United States Patent Application Publication US 2005/0228172 A9 - sequence listing, part 79

SEQ ID NO: 351443 - DNA, 580 bp, Homo sapiens
agaaaaagcataaaactccatactcaaaagtgcccattagtcagctttcaccatgccaagttgtcaagcgatatcacagttatgatctttaaagcattcaaaaaaarctggagaactttgtgtgaagagctggattttatggcttttgtgtgtgccaaagggattgtccaacagaaagtaccctggaaagcctaattattactccacatatagtacgtggcattataagctattttgaggtttttggaaagggagagctatgagtgacaaccacagcagggcgtgctgaggaatttaaacccaactctatcatctccctgttggcagaacataaaacacataatgctgttttagtaatcaatctttcatgtatttattttaaggaaaaataatttcattaaaacttacagagtgggaaaaggagtgatataaaagtcaacacagtacatttatattcaatgagaattattttttaaaacattatggctgctatttacaagggtggcgttcgttttatacttaaaatcacagcagcttttgtaacactttttttaggaaataatgaaaaatctgatttgga

SEQ ID NO: 351444 - DNA, 616 bp, Homo sapiens
atgtatttattttaaggaaaaataatttcattaaaacttacagagtgggaaaaggagtgatataaaagtcaacacagtacatttatattcaatgagaattattttttaaaacattatggctgctatttacaagggtggcgttcgttttatacttaaaatcacagcagcttttgtaacactttttttaggaaataatgaaaaatctgatttggattacgactcaagttgaatatttttaagaactctttaattcttatacatgtcagttgtataaacaaaataatgttgggagaatgaactcagaaacttagaagctatcagtcatttttcagatttgcctctatgctttgttattctattatgtttgaaagggtcttcagacagagatgagaatttaaagacaataaatgaagagcattgttttatgattgtgacttcaatatgcaagtctagtgagaactatctctaagtcagatttgtggatatgtcagtactgtttaaaatgaaattcagctgtctcccctctccatcctggaagcattttatacgtcagcrttgtctactgtttagttgcagaatattttgctcagtggtcattataactttggagggcacg

SEQ ID NO: 351445 - DNA, 604 bp, Homo sapiens
ctgtttaaaatgaaattcagctgtctcccctctccatcctggaagcattttatacgtcagcattgtctactgtttagttgcagaatattttgctcagtggtcattataactttggagggcacgccttaatgcctaacatgtgtaaaagrtatttacctatagtaaccagtaattttacttacattttctcccaagcattgtggaatctcaaaagccttcgactctacgcttcaagtccaaaaaaactaagcagatttgtgataccacttctttttcatggttctagataaaacaagtaagaattttctttctagtaaaataaatggatttgcttctctggttttctactctaagtactaagaaaaagggaggtacaatacttaaagttaaggattattgtaactaggatagaataaatagaaacaattaattttccccgtagatctatatccatgaccaaggataaatgaaaactgtgacattaggatttgagacagtgttttgctattttgtggttatttcagacttactgttttaaagcaaaatcaacttattaccattttgaaaatgagaaaaaccaaatccaagttttgattcagacttt

SEQ ID NO: 351446 - DNA, 604 bp, Homo sapiens
ctgtttaaaatgaaattcagctgtctcccctctccatcctggaagcattttatacgtcagcattgtctactgtttagttgcagaatattttgctcagtggtcattataactttggagggcacgccttaatgcctaacatgtgtaaaaggtatttacstatagtaaccagtaattttacttacattttctcccaagcattgtggaatctcaaaagccttcgactctacgcttcaagtccaaaaaaactaagcagatttgtgataccacttctttttcatggttctagataaaacaagtaagaattttctttctagtaaaataaatggatttgcttctctggttttctactctaagtactaagaaaaagggaggtacaatacttaaagttaaggattattgtaactaggatagaataaatagaaacaattaattttccccgtagatctatatccatgaccaaggataaatgaaaactgtgacattaggatttgagacagtgttttgctattttgtggttatttcagacttactgttttaaagcaaaatcaacttattaccattttgaaaatgagaaaaaccaaatccaagttttgattcagacttt

SEQ ID NO: 351447 - DNA, 604 bp, Homo sapiens
ctgtttaaaatgaaattcagctgtctcccctctccatcctggaagcattttatacgtcagcattgtctactgtttagttgcagaatattttgctcagtggtcattataactttggagggcacgccttaatgcctaacatgtgtaaaaggtatttacctatagtaaccagtaattttacttacattttctcccaagcattgtggaatctcaaaagccttcgactctacgcttcaagtccaaaaaaactaagcagatttgtgataccacttctttttcatggttctagataaaacaagtaagaattttctttctagtaaaataaatggatttgcttctctggttttctactctaagtactaagaaaaagggaggtacaatacttaaagttaaggattattgtaactaggatagaataaatagaaacaattaattttccccgtagatctatatccatgaccaaggataaatgaaaactgtgacattaggatttgagacagtgttttgctattttgtggttatttcagacttactgttttaaagcaaaatcaacttattaccattttgaaaatgagaaaaacmaaatccaagttttgattcagacttt

SEQ ID NO: 351448 - DNA, 601 bp, Homo sapiens
gatgagatggaagtttattctgaggggtgaagtgacttgcccaaaataatacagaagatagctgggtacagtggctcatgcctgtaatcccagcactttgggaggtgggaggatcaccttaggtcaggagttcgagaccagcctggccaacatggcgaaaccctactaaaaatataaagattacccaggcatggtggtgggcgcctgtaagccagctactcaggaggctgaggcatgagaattgcttgaacctgggagggggagattgcagtgagccgtgattgcgccactgcactccagcctgggggatagggtgagactctgtctcccgaaaacaaaacaaacaacaacaataaaaatacagaagataaaaaacatatcttcaaactggaatrcatgtttttaacttcaagtccaatatgtccaatgcactttctaatctctctattaccaaccccatggtagagattggtttatgccaactttctaattttttccaacatcttccaaggaactatcgaataagtcgtgccttgtatatatatcgacattctcttttttgtaagttcaatttttagaattttcttgaataaagacagaa

SEQ ID NO: 351449 - DNA, 601 bp, Homo sapiens
gatgagatggaagtttattctgaggggtgaagtgacttgcccaaaataatacagaagatagctgggtacagtggctcatgcctgtaatcccagcactttgggaggtgggaggatcaccttaggtcaggagttcgagaccagcctggccaacatggcgaaaccctactaaaaatataaagattacccaggcatggtggtgggcgcctgtaagccagctactcaggaggctgaggcatgagaattgcttgaacctgggagggggagattgcagtgagccgtgattgcgccactgcactccagcctgggggatagggtgagactctgtctcccgaaaacaaaacaaacaacaacaataaaaatacagaagataaaaaacatatcttcaaactggaatacatgtttttaacttcaagtccaatatgtccartgcactttctaatctctctattaccaaccccatggtagagattggtttatgccaactttctaattttttccaacatcttccaaggaactatcgaataagtcgtgccttgtatatatatcgacattctcttttttgtaagttcaatttttagaattttcttgaataaagacagaa

SEQ ID NO: 351450 - DNA, 502 bp, Homo sapiens
tgatccgtttaggcacacccaaatccagatgttatcctaattctgggtcttatatattttytctttgcaacattccttgcttggaaatttggtggcaccactccatcagtcaagtggccttaacagaaccctatactgtctctgaaccatattatttgtaaatgtaccacataaaccatatgtcactcagtacggcctcctaagaaagagtatgatagagaattcctcccacacatacaagttatcagtcaaatgttaagttttatgttttgaaggggtactctgtgctacttgcaatacttttagtcccaacttgtattaaagtgagatggtgctgcatttacttacaaaataaacctagttagagattacctttatcttcatcaatagaaacttccaatagtgtggccatctttctttttttattattattatacttgaagttctagggtacatgtgcacaacgtgcaggtttgttacgtatgtatacatgtgccatgtt

SEQ ID NO: 351451 - DNA, 445 bp, Homo sapiens
tggctgggcagcacacgcaaatggcctgtggtagcagggaaaaatgcacagtgaaagaggaagagggaaaagcagtagtgtggagttaaatgtgactggagaagtaggtagataatggagaaaattactatgcagccttgaccrttgtgcaatgtgaatagtttcaccaaaagtcatggctccagaactcttcatctgcatctagatactgtaaaggaaactcttcctacagtgatgggggaaaggaaagttaatatacacccagttcaatttctgtaacacaatcttaaagcaaactggacactgaaaaatttacccacacctttctactcttacatcccccttgaagtagagatcaggaacaaaccagtcttcttgaatggtaaaaataagtggaaatccagaggcagtatttctggtgtcaatataagaatatgatggaata

SEQ ID NO: 351452 - DNA, 538 bp, Homo sapiens
agtcttgggaaatgtgcttaacctctctatgccttaatgttgtcatccataaaatgataatgattcatttttgacatacaacagagttagaaagcatctactatattccacacaatgctcaagtaaaaatcactaaatagaacagaccccaaatccctgcttttgtgggagatgacaagggtaatgcacatcaatggaatttgtgtccttataggctcaaggagctctcttgttccttccaccatctgagaacacagtgagaagtccccaggcttcaacctgaaaaagggccctcatcagaacctgatcatcagaacttggcaccccaatctttgtcttctgatctacattgtgacctaagtcaggtaaatacatctggcatacatctttgacatttttatacaatctctatgcactgyggttttagatgtgcaataatttgtacaatggtttattcccaagaacagattttttgtgtgtgtatacttccttgctttaataaatatatgatataaatttaaataaatttctattttgt

SEQ ID NO: 351453 - DNA, 616 bp, Homo sapiens
tccttccagtgactgttcagttccacttctattaaagtaaaatgtattcctatatggtgtagaaatattatattatggcctattagatgaatattttctactttcattaacatagtaaatataaagatacactgggtgcaggaatgtggacaaatatttcttccttgcccgtgccataatcaggcgcctctgaactctcttctcaactaggtcctgacttttgggcttctgtgtttctgcattgtccaatattagaaacaatcttgataagtcagtttaaccagaaccttccaccctcagtatctgatcacactgtatatctgagcagkttcctcattcccaaccattccccatgtagtgtctgatcaccttggcctgccatcagcaggcattctgctacattggtttaaccagaatcgcctcttacccctgatgcctcctcttggtgtgtttccattcactgaccttcctactgcaacctggctcacaggctataaattcccagttttccttattgtatatggagttgagcccaacctttctcctctatcgcaaacccatctcagtggtccctatggttaatgcaatggtcttgagtaaagtctgccctactatt

SEQ ID NO: 351454 - DNA, 576 bp, Homo sapiens
catctatgaagtaagccttcctttttaatcatgatgggcacgtgcactaagagaaacatggacctgtttttaacccttgatgttgagaacacagagaaaaggtgaagagattatcaactaactggggaaagctatgtaaaaaggactaaggaaacaatattcaggaaggaggaatacaagaggaatagaaacaacttttttctcttcttcaagtacctgaaagtgtgatctttttcagagctctgttgtatagtcttttttttgagacagggtgtcttgctctgtcatccacgctggagtgcagtggtgcaatcacagcttattgcaggctcgacctcctgggctcaagtgattcttccaccacagcttcctgagtagttaggactacaggtgcacaycaccatgtccagctaatttttgtgcgtatatttgtatagagatgatgtttcaacatgttgcccaggctgctcttgaactcctgggctcaagcgattctcctgccttggccttctgaagtgctgggattccaggcctgggccacagcacccagcctgtatagtttttgaaaaagacaac

SEQ ID NO: 351455 - DNA, 468 bp, Homo sapiens
  misc_feature (1)...(468): n = A,T,C or G
cacaaaaatatcaaatatatctaggaaaatgcaacaaagatgatcatgacttcttcacagaaaaatatagcattattgaaataanctaaaagaagaccaaaataaatagagggataaattatacttatacattggaaaactcagtatttttaagatttcgatttttctcaaaccaatctataaaagcaatgttattcaaataaaaatgccaatgagtttgtgtgtgtatgtgaatgtgtgtatatgtgtgatttgaaaagccagttctaacatatatgtggacgtgaaaaagggcaagaatggtcgtgmcactcttaaagtggaacaaggtgtgaaaatttactctgttagatcaaaagtttgtattaaagcctcataataaagacaatgtgatactcttgcaaggatagaccgacatgctgacaaaaccaatggaatagagagtccagaaaactaaatattcttcta

SEQ ID NO: 351456 - DNA, 636 bp, Homo sapiens
tgcagtggtctcagggttgtaacttatatatatcatcatttcccccctccaccctccattctaaatgtccctctacctcagctgttgcctgagtatgtcttagkgaattcctggcattttgacctaaaccctaattcttaaggaggctgagcctctggtaatctcaaactagtattgctgcaagtggacattcatagttacaattagacatgggaacataaaggggtatgcaagtgaatcatctgagttccatacatattcctctccaccctcactatgtgaaagcagacttaactcctcctgctaatcaattaccctggccaagatggtagcccctctcttcacctactggaccctggacacaaggagttcaaagtgcacagggggaagcaatggtttataattcattgggggcagtgttgtatgccttggtaaaatatgccaccttaaaagaaatcaacatatcaaagggatagctgcacttgcttgtttatcgcagtactattcacagtagcaaagacgtggaataaactaaatgcctgtcaacagatgaatggataaagaaaatgtggtacatatacacaatggaatactattcagccataaaaaatgaaatcatgtcacttgcagcaacat

SEQ ID NO: 351457 - DNA, 636 bp, Homo sapiens
tgcagtggtctcagggttgtaacttatatatatcatcatttcccccctccaccctccattctaaatgtccctctacctcagctgttgcctgagtatgtcttagggaattcctggcattttgacctaaaccctaattcttaaggaggctgagcctctggtaatctcaaactagtattgctgcaagtggacatwcatagttacaattagacatgggaacataaaggggtatgcaagtgaatcatctgagttccatacatattcctctccaccctcactatgtgaaagcagacttaactcctcctgctaatcaattaccctggccaagatggtagcccctctcttcacctactggaccctggacacaaggagttcaaagtgcacagggggaagcaatggtttataattcattgggggcagtgttgtatgccttggtaaaatatgccaccttaaaagaaatcaacatatcaaagggatagctgcacttgcttgtttatcgcagtactattcacagtagcaaagacgtggaataaactaaatgcctgtcaacagatgaatggataaagaaaatgtggtacatatacacaatggaatactattcagccataaaaaatgaaatcatgtcacttgcagcaacat

SEQ ID NO: 351458 - DNA, 586 bp, Homo sapiens
ctggtaatctcaaactagtattgctgcaagtggacattcatagttacaattagacatgggaacataaaggggtatgcaagtgaatcatctgagttccatacatattcctctccaccctcactatgtgaaagcagacttaactcctcctgctaatcaattaccctggccaagatggtagcccctctcttcacctactggaccctggacacaaggagttcaaagtgcacagggggaagcaatggtttataattcattgggggcagtgttgtatgccttggtaaaatatgccaccttaaaagaaatcaacatatcaaagggatagctgcacttgcttgtttatcgcagtactattcacagtagcaaagacgtggaataaactaaatgcctgtcaacagatgaatggataaagaaaatgtggtacatatacacaatggaatactattcagccataaaaaatgaaatcatgtcacttgcagcaacatgggtgggccagaaggtcattatcttaagtgaaataacacaygcacaaaaagacaaacatcacatgttcttattcatatgtggaagctaaaaaatttgaccacat

SEQ ID NO: 351459 - DNA, 594 bp, Homo sapiens
gaatggcaatctcaattatccattaagtaaccaggaaaataaacccggctgtcctactgaaagctgtagtttatcaagactccatcctttattacctgctccctgtatgtcacctctacaatggggggctgcaatgaggttccagatttccaggtatcatatccactcaggatatttttcttagactgatatatagacaccgaagtaaatgaccatagttcccttttcagacaataagaaatggaaagcatacaaacagaagcataataactatcccggtataaatggaataataactcatgttacttacattgcttaccttagaaattcatttattcaygcagaaaaaaacactaagagtctaatttggaatagactctgtgatagatacttgaacttatatgaaaacaatggaaaaaagtacagacatgaggcctggaggtcctgaaatttgtccagtttgtcattagagcgtacaagtttaagaaataattttttaaaatactttttggtaatttaaaagaataaaagcatattctatgcataatattggtttatattcccttaatgtgtagcaatttctcacttatgtga

SEQ ID NO: 351460 - DNA, 601 bp, Homo sapiens
actccctgtgattggttctccctctctcttattactgcctatgtgtgttaaataatgtatgtacacctatatatttgtatgtatgttgtataccaataatgcctatgtataatttgcatgtttgttggcttctgacagcctcagaataaaccatgaattcaaaagcatttaattggccatggagtcattataaaacctctggccctgtggtcagaattagcacagctaggctgatttgaacctgacaaactatcatctcatttgatgcaaaaaagaaagaaagctgacaaaatttaacacgctctcctrataaaaacgtgcaacaaaataggaatatgacaaaactacctcaatatataaaaattatatgtaaaaacccacagcaaacatgatgaaagtttgaaaagttttcctttaaaatcagagacaaggaagaatgcctgctttccccacttctattcataggaagtccaacccaaagctactagattcatgcaatacatgaatttaaacacacaatgttgacccaggcagctaaacacaaataataaacattttattattcattctataagttgtttaacaaaagaaaaaaatacat

SEQ ID NO: 351461 - DNA, 601 bp, Homo sapiens
actccctgtgattggttctccctctctcttattactgcctatgtgtgttaaataatgtatgtacacctatatatttgtatgtatgttgtataccaataatgcctatgtataatttgcatgtttgttggcttctgacagcctcagaataaaccatgaattcaaaagcatttaattggccatggagtcattataaaacctctggccctgtggtcagaattagcacagctaggctgatttgaacctgacaaactatcatctcatttgatgcaaaaaagaaagaaagctgacaaaatttaacacgctctcctaataaaaacgtgcaacaaaataggaatatgacaaaactacctcaatatataaaaattatatgtaaaaacccacagcaaacatgatgaaagtttgaaaagttttcctttaaaatcagagacaaggaagaatgcctgctttccccacttctattcatagraagtccaacccaaagctactagattcatgcaatacatgaatttaaacacacaatgttgacccaggcagctaaacacaaataataaacattttattattcattctataagttgtttaacaaaagaaaaaaatacat

SEQ ID NO: 351462 - DNA, 615 bp, Homo sapiens
tctttgctattgtgaatagtgtttcagtgaagatacttgtgaatgtgtctttatcgtagaacgatttatattcctttgagtatatacccagtaagagaattgctgggttgaatggcagttctattttaagtcctttgagaaatctccagactgcattccacagcagctaaactagtttgcattcccaccggcagtgtatacattttccttttcctacaccacctcaccagcatctgttattttttgactttttaataacagccattctgactggtgagacatggtatctcattgtggttttgatttgcatttccctaatgattagtgatagtgaacatgttttcatatgctgttggccatatttatgtcatcttttgagaagtggctgttcatgtcctttacccatttcttaatggagttgttcattttttgttaatctgtttcagttccttaagattctagatattagacttttgtcagatgcatagttttcaaatattttctcacattctgtatgctrttttgctcctttgatagtttgtttggctgtgcatagctctttagtttaattaggtcccacttgtcaattttggttttgtttgcaattgcttttgg

SEQ ID NO: 351463 - DNA, 606 bp, Homo sapiens
tttaaggacagaactctgatctccttgggataagcccctaagggaaggggcagccaaggtatctgggaattagcagtcttagtcttctcttcctgctagctccagagagtcagggcagtccaaaagaggaggattccccccaattcagcatacctgctytgccaaggggcagccagactacttatttaagtgggtctctgatcccattccttctgactggatgagacttcccattaagggtctccaggcatgttatacaggagtattcctgctggcatcaggttggtgccctctgggatgatggagctcccagaggaaggagcagacagccatctttgctgttctgcagcatccagtggtgatacctccaggtgcaggagggacccaggtgaataaagtctggagtggaccaccccagcaaactgcagtggccctacggaagagaagtctgactgctaaaagaaaaacagaaagcaacaacaacaaaatcaatggaaatagtcccacaaatatcccagccaaaggtcaacagcctcaaagattgaaggtagataaacccaagaagatgagaaagaatcaatgcaaaaacactgaaaactcaaaaag

SEQ ID NO: 351464 - DNA, 510 bp, Homo sapiens
gcatgttatacaggagtattcctgctggcatcaggttggtgccctctgggatgatggagctcccagaggaaggagcagwcagccatctttgctgttctgcagcatccagtggtgatacctccaggtgcaggagggacccaggtgaataaagtctggagtggaccaccccagcaaactgcagtggccctacggaagagaagtctgactgctaaaagaaaaacagaaagcaacaacaacaaaatcaatggaaatagtcccacaaatatcccagccaaaggtcaacagcctcaaagattgaaggtagataaacccaagaagatgagaaagaatcaatgcaaaaacactgaaaactcaaaaagccagagtgcctcttctccttcaaatgattataacacctctccagcaaggccacagatctgggctgaggctgagatggatgaattgacagaaggaggcttcaggaggtgagtaatagtggactttgctgagctaaaggagcatgttctaacc

SEQ ID NO: 351465 - DNA, 591 bp, Homo sapiens
gaatcctaactcatcctttaagacgccactcaagtgtcacaagctctgaaaagtcctttaggcaatagctgttcttcatttttgtctccacagtactgttcagaattctatttagcatgtatcagattgcattttacccatctcactacayacctgacttccccctcaagttatgaattcctccaggatagggatgataatcatacacccacaatgtcaggttcattttctggcatggaggagttcagtgtgcccttattctaggactgcaagaacaactgaataaatggagttcttccacagaaataaggagtcttcacattcctgaaaacctcttgttaaaacttgattaagtaagatcagaaaataaatcatggagatgcctttttactttgtttaaagaagatataccatgaaattctgtggaaattcagtgaaaaatgacattcaatttccctcctttcaattgtgggctaaatagtattgccaatactgtctactcttaaaaactgaaaatctgtttttcagactgcaaaatatctcaaattcttgactccttctactgttactaaatcaaattgcattttgttt

SEQ ID NO: 351466 - DNA, 591 bp, Homo sapiens
gaatcctaactcatcctttaagacgccactcaagtgtcacaagctctgaaaagtcctttaggcaatagctgttcttcatttttgtctccacagtactgttcagaattctatttagcatgtatcagattgcattttacccatctcactacatacctgacttccccctcaagttatgaattcctccaggatagggatgataatcatacacccacaatgtcaggttcattttctggcatggaggagttcagtgtgcccttattctaggactgcaagaacaactgartaaatggagttcttccacagaaataaggagtcttcacattcctgaaaacctcttgttaaaacttgattaagtaagatcagaaaataaatcatggagatgcctttttactttgtttaaagaagatataccatgaaattctgtggaaattcagtgaaaaatgacattcaatttccctcctttcaattgtgggctaaatagtattgccaatactgtctactcttaaaaactgaaaatctgtttttcagactgcaaaatatctcaaattcttgactccttctactgttactaaatcaaattgcattttgttt

SEQ ID NO: 351467 - DNA, 472 bp, Homo sapiens
gggtggcaattccttaaagatctaaagacagaaataccatttaacccagcaatcccattactgggatttatgtacccaaaagaatatcaataattctattataaagacacatgcatgcacatattcattgatgcactattcaagagaaccaagacatggaatcaacctaaatacccatcactgatagactggattaasaaaatgtagtacatatacaccatggaacactatgcagccatgaaaaagaatgaggccatgtcctttgcagggacatggatggagctggaggccaattatccttagcaaactaacacaggaatagaaaacctaataccacatgttctcacttatatatgggagctaaataatgagaatgcatggacacagggagggaacaacacacactggggtctaccagaccccagggaggtagggggagagaaaggatcaggaaaaataactaatgggtact

SEQ ID NO: 351468 - DNA, 472 bp, Homo sapiens
gggtggcaattccttaaagatctaaagacagaaataccatttaacccagcaatcccattactgggatttatgtacccaaaagaatatcaataattctattataaagacacatgcatgcacatattcattgatgcactattcaagagaaccaagacatggaatcaacctaaatacccatcactgatagactggattaacaaaatgtagtacatatacaccatggaacactatgcagccatgaaaaagaatgaggccatgtcctttgcagggacatggatggagctggaggccaattatccttagcaaactaacacaggaatagaaaacctaataccacatgttctcacttatatatgggagctaaataatgagaatgcatggacacagggagggaacaacacacmctggggtctaccagaccccagggaggtagggggagagaaaggatcaggaaaaataactaatgggtact

SEQ ID NO: 351469 - DNA, 594 bp, Homo sapiens
gtcaaaagagaaagagaaatagcacttaaagggcgtctttataaattgtcacaatgttgataattttttttatgattcactatgaagaagaaaaaagatgacatccattcaagtactgacaaattctaactaactatgaaagactaaagagaaggattgaattacaagaataaattattttttaaagttggaagtagcgacataagtaatgaacatagtaaattaaagtggcagggtaaacagtgaagaccaatgaacaaccggttggaaagtatcatatagagaacagagcwaaggacaaagaggatgcagatgtagaaataagaactccattcatctggggaaagattaaaagtgtccacttctctatggcacacccagtttggcttcatcatttctttaagaccttttttttttttttcatcattgccaacagaatactaacatttttctctttactccttttcctccaggtcctcatagataatttattgagcaatctgataactaaatttgagttatgaaactaatgcttaagagtattttctatttcatttcttccagatatgttggtaagacccgttcatatttgtt

SEQ ID NO: 351470 - DNA, 594 bp, Homo sapiens
gtcaaaagagaaagagaaatagcacttaaagggcgtctttataaattgtcacaatgttgataattttttttatgattcactatgaagaagaaaaaagatgacatccattcaagtactgacaaattctaactaactatgaaagactaaagagaaggattgaattacaagaataaattattttttaaagttggaagtagcgacataagtaatgaacatagtaaattaaagtggcagggtaaacagtgaagaccaatgaacaaccggttggaaagtatcatatagagaacagagctaaggacaaagaggatgcagatgtagaaataagaactccattcatctggggaaagattaaaagtgtccacttctctatggcacacscagtttggcttcatcatttctttaagaccttttttttttttttcatcattgccaacagaatactaacatttttctctttactccttttcctccaggtcctcatagataatttattgagcaatctgataactaaatttgagttatgaaactaatgcttaagagtattttctatttcatttcttccagatatgttggtaagacccgttcatatttgtt

SEQ ID NO: 351471 - DNA, 496 bp, Homo sapiens
cacaagctcaaattaagaagatgtcaataaaatgtttatttattcaataaattccccttaaatatttatatgagatgtccttctgacttgtattgtacattaagattttttggcaattgttttgggacaagccaaggagaaatggaatagtactaggggtttaacaaaackgctgtctttgcatttcatctacaaacagagtctatataacattcatccctggcaaagaagttaatattccctagaagagaaaaatatttaagtctttaattaatcttaagtagatttttgtatatggcataaggaagggatctagtttcagtcttctgcatatggctagccagttatccaagcaccatttattgaatagggagtcctttccccattgtttgtttttatcacctttgttgaagataagataattacaggtgtgcagccttattcctgggatcaaaacccaaactataaaaaccctggaagaaaacttacgcaatac

SEQ ID NO: 351472 - DNA, 376 bp, Homo sapiens
gcccccatgacatgagtttacctaaataacaaacctgcacataaacccctgaattttaaatacgttttaaagaaggcgagataaatagatctgggtgtgtgtgtataatctggaggaatgaaaaggatatgtactgtctttttgaggaggtggtgtaaccacgtggttgactactggtttttgatttacagacckggtatcaggccaacactttcccactgaggagcactgtgactttgagaaagttacttaagctctttgagtcttgtttctcaaatatcaaatatgggcaatagcaaccttctcaaattgtcattataaataattattaagataatacatgaaaaatgcccaccatagtactatgtcttacctt

SEQ ID NO: 351473 - DNA, 647 bp, Homo sapiens
ttgagtcttgtttctcaaatatcaaatatgggcaatagcaaccttctcaaattgtcattataaataattattaagataatacatgaaaaatgcccaccatagtactatgtcttacctttagcagaagccacaaaacaaaaaactgatttcaggagttactgagggaggggaggaaatagycatacacacacttgcctctatttctactttggcaaaaagtggcatatggttataaagaccaaacatttctatgacaggattcattccttcaacagaaaacagtttaggtgaggtttggactctatataaaggaggggtcagattgcattttatttagaaactaataaaggatttgaagcagtcaaggggcatgctatgtttataataattattttggcttctatgtgtagaaatatttgaaggacggcaagactggaaagaggaaggtaagttaggaaactactacaattgctgaggcaaatgatgaaggcagtcagcaggaagagacacggatagaccggaacatgttctggatgtagagatgacagaagttaccggtgatacaatattgggagaagaaacgtgtgcatgttccaggacaattcctgaatttttagcttgatccactggaacagataatgatgcta

SEQ ID NO: 351474 - DNA, 647 bp, Homo sapiens
ttgagtcttgtttctcaaatatcaaatatgggcaatagcaaccttctcaaattgtcattataaataattattaagataatacatgaaaaatgcccaccatagtactatgtcttacctttagcagaagccacaaaacaaaaaactgatttcaggagttactgagggaggggaggaaatagtcatacacacacttgcctctatttctactttggcaaaaagtggcatatggttataaagaccaaacatttctatgacaggattcattccttcaacagaaaacagtttaggtgaggtttggactctatataaaggaggggtcagattgcattttatttagaaactaataaaggatttgaagcagtcaaggggcatgctatgtttataataattattttggcttctatgtgtagaaatatttgaaggacggcaagactggaaagaggaaggtaagttaggaaactactacaattgctgaggcaaatgatgaaggcagtcagcaggaagagacacggatagaccggaacatgttctggatgtagaratgacagaagttaccggtgatacaatattgggagaagaaacgtgtgcatgttccaggacaattcctgaatttttagcttgatccactggaacagataatgatgcta

SEQ ID NO: 351475 - DNA, 576 bp, Homo sapiens
gtgatattctgttgtggtttaatttgcattttcctgatgattagagatgttgagcattttttcatatatctagtcaccttttatatttcttcatttaagcaatgtctcttgaggtttgccttaattcatttgtgctgacataataaaatactacagacttgatcatttgtaaataacagtaatttgtttttcacagttctggagctatgtaagtccaagatcaaggcatcaacaagttccatggctggcgagggctgccctctgcttccaagatggygcatcattgctgtgtcctcacatagtggaaggtgaaaaggcaaaagggctgaatgctgaataagcctctttttaagggccttagtcccattcagaagagagaaggcctcatgactaatcaccttctacaggccacaccacttaatactatcacactggtagttgtttcagcatatgagttttgggggacagccagaccatagcaaagttctttgcccatgttttaattaattgggttgttttcctgttattgaattgtttaagtttcatatattttggatatttgtcccttatcagcta

SEQ ID NO: 351476 - DNA, 588 bp, Homo sapiens
tgatattctgttgtggtttaatttgcattttcctgatgattagagatgttgagcattttttcatatatctagtcaccttttatatttcttcatttaagcaatgtctcttgaggtttgccttaattcatttgtgctgacataataaaatactacagacttgatcatttgtaaataacagtaatttgtttttcacagttctggagctatgtaagtccaagatcaaggcatcaacaagttccatggctggcgagggctgccctctgcttccaagatggtgcatcattgctgtgtcctcacatagtggaaggtgaaaaggcaaaagggctgaatgctgaataagcctctttttaagggccttagtcccattcagaagagagaaggcctcatgactaatcaccttctacaggccacaccacttaatactatcacactggtagttgtttcagcatatgagttytgggggacagccagaccatagcaaagttctttgcccatgttttaattaattgggttgttttcctgttattgaattgtttaagtttcatatattttggatatttgtcccttatcagctatatggtttgcaag

SEQ ID NO: 351477 - DNA, 626 bp, Homo sapiens
ttttttagtttgatgaaatttcatttgtctatttttgcttttgttgactgtgcttttggggtaatatcaaagaaatcattgcctagaacaatgttgtggagcttttcccctacgtttttcttctagtagttttacaattctaggtcttaaatttctttctttaatccatcttgagtttatttttgtctttagtgtgaaataaaaatccaatgttattattctgcatttggatattctacttgtaaagaatacagttatttttattgtctggagtcctgacaagaaacagaactcacttcagattgttcaactgaaaaacaaaacaaaacattaatgtattgtactttctgaggtataggaatagcaaaaggagtaaatcagggatggtggagcatgctgagactagcaacagctgaaagtaatttcctctcacaggaccaaagaggcatgaggaagaaatggtgttaccagcattcactgaggattagaattgcaaaaatgttgctttctagtgggaaaaaggaaaaaaagttattaccaaggacaaggtaatgtacaacttcctctcctcccaccttcctatctcagtrcactaggaccactgtctggttagaagcagaagccag

SEQ ID NO: 351478 - DNA, 379 bp, Homo sapiens
aggagaatgaaaagaaaagccataggctgggaaaaaaatacttgcacatcaaagacgtgtatccagactatagaaaragctttcaaaattcaattattaggaagcaaacagcacaatttgaaacaaaacaaagcggaccaaagatttaaatgaatgtttctccaaagaagatgtatagtaagcaaataaacagaagaggaaaataataatgatgataataatttaaaaatcaacaaatttagaaaataagagctataagttaattcttgccgagttaggatcatctaactttgcaatctaaatttagacttcgctctaacctttggtccagaattcatcaaactgtgggcttctgtcaaattaaatataactattaata

SEQ ID NO: 351479 - DNA, 635 bp, Homo sapiens
cttaacagttctactttttaatttttatagagatatcttggaattttcttctaagacaatcgtgtcatctgcagatagggacaattttatttcttacattccaatctgtataactttcatttctttttcttccctcactggagtgaccagaacttgtagtactatgttaaatataggaggtaagagtagacatctttaatatgttcctaatcttaggggcaaagctttcagtatttcactattacatatactgttagctataaacttttttttttttttacattttgctatcatgttcaagcaaatattctgtaattataactttctgagagtttttgtaattaatgggtgttggagtttttcaaatgcttctacttcaattaattaattaattatatatatatatgtttsttttcggcattttgatgtagtcaattacattgatttttgaattttgaaccagattttcattacttgaaataaatctcatttattcactgtgtataattgtttttatacatttttggattcaatttgctaaggatttttgcatatatactcatgagggatattgatctgtaatttttctttgttattttggtgtcagagaaattctgacctcataatataaatta

SEQ ID NO: 351480 - DNA, 527 bp, Homo sapiens
gccttctccatgggatgacacaggaagaagaccatcaccagaggtaagccctcgatcttgaacttcctagcctccaaaaatgtatgaaatatgtttcctgtaaattacccagtctcagttattctgttataacagcacaaaatagactaaaacagagtacttgctcaccagggctagcacttatgagtagaaatgctaaagttttctgtttattttttttctttttaaacttgggggacttctcttgaaagaygggatttaatgccctgacaaagaccatagagcatgggaaagattggatgctagagtaggcctcagaaacctggagaaagacttggtgagttgaaatgtctgaactactagagaaggtagcagaggcataaaaggagtaaaagaaggaggagtaaaaggctcaggagggtgagtatacaatttgtgatgccaggaaacccagcagaggaatatactccatgaaagcccagtggatgcatagtccacaaaaggtataaggaaagtgctggtgagac

SEQ ID NO: 351481 - DNA, 559 bp, Homo sapiens
gtttcatatctagagagttttattcttttctatgccatcagcaaaaaatatttttttaaagttttcattcacatggaaycttcaactataaatttacatttttgtctcttagctatgttaagtctcctgccgtctgtcatactccaaagagatcaaaactatgaggacatccctcagaacatagccttgctccattgcactcaaactgatccaggaagaaataggtagtaagctcaaagccttggtagacatgggctcagagtgagataaaacctttgaaaaataagagacctgccatttctgttaagattttaggtatcccatgtcccccagtaaatagggtcatcccctttaaaaagtaaaagataaattgatttagcttgcatccctaccacaaagtaagaagcacaaaactttgtagctcttcaagctctgtatgcaagctattccatacctaagaatagtctttggcccatatgctgtgtaacacaaaaggctatcagttttgaacagaatgtgagcagataaaggctgtttagcagatccaggttacattgca

SEQ ID NO: 351482 - DNA, 562 bp, Homo sapiens
tggggattacaattcgagatgacatttgggtggggatgcagagccaaaccatataattccacccttggcccctgtcaaatctcatgtcttttcacatttcaaaaccaatcattccttcccaacagtagcgtaaagacttaactcatttcatcattaactcaaaartccacagtccaaagtctcatctgaggcaaaggcaagtcctttctgactatgatcctgtaaaatcaaaagctagttaattactttctagatataatgggagtataggaattgcataaatgctcccattccaaatgagataaattggacaaaataaaggggctaccagccccatgcaggtctgaaatccagcagggcagtcattaaatcttaaagctctgaaatgatctcctttgactccatgtctcacatccagatcacactgatgcaagaggtaggctcccagggccttgggcaattccacccctgtggctttgcagggtacagccccactcccagctgctttcatgggtggcgttgattgttgtttttccaggtgcctagtgcaagctgtcagtgg

SEQ ID NO: 351483 - DNA, 566 bp, Homo sapiens
attgcataaatgctcccattccaaatgagataaattggacaaaataraggggctaccagccccatgcaggtctgaaatccagcagggcagtcattaaatcttaaagctctgaaatgatctcctttgactccatgtctcacatccagatcacactgatgcaagaggtaggctcccagggccttgggcaattccacccctgtggctttgcagggtacagccccactcccagctgctttcatgggtggcgttgattgttgtttttccaggtgcctagtgcaagctgtcagtggatcgacaattctggggcctggaggatggtggcctcttctcacagcttcactaggcagtgcaccagtggggactctgtgtggggctccaaccccacatttcttttctgcactgccctagcagaggttctccatgagggcccaaccccctacagcagacttctgcatgggcatccaggcatttccatacctcctttgaaatctaagaggaggttcccaaacctcaattctcaaattctgagcacctgcaggcactacactaaatggaagctgccaagg

SEQ ID NO: 351484 - DNA, 562 bp, Homo sapiens
tggggattacaattcgagatgacatttgggtggggatgcagagccaaaccatataattccacccttggcccctgtcaaatctcatgtcttttcacatttcaaaaccaatcattccttcccaacagtagcgtaaagacttaactcatttcatcattaactcaaaaatccacagtccaaagtctcatctgaggcaaaggcaagtcctttctgactatgatcctgtaaaatcaaaagctagttaattactttctagatataatgggagtataggaattgcataaatgctcccattccaaatgagataaattggacaaaataaaggggctaccagccccatgcaggtctgaaatccagcagggcagtcattaaatcttaaagctctgaaatgatctcctttgactccatgtctcacatccagatcacactgatgcaagaggtaggctcccagggccttgggcarttccacccctgtggctttgcagggtacagccccactcccagctgctttcatgggtggcgttgattgttgtttttccaggtgcctagtgcaagctgtcagtgg

SEQ ID NO: 351485 - DNA, 594 bp, Homo sapiens
tgatcaagcagaaacttttgcttaatgttctcaatgcacttgggagtttgaagctcaaaatccatcccagctgcttgaagttcagctctcacaaatttcccatggtcactgctcctgaggaattctttttggttcccgtttcccttcctccttgtgtttgtacagggtcttgtgacaacagttctgtcatacacatactaaggtgaccaacctagttctcatttgccagaaactttcctggtcttaaaactggatatctggtgttcccagtaaccccttaaggcaggggcaaaccaggacaattgttaccctaacccagttcatctccaattccatattccctgttactcaatacaccttcagtagtagaatctgctgtggtataagaaagaaaagaaawggaagactaaatgaggacatgataatgaaagataataaagaagattttgaaagttaagaggaaggaatggaggcaaaattccaccctgctaatgatcagcatctcctccttcacagctgattcttctcaatcccttcttccagttgtcatctcccctcacacccacatttgttctgagcagtttcttttcccca

SEQ ID NO: 351486 - DNA, 563 bp, Homo sapiens
ctgagcctcagttttcctcatctatgaaatggaaatcatcccccaatctctctcaaagattgccctgaggcctcagtgagctaaagtctgaggaggctgggcccacggcttggcacattggcacatgtggccatgacctctaagcagagtccccttagctggattaaatctgaccctaggcaggtgtggaggcagcattgggtgggatggaacattgagttagcactggrgaggggccctggcacatccaggctcttcctgggctcccaagggcaaggaggagagccctgactgtaaacctgggaacatgaggttcagatgcagctcccgctggaactgtgagagccatggagtggaggcacaaagggagctgagaccctgcacccctgggttcacagctcaggggaaggtcaaatacattgccctaaacagaaacctatcataccttatgctcagcgtcgcaggagggcagagagaatatcaggcagagggtcagaataggagtaggagccacactgcccggggtctacatcccagacccgacactcagctttcacccccgt

SEQ ID NO: 351487 - DNA, 564 bp, Homo sapiens
ctatgagtttgggttgagcatgcaaatacagtctacctcaatttccctgacaaaatcatgctgatagaaagccgaataattactcaggatttgataaggattaaataaagctttacaaagagaatatacctttgcttttctttaacttaacttccctgtctgaagcagtaactgaatatacaaaatataaaaacttttttacaggtcatctctacttgaaactccccaaggtcacagacagaaaggaccatgacagattctattaattcaatttaggagatgggggaaatgaggcatgggagagtttagttatctgttctcatttttctactttacayagttttataagatgcaaataccaaataatgcacctgcacttaaaagattctgctctgcagaaccccatttgaggtgatattaaatgggccaaatatgtttggaaaactccagtttaagtataattaaactctaatgtgggggtcctgaaatgatatgctagattgaattgctgtttatctttcttagctagaggagttggcaaagcatcacagagaggcaagaaca

SEQ ID NO: 351488 - DNA, 599 bp, Homo sapiens
tctgtttctcaaaagtcatcttgcttcacatagacactgtgtattctgtgcccacttatgcattacattctagccacgyttgtcttcttccacttcctcaaacagatcatgtctttccttacaccggggtcaacatccttgatgctgtcactacccgggaagttccctccactttacttcataatgctggccttttttcatcttctatttttctgattaagtatcaccttctatgagcacttttcaaaataattctctttattttttttcaccatccaacttatcttatttcctatttagatttattacaacttacaattataagttatttatctgaaattttttccagctgctagaattcaaactctatttatattctggcaaggtacaggccaactgtacagatacatgtatagactagctgacctgcagaaacttgagggagattagcaaagaaaagatgtccctaaggtatttcaactaaatctcaaagatgcatagaaagtaaatacttagtactatgtcccctgaatgtgtgagtaggactgttacacagcataccggattcatataatagcaaagacatatttcaagaagga

SEQ ID NO: 351489 - DNA, 599 bp, Homo sapiens
tctgtttctcaaaagtcatcttgcttcacatagacactgtgtattctgtgcccacttatgcattacattctagccacgtttgtcttcttccacttcctcaaacagatcatgtctttccttacaccggggtcaacatccttgatgctgtcactaccygggaagttccctccactttacttcataatgctggccttttttcatcttctatttttctgattaagtatcaccttctatgagcacttttcaaaataattctctttattttttttcaccatccaacttatcttatttcctatttagatttattacaacttacaattataagttatttatctgaaattttttccagctgctagaattcaaactctatttatattctggcaaggtacaggccaactgtacagatacatgtatagactagctgacctgcagaaacttgagggagattagcaaagaaaagatgtccctaaggtatttcaactaaatctcaaagatgcatagaaagtaaatacttagtactatgtcccctgaatgtgtgagtaggactgttacacagcataccggattcatataatagcaaagacatatttcaagaagga

SEQ ID NO: 351490 - DNA, 599 bp, Homo sapiens
tctgtttctcaaaagtcatcttgcttcacatagacactgtgtattctgtgcccacttatgcattacattctagccacgtttgtcttcttccacttcctcaaacagatcatgtctttccttacaccggggtcaacatccttgatgctgtcactacccgggaagttccctccactttacttcataatgctggccttttttcwtcttctatttttctgattaagtatcaccttctatgagcacttttcaaaataattctctttattttttttcaccatccaacttatcttatttcctatttagatttattacaacttacaattataagttatttatctgaaattttttccagctgctagaattcaaactctatttatattctggcaaggtacaggccaactgtacagatacatgtatagactagctgacctgcagaaacttgagggagattagcaaagaaaagatgtccctaaggtatttcaactaaatctcaaagatgcatagaaagtaaatacttagtactatgtcccctgaatgtgtgagtaggactgttacacagcataccggattcatataatagcaaagacatatttcaagaagga

SEQ ID NO: 351491 - DNA, 567 bp, Homo sapiens
tctcagtgaatcactttgcttcctgatacatcctaaaatgaatcatggaacaaaggaggaaaaatatattctgaaccaatgggctttgaacataggttgttactaaagcaattatggagcgttacctgggaagacmtatgtgaacaattacttcaaacacacatagcacttaagtaaggtaaataaaacaaaaatggagagcgtggcctggcagggggatgattaaaggtcaagtgtttttaagatttttagaataggcaaaaataaatttttttcttttacaactttttttttttatgtaacagtcttccaattaaattattgttcatactatattcagatagtttgcttggcatattgtgattggcacttttggcaggggattgaagattacatctgaagcaatactagatgatatataatggagatggaatcctaagataatgcagtttaattaatggatttttcatatattgtatacacactttttaaagacagaaaataaaactgtagctattaatgccagccagattgaagttacttcaagatagaaatcaaatttgtgtg

SEQ ID NO: 351492 - DNA, 567 bp, Homo sapiens
tctcagtgaatcactttgcttcctgatacatcctaaaatgaatcatggaacaaaggaggaaaaatatattctgaaccaatgggctttgaacataggttgttactaaagcaattatggagcgttacctgggaagacatatgtgaacaattacttcaaacacacatagcacttaagtaaggtaaataaaacaaaaatggagagcktggcctggcagggggatgattaaaggtcaagtgtttttaagatttttagaataggcaaaaataaatttttttcttttacaactttttttttttatgtaacagtcttccaattaaattattgttcatactatattcagatagtttgcttggcatattgtgattggcacttttggcaggggattgaagattacatctgaagcaatactagatgatatataatggagatggaatcctaagataatgcagtttaattaatggatttttcatatattgtatacacactttttaaagacagaaaataaaactgtagctattaatgccagccagattgaagttacttcaagatagaaatcaaatttgtgtg

SEQ ID NO: 351493 - DNA, 579 bp, Homo sapiens
ggtggtgcacacctgtaatcccagctatttgtgaggctgaggcaggagaattgcctgaagcccgggaggcagaggttgcagtgagctgagattgcgccattgcactccagcctacctgggcaataacagtgaaaccccatctcaaaaaaaaaaaaaaaaatggttcaaaggactttactagagaagctttaattctctgaccccatcaacacacataaacacccacttacatgtacaaacatacactagatccacttgatattgaatgatcaacatcttgatacttcatccttaaatacttcagtatttatgtcgtaaaacagggaattacccccaaacaaggtagacactygtctacctacttgtctacgtagttttgatttcagctgctgcaatggtagatagttcttatttacactgaaagattactatattttatgtaccttgccatatatatgaacatttcttctccatcagaacttaccttagcaaatgtacttggaaatataggtaaaataacacccacaggaagctactttcagtggataaatatcccagtcctttgtctttcagttaatg

SEQ ID NO: 351494 - DNA, 573 bp, Homo sapiens
ggcttttgactttttgatttattatctgyatcttatcccctcatgtcttcactcttgcttcctcatcaaagactcaggcttcatctatctggttatcactaaatggactttcacactagggaatccattagatcaatcagtgtttcttttttttcttctcatcttccttggagtcagtgaaaattataccttatattagtataccttaagaatacctctatttgcaacatgttgcatacctataatcttttcaagtactgtgcaatattcccaggatacaggatacagaaataatcaagacttagttcattaaagtcagataatctattggtctccacttgttttagagacaactctctgagctatgtaagacttggattttcatcactgcgtagactgataaaaaggttaagcaactggttcaagatcatgtgtccaataaatcgctgctcaggacagccagagaccagatcctagagcccaccacccaaacctatctccagacaacaagaagtcaaggaacatatttctatcacataatgattatcagcatagattgactagttgtatcat

SEQ ID NO: 351495 - DNA, 557 bp, Homo sapiens
ctcctgaaaggtctagtttggattatcctaagggcactagagacaaatctaaagggtttaataaggttggcaaatggttgtatattttctttatttagataggaaaatatcctggaacatgagtggtagttaaaccaagataatatgtgccatttctcaagaattttttttaatgctgttactgtagttacttagaggattcgaagataggcttcagagttatwaaaaactaccagcgtttatatgctgtataagcactagtataaagaagaatatatgtacatatcctttattaaattctcaaacatttcattgattgaaacattgaaaaatcactagattaaattaagaacagtggttgaccagaaaagtacccttaagaacctttaagaaaagaacctttaagaaaatctttaagttcagagaaataacagagagaatcatggaagccaagtgcatgaaagaagaaaaagattccaaaattaagtcctttacataaaacagttaaattccctcatggtacaagccagcctttctgtgctaatggggccgttctg

SEQ ID NO: 351496 - DNA, 635 bp, Homo sapiens
ctggtaaactacctttcacaattcaattagataggtattgtaccagctccatttcttaatgtgttcgtttatctcaaatgcaacagtgtggtaggattgtatgtgcctggagaccctgagcatagaaacaggggagaagagaaatgcattaataagtacaaggcttaaactaaatataaagaatttcaatatcacgaacatataatagctttaatcatgcttgttctcaaacattatttatggcagyggtttatgtgattttacttaattaaaaattaggtaaactgatttttaaaaatgtatatataaagaaagcaagctattatttctttgaaaactgagcttttgctttggcaagtcttgataaaagtaagtctctaagaagtatttccattgcataaagtatggacaatacaaatgtaaaagactacacaaattataaaaattcagatgtctgtactgaaatttttttctctagtgactaaattctccattcatttaaaaatatattaaattcaaaattattgatggggcagtttatacacaaaaagcaatagcaataaaattatgcttgatgggcacacaggtaaagaaaactttaactatataaatatacacatatatacatatgtcta

SEQ ID NO: 351497 - DNA, 529 bp, Homo sapiens
atagaaaggcttaaatattttagccagtcctttgtaactttttccttgcttgtcaaaagcaataatattgccatcattgagaaatggtttcaatgatggcgacacttcacagataagaacaagcttattaatcttgggaaactcacaaatgattattgagtctcctagattgctaaaaacaaagaagaattaattttttgtcctgaagatttaaggtaattgtccacagcttaataatcatcaggaagaggataaactcaatcacaggaaatacaacgtagtagtgaaatttgttcaattacagaggaaagttccawcggaaatggtggaaatcctggcacttggaataagcaaaaccaaacaggacaaagtactaaactacaattagtaaggttctaatacagctctaaaaaggaatgcttcctatattgatgataattagttgatgatagattactgagctgaaaacttgacatttgattgctacttttaagtgttaggcaaattaagaggtatggaaaattggaca

SEQ ID NO: 351498 - DNA, 529 bp, Homo sapiens
atagaaaggcttaaatattttagccagtcctttgtaactttttccttgcttgtcaaaagcaataatattgccatcattgagaaatggtttcaatgatggcgacacttcacagataagaacaagcttattaatcttgggaaactcacaaatgattattgagtctcctagattgctaaaaacaaagaagaattaattttttgtcctgaagatttaaggtaattgtccacagcttaataatcatcaggaagaggataaactcaatcacaggaaatacaacgtagtagtgaaatttgttcaattacagaggaaagttccatcggaaatggtggaaatcctggcacttggaataagcaaaaccaaacaggacaaagtactaaactacaattagtaagsttctaatacagctctaaaaaggaatgcttcctatattgatgataattagttgatgatagattactgagctgaaaacttgacatttgattgctacttttaagtgttaggcaaattaagaggtatggaaaattggaca

SEQ ID NO: 351499 - DNA, 348 bp, Homo sapiens
gaatcttgcaaacacaaagataggcgcagagtgattatgaaacttaacatcatcttgttgatgattttgattgttgataaatttgaaattgttcataccttgcctgcaatagaatgcctagaayatcttgttagttcaataatgtaaagtggaggtttaaacgttgaagagaaggaactgccagggtctaagggatggcatcttcctttaaatcctctttgatgaacagaaaataaaaatggcgaatataggaaccttctgtttctccagcgcactaagtatggtcagcatgattacttcaaccttcatttatcatctccaattgccttttactttacaaagcttaca

SEQ ID NO: 351500 - DNA, 348 bp, Homo sapiens
gaatcttgcaaacacaaagataggcgcagagtgattatgaaacttaacatcatcttgttgatgattttgattgttgataaatttgaaattgttcataccttgcctgcaatagaatgcctagaatatcttgttagttcaataatgtaaagtggaggtttaaaygttgaagagaaggaactgccagggtctaagggatggcatcttcctttaaatcctctttgatgaacagaaaataaaaatggcgaatataggaaccttctgtttctccagcgcactaagtatggtcagcatgattacttcaaccttcatttatcatctccaattgccttttactttacaaagcttaca

SEQ ID NO: 351501 - DNA, 348 bp, Homo sapiens
gaatcttgcaaacacaaagataggcgcagagtgattatgaaacttaacatcatcttgttgatgattttgattgttgataaatttgaaattgttcataccttgcctgcaatagaatgcctagaatatcttgttagttcaataatgtaaagtggaggtttaaacgtygaagagaaggaactgccagggtctaagggatggcatcttcctttaaatcctctttgatgaacagaaaataaaaatggcgaatataggaaccttctgtttctccagcgcactaagtatggtcagcatgattacttcaaccttcatttatcatctccaattgccttttactttacaaagcttaca

SEQ ID NO: 351502 - DNA, 348 bp, Homo sapiens
gaatcttgcaaacacaaagataggcgcagagtgattatgaaacttaacatcatcttgttgatgattttgattgttgataaatttgaaattgttcataccttgcctgcaatagaatgcctagaatatcttgttagttcaataatgtaaagtggaggtttaaacgttgaagagaaggaactgccagggtctaagggatggcatcttcctttaaatcctctttgatgaacagaaaataaaaatggcgaatataggaaccttctgtttctccagsgcactaagtatggtcagcatgattacttcaaccttcatttatcatctccaattgccttttactttacaaagcttaca

SEQ ID NO: 351503 - DNA, 602 bp, Homo sapiens
actcatcagtgaaaaactaatcaaccttattactttgaagggaaatctgggaagaaagagaatagaatgaggtacatgttagaaatggaaatggcgaagtaagtaatttttctgattttcataattctgtttcactagttaaatctattttccacttttcttyccttcctttatctggctcggttctcactttagaaggcaaaattttgattatttgcaagagtgctcccaactcaagtctcttagtcaacatttccttccctcaggcttcagtctatgatatttcatgtaataatttgtaaaatatagttctcattgcgggactcctcacttctattttaagatatttttcttaaattattttatttctattgctgcatgcattcattgatttgagataaaattttataagtttgtggaaatcattgaataggaacttctcagtcagcgctgaaagaaattttatgaatgaataatacaattccctcctcctaatgaaagtattgtacatctcacatttagtttatattgattgctttctgacatggaaataaaacaatctttatattatgcagagttcctgttagtggtactatcaagaa

SEQ ID NO: 351504 - DNA, 602 bp, Homo sapiens
actcatcagtgaaaaactaatcaaccttattactttgaagggaaatctgggaagaaagagaatagaatgaggtacatgttagaaatggaaatggcgaagtaagtaatttttctgattttcataattctgtttcactagttaaatctattttccacttttcttcccttcctttatytggctcggttctcactttagaaggcaaaattttgattatttgcaagagtgctcccaactcaagtctcttagtcaacatttccttccctcaggcttcagtctatgatatttcatgtaataatttgtaaaatatagttctcattgcgggactcctcacttctattttaagatatttttcttaaattattttatttctattgctgcatgcattcattgatttgagataaaattttataagtttgtggaaatcattgaataggaacttctcagtcagcgctgaaagaaattttatgaatgaataatacaattccctcctcctaatgaaagtattgtacatctcacatttagtttatattgattgctttctgacatggaaataaaacaatctttatattatgcagagttcctgttagtggtactatcaagaa

SEQ ID NO: 351505 - DNA, 452 bp, Homo sapiens
caggaggttgggttgaatgcagcagcaattagaacccaagaaccagcacgagggttacacacaacttggcaggcactataaattctagaatccagttctgtaggttcaaatgataaaaaactttcagaccaggcctctatcagtgatgaaaagttaaaagaaaaaaaaactggttctgttttctcctagatagagcataacaagaattgtaaagccctggtgaaactggctagtgtttaatgctstgctataatacctatgaggaatctcagggtgattggattactattgcagaggttaaggagagaaacagctgaaaatgtacccggcagagaaacagttgtgcacaggctagaatttgtcatattatcctaaagagctgaacatggtgattgcagtgtactccaagaacccaagacattatcccaattctacaattaacttacctaaga

SEQ ID NO: 351506 - DNA, 447 bp, Homo sapiens
tagcacagatctgtctaaaactctaatccaaatgcaccatttggtcatttcacatgtaggtttatttcarattctatgtatgtatgtgttctgctggggtgtgcgccacatgttcatgggctggttggggagggcagtggaagtaaaaccttttttttaatttgaagattgatatttaagagtctacagaaagcatggtatgtgtttttcaatgaaaataacactttccttggaaatactacagatctactttattgaagatacattttatttgcatttgggaataagaaaaattatatcatccactttgactcattgctttgggtgttctgctcacctatggtgcaaaaaccaaatgatccctaaagaccatttactccccaaaagtaagaatcatgcctttttgtgcctacaactgtattcccaacatgtagcagggctcttaaa

SEQ ID NO: 351507 - DNA, 447 bp, Homo sapiens
tagcacagatctgtctaaaactctaatccaaatgcaccatttggtcatttcacatgtaggtttatttcaaattctatgtatgtatgtgttctgctggggtgtgcgccacatgttcatgggctggttggggagggcagtggaagtaaaaccttttttttaatttgaagattgatatttaagagtctacagaaagcatggtatgtgtttttcaatgaaaataacactttccttggaaatactacagatctrctttattgaagatacattttatttgcatttgggaataagaaaaattatatcatccactttgactcattgctttgggtgttctgctcacctatggtgcaaaaaccaaatgatccctaaagaccatttactccccaaaagtaagaatcatgcctttttgtgcctacaactgtattcccaacatgtagcagggctcttaaa

SEQ ID NO: 351508 - DNA, 330 bp, Homo sapiens
tctcccttcctatcccttcctcttttctccttttcctttcccagtaatccagcagttgcctactgagtgctagaygttgtgacaggctttggaaatactgaaaccaataaagcagtttgatgcctccatgaggtcaccatctattggtatagaggagggacaaaagtaacatttgtttcgtgcaagacataaagccaaaagcagaaataaaatcaacaactaaaatactgtactaaatacaaaatcaggccaggagcagtggctcatgcctgtaaccccagcactttgggaggccgaggcaggcggatcacgacgacaggagtttaagac

SEQ ID NO: 351509 - DNA, 594 bp, Homo sapiens
tccactatccagggagggtagtttatgccctttgggtgcttttgggtgcgtatcaraggaacccactgggaacattcgactgtacttcctatgtgttgggtaatagagtttcctctcattgtgtgtcatcctcagctcacctttttagggatctattccacacaactttctcccttatgatgtccagtatccttccaggtgttctgttagagagcttcttttcatgcttgggaacacaaatatggctcacaggctatattcatctatttttgcactgacgaattctgggaatttaagcagattatcaacattgtaggaagctcttcttgaatcgaaggctgaagcagttagctaatccaagtgtgacatttacattgtccaacaggattcaaagtcaattccactctgtcttcaaacttcagctccccaagtggtcctactgaaatctctttcattaaaattgagtggaaaggcaggcccaatgctccccaaagaaatcttcctcagaaaaccctctcacgtctcttcatttcaggccttatatagtttcaatgtgttcacagccacctactttgaaattcctactttgccact

SEQ ID NO: 351510 - DNA, 613 bp, Homo sapiens
caataagaagagtgtgtgaataaataaaagacgtgagctgtttcctaagtttacttaatattcagattaaatgaaaattatgagcctgaatgtaggagtctggaatgaatatgagtcaaagatcacatggaattaatgtattataaaatgatatacaarataggtttaattaatcttcctcaatcattcttatttttcagatcttcaggaattttactgggataattatccaaataaattgcaagcattctatccaaatggtaagcagaacatcttattatgtaatcatatttgtttatccataattaatataactttctgagtattgaaatgagaaacttgatttactcttcttcactcatgttttaatttttttataagaaaaactagaatcactaaagaatttctttttattttatttaaaaattataatcctgagatgcaaatatatgccatgtaagcctgggaactatttaatcactttactctaaaatctggtaaaaggtaaaatttctgaaaataggtgactggcaaacattttgtaaacaatatataagaagaattgtatatcaaaatatacacataaaactatcttttcagataattatgtatc

SEQ ID NO: 351511 - DNA, 613 bp, Homo sapiens
caataagaagagtgtgtgaataaataaaagacgtgagctgtttcctaagtttacttaatattcagattaaatgaaaattatgagcctgaatgtaggagtctggaatgaatatgagtcaaagatcacatggaattaatgtattataaaatgatatacaagataggtttaattaatcttcctcaatcattcttatttttcagatcttcaggaattttactgggataattatccaaataaattgcaagcattctatccaaatggtaagcagaacatcttattatgtaatcatatttgtttatccataattaatataactttctgagtattgaaatgagaaacttgatttactcttcttcactcatgttttaatttttttataagaaaaactagaatcactaaagaatttmtttttattttatttaaaaattataatcctgagatgcaaatatatgccatgtaagcctgggaactatttaatcactttactctaaaatctggtaaaaggtaaaatttctgaaaataggtgactggcaaacattttgtaaacaatatataagaagaattgtatatcaaaatatacacataaaactatcttttcagataattatgtatc

SEQ ID NO: 351512 - DNA, 537 bp, Homo sapiens
tttaaggacccataatttgtctgggatgataggatctagtcctatagattattttctatattttgatggaataaatcatctttaacataaattgttcaatccatttgaaagaatgcagctgatataatatgtactcttaaagagaaggcacgatttcactgtatcagctgtcaactgctacaagggtacagaagagcctgaaatttagtgaccaagagaattgaagaagtaaatcaaagagtgtcataaccctggcacatgtccaggctactctctcatcccyatgtgagctcataagtgcacacacacacacacacacacacacacacacaccaccaacctggtctataggcaaaggagaagtaatcatcaatatggtaataaatacataagaaaagcaacaaacccactagtgatatattctgtaacaagcgcttggtgttacgcttcacaccattggtgaagcatttttttttcttgttttattcagaacacttgtcagaagactctttcgttttatttcatctacacatgtct

SEQ ID NO: 351513 - DNA, 589 bp, Homo sapiens
tttccctgtgaggttacatatgttttcagagactttgaaagctactgttctaacattgcttgtattatattacatactgcaattatagaatttctagatagtgtgtaacactatttctgtgaaaacatctatacttttaaagcaatatatactcttctgagtatctacctatcagatacaaactgcttatctgatatgcaataaattatttacatataaaatatcaattgtgcaaagaaattactttctatattwactagtaaaaatgactaagtaaacttaaagcaaaattgtttactatgtctgattatatttcagaaggattatatattttcaagaatttcctattgatactgagtttctgcattacgtaaatgaatagtatgcattattagattctctgaatacattccctatatgcttggcttctaactatacaagtgagatagcaatacaaacaaatattgaaaacatttagaagccagttggaaaataataattagccttgacaagaggaaaactaaactatagtcctaagatggaacatagtaatttcagtttgtacatttagtaaaactacctgctgcgc

SEQ ID NO: 351514 - DNA, 622 bp, Homo sapiens
taagatttcctgaaagattacatatattcataatcaaatattataccctttatttaataattgataactgacaattataaattcacatgaaaaataatatctatacagcaataaaagttgattttatatatcttttcaatttctgtggtaagctgaaaaatattctatgctgaggctccctcttactagtacagatttactagatatttagggataaattggataaaatattataataagaaagtatgatagataattaaagatgtgactcagtggtgaactgtctagcatgtattktgtgctagtattaatgggctgctcattgaaggaggagaaatcactgatccatttcattgattagctaacctccttgtgaaactgtagaaattgtatctgatattatattttcatgcctggttttattttactcagaagtgctttaataaatgtcatattttaatattaagaagtttcagcatgttggaatattctgcagatttaacaaaagcttagcaaagcattttaatatataagtacatttcgaataaagattcagtatattagtttttcattccaaaacagaactctttaaaattaacattacattacaatgataggcaaa

SEQ ID NO: 351515 - DNA, 568 bp, Homo sapiens
tataactggtctccaccaagtttgtctacagaatcaaaacttcctgagtgtggttctcagtatttgcattgtaacaagcacctaatatcaactttgagaagatattttgagaatagaagaatcaaacagtaggcaacagtaatatattatttgttgattatgtatatatcaatcacaataggtgagtcattgatcycaggagcattccccaataaaattcctgcatatgtatctctgtctcagagtctgtttatccttggaactcaatctccaatgtctggatatgactgagctcactaattagtgctcttcttatttcttctctctatatttgttttgttagacacaattaaggtggtgtttgtttattaagtttaattacaagacaaaaattataatatctgaaatttcactgacaaatttagatttctgactagacttctggaattgacatttctgaccccactgggcacttacgcatcttcagcaagaacagggaagtgattactccttataaaggagatattccctctccaggtccctgtggtccacacaactccacactgca

SEQ ID NO: 351516 - DNA, 614 bp, Homo sapiens
ctaaatgccagataccctgacaaacatatattctaccagctggatctccatctgctcaactaaacattttcacaccaaatctgtataaaaagctatgttttcaaagagagttatctacaactgaaatattaaaatcttaactccaggagaccctccattacatatttcacatgtattaaatcatgaatacaaaactacctccaagtattatcagtggtctgctttccgttgccagaagttatcttaaaccatccatgaaggggcagacagactcttttgagcacaacaaatatttttgagatttttcacctaaggcagaagtattgctactgtcttttgatgtgtttccttacaaaaatactgcaaaattactgttaatggatagactgattttttaaaaatctgcattaagttwgtcctgggataacttcctttaccaacatatgagtatattaactaacataaaatatgcctctaattaaatcctcataatattcatcagaatctttttaattgagctctgattatacaagagtggcaaagaaaatctcaggtaatttaaaaaagtttctatctgaaaataaaattgatcctcataaacatcagtgccacta

SEQ ID NO: 351517 - DNA, 537 bp, Homo sapiens
gattttctcaaataatcttattgtctcaaatattttaaattatattttgtataaatacttttgttatacatatgttctactttatacaaggagactgcggcagaactggaaagtgaaaacaagwctcttgcttcacagcccatcttctttccattacactcatcagctgaagtgaaattaaaaaaaacaaaaacaacaaagactcattcttggagcagaagatactgaacaagaatactaattaattattagcaatgtaaactctcacctaaagtataagcaggtttatctttttacactagttagaagaaaaactatattttggaggaattgagaaaaatgccacagtcagtggaatgagagaaggagataactaaagaatttgaaataattcttgttatacaatgtcaaacatagcaattaaattgttttcaaacagtacacaaaatggtaatcataggatgaaagtgactctttttaattgacacataataattttacatgtttatgaggtacacagtgatattttgatataag

SEQ ID NO: 351518 - DNA, 488 bp, Homo sapiens
ccactattttactatctgcttctattaaagattttagcccttacatataagtgagaacatgtagtagtatttgtatttctgtacctcacttatttcacttaacataatgtcctccaggctcaacaacattgctacaaataaccagatttctttcttttttatggctgaatagtataccattatgtagatatataccacatttaaaaaatctattgacctgttgatcgatacttargttgatttcatatcttcgctattgtgaatagtgctacagtaaacataggggtgcagatagctcttcaatatgctgatttcctttctgaaagttatttatccaagccaatcaacagcattttctccaagggcaaaatatttacttttctcttttttatgttaccttgggtatcagctgagaaggcatttcaaaaggtgtaaagcatttattaactccttactctataactgatcttaggactttgctgtatgga

SEQ ID NO: 351519 - DNA, 601 bp, Homo sapiens
tgccatatgatttaaaaaatttagattattccattttatttaaggaaattgagtctaacgctgtctgatatgctccaaagaattaacactataatgagtcaaaaaccaactacaactcagagtttatatttttagttttttttttaatctcataaaccgtgaagagtttaatttttattctatttttaggtaattggaaggtaaattsggaagcaataggttagaaagtggagtattttttttctgttgcctgtgtcttttagctaggtaactaattaaccagcttccccttcctctgtttctccctctcatccttccacctttctgtctgtcatttgtattcataaatataatagagagagttcataaacctatagatatattcataaatatatagataattttctcaggtcaagaagttctgtagtaaatccttttcttaactgtaacttttctttgtgactggaggaatagttttttagttttgccatgttcaggctccttgccttggtccttctctgtccttttctatggaagcatcaacgtccacatgagaagaggttatgttcatatacaagaacaatttgttcttggtaatacc

SEQ ID NO: 351520 - DNA, 538 bp, Homo sapiens
aaatttgagaaggatgaaatttgggaggtgcccagggtggaatgatgtggcctgactctgtgtccccatccaaatttcatcttgaattgtaatccctatgtgttgggagcagtccccctctgctgcccatgctgttctcatgatagtaaatgagttcttatgagatttggtggttttataaggagtttccttgactccactctgcacttctctctcctgctgccatgtgaagaaggacgtgtttgcgtccccttccaccatgattatgtttcctgagaccttcccrgttatgcagaactgtgagtcaattaaacctctttcctttataaatttctcagtcttgtgtatttcttcacagcagtatgaaaatagactaattatctatctatctatctagctatctaatctatccatccatccacacatcaccatctctatgtatatctaatatatttatatataattttacaaagaaaaagcctcatgggagtagaacaagacaaaattacccatcattgtctcattcttcagtctcatt

SEQ ID NO: 351521 - DNA, 615 bp, Homo sapiens
atatataattttacaaagaaaaagcctcatgggagtagaacaagacaaaattacccatcattgtctcattcttcagtctcattaataagtggggtgcaagtacttttttggttgttgttaaataaaaatatgagataccattgtagttaataaatatagggttttttattttcaagaatattccagtataaattaaaaaatgcaatctggaccaatttatttaatatactactataaatgtagaaggaaaacaagttttgmgggagttaaaagtatgaaagcgtttgatttttattattcctttctgactgctagatgacatagaggtggattatttagacacactgtattacataatatgtaaatatctattatatattcatatgcgtacacatatattttttctcttctattaatactagttcttgagctattgctgttactaataaaccattatacatttgcaatcagttacattgttttgtgggaatgaatttcatttatagaacaacatgcaaatgggtagcatgagttctaatagtaaatgtgccattttatgtaaggaagaaattggtatataatagtgtattaatccctaaaaggaaaccaaattaa

SEQ ID NO: 351522 - DNA, 615 bp, Homo sapiens
gttatttcatattccaaatctctgggtttcttccttctattgaaaatatagtaatatagttttttaccttcatgccattcagtaggtttgttttaagaaattaacactgattttcatgctaaattacaagaaatattttaagaagacaaatcgttcaataacaagttacaatataagtcagaaattaattctaattaaagtgagggaataaatttcaaggagggaacaaataaggtctttcaggagataatatgtgcattgaggtttaatagacaaatgtgcgatcctgtgagggcacttctaggcacagtgagcatgatgaacaaaagtgggtgacatatgaaatcgcagctcttatttgatgatcagatagctagggcttgagtgagaaggattatagtgataaagctaggaaagtagaaaagttgcattaagttctggagggctttctatgttgtaccaaagaatttgtactactctttgtagttatggaacaatggccaagaattcttaaggagggcataatgattaaattttggctatagtaataactttaaggraagttaaagttattactgaatactgaactagatatgagagaggctgaaggcaaca

SEQ ID NO: 351523 - DNA, 593 bp, Homo sapiens
ttgtcacagaattccaggatgtaattgttttttctcctaacttgtcagtttatttgttccaacaaccattgacataaagcttgtaaactttttaatttgtggttaattaaatttgtgactaatttgctgtttattaattatccatttrttataattaatagatacatgtgttaattatgatgccaaaagtagcagcttatttggtctatagaataactcaaaaaatcctagtttttaagggccatattttaagtgaaaaagattttctaaaatataaacctttagtttgtttcagataatgtaataaaacaccatatgatcttttagagggatattgcattagatcatatttgggttccccacaatttcttcagtcctagatttatgaaaatgagataggtatcacttaattatacagtaacttaaaataataaattttattgcttattttcctttcaggtgagaacttattgcactaaagtttctcaatttgtaattgtgttgtcaaggacagatgtgcatggagcactaaaaatagataaattttaaaatggcaaatgtaaattctttgaaataaatatacccgataactg

SEQ ID NO: 351524 - DNA, 593 bp, Homo sapiens
ttgtcacagaattccaggatgtaattgttttttctcctaacttgtcagtttatttgttccaacaaccattgacataaagcttgtaaactttttaatttgtggttaattaaatttgtgactaatttgctgtttattaattatccatttattataattaatagatacatgtgttaattatgatgccaaaagtagcagcttatttggtctatagaataactcaaaaaatcctagtttttaagggccatattttaagtgaaaaagattttctaaaatataaacctttagtttgtttcagataatgtaataaaacacmatatgatcttttagagggatattgcattagatcatatttgggttccccacaatttcttcagtcctagatttatgaaaatgagataggtatcacttaattatacagtaacttaaaataataaattttattgcttattttcctttcaggtgagaacttattgcactaaagtttctcaatttgtaattgtgttgtcaaggacagatgtgcatggagcactaaaaatagataaattttaaaatggcaaatgtaaattctttgaaataaatatacccgataactg

SEQ ID NO: 351525 - DNA, 583 bp, Homo sapiens
agccatacagttgctcaaatatgaatttttacctggtagcatatattataataaatatttcttcaataaccaccaatttgggggggatgaaaaattggggggggcaaaaatttagatatatattactaaattagaaaagaaatgctgctttaaaagactataattagaaggaagaaatacttaagattttttaaatgtgcaaaatttgcttaaaacctatacgtattctgctttaactgtactttaacatgtgaattcggaaagaaaggtattcattcttttaagaaacagtaggtagagtgagctggaagtgagaattttccaagggtaagaattggaagcaaaataaaattttacactaactttctgcccagaatggaaatgagtcaagcaagaaaaatactctctcctgataagacagggtaaattatagaatgtttcaaacacctgaaggatgacactgcctcctgcctgcacccacatgtagttggaaatawcctctcttcttctagctctagtctagcctgatggaacataaagttttttcctcatgtaaaaagaggcaagttcgcaaaggaacaac

SEQ ID NO: 351526 - DNA, 617 bp, Homo sapiens
gaaatcaaacaatataaaatacacttaagcaaccagtgagtcaaagaaaacagcacaaaggcaattagaagaaagatttcaaatcatatcttaatattacactttaagaaaccagaaaaagaatatgcagctaaactcaaagttagcagaaagaaggaaatagtaaagattagagcagagatamataaaatagagctaagaaaacagtaaagagaatcaaggaacaaaaaaataattacttgtaaagatacacaaaatggaaaaatcttagctagactggctaaggaaaaatgaagacacaaataaataaaatcagaactgacaactgcaaattattactaactttacagaaataaaaaacaattataagagaataccatgaaaaaccaaataattagataacctagatgaaatggaaaaattccaagaaacacacaaactaccaaaactgatgacttaaggagaaataaaaaaatctgaacacatgtataataaatagagattaaattagtaatcaaaaacctcccaacagagaaaagccaaggtctactgctttactggtgaatcctaccaaatattttaaacaagattaacacaagtcctcagacttgtccaaa

SEQ ID NO: 351527 - DNA, 477 bp, Homo sapiens
taaatagaatggcacaagaagtattttacattgtcattattaaataaagtcctcctggatgtgctgttaattctttattgccagtacatttatttacagtgtaagaacaataaaaaatactgttttataaggatggcagggtaatttcagttacctagaaggatactaaatctaatttctatattgagttatcgtatatatgtttattatgcatctaagagaagaaagatgaaacaaaatatccaattaaatgacagttattagaaaatatggctttacatgttattcatttgcctactctaactaatgaacacgtctttactgatatgtgtaaagaaaacacatattgtctgcaagaacaaacttcatgctgaacaagaaaatcgtgtcatccagcagatggcatatggaattcacaaaaaaatcaattactattagaagaaataataataayctaagcataaaagttgaacactt

SEQ ID NO: 351528 - DNA, 548 bp, Homo sapiens
atagatagatagatagatagagatagacagatagatttatacagggctacaaccatctcattrtaaatttatgacccactactgccctcagaagccagttggctatgttgtctttagttggcttctcaattaatacaagaggaaagcagttacaaaaacattaagcaaagatgcataatgcatcttcacttgttttcaatagcaattattgcaaatataaggcatagagagaacaatgatattgattactaaacataacaaaaatatacaaccttaaaatgtttctaaatatatgatcttgtcacattaaaaaatatggttaacagaaaggataaagggtttagcttagatttctcgggatggaaattcttcttttttaaaatattcattgtatcttgctttatgtattatttgtaattcaaagatcagagacaacattccataaaacagagaaagcaatgctttactcacaactcgctgtctgagacattaaggcctggacaagtaaaacaaacaaccaaagtagacatacagacaaataagaggtg

SEQ ID NO: 351529 - DNA, 560 bp, Homo sapiens
gaagttctaagtgggtcagttagacagcataggttacccaaaaatttcccatggaatataggcataggagagaaggcagtaacaatagggaggaggtggagcaaagaacagagaaggaagaaataacataagttagctgtagaaaatgggtttggaatggtccargagcacataaaggctgaggtcctgaggcctgtagtccaaggtctcacgaattctcccaggctggtcatgaagactagagtgtctcatttgatttttgaggaaagcctagcaggtttcattagactagggtaagacaaatgacatgtattctgaactaggtaatgaatcaattgattaagtaaagaagagacctctcaatgatacaccttcaaaggaagagaagttcccatactagacaaggagaaacattgttcacattatgtaaaaaggaatttgctgatgaattgtagctagaaaggaagatatgaacactttcttatcctactgtgtatataaaataattgctctttgaaaaagtaaaatctcaatttaatgataatgcttagggattaaga

SEQ ID NO: 351530 - DNA, 559 bp, Homo sapiens
tctatatcatgatttcattaattttttagtaaattacttcttccactacctttttaaacaaaattatactaaaaggagatggagaattctgaaaatgtagtacttccttctgaattatggtatatactcttacaatttagagtgcatatgtcttcaacaattgtcaaaatagttgtctggattaaaatacatacattttctgttcaaatatttaattgtgatacatgattatataacagaagatatatttgtattttgacatatagtcaataattatagtaatatatctttggaattaacagctagaaaccactagttctctttatattatatttaattttattaaaataatcacaaattctactttattgcttcaatatcaaaagggaaaaattacaaagttaacagacatctccaagagcaataattcttgaccttttcttaaaatctaaatgttctgtgtaaagtaattgttcaataacttggtcatgtgaaaaaaagacttgagtcaagaacagaagccctgacttmttagaaatggtgaattccataaggcagg

SEQ ID NO: 351531 - DNA, 559 bp, Homo sapiens
gggtttaaaaacaggaggaatggcatctcattaaatcctgttaaatgtcacctcagtcttgccaggctayatgtccaactacccagactcctctctaaactccatagcccaacgtgcaactattgacttccatgttaagcataggacacattaaattttagtaacaaatttcattatcacctatattgattacatacacttagtgcagatgctactgtagggcaatcactaagttcaacggtgactttgtttaagatctactgaattgcgcttctggtacagagcagattcacgtattcaaataactattaaagtttaaaatgtctgatactgaaatttaaaaaggcaaagtagagttttaataggacacattacttacgttcacaagtgtctcctttttgctggtagcctgctttgcagatacattttccaatgggcactaaccattctccttctgcactgcagtgcatcctgggggcgttttccgcttcttcctctgcactgctgacacatgtccctcgaacctcgactaaagaggaaaattctgaaccagtcactg

SEQ ID NO: 351532 - DNA, 613 bp, Homo sapiens
aatcaataaaatcatttcacctaggaatcttaaaagcctaaatgaatggtttgttttcttcgtacaattattaataattttcccactttgtatttatgatgtcttaataatgaaattgtcatgttaatattaatttccccaataaaaaattcaaatacaaaacatttgtgttcaagtccaaagttgcatagcatgcaatattttaactattgtttcaagaaaagatgagaaaataaaaatcatgtggtaaatacttttattttaaatacttgatttgagtattgatttatttaaatgttctgtacaatattaatgtatacttttaaaaccagtccttagaaaattaacaagactgacaaattagcaatataatacaattcagaaatttctttgatgatgttayatatttggtgtgattttgttatacacagtctaataccatcaaaggtactcaaatgtagtaaagaacccattttaatgttcagcttttactcagttcaacttgcatttgtgactagttaacagtgtgcctagcttccctttgtttcagttagctgcctacaatctgaatggcaatcagccaaacataaccaaattcatccatttggatggc

SEQ ID NO: 351533 - DNA, 570 bp, Homo sapiens
ccaagtgtattatgtttaaacaatgtttccaagagtttgcaacaagctctggcaaaagaaacagaggaaaagggagtgggaaaggaagtcttttgttttaagcgccycttctcctccgccctgtctcttcaccatagtttgttgagcgaagtgagacattaggagagaaccttctgatggttgcgtatcgtttttttacgcgtttatcattttctaaggttttccttggattgcctccactttgatagttttccatttcgctgcataaattacactgaattttaaagaatgccactacgtattaaattcataaagcaagacctttctcttcgcaagtatttaccattttcaggaattattcaatgcttatctttcaaagagaaactaagaataaaaaaagtcataaccaatatctccagttgaattcattcaacccgaacggcaaggaaggctgcgtagagaaatctgttttccattaggcagtttcggacactttgtattcaagaggtaggtaataagaggaagaactttaaaattttaattgccaaatcttcaatttcaaaggtcaca

SEQ ID NO: 351534 - DNA, 570 bp, Homo sapiens
ccaagtgtattatgtttaaacaatgtttccaagagtttgcaacaagctctggcaaaagaaacagaggaaaagggagtgggaaaggaagtcttttgttttaagcgcctcttctcctccgccctgtctyttcaccatagtttgttgagcgaagtgagacattaggagagaaccttctgatggttgcgtatcgtttttttacgcgtttatcattttctaaggttttccttggattgcctccactttgatagttttccatttcgctgcataaattacactgaattttaaagaatgccactacgtattaaattcataaagcaagacctttctcttcgcaagtatttaccattttcaggaattattcaatgcttatctttcaaagagaaactaagaataaaaaaagtcataaccaatatctccagttgaattcattcaacccgaacggcaaggaaggctgcgtagagaaatctgttttccattaggcagtttcggacactttgtattcaagaggtaggtaataagaggaagaactttaaaattttaattgccaaatcttcaatttcaaaggtcaca

SEQ ID NO: 351535 - DNA, 586 bp, Homo sapiens
tcaactagaacatttttatttcttacagataatagattccttctttcacatcatgtcaaggaagttttgcctctgaacaagtgagttttcaagccacttactgccacacaaattaatatatgaaatccagaatctctgctaagtgactccatatcaatgaatttgtcctggactaatattgtgccccattctcattggggtaacacacttgtaatctatactcacacctaattcctaaatttacattggggtaaatacacacacaagcacacatacacaaatatataatacaaatattacatacayacatatataataccctctgaagatgttctgtgaggctttgccatcagttgtgcttgtggggaatctgtgagcaattcagaaacgtacatcattttattgattctcccttcctccctgactcgctcactttttgctatcactttcctagggttgtattcacaaatacagagtgaacatgcaagttttcgccatgggctccatttctaggaaacatgggttaatacaatgagcaatgggtattcaaaatattccattagtaaacaagtaaataaataaatca

SEQ ID NO: 351536 - DNA, 586 bp, Homo sapiens
tcaactagaacatttttatttcttacagataatagattccttctttcacatcatgtcaaggaagttttgcctctgaacaagtgagttttcaagccacttactgccacacaaattaatatatgaaatccagaatctctgctaagtgactccatatcaatgaatttgtcctggactaatattgtgccccattctcattggggtaacacacttgtaatctatactcacacctaattcctaaatttacattggggtaaatacacacacaagcacacatacacaaatatataatacaaatattacatacacacatatataataccctctgaagatgttctgtgaggctttgccatcagttgtgcttgtggggaatctgtgagcaattcagaaacgtacatcattttattgattctcccttyctccctgactcgctcactttttgctatcactttcctagggttgtattcacaaatacagagtgaacatgcaagttttcgccatgggctccatttctaggaaacatgggttaatacaatgagcaatgggtattcaaaatattccattagtaaacaagtaaataaataaatca

SEQ ID NO: 351537 - DNA, 608 bp, Homo sapiens
ccttccaccatgattgtgaagcctcccagccaggtggaactgtgggtccattaaacctctttttctttataaattacccagtcttggatatgtctttatcagcagcgtgaaaacagactaatatacaaacatctctagaattgtgcctggttttctctcactgtggtttccctggccatctctcaccttcttctatctgaccatccacttttcatctggttctgtacaaagcctttgattttctactcacatccttctagatttttaaaaacatagactcagcatcgaccctatgaagaatctaggctgtttctgctctcccatatttctcagtgttgatcccctaaattgctttggtccctctaaaatcagtggaacatcacactaaacaactggaagaaaaacatgaaaacaaagcaccaaggagaaaatagttacttaatttactttctgactctacagagaaatattgtgcgttggctytttgagcagaacttacattcaagagtaaaaggtaactgtgcaagatttggactcaatatagatattttttccacaactcagtttcattaaactggaataagctgccccaggatattcagaatcaa

SEQ ID NO: 351538 - DNA, 484 bp, Homo sapiens
aactcttacaatccgaagtagtacaaatttttaatatactattatacaaataaataatcttcaggtccccaggatgtgtacaaaaacattgttatgggataagaaaagaagaggaaattaatgttaacaatagcgtctatacaaattttaaatagaatttgggattaatgtccaagatattttccaaattatgtcagcaattatgtactagagattgtgaattaaacaagagaggtatagaccctaattttatatatgttagaagtcaacagaawgatatttttaaaactctcaatttagtgtttgaatttaactttttaattttaactataataaaacagaaatattgggtgcatcacaatagattttagggtcctgacctgtactggggcgatcacaaatgttttcttcaagaaatttctgagttttgaaagatgtatgaaaatttttcaagtgaatattcagggctggctgctgaaaatat

SEQ ID NO: 351539 - DNA, 599 bp, Homo sapiens
ccagaggctgtggaagttattcaaactagccaatcctaaatctatatatctgcctcactttttccttcccacagaaacaccaatcaaggctcttccccatttttcttgcccttctgccttctgacccacaccttgcgtgaccctatgtgaccctgtgtggtgtagtgtgccatcttctcttgggaactgtgaatataataaactatctttacaatgacatcatctaatctattgacatcagcatacctggaaatttaaataacaaaaacaaaaaaactgcattttaaaacaagaccttcagcaaacccaagcctgcatgtaaaggccagctctggaggaggtcctacctcatatttgcagagggcttgtttgtgctaggcattgttgcattcactcagctaatcctaacgacaccccattatttaggaggactatattgaccccattatacagatgggaaaactgaggcwcagttagattaagtgactctctctacatcacaaaactttcaaatggtagaactgggctccacacccatttctatctgactccaaagcctacactcttgcctccctgctgtcatgacaacacattcttcc

SEQ ID NO: 351540 - DNA, 540 bp, Homo sapiens
catatacatcatggaatactatgcagccataaaaaagaatgaaatcatgtcctttgtagggacatggatgaagatggaagctatcatcctcagcaaactaacacaggaacagaaaaccaaacactgcatgttctcattcctaagtgggagttgaacaatgagaacacaaggacacaggaaggggaacaacatgcaccagggtctgtcagggttggggcgcaaagaaagggagaacattaggacaaatacctaatgcatgaagagcttaaaacccagatgatgagttgataggtgcagcaarccactgtggcacatgcacatctatgtaacaaacctgcacattctgcacatgtatcccggaacttaaagtaaaattaaattaaattaagttaaaaatgtcagcaccactccctcccttgcattctttgttctgataatgaattcccacctaaaggagatttctctgtgcatgttctgggcacgtaaacttccagcaatttgagacagtgcttacttcctctgaacatactcagccatttg

SEQ ID NO: 351541 - DNA, 590 bp, Homo sapiens
aaattgaaaatatcctaattcgaaaatccatgtaacacatctaacctaccaaacatcatagcttagcctagtgtaccataaacatgttcagaacacttatattagcctatagttggggaaaratcatctaacagaaagcctattttataataaagtgttgaatattttaaataatttattgaatactttactgaaagtgaaaaacagaatggctgtatgcgtactcaaagtaccgtttctaatgaatgcatatcacttttgcaccatctgaaaatacaaaaaagtcataagcagaaccactattaagcagaggactgtctgtattttaaattacataagtggcttgagaatacattttgatataaagcactttaaatggtatagatataagtgcctctcttgcatatcttgtataccttcacctaccaaaccaaagaatgaatatatataaaataatcatggatcaatgtatttcattttaatcgtataatatttgctttgaagtacattaagacttgaatttttttctgggtagcacacagagctataattcacattctacagttttgtttttgtttttaatatggact

SEQ ID NO: 351542 - DNA, 260 bp, Homo sapiens
ttataacactgattataaagtatataatgtacttaggtatgctatatatgataataacataaatggcacaaaagtgttgaggtgcaactgcactgtttcaggtttccagattctacatgatataatccaatattcactcaaaagaaattctaattaaatttaaaagaaaaacctctaaaattaatgcaaagggttatacttaaagracaaaaagtccttaaaatgtaatactgaaaatattttaatttagcaaagatcat

SEQ ID NO: 351543 - DNA, 567 bp, Homo sapiens
ttaacttactccaaggtattctgcaaccaagaagccattaataactccattattgttaccttattctgcctaaaatattctatgggcaaatccttggccaaccaaaagcttgccttctacaagcacttggtcatttcagaggagataatttatgtaaccattctctcatacttcacatatctaaacaatgaagcataatattctgactgtaattccaaagtctatactgaattctatatgctatgaactatcaatgtccctttatcactggcaatatggacatcagggcctctaaatataataaaattggagacttaattccagattcttatatgtaaattatgttgcactggaaacagttctgagctattaaaaaataacaatyatttagggaccactcacagcagctgaataataaacggttttgttatataaaacaaattgttaatataaaaattaaatatacaactgttggaaatacttgggaaattaaaggtcattaaatagtttcaaatattactaaacagcccaggaatggatgaacaaattgaagactgcaggaagcta

SEQ ID NO: 351544 - DNA, 551 bp, Homo sapiens
tcaaacttcttttttaaattttattatcaaacttctatagaaggtgactacaatatctgagatgaaatatacactggataggattaacarcagactagacattgcaggagaaaatattagtgaaattgaagtcacagaaattcagactacctaaaaggcaggctagaaggaataatcaattttaaaaatgacaatatgagcagtgagctatagtaaaacttcaggaaaacttaatatacatgaaactggatttgccgaagaaagtgaggggcagaaaatataaaaaaagacccaattttttcatttgattaacaaggatatatgggacaaaatggaaaacaaatagcaagaatactgacttaaacttgtccataccaataatcatagaaaatgtaaataatcgaaacacctagtgaaaaggcagagattgtcagattgaatttttaaaaacaaggccaaaccattcaccgcctataagaaacatattttcagtataaatatataaatctgttaaaactgcaaaaataaaaaagataagatgatcaaaagaa

SEQ ID NO: 351545 - DNA, 551 bp, Homo sapiens
tcaaacttcttttttaaattttattatcaaacttctatagaaggtgactacaatatctgagatgaaatatacactggataggattaacagcagactagacattgcaggagaaaatattagtgaaattgaagtcacagaaattcagactacctaaaaggcaggctagaaggaataatcaattttaaaaatgacaatatgagcagtgagctatagtaaaacttcaggaaaacttaatatacatgaaactggatttgccgaagaaagtgaggggcagaaaatataaaaaaagacccaattttttcatttgattaacaaggatatatgggacaaaatggaaaacaaatagcaagaatactgacttaaacttgtccataccaataatcatagaaaatgtaaataatcgaaacacctagtgaaaaggcagagattgtcagattgaatttttaaaaacaaggccaaaccattcaccgcctataagaaacayattttcagtataaatatataaatctgttaaaactgcaaaaataaaaaagataagatgatcaaaagaa

SEQ ID NO: 351546 - DNA, 606 bp, Homo sapiens
cattgtcctgttattatatccaaagctccattcaaaggcatgtaaacatgcactagtgtctgtatgatcacacatttgtatgtattatcatttgctattagttttatttcttctattttaaatgttattatccaaacaggctgggcacaagctttccgtacttgttccaccataaataaacaataatgcctaaacacaatttgtaaaatgtcatctccaaaccacagctaggatgctgcataagtaggaaaccaaaattaaatctaactgggcaccatgcccagaccacaggcttccggcaaacagacagaaagggaggaaaaaaggaagacactaacttgcaaaacatgggtggaatcacagggaaagcctagcaattaaccctamgaccaggttgtctgttctgggatccaccttttacttacctttggaaaatggatgttgaaaattattcatttttatttgaagtgagtctctattattggcatcgccttaatgtaaagctagagaaacaacactttaaaaaaaatctgcaggtgttgatcattttctgcagtcactcactaataccaataataataataatgacatcaacaacagaagatt

SEQ ID NO: 351547 - DNA, 575 bp, Homo sapiens
aagtaacttggtattatatcctagcgaagtttacacataaaacaaaccattaygaaggttctttgttaaagtagggtcttatggatgtcagatgatatcccggagtcctgctcaacatctagcttacagtgatccatgatatcaacaagaaaaatgatgccagggatcatttttctggtccataaaattgagatagacagattgggaaattgacacaaaatctccatattgggatctgtggggtaaaagctatcatagtggagagggccaagtagaaaactccgaaatcatcaacactgttttcctcatacccaagataataaattagaaacaatactgtatcccaaaggaaagagatgagaaaggggtgattagtgccattcctaaggaaaaagtttcagaggagtgagtgatcacaatgatagcttttttaaacacattaaacaacacagaactgtaagaatcctggaggattactgtagaccacttcaagttcaaccaagtactatctccaattggagccatcgtgacaaatagtgtctttgaatgagcatataaatatgtcctcaagtaag

SEQ ID NO: 351548 - DNA, 535 bp, Homo sapiens
ctgctcagtgcctgctttctggttcatgaactcccatcctcacactgtgtcctcacatgtgtgaagggacaagggagctctccaaagtctcttttataaaaacactaatcccattcatgaaggttcttccctcatgtcctgatcacctaccaatggcctcacttactaataccatcatgttaagggttaagatttcaacatatgcattttgtggggtcgtgtacattcagtctatagcaccccactccttgtctcccaaaatttatgtccgtcccacatgcaamatacatttatttcatcctaacataccccagacttccaacttcttttagtgttaactcaaaactctaaagcacaaagtctcattaaaatatcaactaaatcagatatgagtgagacttgaactatgatttaagctggggtcagttgctcttcagctgtgaacccatacaaccaaaaaagttatatacttccaaaatacctgggtaagatgggcataggatagacgttttcatttgaaaagggaaaaatcgga

SEQ ID NO: 351549 - DNA, 633 bp, Homo sapiens
aaatgagatattatatcataaaaagatatgaaggaaacaaattcatactgtcaagtgaaataaaccagtttggaaggctttgtaattccaactacaagacattctggaaaaggtaaatctatagagatggcaaaagaaaaaagaaaaaaaaatctggtcrttgccaggaagttgggagagagagggatgagtaggtggaacatgggagcttttgagggcagtgaagttgttctgcgtgacattgtgatattggatacactgcattatgccttcatcaaattcacacgactctacggcataaggagtgattcccaatgtaaactatggaatttagttaataaaataatcaatactggttcattaattacagcacttctgccacactaagcaagatgctaataaaaactgtgggcaggaaatgaatatatggaaagtgtactttctgctcaatttttctctaaacctaaaactgttgtaaaaataatctattaattaaaaacaaatctgaaggttgtagttatttagaaaaggtgaaagacagagtggtctccttctttactttagctctgctggtcaaagcatctccaggcccgccactgcatgctttaccgtgaattcactgaggtcagaacc

SEQ ID NO: 351550 - DNA, 550 bp, Homo sapiens
gtcataggccttcaatatttgtttctcatttgtgrgtctatgaatgtagactttatctgaaattgcaatgtgtatttaaagtgacttgcttttaagcttcttgcagaattggtaacatgctcctctacaagctacttaatttgtataccttatccaagcacacgttttgcataataaataaacagtaactcactgtcctgcttgataagtgactacacattgtatattttaagcaagtagaccacatctaattcaaactgcttttaatagcttatatttttctcccaacagctgctccatgcagtagagataactctgacctaaaccacaagtgtttatgtaaaaactctagcacagggtatattatctgacataattacatctttgaaagatgcaaatgtgcaacctgaaaccctgaacaatctgtgagatgtattctaatgtactaattctctgtgtttcttggccattgttacaggtaccattttatggttaatcagcctgtagaaagtgtgtgtgtgtgtgtgtgtgtgtgtggtgtgtgtgtgtg

SEQ ID NO: 351551 - DNA, 550 bp, Homo sapiens
gtcataggccttcaatatttgtttctcatttgtgggtctatgaatgtagactttatctgaaattgcaatgtgtatttaaagtgacttgcttttaagcttcttgcagaattggtaacatgctcctctacaagctacttaatttgtataccttatccaagcacacgttttgcataataaataaacagtaactcactgtcctgcttgataagtgactacacattgtatattttaagcaagtagaccacatctaattcaaactgcttttaatagcttatatttttctcccaacagctgctccatgcagtagagataactctgacctaaaccacaagtgtttatgtaaaaactctagcacagggtatattatctgacataattacatctttgaaagatgcaaatgtgcaacctgaaaccctgaacaatctgtgagatgtattctaatgyactaattctctgtgtttcttggccattgttacaggtaccattttatggttaatcagcctgtagaaagtgtgtgtgtgtgtgtgtgtgtgtgtggtgtgtgtgtgtg

SEQ ID NO: 351552 - DNA, 508 bp, Homo sapiens
ggcttaattataatgcaaattattatattttgctacaaggtgctaggcatggtacaggcttatttacagtcaatgtatcttctttttctcatttgatgaccatgtatgaatttaattcaatgaccctgacattaatggcatgccaaacgcagtgctgggttttttggtgctacaggcaatgagacagagttaggtgggaaagttaggaaagtaaagagccatgactcatcaccatctatcataccttgcctctgccaaatttataaaacaggtgaagttggtctttgatgcattccaccttttatagtttaatagctgatgtggtttggctgtgtcgccaccaaaaatctcatcttgaattgtaattgctataatccccataatacccctgtcaaggaagaagccaggtggaggyaactgattcatgggagggctttctcccatgctgttcttgtgcatgatattgagttctcatgagatctgatgggtttgtaagcgtttgataatt

SEQ ID NO: 351553 - DNA, 566 bp, Homo sapiens
agatttgtgcgattttaattttcaacatgatggcctaggaaaactctctgaggaactgacttaagcaaagaacttaatgaataagagaaggaagcaaatctatctatctgtctgtctgtctgtctgtctgtctatctatctatctatctgtctgtctgtctgtctgtctatatctgtgggaagcccattatctatatctgtggaacaacatgtgagaatacattgagcacaggaatggatggtgtccttagagacatcacccaagtgacaacacaccatcagacacacagtatgtatccaaaaaactcagtattttattttttcattgagacaggttcttactctgttgtccaggctggagtgcagtgctaccatctcagctcactgcaacctccgcctygccactcacgccatcctcccatttccacctcccgagtagctggaactacaggtgcatgccactatacctgcaaatttttgtgttttttgtagcgatggggttttgccatgttgctcaggctggtttcgaactcctgagctcaagccatcctcttgccttggcctcc

SEQ ID NO: 351554 - DNA, 472 bp, Homo sapiens
cgcagaaccctgaattttctgtgctgcaattatcttatttatttaatataaaactgaaataattctcaattacttatacaaaacatacacttaggcatttatagtaaatgatttaatcttcagtgtacccttgagggattgatatgatttttgttgtatggatgtggaaacttgtagaaggtaagaaacttactacccaatcatgtagcaggtggrtggcagagctggaacccaaattagatttctaaattaatatgatgccaaaatatatgagtacctctgctgctataatcaaacaagaaactttattttcagcacgtcttgtaaatttccttggaattctttatgtcttcttttatttatactttccacatattttatttttctttttgtgaagtagtttatattcatatatagtcacttatgtgtttttatatacatatatattcacttatatgcatatatgtgtgtg

SEQ ID NO: 351555 - DNA, 472 bp, Homo sapiens
cgcagaaccctgaattttctgtgctgcaattatcttatttatttaatataaaactgaaataattctcaattacttatacaaaacatacacttaggcatttatagtaaatgatttaatcttcagtgtacccttgagggattgatatgatttttgttgtatggatgtggaaacttgtagaaggtaagaaacttactacccaatcatgtagcaggtgggtggcagagctggracccaaattagatttctaaattaatatgatgccaaaatatatgagtacctctgctgctataatcaaacaagaaactttattttcagcacgtcttgtaaatttccttggaattctttatgtcttcttttatttatactttccacatattttatttttctttttgtgaagtagtttatattcatatatagtcacttatgtgtttttatatacatatatattcacttatatgcatatatgtgtgtg

SEQ ID NO: 351556 - DNA, 614 bp, Homo sapiens
ttgctgtgtaaaatctaaggtctcattatgcatcgttctttgatacctgtttaatttttggcaggagtgtaaaaaccaaagtcgcctcttctttgtctttcttgcttccttcagctgagagaactgctaagcagggaagagcataaacatttatttagcacactaaaggcaagaatttaatctgctttgtttgctgcrataaccttagccctagagtagaaattaactcatgtatacattcattcagtttcctgtatgtatacatttttatcttggtttggtttctataggggcagactctaagacaaggctatgatgtaaatagttcattgggaagtggtcttaggacacaccagcagggaaacggagagtgagtcagggaagggaaggcaccagtgaaaggtatattgaggataaagcaaaacctgctgttgtcatgtagagcttggtcctgctggggaaccatgggagtcaacaggggacacacacctccaaagcatagtggagctgctggagtaccaaccccctactcctactcatcatttgagtgagggcttctcccaggcacattattcccccaagagttctctccacccctcacatacacagaagtt

SEQ ID NO: 351557 - DNA, 640 bp, Homo sapiens
aatttttggcaggagtgtaaaaaccaaagtcgcctcttctttgtctttcttgcttccttcagctgagagaactgctaagcagggaagagcataaacatttatttagcacactaaaggcaagaatttaatctgctttgtttgctgcaataaccttagccctagagtagaaattaactcatgtatacattcattcagtttcctgtatgtatacatttttatcttggtttggtttctataggggcagactctaagacaaggctakgatgtaaatagttcattgggaagtggtcttaggacacaccagcagggaaacggagagtgagtcagggaagggaaggcaccagtgaaaggtatattgaggataaagcaaaacctgctgttgtcatgtagagcttggtcctgctggggaaccatgggagtcaacaggggacacacacctccaaagcatagtggagctgctggagtaccaaccccctactcctactcatcatttgagtgagggcttctcccaggcacattattcccccaagagttctctccacccctcacatacacagaagttctgcagccagagaatgaccactggcaaagaattataggtgctggcagctggaagttgggctggcctcacaaaaatagt

SEQ ID NO: 351558 - DNA, 640 bp, Homo sapiens
aatttttggcaggagtgtaaaaaccaaagtcgcctcttctttgtctttcttgcttccttcagctgagagaactgctaagcagggaagagcataaacatttatttagcacactaaaggcaagaatttaatctgctttgtttgctgcaataaccttagccctagagtagaaattaactcatgtatacattcattcagtttcctgtatgtatacatttttatcttggtttggtttctataggggcagactctaagacaaggctatgatgtaaatagttcattgggaagtggtcttaggacacaccagcagggaaacggagagtgagtcagggaagggaaggcaccagtgaaaggtatattgaggataaagcaaaacctgctgttgtcatgtagagcttggtcctgctggggaaccatgggagtcaacaggggacacacacctccaaagcatagtggagctgctggagtaccaaccccctacycctactcatcatttgagtgagggcttctcccaggcacattattcccccaagagttctctccacccctcacatacacagaagttctgcagccagagaatgaccactggcaaagaattataggtgctggcagctggaagttgggctggcctcacaaaaatagt

SEQ ID NO: 351559 - DNA, 593 bp, Homo sapiens
ggtgactcataatacagtaaaatttgggaaatactgctttaatggttcagatcccggtaaggcaaatgctggagaaacagtgtaactcagagcaaaaattacaaaacaaaaatagaattctccaatggtgggtaaagacagttacagggtaaacccattgacaggtaactgacaggtaatttcacagagacagcgccagtaaatggaattctggaagagaagtttttactatccaagactgttcttcagggtcagttcacttaaaaagctctgtattcccaaccagagaagtcaaaatactgagcaaacttagaaaaacgtagctgacttcatgcatcagaggcaagatgagaagttaaagaaaaatctctgagttgcatgttgttttgggtaagagaaaagctgagagatcaggggaagaaragttgaagtagtagaagaagatgaaggtgtgggcaccctatcccttttgtacatgaactgggaagctctatgagaaactcagctcttcttaagtctggaggcacctcaccatcatcaggcaagctttacacacacacacacacacacacacacacacacacacacactgt

SEQ ID NO: 351560 - DNA, 593 bp, Homo sapiens
ggtgactcataatacagtaaaatttgggaaatactgctttaatggttcagatcccggtaaggcaaatgctggagaaacagtgtaactcagagcaaaaattacaaaacaaaaatagaattctccaatggtgggtaaagacagttacagggtaaacccattgacaggtaactgacaggtaatttcacagagacagcgccagtaaatggaattctggaagagaagtttttactatccaagactgttcttcagggtcagttcacttaaaaagctctgtattcccaaccagagaagtcaaaatactgagcaaacttagaaaaacgtagctgacttcatgcatcagaggcaagatgagaagttaaagaaaaatctctgagttgcatgttgttttgggtaagagaaaagctgagagatcaggggaagaaaagttgaagtagtagaagaagatgaaggtgtgggcaccctatcccttttgtacatgaactgggaagctctatgagaaactcagctcttcttaagtctggaggcacctcaccatcatcaggcaagcttyacacacacacacacacacacacacacacacacacacacactgt

SEQ ID NO: 351561 - DNA, 558 bp, Homo sapiens
atcatcaggcaagctttacacacacacacacacacacacacacacacacacacacactgtgctttacactctcaggaattctgtgtaatgatcaggaagaagatgctggcttctatttccctaaaacttccctcaggtgatgctgacgcccagttcaagtgagaagtgttttcaggagtgagagaagccaatttaaaataagacatctacaaaaataagtcatcagcaaagataaatcagagcaaagctggtagaataaacaacagaagtaagagtgtaaatagaccaaagaccagagaaagtccattgactcagttgtggggttccaggagcactgctctttcttgggcttaaaaataataatttgtgttcatgtgtgtttcacataagatgaaacatgaatttctaaataccatatggaatgagcacaaatttgttaaaagttctataatatcactactcaaagaagttctataaaattattayacatagtggaaaaattaaaactgccttgaattatgcaaaaaaaaaaaaaaaaaaagaggccgggtgcagtgg

SEQ ID NO: 351562 - DNA, 422 bp, Homo sapiens
cttttgccttttctgggctacactggaaaaataattgtcttgtgccacagataaaatatactaatgatagctgctgagctaaaaaaaaaatcgcaaaaatatctcatattgttttaacaaagttgatgaatttgtgtggggccgcattcaaagtcttcctaggctgcatgcagcccatgggccrcaggttggacaagcttgctttgggacattaacttagaatatgagatcaatagcttttcaaaacttatcttggaagccattatccttagcacactaacacagaaactgaaaaacaaatactgcctgttctcacttagaagtgggagctaaatgatgagaacacatggacacatataggggaacaacacacactggggcctttcaaagggtagatgttgagaggaaagagaagatcagga

SEQ ID NO: 351563 - DNA, 571 bp, Homo sapiens
agcctactgaatatacttattgactagtgctaaatttttaatggtagtccatgatttaataatgacctatataggtccctgctgcctctcaatgttactgattttccctcactgtcactggctgtcttccactcccccataatgtgttagctcttggggaaaaaaatcgctatcattagggagcctgtggattcaaaagcaaaggaagacacaaagaggtgaaaaggcaataaaatattacacatatatagtgtgtgtgtgtgtgtgtgtgtgtgtgaaatatattttaggagaagcagagttttatactcttagactgggctgataggcccactctgtgacccactgccaaatctaactacttcatatgcttgctggctgaatttttcacttarcttcatattgggtcaagagttcaaaggcctcttgttgggttccaagaattagcagaagtgttttaatatctattgagtgactgataagtaacaagcactgtgatagacatgtattctcacaactaccctgtgagctataataatattaatccaatttaaaatagaggggagcaaaa

SEQ ID NO: 351564 - DNA, 527 bp, Homo sapiens
tcactctgagactattaatagatcaaaaagttataggcagtcacatgtaaattgtttaaatttgtagaaattttattcatttggaatacttttcatattaaagtttattataatagctgttatagtaattctaaattaaataaataacataccaaaaaatctagtagaggcaataaaaatgtatamaaataagaatgatgcaaatccaaatgtaaacttcagagaaaggggcaaccaggtgtaccttaacatggagggaggaaactgaggaaagtttcatggctaaagtgatatttgacatctagaagttgggatagaggaaacctacacaaaggagggaaacagagtaaatatagactcacaaaagccaagttgcaaatacatgaataatattatggaatcatgagaaatttcatttcataagagcaatgaaaataacaataacatgtagagtggattttgatcatgaagttccctgagagtcaagctaagaagttttagttttgcatttagaagccggaaaccat

SEQ ID NO: 351565 - DNA, 578 bp, Homo sapiens
cctttaggaataatttggggaaasaactcatacgtataccttgggctggtgtctccagggcctctctagatgtttgagcaggttaaaccctgcataattctatgcaaattgagcccctagagttatacagtacacagcttgaaaaacatagctctggtgtttcatctgctgtgacttcactgccagtctttatctagctcccaaaatgtttgcaaattcttagcattgtggtttcccaatgatctcattgttttattctcttgaaatattatgtaagtattcaatatgaccttggaaggaagaaaaaaatagtagtactggctaatgacttgaaccagaaaccttagactatatttagtaatacattttcctcctgatattacctataattggtctatgtcccctgcatattatctcaccaaaacccatagaagggagaaacaataaagctgaacacaataggtatatataaatttttcagtgttatttatgaaaaactgtggcttatccagagtaacacaaaaatcacagagattttttggaaactatgtttgtattagcctctgatactttaaata

SEQ ID NO: 351566 - DNA, 609 bp, Homo sapiens
gtgtaattaaggttcaaataaataaaccaaataataactgctatgtggtgtttctaaaagtataatcacaagtccaccagagtcagaatcacttgtaaattttgttaaaaacaaaaattctgtgggctcaccattgatttactgaatccaaatatctagaatggagcctgaaaatgtgcattgtacaagcattgcaagtaattttgatataatgttgtgtttgagagatgtatgtaaaaaatggaaactcagaatggattaaaataattgccaatgggcagaattcaagtgagatccatggagccacaarcattgagaagaaccatgaaaatagatggaatttatatcagtgaagatgggagaatatgtttcaggtagggggaattgaatcctaggaatgaataaacgagcaaaggatatttaagacattttgaatagatcatacagattataatgttgtgcaaacgagaaacataggaaatgaagttagaaatacatttgtatcaggtagtggagagctttgaattccagacttagaaatttttactttattctgaaagcaatggagagtatttatttatgccaagggagagtgtttatttaggcaaa

SEQ ID NO: 351567 - DNA, 578 bp, Homo sapiens
aaatgaagttagaaatacatttgtatcaggtagtggagagctttgaattccagacttagaaatttttactttattctgaaagcaatggagagtatttatttatgccaagggagagtgtttatttaggcaaagttttgtgaacattaacctggctgtggtgagtagggtaacttgaaatgaagagacactgtaaacaagatgtcagtaaagagaccattgagatagtgcaggtatgatatgaacagcctagatttatgtagtggaagtggaagaggtagatggatgtaaggaagactgcagaaagaatacttcatacatgttttcatttgcttctttaaaaaagtgaaagctgatatttattatcccaaagtatgcactgaagtgtaaataaggtaaaaatctgatttgataaatgataattgtaayaatgcatgtcatgtgccttgtctagtcacatagggaactgatgttcaaagaatgccagccctagcaccaactattctcatatggcacaaacctgtgctcttgtgaaaggataattgactatagttaggaattctgggttcaagtaccagcaa

SEQ ID NO: 351568 - DNA, 552 bp, Homo sapiens
ttgtcttgtttcagaacagtctgaagatttttagaataagtgtttgttatttttatgcttttcttcttcaaaatttttttgcacctttaygtgcttaaatgatcataagttcaagatataatcaatatgaaataagataaagtatatgggatatattattttgtagtcagagttgtcttttaaactcactctaacaggactaattggcagagaccaagatgaggggaaagccaggtctgttgtgatctctttgctgttctcttcctacaatggtgcctcccagccaatgcccacttgtaggaagagaactgcaaagagatcacagagtcattccagggggagccaaaggaagcattcaggaatgagaagcaggatttaggtgaggagcccttcggtttcctctgggatatcttaaaggtagcttaagatctttgtcactgggagacagattttcagatcttgaaatttatagttccccacacgatttcctccagatctgctcaggaagaattagtctccatcaacattcttttgcaaagagaaagggaaaaa

SEQ ID NO: 351569 - DNA, 552 bp, Homo sapiens
ttgtcttgtttcagaacagtctgaagatttttagaataagtgtttgttatttttatgcttttcttcttcaaaatttttttgcacctttatgtgcttaaatgatcataagttcaagatataatcaatatgaaataagataaagtatatgggatatattattttgtagtcagagttgtcttttaaactcactctaacaggactaattggcagagaccaagatgaggggaaagccaggtctgttgtgatctctttgctgttctcttcctacaatggtgcctcccagccaatgcccacttgtaggaagagaactgcaaagagatcacagagtcattccagggggagccaaaggaagcattcaggaatgagaagcaggatttaggtgaggagcccttcggtttcctctgggatatcttaaaggtagcttaagatctttgtcactgggagacagattttcagatcttgaaatttatagttccccacacgatttcctccagatctgctyaggaagaattagtctccatcaacattcttttgcaaagagaaagggaaaaa

SEQ ID NO: 351570 - DNA, 622 bp, Homo sapiens
tctgagactctgggtaaaatccttctttgtctcttcctagctcctgatgttggccatcaatccttggcattccttttctttggtgtcatcacttctgtatctatttctgacattacatggcattctctctgtgtgtctctgtccatattttcctcttgttatgaggacaccagtcatattgaattggaacccattctgatgactgtatcttacttcttctgcaaacactctagtttcaaataaggccacattctaaagtactgggaattaggattacaacatttatttggggggacataacccatagtaaggagttcaagaaagatttaaaatattcatcttggactactgacatgctggttaggccartgatggaaactgagattataggaagaagatgaatgagagaaagcttgggaaaaaaagaaaacagtttatgggaactattctcagctatattaattgtgcttacccaaggaaaccacatagaacaagaagaggctgtcagtaccttgtaggtgaatagcattttaatgaggaagagaagatagaaaaagaagccaagaaagaatgggcagaatcttgagagaaaatttagggagatgtgtaataaattaaaaga

SEQ ID NO: 351571 - DNA, 592 bp, Homo sapiens
ccacatagaacaagaagaggctgtcagtaccttgtaggtgaatagcattttaatgaggaagagaagatagaaaaagaagccaagaaagaatgggcagaatcttgagagaaaatttagggagatgtgtaataaattaaaagacaatagaatttcaaagagagcagtgatcaatagttctaagttgtttgtttcacctggaaggaaatgttaaaaatcaacagttttgttccttacatataatggatcagaaattgataatgcatttcaatttaaaaaataacaaaaaacactgcatawatgctgaagccatagctaggcattaattcaacattgagctgagcaaattcctaattttaccatcaccatgaaggttcccttgattgtttaatatgagatggccagaatgcaaaaaaatgatgccagctctgtttgtaggtgtttgtgaatgtgtgagctgctatgtggtaagtccacaacagcctggtcaagcccagacacagacaaaccagccccctgccatggcctgctctgtggccatcatcagcagtgatgagtacttgcagatcgcatcagaacagagaccagataatta

SEQ ID NO: 351572 - DNA, 602 bp, Homo sapiens
tggcattctgggttatggttctggcttttccagtagcttcctacataaacatgagctgatgacttaccttcagaagctgtagttttccttacttgtaaaaatagtggtttggaacatgcttataaataaaacattcaacgattgtgttagtctactcaggctgccgtaagaaaacactacagactgggtggcttaaaccagcagtagtcctcaacatttttggcaccagggagcagtttcatggaggacagtttttccaccaatggygagcggatggtttcaggatgaaaccatttcacctccgatcatcaggcatcagatgctcataaggagtgtgcaacctagctcctatgcatgtgcaattcacaatagggttcacttttatgagaatctaatgccactgctgacctgacgggaagcagggctcaggtgataaagctgtcttgcctaacgccactcacctcctgctgtgcagcagggatcctaacaggacaaggaccagtaccatccgtgggttggggaaccctggcttaaacaacagaaatttatttttttccacagttctggaggctagaagtcaagtttggggtgccagcaatgta

SEQ ID NO: 351573 - DNA, 602 bp, Homo sapiens
tggcattctgggttatggttctggcttttccagtagcttcctacataaacatgagctgatgacttaccttcagaagctgtagttttccttacttgtaaaaatagtggtttggaacatgcttataaataaaacattcaacgattgtgttagtctactcaggctgccgtaagaaaacactacagactgggtggcttaaaccagcagtagtcctcaacatttttggcaccagggagcagtttcatggaggacagtttttccaccaatggtgagcggatggtttcaggatgaaaccatttcacctccgatcatcaggcatcagatgctcataaggagtgtgcaacctagctcctatgcatgtgcaattcacaatagggttcacttttatgagaatctaatgccactgctgacctgacgggaagcagggctcaggtgataaagctgtcttgcctaacgccactcacctcctgctgtgcagcagggatcctaacaggmcaaggaccagtaccatccgtgggttggggaaccctggcttaaacaacagaaatttatttttttccacagttctggaggctagaagtcaagtttggggtgccagcaatgta

SEQ ID NO: 351574 - DNA, 619 bp, Homo sapiens
cacgggatgtaatcttttgagagcagagattatagtgaatatttggatgggccaaatctaatcagatgaatccttaaaagtgtaagaggaaggctaagtggaacagagagatgagacatgacaaggaatctatctttcattgatgactttgaaaatggaggaaacggttcaggaacagtgcaatgcagcagccccaagaggccaagaatagctctcagctcacagccagcaagaaaattggacctcaattattccgttgaattttgccaactacccaaatatcaggaaataaattccccctcagtaactccagaaaggcagcctgctgatgccttaattttagtcagatgagacttgtatcccacttaaaatgtacagaattataagatgataagtttaggtgttttaagtccctaggacggtgatatgacattgttacagaagcaatagaaaatcaatacaaccacatttgttgagatgatcatgkgatttttgtttttaattctgtttatgtggcatatcatgtttattgacttgtgtatattaaaccatccctgcatccttggtatgaaacccacttgatcatcatggattatcattttgatatgttgttggattt

SEQ ID NO: 351575 - DNA, 582 bp, Homo sapiens
tatgcagcccatatgctgtgaatactttttgcccctagcagctgtggagtttatcttacttagggatgtcatatactagtgttttttttgtttccccctcaagggtcttawctttagatatcctattgttaggataaaaactaaaccaacaagactggttttaaaagtaaaattttcaactatggtgtctgagaagaactaaaaatgacaattataataatagttataatttattgagatcttatataacaagcattgagctaagtattttatactctacttttaatctgaggtagatactacttttaacttatttttatatgcaatactgacattcagaaaagttaagtaacttgaggtcacataactagcaaaagatggagctatgaatggaacacaggtttgcaattctttacatttcacatgtaaaatccccacactaaacactttctcttccctgagatcttcctgctaaatgcctaagattctaccattttatgtaatggacattttcacactcacatacatactacctcaatgggtaacataacaaacctttaaggaaaattggctaccatccag

SEQ ID NO: 351576 - DNA, 638 bp, Homo sapiens
ttgatagcacaatgaggtgactagaatcaacaataatttattgtacatttaaaagtaactaaaagaatataaacagaatgttggtaatacaaagaaatgataaatgcttgaggtgatggatactctatttgccttgatgtgattactatgtattgtatgtctgtattagaatatctcttgtaccacataaatatatacacctactatgtatccataaaaattgtaaatgcaaacaaaaaaagagcacagagaaagatggtttcacctctggaatggcagctgtggagctccacggactcactcctyacctagacaaccataaatagtgaaaatcattatctaaagaaaacagctattattttaaaagtctccaaactttgtcttatggacatatgaaaaatacagacacacgtattctactaagtctcaggaagaactgtgagagtctgaagaacatgagccacaacctgctctctccctaaccccaccgcagtgtgatagaagcttcactacgtgtgagtgtggacaaggagatgggggtctccctgttcttccaaatcctaatcatgggctagttggtttgccagagagaaccaggaaaaaggaagagttactactaggataagaaaaaattcact

SEQ ID NO: 351577 - DNA, 542 bp, Homo sapiens
agtactgtcatcccaggataacttcatagtaaaaatttatatttcttcttttttattctgttaactaagttttaaagcaagtgtataaaacaatatgcatataattgaatttcagggcctataacatatagcaatgtaatatgtttgaaaataaatgcacaaggaggagatggggaggtgaattaaataacatcagattgtaacttgaatccatatgaacaaattagaagaattataaatgttaaataagaatgtaacttacaaaaattctaagatatatactcaatctccttttcagtctctttataaaatatataaaattattttgttaaagtttacaaaattgctgttagataggagaaatgagttctagtgttctatagtatggtatgatractgtggttaacagaaatacataatttcaaatagctagaaggatgatgttgaatgtttccaacagaaagaaataataatatgataataatatttgagaaaatgaatatgctaattccctgatctgatttctatacgttatatgtatg

SEQ ID NO: 351578 - DNA, 563 bp, Homo sapiens
ttagtttatctgccttcactgtattttttggatccaaactttaaggtttcagacttttattgcctcatttctggatcatcaaagtagtctcctaaattctttcccttttttctaaagaatattatcactctaaagcatcctactcattaatatcacactcataatcttgaaaacatcaaattttaattgtacccatattggaaactatttatagtttttattacttcttgaataaaatctaagttctacttattattcaaagtctctacaatggcatacttcacctatccatcctcawctcccaccacaactatatattaacagtttcacttccttataaactccagtgccaaatatcctcccttgttattcacgttttttatttcctttaccacctcatttctccacatgtaactcaaatcctaccatctttataattctgggactcctttaatcattctttcactatcttctcatgaatccccaggtatatttactttttgccagtcatgaggtcattttctttgcattgctatataaaactttaaaaatcatttaagctt

SEQ ID NO: 351579 - DNA, 563 bp, Homo sapiens
ttagtttatctgccttcactgtattttttggatccaaactttaaggtttcagacttttattgcctcatttctggatcatcaaagtagtctcctaaattctttcccttttttctaaagaatattatcactctaaagcatcctactcattaatatcacactcataatcttgaaaacatcaaattttaattgtacccatattggaaactatttatagtttttattacttcttgaataaaatctaagttctacttattattcaaagtctctacaatggcatacttcacctatccatcctcaactcccaccacaactatatattaacagwttcacttccttataaactccagtgccaaatatcctcccttgttattcacgttttttatttcctttaccacctcatttctccacatgtaactcaaatcctaccatctttataattctgggactcctttaatcattctttcactatcttctcatgaatccccaggtatatttactttttgccagtcatgaggtcattttctttgcattgctatataaaactttaaaaatcatttaagctt

SEQ ID NO: 351580 - DNA, 563 bp, Homo sapiens
ttagtttatctgccttcactgtattttttggatccaaactttaaggtttcagacttttattgcctcatttctggatcatcaaagtagtctcctaaattctttcccttttttctaaagaatattatcactctaaagcatcctactcattaatatcacactcataatcttgaaaacatcaaattttaattgtacccatattggaaactatttatagtttttattacttcttgaataaaatctaagttctacttattattcaaagtctctacaatggcatacttcacctatccatcctcaactcccaccacaactatatattaacagtttcacttccttataaactccagtgccaaatatcctcccttgttattcacgttttttatttcctttaccacctcatttctccacatgtaactcaaatcctaccatctttataattctgggactcctttaatcattctttcactatcttctcatgaatccccaggtatatttactttttgccagtcatgaggtcattttctttgsattgctatataaaactttaaaaatcatttaagctt

SEQ ID NO: 351581 - DNA, 541 bp, Homo sapiens
gttccaaggactcagagatcaattcccaggatccaaaccaagggctagtcctgccaataggtctttttgggggtggagttggggggaagagcaggcattgggaaacccaggcaggtaatctctggtgcttgtctaatccaagggttctttggaatgaattttcttatgacattattttggactattattgaaagaaaaaacggagatctgctgacactctgtgtcagagagagagakcagtttttaatggttgtgttaacttctatcacaatgtatcactatggaggagagggcttattggctgcactagacaccagaagtggtcttcaaaagttaggctagagggtagaattgaagattgtgcacaaacctcattattccaagccatacctctttctccatagtcctctgtatgattttactaagatgttttagattttctctttctttcgtttagacacactttcagttccttggagaccatgtgttatttatttcaatattcctaatattgaattgccatctggcacacagcagggtc

SEQ ID NO: 351582 - DNA, 609 bp, Homo sapiens
ttttctgacatgtttgaagaaagactccattaaatagagtaatagtgttaaaatatatgctgcatgtaaatacatattataacatctgtacagtttacaaatgtgaatctaaatgaaaggggacttcatttaatagacattatttagcttaacgtagtacctatgattgatcattaaaattcactctatgtttttgggtattcaaggggtaaaggaaaatgaaattgttatataattgtattgcttgatacataatttattatttcaagataaaccaatatcatttgggtattaaattctaaaattaatatatggttatttgtcccaggaacatacacaaatggctataaaaacacaaaataagaagaagaaaattgtgacataaagatagagaaataagtccatgaagaattaatagaattctgatgagtagagagrggcgaaggttttacaattttttaaatagttgctatttcatatttcatcaaactatcaattacatttatttatttgaaatcattgatcttttaacctatgatcttttaagaagattcaactaaatgtaattaccctggctgcaaatgatataaaaatcttcagatgcagtag

SEQ ID NO: 351583 - DNA, 548 bp, Homo sapiens
tttgtcattactccctaaacaatacagtataacaactatttacatagcatttacattgtattaggtactaaaagtaatctagagatgatttaaaatatacaggaagacatatacacattatatacaaatactacagcattttatacatgggacttgagcatccgtgaattttgaaatccacagggcatcctggaaccaatcyccttggatactgagtgatgactgtacttattaactgctccatataaacctctaatcagtggaccatgatgatgcttcaggcccctgagaaccaatgtcaactttgaacctgtgtccaaaacttctcaaaatgtttgagaatgactctttttccaatggatggtaacctgagtaaatttatatatgttcctttgagaaaggactcaggtaatttttactaaatatacttgccattgtattactggggtccatctcatgaggacccagcttttcttctggccaatgaatttggcttctgagaactagctgacgtgcagaaacagggtaagaaatgaggacttctcatt

SEQ ID NO: 351584 - DNA, 515 bp, Homo sapiens
aaatcaagcctgctgcagaaatttgcataagtaacaaggaaccaaatgttaatagccaagacaatgggaaaaatgtctccagagcatgtcagagaccttcatggaaacccctcccactacaggcccggaggcctaggagaaaaaattggtttcctgggcctggcacagggacccagttgctgtgtgcagcctagagacttggtcccctgcatcccagaagctggggcaaaaaggacccaggtatagcttgggttgttgcttcacatggtgcaggctccaagcctcggtgcctaacatgtggtgctgggcctatgggtgcacagaattcaagaaatgaagtttagtaaaccacctagatttcagaggatgtatggaaatgtctggatgtccacgcagaaatctgctgcagtggtgtaaccctcatggagaacctctgcttgggtggtgtggaagggaaagagagagaaaagagagagccccttatstcatgagatctgatggttttttaaggggct

SEQ ID NO: 351585 - DNA, 374 bp, Homo sapiens
tactccatgcactgtggtctggaagaactttttagccagtaatatgtgtaaatagtaggctatatcttggttttgctcttctttcaggaaatattctcctgtacttcttgttattcaatatctgagcactttgatttctctattttgtccaattatacaattgttaaaggtgagscattaaaccctgactccattattttatcatgagcagataaatgtagagccccaaaatatgacttccaaattatttaagtttggaaaaaagctaattctctgtatagagaattatctgaatactaaatgtagactttctgtaatgaaattaaacctatccacagatagaggcaatttaaccatcacattaaaaaaaaaaa

SEQ ID NO: 351586 - DNA, 374 bp, Homo sapiens
tactccatgcactgtggtctggaagaactttttagccagtaatatgtgtaaatagtaggctatatcttggttttgctcttctttcaggaaatattctcctgtacttcttgttattcaatatctgagcactttgatttctctattttgtccaattatacaattgttaaaggtgagccattaaaccctgactccattattttatcatgagcagataaatgtagagccccaamatatgacttccaaattatttaagtttggaaaaaagctaattctctgtatagagaattatctgaatactaaatgtagactttctgtaatgaaattaaacctatccacagatagaggcaatttaaccatcacattaaaaaaaaaaa

SEQ ID NO: 351587 - DNA, 491 bp, Homo sapiens
tccagaaaagaaacaatgcaatttggtgtaacttgaaatctcaatatctatattacctatatctatatgtatctatttctctatatacacatatacatatttccacaaggtgcaaagaccaatcaagttagacttaataccataaattcattaatttgcataattgcaaaagtagatatgccagccaaaacaatacaacaattttaaggtctaccgatataaaagtgtttcgtacaccctcttagccttcaataaagctatatgcaacaaagttcatttttgacccatgtgctaaattacttactaaagttggtaaataaatcatcttataaaacagctttactcatgcactstatgaaatcttcacctagaatacctatatttttttgttttaacaaacatatatttataggtatatatgtgtattttttcataaaatataatagttttgttaggttcctagctatcttatgtatcaattattgatgaat

SEQ ID NO: 351588 - DNA, 608 bp, Homo sapiens
gcttggttcaatatttggacttccaaaagggccccaaaatattaaaaagttgtcaaactgggtcttcacacaaaatataaagttagcttttatagagagtggagtgggggaggataattttccagccaacaagtagtcatgattaccatccactggttttattctattattggccaaatatagattaatgtactttctccactgttccaatgtataatgtatgaacrtgattactgggataatttagaaacaggatgcctttaatcttctgctcagtcaatcagttacaatacataggttataaaatgttctatgattttacactgaatccttaatagaactaattttggagttaaatgagattgggaaaagcgtaaagcccacagagctcacacttgtgtaacaaagacaatggaactttaaccatcgcatatttaattaaccaacccaaacaaacagagaccactctgaaagttgtaaagaaagagagaatacttcagggagcagaaagccagaaggaaagtggaattcaagggtttccagaatcaatatcctttgaaagttagtttcagacttataattagagacattatgcacaattaccttct

SEQ ID NO: 351589 - DNA, 608 bp, Homo sapiens
gcttggttcaatatttggacttccaaaagggccccaaaatattaaaaagttgtcaaactgggtcttcacacaaaatataaagttagcttttatagagagtggagtgggggaggataattttccagccaacaagtagtcatgattaccatccactggttttattctattattggccaaatatagattaatgtactttctccactgttccaatgtataatgtatgaacatgattactgggataatttagaaacaggatgcctttaatcttctgctcagtcaatcagttacaatacataggttataaaatgttctatgattttacactgaatccttaatagaactaattttggagttaaatgagattgggaaaagcgtaaagcccacagagctcacacttgtgtaacaaagacaatggaactttaaccatcgcatatttaattaaccaacccaaacaaacagagaccactctgaaagttgtaaagaaagagagaatacttcagggagcagaaagccagaaggaaagtggaattcaagggtttccagaatcaatatcctttgaaagtkagtttcagacttataattagagacattatgcacaattaccttct

SEQ ID NO: 351590 - DNA, 563 bp, Homo sapiens
gaattttacagacagaaatctgagtcacaatttagatggagtcattttcaagattcttcaactgagagttggtttgacttaagataattattttcattgacaacataacattaaatatatactrtgatatagaattaagacattattaaaccctgtattgtagaagacagaaagttgaagacaaaaatttacccagcaactgtccccacacttttcttgagggaatctgaataaaaacattaaaattgtatatcagtttaagtcataggtctgttaacattcttcagcttcttgtttcttttgatgtgaatttatgaagaattagattattcagaagatgccattttttaacttgcaacactaataaatatcagaatgacattttagaaattattgttctgcctcttcctcctagagtaatatccaagctctattgatatgtaacctaacctcactgaaggtaaagctttattcagtacttttgattcctgtaataactatcattgtgcattttagtaaaaaataaatgtcagacttgaaatatcagaaatacattttgctag

SEQ ID NO: 351591 - DNA, 609 bp, Homo sapiens
ttgcatgttcaaagtcagatagaacaaagactakggagacaggaagttggaaatgttgaaggtgagaggctaagtcagaaaatgtgtgtgtctagttaacattagattacttctctccagaacccaagcaggcccaggaatggtcaacccactttaaccttcagttcaaagaaaggtgagacaatcatggataaaaaggaatgccaaatgtgtactcttccacctgccagaatcagatacattcctcgatcaggtacactcctctatatttgtgtacacaacggtggtcactgaaaactagggaagaaaactttattagaggaggtgtaaaataccagactgccatcaggggtgattggtgaggctcattaaaacttggtgaaacttctaaaatctttgggttagcactttaccttcatcattcattctctcccaattattgctggggaaactataaaaccactgatggatttaatgattttttatccactatcaaccactgttcacacagctttaaaaatttaacaattcactcaaatttctactaagtctgtcattaggaaaacttccttttaatatttgtattctcttttacatttttacacacta

SEQ ID NO: 351592 - DNA, 609 bp, Homo sapiens
ttgcatgttcaaagtcagatagaacaaagactagggagacaggaagttggaaatgttgaaggtgagaggctaagtcagaaaatgtgtgtgtctagttaacattagattacttctctccagaacccaagcaggcccaggaatrgtcaacccactttaaccttcagttcaaagaaaggtgagacaatcatggataaaaaggaatgccaaatgtgtactcttccacctgccagaatcagatacattcctcgatcaggtacactcctctatatttgtgtacacaacggtggtcactgaaaactagggaagaaaactttattagaggaggtgtaaaataccagactgccatcaggggtgattggtgaggctcattaaaacttggtgaaacttctaaaatctttgggttagcactttaccttcatcattcattctctcccaattattgctggggaaactataaaaccactgatggatttaatgattttttatccactatcaaccactgttcacacagctttaaaaatttaacaattcactcaaatttctactaagtctgtcattaggaaaacttccttttaatatttgtattctcttttacatttttacacacta

SEQ ID NO: 351593 - DNA, 609 bp, Homo sapiens
ttgcatgttcaaagtcagatagaacaaagactagggagacaggaagttggaaatgttgaaggtgagaggctaagtcagaaaatgtgtgtgtctagttaacattagattacttctctccagaacccaagcaggcccaggaatggtcaacccactttaaccttcagttcaaagaaaggtgagacaatcatggataaaaaggaatgccaaatgtgtactcttccacctgccagaatcagatacattcctcgatcaggtacactcctctatatttgtgtacacaayggtggtcactgaaaactagggaagaaaactttattagaggaggtgtaaaataccagactgccatcaggggtgattggtgaggctcattaaaacttggtgaaacttctaaaatctttgggttagcactttaccttcatcattcattctctcccaattattgctggggaaactataaaaccactgatggatttaatgattttttatccactatcaaccactgttcacacagctttaaaaatttaacaattcactcaaatttctactaagtctgtcattaggaaaacttccttttaatatttgtattctcttttacatttttacacacta

SEQ ID NO: 351594 - DNA, 596 bp, Homo sapiens
aaaatttaacaattcactcaaatttctactaagtctgtcattaggaaaacttccttttaatatttgtattctcttttayatttttacacactaaatatcacagaaatatttaataaaccatgccctagctttatttaggattagaagaaatgagttccagtgaattgtactgtcagttatattgacacttacttccaagactactaacttctaaacttcatttcctaagaaacctctaagtgaacatgatacaatagttcataaaaatgtcaaagcttttttctttgactagctgatattgagacaaataaactaaggtctgctgtaataatatgtctacagtaaaaaaaagtgaatcattccattaaacacattctgacttttaataaagaatttgaaatgcagaaacctggaaattggacaatgtggatcctggttctgatgccaagcgaccttgggcaattgcttggccttggtttcagcatttacaaaataaaggctgttgaaagaaaagaaggagaagaggaagtaggaggtagaaaagggagggaaagtggcagatatacaagtaggtttgcaggaaagttggttagtca

SEQ ID NO: 351595 - DNA, 596 bp, Homo sapiens
aaaatttaacaattcactcaaatttctactaagtctgtcattaggaaaacttccttttaatatttgtattctcttttacatttttacacactaaatatcacagaaatatttaataaaccatgccctagctttatttaggattagaagaaatgagttccagtgaattgtaytgtcagttatattgacacttacttccaagactactaacttctaaacttcatttcctaagaaacctctaagtgaacatgatacaatagttcataaaaatgtcaaagcttttttctttgactagctgatattgagacaaataaactaaggtctgctgtaataatatgtctacagtaaaaaaaagtgaatcattccattaaacacattctgacttttaataaagaatttgaaatgcagaaacctggaaattggacaatgtggatcctggttctgatgccaagcgaccttgggcaattgcttggccttggtttcagcatttacaaaataaaggctgttgaaagaaaagaaggagaagaggaagtaggaggtagaaaagggagggaaagtggcagatatacaagtaggtttgcaggaaagttggttagtca

SEQ ID NO: 351596 - DNA, 596 bp, Homo sapiens
aaaatttaacaattcactcaaatttctactaagtctgtcattaggaaaacttccttttaatatttgtattctcttttacatttttacacactaaatatcacagaaatatttaataaaccatgccctagctttatttaggattagaagaaatgagttccagtgaattgtactgtcagttatattgacacttacttccaagactactaacttctaaacttcatttcctaagaaacctctaagtgaacatgatacaatagttcataaaaatgtcaaagcttttttctttgactagctgatattgagacaaataaactaaggtctgctgtaataatatgtctacagtaaaaaaaagtgaatcattccattaaacacattctgayttttaataaagaatttgaaatgcagaaacctggaaattggacaatgtggatcctggttctgatgccaagcgaccttgggcaattgcttggccttggtttcagcatttacaaaataaaggctgttgaaagaaaagaaggagaagaggaagtaggaggtagaaaagggagggaaagtggcagatatacaagtaggtttgcaggaaagttggttagtca

SEQ ID NO: 351597 - DNA, 568 bp, Homo sapiens
taacatatttttcttctactgaggctctgtttagtctttagaagtttttctttacctataatgaatatttcaaagactttctaaatggattgcccttctctcagcttctcacccgaaagaaaccatcatcgtcctttcaaagacagatcaaaagacttctctgtgaaatccttcctgatgttcccactatctgcacttctgtctcctcatagcacttggttctaggctccagggtagcctctgaagagtgctccttgttattacgcattattgtagttaatttagtctatttttagcttattcagagaaaacaccaagtcttattaatttctgtgtccaggatatatggaagggtaactagtaygaagtgagtgcactgttagtatttacttaaagaatgaagagaagatgaaaaatggtaccatgcagttagaaaaaaaaaaaaaacagataaagttaacaagatctgggggaaagtgtgttataggaaaagtgtaatgctttgttttttttttcattttcttaagaacacttctaaaatattaaaaacaatttttaccataatttt

SEQ ID NO: 351598 - DNA, 560 bp, Homo sapiens
acaaatacacacatgtgagcattcatgcatgtttttaacaagaccagggcagcactatatgtatcacagcttgtagcttgttttcctcactgagaaatttctgctgaacatgcatatttttttaatgattacataaaatttttacacagaccataattgttttaatatccacagaatattaccaacaattattacttaataataattgagcacttgactatttctaactttttactgttgtacaaatgtaccaaaagtctgttcaaccatcttgaccacctgtacttttttccttactaaatagtcctagaagtataattactgcataacagtatgtctatcttaaaacttttgaaatctcttgtcaaattataacwgcaaaaaggtatatatttaactgcacattttatgtgtccaataaaacttagcattctttttaatttttgttgatctagtagaaagagtaccttattgtctgatcactaaatgtgatccaattcaatttttgttgaaatttgttgaattttgtaattcaaattttattgaaaaacacatgtaga

SEQ ID NO: 351599 - DNA, 560 bp, Homo sapiens
acaaatacacacatgtgagcattcatgcatgtttttaacaagaccagggcagcactatatgtatcacagcttgtagcttgttttcctcactgagaaatttctgctgaacatgcatatttttttaatgattacataaaatttttacacagaccataattgttttaatatccacagaatattaccaacaattattacttaataataattgagcacttgactatttctaactttttactgttgtacaaatgtaccaaaagtctgttcaaccatcttgaccacctgtacttttttccttactaaatagtcctagaagtataattactgcataacagtatgtctatcttaaaacttttgaaatctcttgtcaaattataacascaaaaaggtatatatttaactgcacattttatgtgtccaataaaacttagcattctttttaatttttgttgatctagtagaaagagtaccttattgtctgatcactaaatgtgatccaattcaatttttgttgaaatttgttgaattttgtaattcaaattttattgaaaaacacatgtaga

SEQ ID NO: 351600 - DNA, 553 bp, Homo sapiens
gtcttcttaagctttctagaggacctctgktgtgattaagagaggctccaactcataatcttaaactgtttcaagaggtttttatctgactgaatatttttatcttttaaccttcctgaggttttagtaaaaaatcatagagactcagctttcctctatgccacactttcaacagctatgttttgcttttagaaccttttgccatcttgagaagctaagaatttaaaatatcatcagatgctgttttatttttgtttaacgtatcctcaatttatctctctcttttctcatgtttattgtaagcaaccaaaagaaactaggcaacaccttcacaactattctcagaaatccccttagctatatgatgtagtttagatgtgtatccacacccaaatgttgaaatgtaatccataatgttagaaaaggagcatggtgggaacttattggatcatggggatggattttacatgaatggtttagcaccatcctcttggtgctgtccttgtgatagtgactgagttctcacaccatctagttgcttaaaagtgtgtgc

SEQ ID NO: 351601 - DNA, 588 bp, Homo sapiens
aaatagaagttgaatttgattatctcagaatttgcatgatttactgaccttatatgacctgtgcgaaacaaagtttaaaaaaatatataccctactatcatattaggttaactagacttttaaagttctgtctcttggtttctaacaaatttggttcacattcattaccccattagtttaatattttatttagaggaatatatgcactaagaaagaattttaagtttctaagatacatacataacctctgaatgagtatatatttatttgtgcaataataactgataaagtaagaaggacagttggatatgtaagatcaaagtacctaaaacacaatccttatttgtatttttaacagtaaaattactttaaatgggcacaaaattaattatccatcatttcactattagttgaagagttgagaggttggaaatggaatatctgcttatacaaatgaatttggaaagaaaggatgatgaagtttattgggataataaggacmggagagctcgtgggtgaattctgtcactattttctctatctgtcacttccattaaatgtgagctgcataagtattttcctacatat

SEQ ID NO: 351602 - DNA, 572 bp, Homo sapiens
attctttctggcttttaatccagccatagcctgagctaaaagagtagccttatgtaagttacctccagtgccattgcaagccttaatatattcagctaaatgagacttccctctcaggggtctaatagcagtttgacactctgcattagcattatcatatgtgagaagctgtattacaacatcttgagctgttttatcagttatggctttatacacaacctcttggagccaagcaataaaatcaatatatgattctttaggtccctgatggacagaactgaaggaagartatttttcccctgtaacatttatcctttcccatgcccataagcatacagagcacagctgagcaatgacaacatcctccattactgcttgatattctagtcaaccccaatcaggtccgactcccattaactgttcaaagtaaacaggcacaggtggttgtgcttgttattttcccttgcctgagtttgagcttcatcagcccaccaggttttaaactgcaactactgagatggagtgagaacagattttgttaaagtatcccaatcatatgatattaatctatt

SEQ ID NO: 351603 - DNA, 564 bp, Homo sapiens
aactcgtcatttacgttaggtatatctcctaatgctatccctcccccctccccaacctcatgagaggccccggtgtgtgatgttccccttcctgtgtccaagtgttctcattgttcaattcccacctaggagtgagaacacgcggtktttggttttctgtccttgctatagtatgctcagtatgatggtttccagctgcatccatgtccctgttagggactgtcatcttttgaggcaacttcctggtgggtgtgagttctgtagaacacatcctttgttctaaaaattgattgttatctctcaaagcaacctcctggtgggtaggcatttcatgttggaggcatagacagatgaacttgccctgtggggagtgcctggggaagggaaagtaaatattatattcgcatgtctaaagggttaagtagaaagatttagccctttagaacagggagaatggagaaagaaaatactgaaaaaaaagtaacacattttctatttcatagaaaaatggggttactaaagtagttttcttgtttgtttctgacaaacgatggagaagtattg

SEQ ID NO: 351604 - DNA, 584 bp, Homo sapiens
agggagaatggagaaagaaaatactgaaaaaaaagtaacacattttctatttcatagaaaaatggggttactaaagtagttttcttgtttgtttctgacaaacgatggagaagtattgtgctagcaaatggaacagggtttgtcaacctcagcacttttaaaattttggagcaggtaagtctttattgtgggggtctgtcctttgtatagtaagacatttatcagcctcactgaccttaacacactagatgcactagtactgggctcaaagttagaaaaaaaaatcaacctccaaaaatttccaaatatctcttggatattgtgggggtggggtgggaaagaagcaaaataattcccagttgagaaacgctgctctagaaagatgaccactcttaagaataaggaagatamgattaacacttattataagactggctataattaatttttggatatacaaaggaaataggaatctgtgggattttataggaatctgtgtgactcatggacaagtttcaaaaacaggcaggttttgaacttgatcacaataaacaaaacatatatacatattatatgtatatata

SEQ ID NO: 351605 - DNA, 606 bp, Homo sapiens
ttagatttttgttgttgttgttgttttgttttacagggattgtggattggctagtttaaagaaagcgtgtgcaaggaaaggagcttatttacataactcaggtgttgatcattaggtttgactgtggtcagcagctgtgggatatgttgagttttgcttcagtgagatgagggacaagggtaatatatcacaaacaagcacacaaggaggagaagttttaactagaccaaacatggtgaggtgaaactgcatcccaaaaaacttatgtcaggcctataatggatgccaaggcagcaactatattaaacacatttatgaaaattagagtcatyaattctcaataaggacagcattattttgaattgtctcctgtttgctttctacgctaagggacagtgcaccataataaaatatgagaatggtaagagataagagtgttatctgtcttttgcaaagtggaggaaagacaattgtgaaatgggatatatagaaagagaaattttctcttcatgagaggtgcattctcagggagctcaacatcagaaaacagaatattttgaagatgtgattctctaaactgataaatttaaaagtatctgtgaatgc

SEQ ID NO: 351606 - DNA, 393 bp, Homo sapiens
taaaacctcccccaaaacaactttctattttaatccactgactttacttgtagcttgataattaatctgatttaataaatgcataaaatatttataaaatattcaaaatatgtaacatgtatgcaatatttataatatacaactatattcaattgtagctgaaaataatattatataatataattttatayacaaagggtcagggaagctaattttttgccatatacagaactaggctttttatttatcatgatgatgatgaggaggatggtgatgatgatgattttagagacagagactcactttgtcacccaggctggagttcagtagtgtgatcatagctcactgcacccttgaactcttgagctcaagcaattcgcttacttcagcctc

SEQ ID NO: 351607 - DNA, 393 bp, Homo sapiens
taaaacctcccccaaaacaactttctattttaatccactgactttacttgtagcttgataattaatctgatttaataaatgcataaaatatttataaaatattcaaaatatgtaacatgtatgcaatatttataatatacaactatattcaattgtagctgaaaataatattatataatataattttatatacaaagggtcagggaagctaattttttgccatatacagaactaggctttttatttatcatgatgatgakgaggaggatggtgatgatgatgattttagagacagagactcactttgtcacccaggctggagttcagtagtgtgatcatagctcactgcacccttgaactcttgagctcaagcaattcgcttacttcagcctc

SEQ ID NO: 351608 - DNA, 642 bp, Homo sapiens
atatttttccctttttgtaaagcaaaaatagaaatccatgcatacctgcttacttataattgacatcccccatctccacccaataaaggcaggctggaaaagaatataagacttctaaaacctgcgggattttgttttgtttcttttctactaccatattatgtatcaagatagtttaacactcatgttagaaggcagtgtcccagtagtcccataaagtctgagacttttatatttaagagggtaatagtagctcccttgctactataaagtgatgttcataygaagagtattgtcgcagacctgtacagcagattatttacttttaatcacctccaaagaaacgttaattagtgttttcaaattaccaagactaccacagaagtgtaccgaggttttcggagctaccttaatggcttctatgcaggaaagaaagaggtttccctcccttcttccttctctcatcttaattttaatcatatttattctgctttttttccttgtttgtatataatgctaggtgatgttaaaacattatttatgacacttgttagagaatggtaaggcagattatacctagaaagactatcatagtaggtatggttactaccacaataggattttgcagtaaaggagagagat

SEQ ID NO: 351609 - DNA, 515 bp, Homo sapiens
ttgacaacactgtgaatgtgtttaatgccactgaattatttgattgttattgttttaatgttttatatatgtaaatatagttacatgcaaagttatatgtgtatatggttatacattattatacatactgttgtattttatcatyattatggctttaaaactgccttaattgctataaatactatggaatcaaggagaacagaccaccatggttttatttaagtaaggtttctgaagatcatagggctgttaacattggattgagagaagggagattaaaagttcaagagataaaatatagtagttgaacaatgaagttggaaggcatcaaaggcaaatgtcatcatgtaacaattacttttattttcaaagacactgattataactttaaacagagattgtccaacaagaagacttaacaatcctaaatatatacgcaaccaacactggagcactcggattaataaaacaagttcttagaaacttacaaatatgcttagatatttacacaataa

SEQ ID NO: 351610 - DNA, 571 bp, Homo sapiens
taaaactaccaaggcagtatttctatgagtctgtaaaaaacacaatgtttctgggcttggggtgatccctaatgcacatatggctacagtgaccgaaaatytagatgacaacacccaaatcccttcaaatacatgaacagccttcccaagaagaatgggtgcaaacaagcctagactgtgaagactataataaatacctaactctttaatgcccagagactgttgaacaccataagcatcaagaccatccagaaaaatatgacctcacaaaaaatactgaaaaaagcaccagggaccaatcttgatagcagtgtgaaaatggacaaatacgatattgtaggtgtacttcatttttcttattattttttatcttatctcttatgactgtttattttcaaatagcctgtctttgagctaattctttcttctgcttgatcaatcctgctattaaaagactctgatgtattcttcagtatgtcaaatgaattttcaggtgcagaatttttgctggactcttgaattttgaatatctttggtaaatttatctgatagtatttctaattccttctct

SEQ ID NO: 351611 - DNA, 488 bp, Homo sapiens
tcttcacagggtagggccccagatttggtcccacagcacagtcacaccaccccggctaaacattcccattggaagtggctctgtctctctggggtggtgttcttagagacaactgacagcccctctgccactaccaatgcagtggtactatccttactgcccttgggctagggaagaaacagagagcctgagtgcttggacctccagcacattgcagtcacyctacaaaaaaaaaggttagactgttttccccataagctcctcaaatctcctactcttcaccacacagggcttcctatcttgggctcacaacacagtcttcccaccctaggctgatcaatccaacttgccaaggctctgtgtttctctggagtggagccctaagacactagtgaaaggtgctttgccattgccactgccaatgtctccaactttgctttctctaagctgaggagtaagcaaaaagtctaagcttgccccaggcctgc

SEQ ID NO: 351612 - DNA, 488 bp, Homo sapiens
tcttcacagggtagggccccagatttggtcccacagcacagtcacaccaccccggctaaacattcccattggaagtggctctgtctctctggggtggtgttcttagagacaactgacagcccctctgccactaccaatgcagtggtactatccttactgcccttgggctagggaagaaacagagagcctgagtgcttggacctccagcacattgcagtcaccctacaaaaaaaaaggttagactgttttcyccataagctcctcaaatctcctactcttcaccacacagggcttcctatcttgggctcacaacacagtcttcccaccctaggctgatcaatccaacttgccaaggctctgtgtttctctggagtggagccctaagacactagtgaaaggtgctttgccattgccactgccaatgtctccaactttgctttctctaagctgaggagtaagcaaaaagtctaagcttgccccaggcctgc

SEQ ID NO: 351613 - DNA, 488 bp, Homo sapiens
tcttcacagggtagggccccagatttggtcccacagcacagtcacaccaccccggctaaacattcccattggaagtggctctgtctctctggggtggtgttcttagagacaactgacagcccctctgccactaccaatgcagtggtactatccttactgcccttgggctagggaagaaacagagagcctgagtgcttggacctccagcacattgcagtcaccctacaaaaaaaaaggttagactgttttccccataagcycctcaaatctcctactcttcaccacacagggcttcctatcttgggctcacaacacagtcttcccaccctaggctgatcaatccaacttgccaaggctctgtgtttctctggagtggagccctaagacactagtgaaaggtgctttgccattgccactgccaatgtctccaactttgctttctctaagctgaggagtaagcaaaaagtctaagcttgccccaggcctgc

SEQ ID NO: 351614 - DNA, 598 bp, Homo sapiens
cctaacatacgtctacagaacattccagccaacaacaacggaatgtacattacttttatctgcacatggcacatactttaaaattggtcaaaccctcaaccataaagcagatctcaagaaaattttttaaaaaatcataccacccacactctcagaccatagcacagtaaaaatagaaatcaaaaccaagatctctcaaaaccatacaatcacatggaagttaaacaatctgctcttaaatgacttttggataaacaatgaaattaagrcagaaaacaagaaattctttgaaactaatggaaacgaaaataaagcatagcagaatctctgggacacagctaatgtagtgttaagagaaaatttgatagttttgaacacccacatcaaaaactttgaaagatctcaaattattaaactaacattacacctaaaggacctagaaaaacaaaagcaaaccaaccctatagctagcagaagaaaataaataaccaaaataaggcctgaactaactgaaatagagatgagagaagccatacaaaagatcagcaaaaccaaaagttggttctttgaaaaaaatgaataagatagatatggtgct

SEQ ID NO: 351615 - DNA, 536 bp, Homo sapiens
atgcagaagattagagctggattcctaccatttaccatatacaaaaatcagatcaagatgtattaaagacttaaatataaacccaaaaccataaaaaccctggaagacaagccaggtaataccattttggacataggaatgggcacagatttcatgatgaagacaccaaaagcaattgcagcaaaaacaaacattgacaagtgagacttaattaaaccaagagcttctgtacaacagaagaaactatcaacagagcaaacagacaacctatagaatgtgagaaaatatttgcaaactatacatctgagaaaggtctaatatccaaaatctataagaaacttaaacaaattgagccaaaatcaaacaaccccattaatgcttagctctcacctacaagtgagaacatgtggtattaggttctgttcctgtgttaattcacttagcataatagctgccatccatgttgctkcaaaggacatgatttcattcattcttatggctgcatagtattccgtgtagtttcctgacattttaat

SEQ ID NO: 351616 - DNA, 609 bp, Homo sapiens
cacaactatcattatctgacatctgaaagtataaatgtagagcaataatagtttatattgaaattaatataagtaaagatggataacaattactgctaaaaatgtatatagaacatagtatgtttgagtgagcctaaggaagaaaacatagcttttggaagtatgattggataaggcttaacagcataaattatggtctcaaacacatttgaatttgtatctggtaaataatagtaacattagggcaatacaattatgtaagatattaaaattaatgtaaatttcttttgtttttctctgagtgagatagaaaaccactggagaatcttgagcatagaaatgacatgatttgacctatatttttagaagaccatyctggctgcagtgtcaagaatagacttgaagcagggggcaaaagcagaaatagaccatttggaagatcaaattatttgggagatcaccaaactggggtatgaataagaaaaatcaagaataatgccaggattttagcctgagcaagtaggtagttggtggtacagtattagtgatacacagaagaatgaagaagaaataattttggagagaaacagcataagtttggttgataca

SEQ ID NO: 351617 - DNA, 609 bp, Homo sapiens
cacaactatcattatctgacatctgaaagtataaatgtagagcaataatagtttatattgaaattaatataagtaaagatggataacaattactgctaaaaatgtatatagaacatagtatgtttgagtgagcctaaggaagaaaacatagcttttggaagtatgattggataaggcttaacagcataaattatggtctcaaacacatttgaatttgtatctggtaaataatagtaacattagggcaatacaattatgtaagatattaaaattaatgtaaatttcttttgtttttctctgagtgagatagaaaaccactggagaatcttgagcatagaaatgacatgatttgacctatatttttagaagaccattctggctgcagtgtcaagaatagacttgaagcagggggcaaaagcagaaatagaccatttggaagatcaaattatttgggagatcaccaaactggggtatgaataagraaaatcaagaataatgccaggattttagcctgagcaagtaggtagttggtggtacagtattagtgatacacagaagaatgaagaagaaataattttggagagaaacagcataagtttggttgataca

SEQ ID NO: 351618 - DNA, 504 bp, Homo sapiens
atctttcttgaggtcaacttattagtaaacttcattacatctgcaaaattcatttttccacatcatataagagaatcacaagactgacatcaggggacctagataattctgcctaccacagtatggattctggtttccatgatatagttccctcccacatgcaaaatacatttgctccatactaagtgtctcaaccttttttcccagtatgagctccaattcaaaatttcatcatctgcatccaagtgctagtagttcattagctcaagttgaaaaatttcacctagattatcttagctcaaagttcaaaatcttattatgtaatttatgtgctcaggtggaaataaggctcctgggcatgaaaatcttctccataygaggaccaacaaaggaaatgagacaagttgtttttcctcactactcccaacatacaatggtggaacaagcataggaaaatagctttagacattgattcaaaaagtgggggaaaaaaaggtaaaaagg

SEQ ID NO: 351619 - DNA, 605 bp, Homo sapiens
gttgtgggacttaagacatcttgtcctgccccaaggtgggaatgattaaatggctaaaaagaggcagatactatttttgtgataaatatgggtttcatgtctcatagcaagtwattttagcctggagtttgttgtcatacagacactatattctgtctgcctttcattcccttttctctacttccttgtttctctggcagttaggcaccttataatctattgtctgatgcatgtccagctagtgacttcagttcttccaggcttattttacaataggcttgatctttattcagtggtgctacaatgacctgaggatgtcatctgtgattatttgcatgctttcttacatgaggatagtaatttgcatgtaattactttatctttattcatgaatttttatcctttattgctcataaattgaagaagcattttgctggatgttaaatagtcaaaaattgtgatacctctgtgtggaacattttcctcttaaaacaagaataaagagaggctttaatagtctgtcttgttttccactgatgataagagatgaattgcaggaaccacttccactctgatgagaccattcacaacacacagcagcagcc

SEQ ID NO: 351620 - DNA, 451 bp, Homo sapiens
tggcgtgtgcctataatcccagctactcaggaggctgaagcaggagaatcgcttgagcctgagaggcagaggttgcagcaagctgagctcatgccactgcactcccatctgggcgacggagtgataccctgtctcaaaaaaaaaaaaaaaaaaaaaaaaaacccgagaaagagaaaaagacwttttcacagtattagttgtaaattttaacacccccttaaactgataaaactagacaacagaagtacacaaaaaaatttgcaagcacatagaataaatgaaggttattaaccactttgactcatttgatattttaaagacactatacataataactgcagaatacacattcttttcaagtacatctataatcaccaagatagatgatatgctgggccataaaaaaaaattcaataaattgcccaggtgcagtggctcatgcctataatcc

SEQ ID NO: 351621 - DNA, 592 bp, Homo sapiens
atccacaatgcctcctacaatacaatctagggtaaagtatgatccattaaaaacacaagtgcactagtaagaaaaagaaagrgagggaattaatacttattgaacacctaccttttaataagcactctattagttacttaacagatgcatcacctttaatctttacaataatggtatggaggaaggttagtagcatttaggtaagctactctaggcccatagcaagtacatgacagccaggatttgaggccagttctgtctgattacaatgccttagcaaagcttttctattctattatttccctgaattgaaaaattccagagtcatactagtaaaaagtaaaaacaaacaaatacttagatttgtagaagtactgattgttaatccagtttacaatagcagtagccatttctacagccactgaatatgtatcttcagtcttttaaagaaaccattgttaatcatttgagaattttataaccaagaaaattttattttttctcactcaaatcaagtgaagaatatgaagattaaacatccctaaattcaactccatgccattaaaagcagtttataaccaaaatatacaaa

SEQ ID NO: 351622 - DNA, 592 bp, Homo sapiens
atccacaatgcctcctacaatacaatctagggtaaagtatgatccattaaaaacacaagtgcactagtaagaaaaagaaaggragggaattaatacttattgaacacctaccttttaataagcactctattagttacttaacagatgcatcacctttaatctttacaataatggtatggaggaaggttagtagcatttaggtaagctactctaggcccatagcaagtacatgacagccaggatttgaggccagttctgtctgattacaatgccttagcaaagcttttctattctattatttccctgaattgaaaaattccagagtcatactagtaaaaagtaaaaacaaacaaatacttagatttgtagaagtactgattgttaatccagtttacaatagcagtagccatttctacagccactgaatatgtatcttcagtcttttaaagaaaccattgttaatcatttgagaattttataaccaagaaaattttattttttctcactcaaatcaagtgaagaatatgaagattaaacatccctaaattcaactccatgccattaaaagcagtttataaccaaaatatacaaa

SEQ ID NO: 351623 - DNA, 593 bp, Homo sapiens
aatgcctctcagtcaggctttctactcaccaggcctatggagataaactcaagctgatgtcctgccattgtttggtatctttgtactccttgtggacaggggtagaagagcttagagtcagtgacagttaacttccttcttctacagcaaaactatgagcattatatttatagaaatctctggttggcaaaatgcttaatgttttttcctcagaaaataataatacagtttttcaattattcagccagtggaaaggacacagtctgcctattcaaaattttcattttccctccagtgactaagtttttagtctaatctttgttaattattactgattactacttatatctgtttgtttgtttgtttgtttgtttgtttgagtcagagtctcactctgttccccaggctggaggctggagtacagtggtttgatcatggttcactacagcctcgacctcctgggttcaagcaatcctctctcctcagcttcccaagtagctgggaccacaggcatgtgctaccacacccagctawtttttatatttttttgtaaagaaatggggttagataaggggtttcgccattgtgcccag

SEQ ID NO: 351624 - DNA, 529 bp, Homo sapiens
aagtcattcacaagagactaaccatttatatgtcctacatcaagagggtgtcgtggcatttacctgcctgaagttgagagagaagcatacttttggtaactggatagtaacctcacaagcataaaataaaactacttgttaggtcagcaatatgcatcagactcaggccaggaaagtctattatctgcagagttttttctttttctctttcttccattatttacrgcgtgaacttcttgtgctgccatccattgaattttcataaacagaactgaactatgctgttattccatcaaggactggtgtggatgatctgaaaaatgcaagtggttgatgcatgtgtagaatggagggtatatgttctcagggaaaatgaaactgtctgctgtcagttcattcctaagtactcgtgataattaaatagcgttttgtgaccatttcagttttagccaacgttttccactcttcaacttagatttgcacattctttctacttaaatatgttcctgagccccagttgtttggtgtc

SEQ ID NO: 351625 - DNA, 591 bp, Homo sapiens
tacatcttggaaaatcactgatgcctgaaatgtagcttaaaagtggaaaaataaagaggtaaatgaagtagaccacagtaaggtagtactccagggccaaactgtgactttgaggagatcaaagtgtcttctagcctcctgccaaacatcagtgcttgcgtccaccttatttttggacttttcaactgaaatgtctgagagctatcttaagtttgaaattttctactgtcgaagaaaaaaatgtgaaggccaggatttggggtttattcttcttttgtcttgtatttrcattcatggtattactcagaccccaagattatagctcatccattaaaaatgaataatttagtgataaaaaatttttatattttcttttgtttttgtttttttttgaatcattttgtaatcagtcatatttgaacactgatgtgaaagaagaaacttttgttccccataacttcaacctaggtgagaaaaacactgtgctttttcccataccattttattaaatttatgagatccttttcatttctgcttttattctttgttttttttgttgttgttgttgtcttcacttatacaattgtccat

SEQ ID NO: 351626 - DNA, 623 bp, Homo sapiens
aataacattggagggattttatgtttatattattttgtgatttttaaagatggaattcctgaaagaaccatcatcctgacaaaccctcatgtgagtccctttcatttcaggctgcaagccgttttccttcagagcctgacacctctgttgatgccatcccttagacttatgtctgtgttcttcatgatctctttcctccaaaaggaatatttcatttctggtgactgccctaaatacattttaaatgtaaagcatttccacttaaaaaaaaaagatggacttggctaaatttttatgaagacattataaaacaggattttgaattygattaaatatttgtatttattattatcataattcttgctgtaaactcataaagtaaagcttgaaatgtggtggaaactagatgcaggtcacttcatattaatttgtgctgtggtaacatgtgtacaaaactaagcaacttagacagcccttgccttagagaagctaaacaaaggatattgaaaaaccaagagagacagctgggtgacagcacaaactaaagcattatgtacagactttgaccagacatgaacttaagcctggatcagattctatctataaaactttaggttgaaaat

SEQ ID NO: 351627 - DNA, 591 bp, Homo sapiens
agattgcattttataccttgtccaaatgtaagaccattgtggaattctcaaacctacttccttattctgtattggcagattattacatttttctcctctcagaaatggaaatcaagaagacataccgataagttgtcayatggtatagaaaaatgttttaatgtaaaacaaaaagtgaattttggggccgggcatggtggctcatgcctgtaatcccagcactttgggaagctgtggcagatggatcacctgaggttgggagttcaagaccagcctgatcaacatggagaaaccctgtctctactaaaaatacaaaattagctgggcgtggtagggcatgcctgtagtcccagctactcgggaggctgaggcaggataattgcttgaagccgggaggcggaggttgcagtgagccaagattgtgccattgtactccagcctgggcaacagaagaaaaactctatctcaaaaaaaaaaaagtgaatttttgggggactagtcaacacatcctggctagaaaatagttataagttttcattgtatcacttttcttaagaacgataaagaaggtattccagtagtaattagatt

SEQ ID NO: 351628 - DNA, 591 bp, Homo sapiens
agattgcattttataccttgtccaaatgtaagaccattgtggaattctcaaacctacttccttattctgtattggcagattattacatttttctcctctcagaaatggaaatcaagaagacataccgataagttgtcacatggtatagaaaaatgttttaatgtaaaacaaaaagtgaattttggggccgggcatggtggctcatgcctgtaatcccagcactttgggaagctgtggcagatggatcacctgaggttgggagttcaagaccagcctgatcaacatggagaaaccctgtctctactaaaaatacaaaattagctgggcgtggtagggcatgcctgtagtcccagctactcgggaggctgaggcaggataattgcttgaagccgggaggcggaggttgcagtgagccaagattgtgccattgtactccakcctgggcaacagaagaaaaactctatctcaaaaaaaaaaaagtgaatttttgggggactagtcaacacatcctggctagaaaatagttataagttttcattgtatcacttttcttaagaacgataaagaaggtattccagtagtaattagatt

SEQ ID NO: 351629 - DNA, 607 bp, Homo sapiens
ttacatttatattcttttaaaaaaatggagagatggcatctcactatgttgcccaagctgttgaactcttggtctcaagtgatccccctgcctcagcctctcaaagtgctgggattacagatttgagccacagcacctagcctaaatttatacttattaaaatcacaagtaaggaaactgaaggagaggaagcccaagaaagaaacttgcaaacagcatygagatagaaagcttagattcttctagacttgaacagaattacatcagatcttctaaagaaaaaaaataaagtctaacttaggcacatgtgttataggcaaatgaataaatagcttcaccttatagtgggacagagcttaatgattcatttcttaggcaacagcaggatattttcctgttggaattttaaaagcctattctttgtggtgaatgatgtatttatttttttcattcctcccatattattccagttcactgcacatgcttctaaaattcttttcataggactgaatttcattcttttggcgaatccctctgagaatcagaaaaagaaatgaatgtctgtagatctggtttcagatcatctttttgtctcatcactaatgta

SEQ ID NO: 351630 - DNA, 559 bp, Homo sapiens
ggcactgcagtcaaaaggacgaagtttcctttataaagcattgatgctgctaacctcaactgcaaactcttccttcccacattctttttgggctgtgacttatccagggtattaacttctcatttctagttccctgctttgggctcatatccagcttcatttatttgctagctgtgtcatctacttcacctctctaagcttaagatgccctgtccataaatgaggttataatgccaaatgcagataaaggggcagtgctatggtctgaatgtgtctgtaaaattcatgtgatgcaaacttaatccccaatgcaatagtgggaaggggggccttttgagaggtgtctatgtcatgaggactctgtcctcatgaattaatttatgttgttattagaaagggcttgctggagtaagttcactctctctagtccttccaccttccgccatttcargatgtagcaagaaggcgtacactagatgcctgtgccttcatcttggacttcccagacagaactgtgtgaaataaatttctgttgtttataaattacccagccaatggt

SEQ ID NO: 351631 - DNA, 648 bp, Homo sapiens
tagacaaatacattaattacaagaaaaaaactacagatcaatgtttctctgaatatggatgtaaaaatcctcaagaaaatattagtgcccaaaaaagaatttttaaaaattatatatgatgaccaagtgtaatttatcctaagtatgcaagattgtatcaactttcaagaatcaataaatgtaattcattacatcaactagtcttaaaaagaaaaatcacacatttatatcaatagacgcagaaaaaaacatttgacaaaattctacatggattcatgayttaaaaagaaacctcagtaacctaggaataaagataattttctcagcttgataaataatgtttacaaaaaacatgcgggtaacataatacttaatgatgataaactcaatggtttttcactaaggtcaggaacgaggcaaggatgtcccctcttagaggcactgctttccaacattgctctggaagtcctagataatataataagacaagaaaaaaaacgtaaaaggtgtagagattgagaaggaagaaacaaaataatctttatttgcagatgatatgattatgtagaaaatcgtgatgcattgacaaaaatactgttggaactaataagccataatagtaagattgcaggatacaagattaatatg

SEQ ID NO: 351632 - DNA, 579 bp, Homo sapiens
cttcactcacctctgccccatgtcttctggttaccagctgtcttctcagagacaattccttttttttttttttttgacacggagtctcgctcagttgcccaggctggagtacagtggcgcgatctcggctcactgcaagctccgcctcccgggttcatgtcattctcctgcctcagcctcccgagtagctgggactacaggcgcccgccactgcgcccggctaatttttttttgtatttttagtagagacggggtttcaccgtggtagccaggatggtctcgatctcctgaacttgtgatccscccgcctcagtctcccaaagtgctgggattacaggcgtgagccactgcgcctggccaacaattcctacttcttgtatagtcttctaggtggagtctatgcatagacaaagatatatatatatatatatatatatacatacacacacacacacacacacacacacacgcatacgcacacacatatatttgtttacagaaatgatagtacatttaacgcagtgttttgcaccatcctcttttcacttagaactatgtcttggagattattccatataa

SEQ ID NO: 351633 - DNA, 619 bp, Homo sapiens
actgccaggtgaggatagaagcacaggttccacaattacatgcattgacacctgagggtaggaagattcctcattgctgcaggaaaaggatggagttgtagctctccagtaggcctccactgaacatcgccttgtctggaagggataggagtgccttttaactgcttcccacagagcctctgcttacaccagaatggaggggtcttattagcactggcgttgatggcaatcctgattctctatttaacttcctctgatatcactccagtcaggagtgggtggaggtcaccttatgatggatagaaattctacatccacaagtagtcaccactgacatcaaggggagggagatggcttattatctacccaataaggatgaaagtcctggctttctaattggccttctctgacaccacaagggaggaattaggtgcctagaaaawgtggaagtctactttccccacccttactggtaagtgtggagccacagttcttttctgtggtagatggctagaataaagcatttaccgtataaaagatttttgtcttgctaggttgttcctttcctggtactttggctagaaaaaatggccttttatgggtctcttattttctgtat

SEQ ID NO: 351634 - DNA, 510 bp, Homo sapiens
agcaatgtaagaaattcctgaaaaatattcagtgatcacctgtgaaatgtggatggtgatactagtccttgaatacatgtagaaagtaacaagcataatatcaatttccttgcaggatgaagctatctcacatatgataaacctttcatttcacaggcatcattctctgttttctggtgcaaggaaaatcaaaggtcctctcattagtttattaaacttcaattcagttcctasagatttaatgggggggccaatgtctaaatgctagataagctactcattttataaagtgttttcctacaatatattattacatccctcccctgcttttttttgttgttgttgttcaaaacaaggcaatagattaacctctcctccttccttctctgacatccaacttgatcttattctatatgcattaactgaaagctgtttttattattgagaaatcctatggcaacgtgatataggtgttgcagattacatgtcaattgtgaatactatgtagta

SEQ ID NO: 351635 - DNA, 520 bp, Homo sapiens
ctcatcagaataacttttttttgtgcattttccttgctttgattatctacccttcatcattttttaaaaagttatttctgaaagagctaaggtctcttagaattaggttaccttttgctatatctattttaaaatattcttttgacattatgattaataggtagccaggctacacccatttatttttyttagtcacccatgtttctctcttaatcaagtgtctaatctcctctgataattcttttgatttagtcctccttaaaaagagattgtacattcaaagagattaatatcaagatatcttttatacataaataatgtttggggtattccaaaagtctctggataactatagaggtccttctttcaccttattaagggagaaatactagtaataattaggttgtttgatatacttgatatttcttaattagttcttattggatgtacttggtatttcttaattagttctaccctattgtaagagctgcataggaagagctgtgaaatcaagagacac

SEQ ID NO: 351636 - DNA, 529 bp, Homo sapiens
tgaaaggatggttcaacttaagcaaatccataaacatgatacatcacattaatggaatgaaggacaaaaaccatatgatttccattgatgcagaaaaaacatttgacaaaattcaacattccttcayttaaaaaaattctcaaaaaattagatatgaaaggaatgtaccacaacacaataaacaccatacatgaaaaatttacatctgctattatactaaaagggggaagttgaaatgtttttctctaaggttagaaacaagaaaaggactcccgacctgcctcttctatccaacataatactggaaattctagccagagcaattaggccagaaaaagagataaaagacatccaaattgaaaaggaagaagttaaattatctgttcttgtagaaggtgtaattttatatgtagaaagccctaaagactccaccaaaacactattaaaactaataaacaaattcagtaaaattgcacgatacaaaatcaacatgcaaaaacaattaacatttttatgcatgaaagcaaac

SEQ ID NO: 351637 - DNA, 529 bp, Homo sapiens
tgaaaggatggttcaacttaagcaaatccataaacatgatacatcacattaatggaatgaaggacaaaaaccatatgatttccattgatgcagaaaaaacatttgacaaaattcaacattccttcacttaaaaaaattctcaaaaaattagatatgaaaggaatgtaccacaacacaataaacaccatacatgaaaaatttacatctgctattatactaaaagggggaagttgaaatgtttttctctaaggttagaaacaagaaaaggactcccgacctgcytcttctatccaacataatactggaaattctagccagagcaattaggccagaaaaagagataaaagacatccaaattgaaaaggaagaagttaaattatctgttcttgtagaaggtgtaattttatatgtagaaagccctaaagactccaccaaaacactattaaaactaataaacaaattcagtaaaattgcacgatacaaaatcaacatgcaaaaacaattaacatttttatgcatgaaagcaaac

SEQ ID NO: 351638 - DNA, 529 bp, Homo sapiens
tgaaaggatggttcaacttaagcaaatccataaacatgatacatcacattaatggaatgaaggacaaaaaccatatgatttccattgatgcagaaaaaacatttgacaaaattcaacattccttcacttaaaaaaattctcaaaaaattagatatgaaaggaatgtaccacaacacaataaacaccatacatgaaaaatttacatctgctattatactaaaagggggaagttgaaatgtttttctctaaggttagaaacaagaaaaggactcccgacctgcctcttctatccaacataatactggaaattctagccagagcaattaggccagaaaaagagataaaagacatccaaattgaaaaggaagaagttaaaytatctgttcttgtagaaggtgtaattttatatgtagaaagccctaaagactccaccaaaacactattaaaactaataaacaaattcagtaaaattgcacgatacaaaatcaacatgcaaaaacaattaacatttttatgcatgaaagcaaac

SEQ ID NO: 351639 - DNA, 507 bp, Homo sapiens
atgtctatactatccaaagtgatctacagatttaatgcaatctctatcacaatagaaatattattcttctcagaaacagaaaaaaaatccccaaattcataaggaatcgcaaaagaccttgaatagccaaagaagtcttgtgcaaaaagaacaaagttggaggcattacactacctgccttcaaaatgcactaaaaagctataatagtaccaaatacaataaccaataacagtacagctttttgacagtaccaaaacagcatggtatagttaaaaaaaaaaaaaaaaacggacacagaaatcaatggagcagaagaatcaasagcaatagtgccacaaacacacaatgggaaaggatggtttcttcaataaatggtgttgagaaaatgaatacccacacgcaaaaaataaactagacttttatcccacaccacatcaaaaaatcaacccaaaatggattacagactacagacttaaaagtgagaaccaaaactatgaaactgccaaa

SEQ ID NO: 351640 - DNA, 507 bp, Homo sapiens
atgtctatactatccaaagtgatctacagatttaatgcaatctctatcacaatagaaatattattcttctcagaaacagaaaaaaaatccccaaattcataaggaatcgcaaaagaccttgaatagccaaagaagtcttgtgcaaaaagaacaaagttggaggcattacactacctgccttcaaaatgcactaaaaagctataatagtaccaaatacaataaccaataacagtacagctttttgacagtaccaaaacagcatggtatagttaaaaaaaaaaaaaaaaacggacacagaaatcaatggagcagaagaatcaagagcaatagtgccacaaacacacaatgggaaaggayggtttcttcaataaatggtgttgagaaaatgaatacccacacgcaaaaaataaactagacttttatcccacaccacatcaaaaaatcaacccaaaatggattacagactacagacttaaaagtgagaaccaaaactatgaaactgccaaa

SEQ ID NO: 351641 - DNA, 507 bp, Homo sapiens
atgtctatactatccaaagtgatctacagatttaatgcaatctctatcacaatagaaatattattcttctcagaaacagaaaaaaaatccccaaattcataaggaatcgcaaaagaccttgaatagccaaagaagtcttgtgcaaaaagaacaaagttggaggcattacactacctgccttcaaaatgcactaaaaagctataatagtaccaaatacaataaccaataacagtacagctttttgacagtaccaaaacagcatggtatagttaaaaaaaaaaaaaaaaacggacacagaaatcaatggagcagaagaatcaagagcaatagtgccacaaacacacaatgggaaaggatggtttcttcaataaatggtgttgagaaaatgaatacccacacgcaaaaaataaackagacttttatcccacaccacatcaaaaaatcaacccaaaatggattacagactacagacttaaaagtgagaaccaaaactatgaaactgccaaa

SEQ ID NO: 351642 - DNA, 409 bp, Homo sapiens
agcatcgtctgcatgtagatatatggttttctcaacatgacttactgaagaaactgtattttctccattgtgtgttcttaactcctttgtcaaaattcagttagtataaatatgtggatttatttctgggctctttactttgtttcwcttacatgtgtgtttgtttctatgcaagtattacattgttttaattactatagctttgtagcatattttgaagtcaggtaatatgatgccttcagctttgttcttcttgctcaagatttcttcgactgtttgagattttcagtggaaactttttgtataacgggggctaattattctctgtaagaaaaatgagttagaggaaggcacaggagcatgctgatagtgctctgctgagtgatgacagggtacagttaaaacatgg

SEQ ID NO: 351643 - DNA, 409 bp, Homo sapiens
agcatcgtctgcatgtagatatatggttttctcaacatgacttactgaagaaactgtattttctccattgtgtgttcttaactcctttgtcaaaattcagttagtataaatatgtggatttatttctgggctctttactttgtttcacttayatgtgtgtttgtttctatgcaagtattacattgttttaattactatagctttgtagcatattttgaagtcaggtaatatgatgccttcagctttgttcttcttgctcaagatttcttcgactgtttgagattttcagtggaaactttttgtataacgggggctaattattctctgtaagaaaaatgagttagaggaaggcacaggagcatgctgatagtgctctgctgagtgatgacagggtacagttaaaacatgg

SEQ ID NO: 351644 - DNA, 595 bp, Homo sapiens
gtataaatcagaactcttattcatttgtatataatatgaatctcccatgctttccacatatggatttgtcagcagaccaaggtakaagggcctggaaatgaaagagctgagagggagtttatttgaggggatttgcagtggatatacacactgtggaaaaaaaggaataattgttgaaaagaggcaaggcaggaaaaattttatatatcaagtccaaagaggaagatgaggataaaattagacagtaaaagcagcaacattgaaaggtagtggaagcaaaacaacatcagatgaaaagattgattttggatgaatagtttaggacatggggtaagggtggaggtgggaaaagaagctcctcttcaccagtgtgtgtttaataaaaatgtctgatagctaaaatgtgtgacataggagtaaatatggttggagcatctgaattctgtgtgggattttctcaaccaaagctatccaaagtctaacctcatgatttcacagtgaaaatagccactcttactcaaaatcttcctttcttccaggcacagagtcacctaggatcacacagatctagctattctacttattttcttctctc

SEQ ID NO: 351645 - DNA, 596 bp, Homo sapiens
caaagcaaggtagagagaaagcagttttgcaacaaagaggcataatcaaattagttcatttcataaatactttttagccctcaggagacagtatgaaaaaatacccataatccctgctgttaaagagggaggaaacagaaataaaccaagcactcagcaaatgagtaataagttagttatttatgaagtccagtggtgaaaaaggacacagggtaggggcactggggctccagttagggtaggctgagctaataagctgccatttgacaaagatgtgagagaatgagccttaagggtatctagggacatatgtttaggcagagacaactgaaagtgcaaaggccctaagcttgtgtgggtggacaccttgacttttctctaaaaatacaagactgctttaggtctttgcttcagtgtcaccttctcagtgatttacctatttacagttgcaatcccttccctatytgagcactccctgtccccttctctgcgtgtcccatatctggaatatgatatattttatgtaatgggtattgtctgtttttccctactagaatgtcagcttaaaatggacaagtgtttttgttttttattag

SEQ ID NO: 351646 - DNA, 513 bp, Homo sapiens
gtaagtcacagaatgacttttttcttttgctactgttgttgtgagagaggatcacgtgttttgatgtgctactgtttatgaccatcaaattcaataactcataaggtcaaccaacatatacaatatgaaaatcaagtagtgtggctgttccttcccttctcccccaacttagcacaaaaatactagagaatgcattttagttccttcatctttgttatgtcagacttagcttaagctctttgcattccttgtgagccatggttaaatgtatgcatgccatatataaatattttgcacagagaaaatctcatttccatagaggtttggttcaatgtttctgaatgtgtctgatgactgaattgtgtccttagtaagaaattgrttatgcaaggtaaactttagcttcattaaacagtgtcctaattgtaattgtataatctatcagatgacacacagaagaaaaattaatgaattattaataaaggctaatgattttattctatattttacttc

SEQ ID NO: 351647 - DNA, 615 bp, Homo sapiens
tattcacctttgtgcacaaaattggtaagaagcacaaaattacttcttaccaagaaacttgtttcacagtgaaggaagtgaggctattgactcatgcttacagagttcactagtcatctgatactactgtctgttgttctctgtcatgttgacctgatagatttgtagaatagacctttgaaaattacaatgtcacctgaaggaagcytgtgaggctgaagtaatatcttcttggatacagtatatcctctaaatcaacagtcaataactagcgctatttcttccaccaccaggctttgtgagttcaagaacgaaggggtggcgcccaaaagattggttcctccgaataccacctctacatctttccaatatccatgactttgtgttaagcaggtgtacaagccttggttcacaaggaagacatgcttcaaacagtggacccagcaatgttagttgagactaccacctgaatacttaaggctccatatgtccatgtatccacagacaaagaagggattagtgtactcgcaggagtgatttgtactgtcaaggggaaagtgggctgccactactcaatgagggcaagtaggagtatatggaatgtgggagatcccc

SEQ ID NO: 351648 - DNA, 615 bp, Homo sapiens
tattcacctttgtgcacaaaattggtaagaagcacaaaattacttcttaccaagaaacttgtttcacagtgaaggaagtgaggctattgactcatgcttacagagttcactagtcatctgatactactgtctgttgttctctgtcatgttgacctgatagatttgtagaatagacctttgaaaattacaatgtcacctgaaggaagcctgtgaggctgaagtaatatcttcttggatacagtatatcctctaaatcaacagtcaataactagcgctatttcttccaccaccaggctttgtgagttcaagaacgaaggggtggcgcccaaaagattggttcctccraataccacctctacatctttccaatatccatgactttgtgttaagcaggtgtacaagccttggttcacaaggaagacatgcttcaaacagtggacccagcaatgttagttgagactaccacctgaatacttaaggctccatatgtccatgtatccacagacaaagaagggattagtgtactcgcaggagtgatttgtactgtcaaggggaaagtgggctgccactactcaatgagggcaagtaggagtatatggaatgtgggagatcccc

SEQ ID NO: 351649 - DNA, 546 bp, Homo sapiens
ctgagtaaagcaagcttagaagtgagattatgaatgacaggaactactgtagagccagtcttatggatagccatcaggaaccaagagagtttatcagtttatttcatctctctttctctctcttggaccatatgcttgtttttgcttatcagctgcattcttttctctctacgtataccagctggtttcttttgcttacatttatatttcattgtctcctcattagaaaggacatggatgtttgacagcctctctctctctttctctctctctcttttctctgtctsacacacactacaccacacatgtatacatatacatacatcatgatctcttcacattactttctacagataattgaccctgtttttttcttttaccaatcccaaatttctagtctaaaagcataataaatcaaaattatcttttcaagtcaaaccataggcaccgttcgtcatcctgcaaatggacttccctcacactatttaatcggggagttcagggagggagctgtggtccttcctgcggtgcagttcagaaggggtt

SEQ ID NO: 351650 - DNA, 546 bp, Homo sapiens
ctgagtaaagcaagcttagaagtgagattatgaatgacaggaactactgtagagccagtcttatggatagccatcaggaaccaagagagtttatcagtttatttcatctctctttctctctcttggaccatatgcttgtttttgcttatcagctgcattcttttctctctacgtataccagctggtttcttttgcttacatttatatttcattgtctcctcattagaaaggacatggatgtttgacagcctctctctctctttctctctctctcttttctctgtctcacacacactacaccacacatgtatacatatacatacatcatgatctcttcacattactttctacagataattgaccctgtttttttcttttaccaatcccaaatttctagtctaaaagcataataaatcaaaattatcttttcaagtcaaaccataggcaccgttcgtcatcctgcaaatggacttycctcacactatttaatcggggagttcagggagggagctgtggtccttcctgcggtgcagttcagaaggggtt

SEQ ID NO: 351651 - DNA, 581 bp, Homo sapiens
ttaattttatttacataggtagcttccaatttactcttcatttttcaactggaccactaatcttagggtggagttcatcagggaatagggccagcaaaacacttgcatttttctggaactaatacttacatatgtgaaaagcaggtgcagctggaaggcagagcacctagatctccagaaattaaggatcaatttttacaatgactcctatgtacagactgaagagtgtacactgactatgtacactgactcctttgtccagggctgaggcaaaagcccaagagggaaatgtaatggggcggggcgatggaggacttccacagtgcaccttgctgcaaggtcaatgcaaccttaatcagcccactctgtgatcaacccatcccccatgggagtctaatctcttaataccaagtgttcccacagcctccaagtatccaaacagcaccttttaaatctagacatacaaagaaaccagtagcccccctgcagtaattaccattacygtaactgctgtcagctgcctccaaaaccacagcacttgccggtgatttgtcagccattgcacacccaaaggagagtgc

SEQ ID NO: 351652 - DNA, 574 bp, Homo sapiens
agcatctggttttgcccaaacctagcagtagagaggtgatctaactaagccctagtgctctccttaagtcttccctaagccaggaggcaatggtaggttagcaattacccacacgggaaagaatctggtcttgcccaaccccagctgcagagtgatgattccaccaagcctcagtgctctgtttgaatataccctagaccaggaggcaagcccaagtccatacatatccatggagcataggctctggcccttaccaccctatgtagctaagcaaaaacattagagacctcacctagcctcagaatccatcacacagccacgcatagctacagattccagacaacagcactgcttacycaggaaagacaatctacaattctcccccatcagggacaattgcaaaaccaagccagcaatcccaccttgcatcagagtccagtcagtggtctcaccggacctcggagctcagccaacaataccacttcacctcagagaataggatgtgacccagcccaattacaaaaccttacaccaagatatgcctgtccagtgttgctgtcagccagcccactca

SEQ ID NO: 351653 - DNA, 630 bp, Homo sapiens
atttcaatgacatttctcacagaaataataaattaaccctaaagttcacagggaaccataaaataaaatcccaatagccaaaacaatcttgagcaaaaaaagtacaaatcttgagcaaaaagaacagtaatcacragccctaattttaaaacatgttataatgtaattgtaatcaaaatagcatggtactggcataaaaacatacacatagaccaatggaacaggagagagaacaaaaaatctttggaaaaggtgctctcttcaataaatgctgttgagacaactggtatccacttgtatccatttgtatctgaaaccgtatatacaaattatctcaaaaggattagagatttaaatgtaaaacctgaaaatgtaaaactactagaagaaaagatcaggaaaaagctctatgaccctggtttgggcaatgatgttttggaaatgaccctaaaagcacagacacaaaagcaaaaacagacaaatgggatggcatcaaactaaaaagcttctattcagccaaggaaacaatcaacagagctaagagacaatctacattcagagaaaatatttgcaagccatacatctgataagggattaatctccaaaatatataagaagcccaaacaactt

SEQ ID NO: 351654 - DNA, 596 bp, Homo sapiens
ctgagtaacttagccatgagttcccccgactgctaaatcgttgcagaaagcctctgagaaatgtgctcagtactggttagcagcttgtataggaatctctgtcttttcttcaacagctggcttgttagccattgacaggaatttcaacataaatttctgagaagtaagttatggtaagcaaaaaatccagtaaattggcaacattatacattggtcaaaaatcgtaagaggtaaagatttttttttgaaaggctgagcaaatgaaaaccatcacatttaacagcctgccaaagaaaacaagaaaaattcctcacaaaccaaccttctcrgtgagtgagcactcattgagtgttctactccagatcaaacaggaggcactgactattctgaacgggaactttcagttctgattcaattggattgcccaattaggaccaagtttctactttgtacatattgaaaagcaattttcctttaaaaagcaagtaaaatgaagaatatatatgaatatttgtatgaaattcagtacactaacagatttctgttcttcccgaactttgtgtgtgtgtatatatatatatatatatatatatata

SEQ ID NO: 351655 - DNA, 580 bp, Homo sapiens
aattattatacccttcgtggaaaaaagcatgaaagttcttcaaaaaaattaaaactagaattaacatatgatctagcgttcctactactgcatatatattcaaaggaaatgaaatctgtatgttgaagatacatttgcactgcactcgtatttattgcagcattattcacaatagccacgataagaaatgacaagtatccattaacagatgaatggataaagaaaatgtggtatatatatgcaatggwacactattctgcaataaaaaggaaagtaattttgtgacttgcaacaacatggatgaacctggaggacattatattatgtgaaatcatccatatacagaaagacaaatactgcttcatctcactcacttgtagaatctaaaaattttgatctggtggaagtagggagtagaatggtggttgccagagaattgggcaatggtggttgggagttgagaagatgctggtcaaaggatccaaaatttcatatagataggaggaataaattcaagagatccattgtacatcttggtgactatagttggtgatatggtttggctctgtgtccccaccca

SEQ ID NO: 351656 - DNA, 572 bp, Homo sapiens
atttacataggcatgtaatatatttttaaatcaggaagtgtaagccctccagcgtctattttcttctttcycaagattttttttggctactttgggtcctttgtgcttctatatgaatcttaggatgaatttttctatttctgcaataaaaaaaggcagtgtgactttgatagggattgcattggatctgtagattgctttggggaagtgttagaccctttgtgttgctataaaggaatacctaagactaggtaatttgtaaagagaaaaggtctattttggcttatggttctgcaggctgtacaagaagcctggtgccagcatctgcttctagtaagggcctgaggaaacttccactcatggtggaaaggaaaggggggccaggatgtcacgtggcaaaagagagaagggggaggtcccggactcttttaaacaaccagatctcataagagctaactgagcgggaactcgctcatcaccgaggggatggtgctgaccattccaccgccatgatccagtgcttcccactaggccccacttccaacaacagagatcacatttcaacgtgagat

SEQ ID NO: 351657 - DNA, 572 bp, Homo sapiens
atttacataggcatgtaatatatttttaaatcaggaagtgtaagccctccagcgtctattttcttctttctcaagattttttttggctactttgggtcctttgtgcttctatatgaatcttaggatgaatttttctatttctgcaataaaaaaaggcagtgtgactttgatagggattgcattggatctgtagattgctttggggaagtgttagaccctttgtgttgctataaaggaatacctaagactaggtaatttgtaaagagaaaaggtctattttggcttatggttctgcaggctgtacaagaagcctggtgccagcatctgcttctagtaagggcctgaggaaacttccactcatggtggaaaggaaaggggggccaggatgtcacgtggcaaaagagagaagggggaggtcccggactcttttaaacaaccagatctcatawgagctaactgagcgggaactcgctcatcaccgaggggatggtgctgaccattccaccgccatgatccagtgcttcccactaggccccacttccaacaacagagatcacatttcaacgtgagat

SEQ ID NO: 351658 - DNA, 563 bp, Homo sapiens
ttaattatactataataattaaaagagaaaagcattaaaataattataacataaaacacgttaatataaaacataaaaatgtgtaaattgtgacattaamaaagtaggtgggagagaagtaaaagtgtaaagttttgtatgctattgaagataagttgttatatgcctaaaagagactattacaactataagatattttatgtaaacctcatagtaaccacaaagaaaatagaaaagaggttatacaaaagaaataaaacaccaaggaagaaaatagaaaatgaacagaaaaacaaaagaactacagtcagacagaaaataattatcaaaatgacaatagtaaatttttctctataaataattactttaaaagcaaataaattattttctccaataaaaagatatagagtggctgaatggattttaaaaaagcaaaatctaactatatgctgtctacaagaaactcactttacatttaagatacacataagctgaaaatgaagggatggaaaaagacattttatgcagtggtaaccaaaggaaagcaggagtggttacactta

SEQ ID NO: 351659 - DNA, 563 bp, Homo sapiens
ttaattatactataataattaaaagagaaaagcattaaaataattataacataaaacacgttaatataaaacataaaaatgtgtaaattgtgacattaaaaaagtaggtgggagagaagtaaaagtgtaaagttttgtatgctattgaagataagttgttatatgyctaaaagagactattacaactataagatattttatgtaaacctcatagtaaccacaaagaaaatagaaaagaggttatacaaaagaaataaaacaccaaggaagaaaatagaaaatgaacagaaaaacaaaagaactacagtcagacagaaaataattatcaaaatgacaatagtaaatttttctctataaataattactttaaaagcaaataaattattttctccaataaaaagatatagagtggctgaatggattttaaaaaagcaaaatctaactatatgctgtctacaagaaactcactttacatttaagatacacataagctgaaaatgaagggatggaaaaagacattttatgcagtggtaaccaaaggaaagcaggagtggttacactta

SEQ ID NO: 351660 - DNA, 563 bp, Homo sapiens
ttaattatactataataattaaaagagaaaagcattaaaataattataacataaaacacgttaatataaaacataaaaatgtgtaaattgtgacattaaaaaagtaggtgggagagaagtaaaagtgtaaagttttgtatgctattgaagataagttgttatatgcctaaaakagactattacaactataagatattttatgtaaacctcatagtaaccacaaagaaaatagaaaagaggttatacaaaagaaataaaacaccaaggaagaaaatagaaaatgaacagaaaaacaaaagaactacagtcagacagaaaataattatcaaaatgacaatagtaaatttttctctataaataattactttaaaagcaaataaattattttctccaataaaaagatatagagtggctgaatggattttaaaaaagcaaaatctaactatatgctgtctacaagaaactcactttacatttaagatacacataagctgaaaatgaagggatggaaaaagacattttatgcagtggtaaccaaaggaaagcaggagtggttacactta

SEQ ID NO: 351661 - DNA, 563 bp, Homo sapiens
ttaattatactataataattaaaagagaaaagcattaaaataattataacataaaacacgttaatataaaacataaaaatgtgtaaattgtgacattaaaaaagtaggtgggagagaagtaaaagtgtaaagttttgtatgctattgaagataagttgttatatgcctaaaagagactattacaactataagatattttatgtaaacctcatagtaaccacaaagaaartagaaaagaggttatacaaaagaaataaaacaccaaggaagaaaatagaaaatgaacagaaaaacaaaagaactacagtcagacagaaaataattatcaaaatgacaatagtaaatttttctctataaataattactttaaaagcaaataaattattttctccaataaaaagatatagagtggctgaatggattttaaaaaagcaaaatctaactatatgctgtctacaagaaactcactttacatttaagatacacataagctgaaaatgaagggatggaaaaagacattttatgcagtggtaaccaaaggaaagcaggagtggttacactta

SEQ ID NO: 351662 - DNA, 535 bp, Homo sapiens
cctcaacttgctcaagatgtaaatttctgaaatctctctataaaaggagcttgggaaacccctctgtgcctgaaaagcaaagtaggaactcccataacttactttccagtttgcctcagtgataactcgagaacagaagtctccctctgcaagaaggtcatgagacttctttttgctgaagcaagagagcaggcaatttccaaattgttaaaaaaaaatggatttttaatgtttacaccgcaaaaagttaagctgatgttctactttgttgctracgggtttcagtggaatcaactgagaaagcctagtaaaacacaaagaatgacaaccataacagagtagaaatgcaacacatttcttatttcagcatgtgggcacggtatagcctaaaattaaattactccttgtgagatgtagaacacgcagtttactaatcacattggatccactttgtttaaatctgaaaaaaaaatgaaaataaaaatggaaaatatgaattggagtcaggtaagatgatttaaagcctggacaataa

SEQ ID NO: 351663 - DNA, 535 bp, Homo sapiens
cctcaacttgctcaagatgtaaatttctgaaatctctctataaaaggagcttgggaaacccctctgtgcctgaaaagcaaagtaggaactcccataacttactttccagtttgcctcagtgataactcgagaacagaagtctccctctgcaagaaggtcatgagacttctttttgctgaagcaagagagcaggcaatttccaaattgttaaaaaaaaatggatttttaatgtttacaccgcaaaaagttaagctgatgttctactttgttgctaacgggtttcagtggaatcaactgagaaagcctagtaaaacacaaagaatgacaaccataacagagtagaaatgcaacacatttcttatttcagcatgtgggcacrgtatagcctaaaattaaattactccttgtgagatgtagaacacgcagtttactaatcacattggatccactttgtttaaatctgaaaaaaaaatgaaaataaaaatggaaaatatgaattggagtcaggtaagatgatttaaagcctggacaataa

SEQ ID NO: 351664 - DNA, 535 bp, Homo sapiens
cctcaacttgctcaagatgtaaatttctgaaatctctctataaaaggagcttgggaaacccctctgtgcctgaaaagcaaagtaggaactcccataacttactttccagtttgcctcagtgataactcgagaacagaagtctccctctgcaagaaggtcatgagacttctttttgctgaagcaagagagcaggcaatttccaaattgttaaaaaaaaatggatttttaatgtttacaccgcaaaaagttaagctgatgttctactttgttgctaacgggtttcagtggaatcaactgagaaagcctagtaaaacacaaagaatgacaaccataacagagtagaaatgcaacacatttcttatttcagcatgtgggcacggtatagcctaaaattaaattactccttgtgagatgtagaacacgcaktttactaatcacattggatccactttgtttaaatctgaaaaaaaaatgaaaataaaaatggaaaatatgaattggagtcaggtaagatgatttaaagcctggacaataa

SEQ ID NO: 351665 - DNA, 542 bp, Homo sapiens
cctgggccctccttccctttatgggtataccaattcagcaatacatggataaattatcaytgtgagaactacagaaactactttagaaactaccataacctgggagaatggaaaaacagccacacagaagctggttaacaaaatttgagacactctctcataatccaccccagcacaatgctatattattgggagaaaaccctagcctggtgcttctaactggggaggaaaagagttgagccattcacccaatctttcagtttttcctggggctgtccaaggaactggctgctgtctcacctgtcttggagcactgataggacacagcatatgctcaatgcctgggggagagtgaaaacagaaggcagttcaagctagcacacaagcactcaccatagcccctcctccatagcaagtggattacaaatactaaattttagcatttccctaggaaggaaaaaaggtgaactgtatgtccaactttccagtttttcaaagagctacagaacggagcttttgtttttgttatgcctgtcttcgag

SEQ ID NO: 351666 - DNA, 545 bp, Homo sapiens
aactttttaatatcttgtcagtcttatgggagaaaaataatacctaattgctgtttgaatcaacaattctataattactaatgaattagagttctcttcatatacttgcaaccatttctgtaatttgtctacttatattcttgcctttttctcctaggacttctgtcttattcttgttgatggcaaggagtatcttgcatatcacacaaaccagtttttcattaatttcagacactgtagataacatctccgccatcttctctctgtcacctttgtcaacgagtccttaattaaacagatatctatatctgatgtagaggataaataatgagaaagaaagtgcaattatagaasctgagaagtcacatgatcttccatctgtaaactggagactcgggaaagactgtggtgaattcaatcaagcccaaaggcatgagaactaggggaggtgatgatataaatctcagtctaagggcaggagaagatgagatgagatgtcctagctcaagtgggaaggcagaaaacaaggcggggagggggaaatt

SEQ ID NO: 351667 - DNA, 576 bp, Homo sapiens
ggtaatttaaacactactgtcagagcttattaaaaacatggaacataatagacacacctatttatttgtggcatctctcctagattttaagtaccaaaccatcaagacttacaaggtgacactrtaaacctttggtcctatccaaaagtcatctggaaaacatttgtataaaagacactttaacattattctaagtttggtaactgatctcagagcaggtaaatgtctaaaaaattttcagataagaataaaaaaggataagaaacagctatggccttggatgtgttattaaccagaatcacaataccttataaaaattacaataaaatattttcaaaagcacctattagaaatttcaccttctccagaagctaataatgtttgtgtgtttatcagggtctacattatttttgaaattcacaaaactagaaagatagttccttttgggagtatatagttgagtcacttgaggaaagtaactgcttttgtcaggatatatggaaagtaaataataacttttcattgtgtcacttgaaaatacatcatttttcccttgaactactgtttcttatctct

SEQ ID NO: 351668 - DNA, 576 bp, Homo sapiens
ggtaatttaaacactactgtcagagcttattaaaaacatggaacataatagacacacctatttatttgtggcatctctcctagattttaagtaccaaaccatcaagacttacaaggtgacactataaacctttggtsctatccaaaagtcatctggaaaacatttgtataaaagacactttaacattattctaagtttggtaactgatctcagagcaggtaaatgtctaaaaaattttcagataagaataaaaaaggataagaaacagctatggccttggatgtgttattaaccagaatcacaataccttataaaaattacaataaaatattttcaaaagcacctattagaaatttcaccttctccagaagctaataatgtttgtgtgtttatcagggtctacattatttttgaaattcacaaaactagaaagatagttccttttgggagtatatagttgagtcacttgaggaaagtaactgcttttgtcaggatatatggaaagtaaataataacttttcattgtgtcacttgaaaatacatcatttttcccttgaactactgtttcttatctct

SEQ ID NO: 351669 - DNA, 605 bp, Homo sapiens
ggccttgcaacctagtgccagccctgctctggtaaaacacagaacaaggcagaatcctgaagcatcagattccagaccattacccccacatggcacttccagatccaccccagatatacaggtmggaaatatgaaaaagttataaattgagacaacacaaaatcaaaaagtgggaggataaagtatagagttatttagtttttgctttgtcttctttcttttccttcctttataatcaaagccaaggtgttataaatttaaaatgatttgttgtaactataagatggttttttataagcctcattgtaacagaaagcaaaaacctagaatacatacattaaaaataaaaagcaaggaatgaaaacatactacccaagagactcacttagccacaaaggaagacagtaatagtggaagagtggagttacaaaacaacaagaaaaagaataacaaaatggcactagtaaagctttacctatcaataacattgaaggtaaatagaatacatttctaattaaaagacatcaagtaacggaatggattaaaaaaaaccctaaaacactcagctacatattgcctacaggaaactcattgcacctataaag

SEQ ID NO: 351670 - DNA, 575 bp, Homo sapiens
gggcatatgcctttattgatggggggtgggtgtcagacgaagggggtggaaattagtttggggaagggaaccacaaataacaatggatttgaaatgcaccagttataaagcaatggcttgactgaattcaaccttttaatggaawaatctaacaatgaattatctcattgtttccccagtacatgctctctttgctgcattcatagaatcataaaaaaatatgagggggaaaggaattgtagacacacttggcaccaacaccctcagtttgcaaattaagaaagagccctttacacccaagcatcctcaagtcacacactcactctgatgggtagggactttgtcactcttcctgccctttcacccagtcttgtccatccccaagaaagggattctgtattagtcggctttcacactgctatgaagaaatacccaaggctgggtaatttataaaggaaagaggtttaattgactcacagttctgagtggctggggaggcctcaggaaacctacaatcatggcagaaggcaaaggagaagcaagtacctttttcacgcggtggcaggaaagagaga

SEQ ID NO: 351671 - DNA, 658 bp, Homo sapiens
gcttcctaatcctctgtatttctttaccaatgcttagagctatgraatgataaactgcattccctttactttctataatgctgtcccactttatacaaatgtggattaaggaaacgtaagagaccataatataaaaattaatcaagtctcaatttatgcacaacatttgagataatataaatccaaatattttcagatttcttcaaaacttgcataattgcagatgtagtagaccgaatgaatggtgaactgtgttcatggcaaggccacatggtgaagtctctagcaagaaaatattctctcctttttcagtatgtgtgaattatatgcttgtttatgtgcacgacaacatctgttaagagttcaatcactactctctgttatttaactatccactgttattataatcaaaagttatttgtatccaataacaatgtcatgcaagcattcattaaatgtgggtgtcagaagcagcgctaaaaacgtgcctcaaaatcaattgctttggaaaagacattagaagtaagtgaacaaaattgcaaataaaggcaaacaactgtcatggtatgctgtgctgttaatgtggaaacaaataacatgagaaatattagaaataatgctgaaaaaattaaaagcataaatatataatgcaatggtt

SEQ ID NO: 351672 - DNA, 658 bp, Homo sapiens
gcttcctaatcctctgtatttctttaccaatgcttagagctatggaatgataaactgcattccctttactttctataatgctgtcccactttatacaaatgtggattaaggaaaygtaagagaccataatataaaaattaatcaagtctcaatttatgcacaacatttgagataatataaatccaaatattttcagatttcttcaaaacttgcataattgcagatgtagtagaccgaatgaatggtgaactgtgttcatggcaaggccacatggtgaagtctctagcaagaaaatattctctcctttttcagtatgtgtgaattatatgcttgtttatgtgcacgacaacatctgttaagagttcaatcactactctctgttatttaactatccactgttattataatcaaaagttatttgtatccaataacaatgtcatgcaagcattcattaaatgtgggtgtcagaagcagcgctaaaaacgtgcctcaaaatcaattgctttggaaaagacattagaagtaagtgaacaaaattgcaaataaaggcaaacaactgtcatggtatgctgtgctgttaatgtggaaacaaataacatgagaaatattagaaataatgctgaaaaaattaaaagcataaatatataatgcaatggtt

SEQ ID NO: 351673 - DNA, 658 bp, Homo sapiens
gcttcctaatcctctgtatttctttaccaatgcttagagctatggaatgataaactgcattccctttactttctataatgctgtcccactttatacaaatgtggattaaggaaacgtaagagaccataatataaaaattaatcaagtctcaatttatgcacaacatttgagataatataaatccaaatattttcagatttcttcaaaacttgcataattgcagatgtagtagacygaatgaatggtgaactgtgttcatggcaaggccacatggtgaagtctctagcaagaaaatattctctcctttttcagtatgtgtgaattatatgcttgtttatgtgcacgacaacatctgttaagagttcaatcactactctctgttatttaactatccactgttattataatcaaaagttatttgtatccaataacaatgtcatgcaagcattcattaaatgtgggtgtcagaagcagcgctaaaaacgtgcctcaaaatcaattgctttggaaaagacattagaagtaagtgaacaaaattgcaaataaaggcaaacaactgtcatggtatgctgtgctgttaatgtggaaacaaataacatgagaaatattagaaataatgctgaaaaaattaaaagcataaatatataatgcaatggtt

SEQ ID NO: 351674 - DNA, 509 bp, Homo sapiens
ctcaaaatcaattgctttggaaaagacattagaagtaagtgaacaaaattgcaaataaaggcaaacaactgtcatggtatgctgtgctgttaatgtggaaacaaataacatgagaaatattagaaataatgctgaaaaaattaaaagcataaatatataatgcaatggttaatgatttatgtgccctaaaaatacatcccacattatttatatttataatatttagtcctttgaaatttgtgagtttttaattagatttcttttatttaaagatacagtcmaatcccatgtaaataagaaaatggacctgaaatgcattttaaaatgatatgtttctttccttgtggtttttctgatgataaaccatcacacttgttacattggataattctaaaaagtgtaaagatgaagaaaatcacctagaatctcaacattcattggccaactgtgctagcattttggcagtttccctagtttctaaaattttctctatatttttatgtagtttg

SEQ ID NO: 351675 - DNA, 550 bp, Homo sapiens
tggaagaacttccctaagcaagagggataaaaagctattactccttcaaaagaagatcaaaaaatttatctgtgaggttatttcttcagcccaaacttatctgcaatgtaggtctgtctttctctctttctctctctttctttctttyctctttctttcttctttcttcctttctcttcctttctttttctttttcttctttcattctggctttcacaagaataataggattattttgcatctacctgctactaaaaaaaaaaaagacaaaacaaaacaaaaaccctgtttagctgttccttactcaatatagacttgcagacttgtcagggtttataaagcatgcatttaaattcttattctaatctccacccctgttccctacctagctgaattctacatccctgtcccctctccccactcagagacaaagcaaggatcattcagaagatgtcatctggatgctgcaagtggctaagtgagcctagcctggcttagtgcagacacactcatctaagtgagccatgattacatcagtaaagagaggtgt

SEQ ID NO: 351676 - DNA, 520 bp, Homo sapiens
gttacagtaatgttaaataaaatttacaggaggacttttgtttgaactgagtttctgcactatgcccagcagcccaaaccaaaatggagtcactcatgctaaagttccacagcaccaagcctaaattaactatttatctgaccttccaagaaatcaaaagagtgagagagaacagtcaaatccccaactaagccagagttagccrgcatcataaggaagtttcctctgctttatcctttataaggaaagtaacttttgaaacaagcatccactttttgttttctatttctgctttcctcagcccttttctgtctacaaaaccaacttctgctcagcttatctgaatgctcattctattttacagaatgcggtgctacccaattttaaagttgcaaataaaagccagttaagatgtttaaactaaatgtgttataattttgtcttttgacagtagttaaaacaattctcccatttttggtcaatctctcaaaatggccttaggtatccttaggttcaggat

SEQ ID NO: 351677 - DNA, 589 bp, Homo sapiens
atgagtttttgtcagaacatataaagaatatataggtcaggcatgatggctcacacctataatcccaacactttgggaggccaagacaggagaattgcttgaggccaggagtcagagaccagcctgggcaacatagggagactttgtctctacaaaaaattttgaaaggaagacattagctgggcatggtggcatgagcatctagtcccagctactcagaaagctcaggtgggagaactgcttgaacccaggaggtcaaagtaacagtgagctacaatcatgacactgcactctggcctgggaaacagagtgagactgtgtctcaaagcaaatcaaaacaacaacaaaaaagaatatacaatcatccttygatatacatgagggattcttttcaggaccattgctacattctcaagtcccacagttgaccccgcagaacccacatataggaaaagtcagcccactgtatacacaggttgcacatcccttgaatactgtattttcaatctgcagttgatggaaaaaaatataagtggacctgcacaattcaaacccgtgttgttcaaggaacaactgtataagccacaca

SEQ ID NO: 351678 - DNA, 231 bp, Homo sapiens
tgcttgaacccaggaggtcaaagtaacagtgagctacaatcatgacactgcactctggcctgggaaacagagtgagactgtgtctcaaagcaaatcaaaacaacaacaaaaaagaatatacaatcatccttcgatatacatgagggattcttttcaggaccrttgctacattctcaagtcccacagttgaccccgcagaacccacatataggaaaagtcagcccactgtat

SEQ ID NO: 351679 - DNA, 514 bp, Homo sapiens
accttatttcaaatttggggagcacataatgtactctctatcacttaaaaattgattgttgccctgttttttggattttttttttaagggggygagggaaggagaaggcaatcacaaagagttggtgagtaattggctgaaagtcatcattcaatattataaaagtttccattttgttccacaatgcctttttagaaagataactgaatgttttaatctttcacctgtatttactttgcatactcagtgtagttaatctatatctctttatattctaattttatttttattgatttaaatattcaatgaatgtttctcattgcctactttgtatcagactctgtgctgggaggtgataataaggagaggcaaaagggctcaattaggagggataggtttctatctgctttacacgagtggagagatacccaaaagctgacctgcaggacagttctacccaaagcaactctccagtgttctgctggggttcctgataagcatatcatttgagtca

SEQ ID NO: 351680 - DNA, 605 bp, Homo sapiens
tgtgttagttcctgcaagtttgctcattcyatatccaggcagctgtcactttatgataaatccccattctccaggcgatccttattactctctgtccactgcaactataagaggaaaggaggaaatggcactgccatgctaagctaatttgtcctcattaccttgcagaatggagaatcttctagaacaatttccaatgtggaattatgcgtctttttacacctgccccatttcaaatgctggtctaaaactagcccagccttggggggcgggggcagaatgtgacacaaacccaatcttttcatcacctgtacgaccaccctcatcaaatcaccagctcttcatgccccgaggccatcctctaaggctaaattgtcttcagctagccacaaagctcgtgacattgtaggacccaatttgggggtctcctagttgttgagctcttgccttatgctgactggacagacacctaggtagccaagcagtaacgcactcacctcaattaaaacaggaattacttatgccataaatatttttcttgtaactggattgtacaaacattatgacactgttaatagcatgttttaattactcacaactccacc

SEQ ID NO: 351681 - DNA, 580 bp, Homo sapiens
tccatagaacactctacctaacaacaacagaatatacattcttctaacatgcacagggaacattttcaagatagaacataagctagatcataaggcaaatctcaatagattaaaaaggacagaaatctcacaaagtacattctcccaccaagggaataagattagaaatcaatagtgggaaaagcctcagcctgtcacggtgcctcatgcctgtaatcccactatttgcgaggctgaggtgggaggattgcctgaagccaggagtttgagagcagtctgggcaacatagcaaaagtttatctctaaacatttttttaaaaaattagccaggcatggtggtgagtatctgtagtagcagctacttaggaggctgaggtgggaggattgctagggcccaggagttcaagggatgcagtgacctatgatggaaccaccattgcaccccagactggacagtggagcaagacygtgtctctaaaaataaataagtaaataacgaatgaaaaaattttaaaatagtgaaaaaatcgaaaacctacaaatatgtggaacttaacacacacctaaatgaccaatgggt

SEQ ID NO: 351682 - DNA, 624 bp, Homo sapiens
ttaaaacttcagtgtgctccaaaaagagtcaccaaacacacacaaaaagttgaaatcagggtcttgaagagatatttgtacagccatcttcctagcagcactattgacaatagccaaaaggtggaagcaacccaagtgcccatcaatggatgaatggataaacagaatgtgggatacacatataatggaatattattcagtcttaaaaaagaaaggaagttctggtatgtgcaacaccatggatgaatcttgagggcattatgctaaatgaaataagccagtcataaaaagacaaacactgtataattccactgatgtgaggtaccgagagtagtcagattagagacagaaagtacaatggtggttgtcaggggttgggggagaagaaaacggaaagttgtcgttcartgtatacacagtttcagctttgaaacatgaagagttctggagattgtttgcatagcaatgtgagtgtacttaatattactgaattgtccccttaaaatgattaagaaggtaaaatttatgttatgtacattttaccacaacttttaaaaagaatcatcaaattctccaaataacatctttgatttctgggatgtggagagaggatgaacgtgggct

SEQ ID NO: 351683 - DNA, 470 bp, Homo sapiens
ttgccttcagtgagtgaatgagtgaatgttggactcaatgaactctacgttattctaacaacttgatcttttaggtaaaaatattttatattgaggtaagcacttcaatggttcatctcaccagcatcaaagaccacttcaaataagacaagctggaattcagatttcattgttggataatgtcctctgtgggaagtgactacactgtctcctgactggtccatgtgtatgtgtcatagaaccccacttaagaccccaaaatcacactatatcttttgtgtttacaaagttaataagatctgtatctacatcaatatctcattcaaatgaaacctcaaaatcacacccgagamcccaaaatcacactatatctttcatgtttataaagttagtgagatccatttctacagcaatatctctttcaaatgtacacagcatctctcttttggcctttatgcattgctgtgtca

SEQ ID NO: 351684 - DNA, 562 bp, Homo sapiens
acatttgtcctactaagggcttcaatggtaatcttgtgaaattggaggagttggcaaaattggcctaagaaaatgttatgtcctgtatggaaaacgtgagtttgccagagcatccatggaactgactaaaatcctccttaaagtaaagtaatgattgctggccaaccagagcaccaatcagaataaaccttgcatattcaaatactaaagaccctgagaaattctgtagaacagaaagcagttaaattctatttaatccagcatttcccaggcttatttcatcaaagaatcatttcttcttgcaggagatatctataaatatatcccaagatattagtatttcagggaaaacattagggaaaacattaatctaagcaatttctaaataaggatgaaggacaaaataaatatttgttgagtggctactaagtaccrcatacacaggtgaagtagattttataaaatcccagttctactgctaagaaaaaaaattctaaatacctctttcagtcaacagatttagacagaaccccaacttcatgatgatgaaatacagtacaaa

SEQ ID NO: 351685 - DNA, 595 bp, Homo sapiens
ttctgactgatatattactctttatgtaggaagacctactgattgtaagtttcctccaaaacgacccttgttgttctggaaatcataggctttgacacccatagccacctacacattccttccagagcagggatactttccccaagatttaagccctgggtctggggatttgtgatgtggagatctacctgtattgtagcctcccaagaccattcttctgtaagtctccctgcttttaagttccccttaaactacccgaaacctatgacccagatttgtctgcctctttctttggtttcttatttcttcwgcatttggggggtcgctttgtatatacagccctttcacagaacaggtgattcaagctcactgcagacttgaacttctaggctcaattgatcctcccacctcaacctctcaacatgctgggaccacaggtatgagccactgtgcccagcccccaggcctattttttagagatcaatttctaagaagctagtgggtaagaggtggagaggaaagatgaaatgaaggacaatttgaatcagattttaatcctgatccaagcccagcacttgttaagaaccctagcagc

SEQ ID NO: 351686 - DNA, 605 bp, Homo sapiens
attttaaatgttatggaggcaatgcaatggaaagtcgtggactgggtggataagtgtttaggatctgaaaccaggactgggacagaatgctggtcttcaatttcctgggcatttaactttgggcatgattctttacctctctgtgcctctgttttctcatctgtaaaatgtggataataatattatctaccttattaagttgtgaggaggattaaatacattaaatatatatgaagtggggccaggtacagtgactcatgcctgtaatcctagcactttgggaggccaaggcaggtggatcacccgaggtcaggagttcaagaccagcctgaccaacatggagaaaacctgtctctactaaaaatacaaaattagccaggagtggtggcgcaggcctgtaatcctagctacttgggaggctgaggcagaagaattgcttgaacccaggaggcagaggttgtggtgagctgagattgcaccattgtactccagcctgggcaacaagagcgaaactccatctcaaaawaaataaataaataaataaataaaatatatatatgaagtgcttagaacagttcctggcacattgtagtgctcaatgaacg

SEQ ID NO: 351687 - DNA, 522 bp, Homo sapiens
ttttgatatttgtaattctgttaagcgtaactcttaaacgcaattattggaaaacaaccttaataaaatctgacccaaggcaagtcctgaaataccagatcatagaggaacctaattaactactttttttcctgctatagaagccacaaagcacattagagctggaaatggccttaaagattattcaggctctcaacctaattttaataacacagaccctcttaaaatttgargaagctataaaccctctctcaagaaaaatgtgtattttgtcttgcttgttatctttctctctctttttaaaaaatagagacagggtctcactatagtttcctgggctgttcttgaactcctgggcttcagcaattctcctgccccagtctctcaagtatctgggactacaggcacatgccatggcaccctttctctttctcattcacgcatccacatgtatacacactcttacctttttttgattcattgtcattgtgaagcccactcatgggttcccagattaatgac

SEQ ID NO: 351688 - DNA, 516 bp, Homo sapiens
taatcaagagtgtctccagaaactttccagttgtcccctgggtgacatagtcaccacagttgaaaactactaggttaaggatataaaatatctcaccaaagtagataaacaactttctctaagtctctgattcttcactgcttagagtcatgaaacctttgagaatcaaactaactctttcagaaaaatttcacagagaagcaacattgtgcttattacatcttggtgataaggaccttttaaacccatccatgctcttttgtttaaaagtcttctctagataatatttatgaatagatttgaatgaaaataaagaataaattgtgaagattagagaaaacacattgtttaggcacttaatacattaaattcttttacaaaacccattgggacaccaaaaattcatttcaactgccaakcttatcatatcctgcatgtctgtaagtgagtaaatcctgtctgtctcatgatactatgaaaagtccatgtcaggctattatttttcccttgacattc

SEQ ID NO: 351689 - DNA, 635 bp, Homo sapiens
gacttttcttctagatatgtggaaaaatacaatacattgtcattaactataggacccctactctgcttttgaacactagaatatattccttttatttaagtgtacatttatggccattaactaacctatcttcatcccctaccccttcccagcctctggtaaycaccattctattctctatcttcatgagatacacctttttttttagctcctacatatgagtgagaatgtgcaatatttgtcttttttgcctggattattttacttaatataatgacccccagttccatgttgctgcaaatgaaaggattttattttttttatagtcaaataggattctgttgtctatatatatcacattttcttcatccattcatctatttatggacacaggttgatttcatatcttgtctattgtgaatagtgctgcaataaacatgggtatgcaaatatctctttgatgtactgatttcctttcttttggatatataactagtagtggaatttctggatcatatgatacatctattttaattttttgaggaaccaccatgctgtttttcatgatggctttactacactgcgctcccacccgcagtgtactaaagtttccctttgtctgcatcctcaccagc

SEQ ID NO: 351690 - DNA, 635 bp, Homo sapiens
gacttttcttctagatatgtggaaaaatacaatacattgtcattaactataggacccctactctgcttttgaacactagaatatattccttttatttaagtgtacatttatggccattaactaacctatcttcatcccctaccccttcccagcctctggtaaccaccattctattctctatcttcatgagatacacctttttttttagctcctacatatgagtgagaatgtgcaatatttgtcttttttgcctggattattttacttaatataatgacccccagttccatgttgctgcaaatgaaaggattttattttttttatagtcaaataggattctgttgtctatatatatcacattttcttcatccattcatctatttatggacacargttgatttcatatcttgtctattgtgaatagtgctgcaataaacatgggtatgcaaatatctctttgatgtactgatttcctttcttttggatatataactagtagtggaatttctggatcatatgatacatctattttaattttttgaggaaccaccatgctgtttttcatgatggctttactacactgcgctcccacccgcagtgtactaaagtttccctttgtctgcatcctcaccagc

SEQ ID NO: 351691 - DNA, 428 bp, Homo sapiens
tcaattacatgaaactcatgtattcaatgtgcaaatcaaaggatgatccttgtcttttagcctaaagcccctctaactctaaagctcarttacaaatcaacttgctgagctaggggtaggggtcattatctgagacaaaaactatgcttttacctacatcttgtcaggagaattcacacacatgttcatgtacatgcacatattacctcctatctccatcctcctatagaatggattttcacatatatgagagagggaaactcgcttatgtcttgctgccaatcacaaccctttgaaatgtgatatttggtggggaaagaccctctgttttttcacttaattatatcctatatgtcacgtgagctctcttcatttttttttcctattttgtctaactgggttatttcaaaaaacctttcttcaaggtc

SEQ ID NO: 351692 - DNA, 569 bp, Homo sapiens
ccagagcaatcagtcctcaattccactgaagtctcccctgtaataccacaattgagtactctgtatctctttgtaggcgtctcatagtaacttatgcttactcacctgagttactaggtgctgaggcagggaaatccaaatatttcaggtacaattataaaaggcattgattaacattaatttttgaagacacatatgtcactatagtcttgaatagcaatttaaagtgctgaaatttcaaaggaagtttcaacatgaatttacatggtctgatatgcaagtatatgtaagtatttgtgtacatatatatgtatrtatgaataaatgtatgtctacttatacaatattagaatcttaacaatggaactatgttaccttaggaaatttcaaataggctttgaacctcatgttttctgccaaaacagtgaataagacatccctggaggaatagcagaggttggaaccaccaagaaagagtccaaataagtaggagtggtcattgtcagcagtttggtcagcacagaatgtttatgggacttgaagaagagcagtagattaccataacctta

SEQ ID NO: 351693 - DNA, 569 bp, Homo sapiens
ccagagcaatcagtcctcaattccactgaagtctcccctgtaataccacaattgagtactctgtatctctttgtaggcgtctcatagtaacttatgcttactcacctgagttactaggtgctgaggcagggaaatccaaatatttcaggtacaattataaaaggcattgattaacattaatttttgaagacacatatgtcactatagtcttgaatagcaatttaaagtgctgaaatttcaaaggaagtttcaacatgaatttacatggtctgatatgcaagtatatgtaagtatttgtgtacatatatatgtatawatgaataaatgtatgtctacttatacaatattagaatcttaacaatggaactatgttaccttaggaaatttcaaataggctttgaacctcatgttttctgccaaaacagtgaataagacatccctggaggaatagcagaggttggaaccaccaagaaagagtccaaataagtaggagtggtcattgtcagcagtttggtcagcacagaatgtttatgggacttgaagaagagcagtagattaccataacctta

SEQ ID NO: 351694 - DNA, 505 bp, Homo sapiens
ttgaacaactgactaattgaccttcttgcattacctcagccaagaactggcactttaatactttcaattgttaagtgaaaagctgtgtcctatagttaaaggaattcaagcattgccaagcaagtggagatacatttgagatcttgatatgtttgaaaactctttgtctatgaaaagaaacttgatttagtcagttttaggtgattggatagctggattcagaaggttaaatctgcattcttgttcacttagtagcacactctggggagatgaagtcattcagggataactttgctgaagcttggactgaagataatgctagagaaaaatcaagaggttctctrgccaacgattactgaacaaaggtggagtactgttttagaggtagatatctataggttggctcatgcctttgagctgggctaatggagaagccttttactcagcagtgaataaaagaagcaatcaagtcttctgtgtaagtttgggcttgacacagcagttt

SEQ ID NO: 351695 - DNA, 573 bp, Homo sapiens
aataaccaaatcagcatgatattggcataaaaatagatgtatagaccaatggaacaaaatagagggaccagaaataaatccatgtatctagagccaactgatttttgacaaaggcaccaagagaacacattggggaaaagatagtttcttcaataaatgttgcttggaaaactggacattcatatgcagaaaaatgaaactaggccattatttctcacacatatgaaaatcacctcaaaatggattaaagacttaaatgtaaractcaaaattataaaactactagaagacaacataggggaaatgctatataaatttgtctgagcaaggattttttttataagactacaaaaacacaggcaacaaacacaaaaatagacaaatgagattacatcaaactaaaaacattctgtacaagaagggaaacaatcaacagaataaagagacaacctacagaatgggaaaaatatttgcaaattatgcatttaacaaggagttaatatttagaatatattgggagttcaactcagtagcaaaaaacaaacaaacaaataatctgatcaaaaaacaaat

SEQ ID NO: 351696 - DNA, 573 bp, Homo sapiens
aataaccaaatcagcatgatattggcataaaaatagatgtatagaccaatggaacaaaatagagggaccagaaataaatccatgtatctagagccaactgatttttgacaaaggcaccaagagaacacattggggaaaagatagtttcttcaataaatgttgcttggaaaactggacattcatatgcagaaaaatgaaactaggccattatttctcacacatatgaaaatcacctcaaaatggattaaagacttaaatgtaagactcaaaattataaaactactagaagacaacataggggaaatgctatataaatttgtctgagcaaggattttttttataagactacaaaaacacaggcaacaaacacaaaaatagacaaatgagattacatcaaactaaaaacattctgtacaagaagggaaacaatcaacagaataaagagacaacctacagaatgggaaaaatatttgcaaattatgcatttaacaaggagttaatatttagaatatattgggarttcaactcagtagcaaaaaacaaacaaacaaataatctgatcaaaaaacaaat

SEQ ID NO: 351697 - DNA, 639 bp, Homo sapiens
taagtactagtgttctattacatggtagggtaactatagttaataaaaatatattatatatttcaagatagctacaaaagaggatcttgtaagctatcaccaaaaagaaatggtaaaggtttgagttgataggctgggtgtagtggctcacatctataatcccaacactttggaggctgaggtgagatgattgcttgatgccaggagtttgagaccaccctgtctctacataaacaaatttacaaacaaggtttgaggtgatggacatgctaactactctgatttaatcattatacaatgtatacatgtattgaaacatcacatacaccccataacattcactatcatgtgccaattattaacataatttaaaagtaataaaaagttttaacaattgtacttcaaccaaaaagagactatcaggccttcatttattacaagctacttattgcctgccaactggctgacaaatgatccatttctaaaatcccactttagagttgctttckaggaccattcctgatgctaattatcatagaatgagtagaaaacagattctgtcactctaagatttgtgaggaataagggcatcagcattggagagaaagggaaattgaactgcaataaagttgcaacaga

SEQ ID NO: 351698 - DNA, 394 bp, Homo sapiens
tattcactggaagaatggttttggctaactgaagccatcacacctgaagacactaggttatattccctcttccagcagctctagccaatgacttgttgatgcagggatatgatgactagaaccatcctcacccccagtctgtacactggaaaacctctgtgttttagttcatgcrccttagctactcatggaatcaagccgaagctaaatgtatcctgaagccatgttttttccagcttcttcatcccagctatcccacttccatctctccctttcattcatattgtgctgagacagagattttaaactgctaaaatttttaaactctagacctaatataatgctgttaaggcataggacattcaagaaatgttggcttagtggaaggaactga

SEQ ID NO: 351699 - DNA, 394 bp, Homo sapiens
tattcactggaagaatggttttggctaactgaagccatcacacctgaagacactaggttatattccctcttccagcagctctagccaatgacttgttgatgcagggatatgatgactagaaccatcctcacccccagtctgtacactggaaaacctctgtgttttagttcatgcaccttagctactcatggaatcaagccgaagctaaatgtatccygaagccatgttttttccagcttcttcatcccagctatcccacttccatctctccctttcattcatattgtgctgagacagagattttaaactgctaaaatttttaaactctagacctaatataatgctgttaaggcataggacattcaagaaatgttggcttagtggaaggaactga

SEQ ID NO: 351700 - DNA, 573 bp, Homo sapiens
gaaaccatgggagttaatgtagatgctgatggagtatgagtgagaagaaaagggaatctaggacaatctgggaaacactaccaatacagaatcagtagacaataagaatggggaacccatagaagatatggatgtacatgcagtggtgtagtagacagttaagaggtgagctgtcttggattccaaggaacaaaattgatttcacaagagtgatatgatggacaatattaagactgagactacaagtaagattaggactaaaataaagccataaaactccatgaaattaagattatggggggctattatgagagcagtttcatagacgatgaaatagtaagagctakatttggcatgaaggagacacgaggaagaggagacaataaaagtaaaccagggtttgccaaatgctcttctatatattttttagttcacctcaaataattggaaaaaaaaacaatattgtttttcataaagttcaccagggttctcaacctcaatactatcaccgttttacactggataattatgtactgtaggaggctgtcttgtgcattgtaataagtttatcac

SEQ ID NO: 351701 - DNA, 608 bp, Homo sapiens
agctaattttttgtatttttagtagagatggggttttgccatgctgcccaggctgttctcgaacacctgacctcaagtgatcctcctgcttcagccccgcaaagtgctgggattataggtgtgagccaccaagygcgggccctggctttgctaattaaaaataaataaataaataaataaataaataaataaataaataaatatgggtctcactatgttgcctaggctggtctggaactcctgggctcaagcaatcctcctgcctgagcctccccagtagctgggattactggtgcaagccactgcacctggctccttcattgattttggtatctgtttataattcctaacagaaacaagtgctgctatgatagctgccaaatagtgattttctacttccatcatctcttatatttataacaaagagctttgctttctcagtcatttattcatttactcttccattaataggactcatgggttatttttctctatggtttataattcactgctatcaccatttatttggcttctcaaattgtctcagatttggctagtggaagccctttcagattggtgcctgtgtccttttgatatgttcctttcaa

SEQ ID NO: 351702 - DNA, 629 bp, Homo sapiens
aaaaccaagagaaagtgttgtcctggaagccaagtgaagaaaaattttaaactaagagagagtgaaaaattgcatcatatgctgttaactgtcaaataaatacatagtaaactatatgtattttaagtacatataaaaaagtaaattataataatattgcatggtacatcattttagtcataattgtaagtataggttgctttgtattttactttgaaattgacctaaatatttaaatttaaaatgcttgccctgttattgatgttaccatattacaactttggagaacgtgaccaaatgaaactacaattaaattataggttttataagcaagacaaagtaaatatgactatttagaaattttttagcaaatattaacagtaactggtacttagattatcctcattttctcttaaggaaatttttgaatatctcaaagagttaacgtatacatttgataattttctaccaaaaataattttatttgatttagaaaggtatttactgatagtatgcactgaagaatatgctaaattgttagccattttaatctaattaggtgtgagagtctgtaygtatatatatatattctcagtattctttcaagattctgagtaaagaacatatta

SEQ ID NO: 351703 - DNA, 619 bp, Homo sapiens
taaaaactaacacttaactatggctattaatgcaatgttataggttatttattataaataattgtttagcatctatatggttttgccttttaaatcataatggtaaaataaatgttaaaaatgacattttaatgtcagacagctgtggacacaatagctcatttatttactaagtacgtgagcttgggcaagttgcttaatttttttttttatgccttggttttttcatgtttaagagtaagagtaattgagttttctgaaagtttaactgagataatgcactcatattatttagtgtggcacaaagtaaagactgaaatatcagatatcattattgatttggaaaagtaagtggaaggaatagccttgatacaaacttccttttatagcagatttgaacaatagcagcaacatttaacatttttaattaataaaaccttaagtaaagtttcatttaagttttaaatttgtagccttagccacaatcagcatttgagaggacaaggaagtgctgtttacaatttaaaaacatattctttytaagcgtgttgatggtgttgtggtctgcacccataaagtgcaagagccaaggggatttgactgtctcatcctatctatg

SEQ ID NO: 351704 - DNA, 592 bp, Homo sapiens
tcacgataaaaattgagaagtgggaaatacttggtaacacattttaggttttgctgttgttgtgctgggatgcagtaaagttatgtaaaaataatttgatcctttcaggtcttgcttttaagctttgttggtaacagagatgtgcctatttcaggactaattttgtctctactgaggcaagtcttttttgtatatgctacctattacctagtgaatcatgagattttctactccagctggtgggaataggaattcttcctaaccaaagagtgagtgtagggcactatcccctctcttcttatggtgtttttctcctcaagccatactagtttcctcaggcattctcayaggtcaccagaacagctgagaaggaacgtgtacagatctctggagtgctcttctctcattctctctcactctccctcaatccccacctcccctcactcttttctctccgcagctctcccctctctgatatccttctcctgcaaactctagcccagtggcctccctgtactcccagctctttgactgtgtcccctgtcctcagactagggcctggaaactctctcaataagctgggacagtggta

SEQ ID NO: 351705 - DNA, 609 bp, Homo sapiens
ttatcttttgtcaatagacttgtatatttcgttttagaattcatttcatccatttttatcctctcagtgcctaaaataatgcctggcacatagtagaattccagtaaatgtgaaatratctccaatttacagacaataaagtaaatgataatagagataagcaatttttaccatggggactcagctacatagtgataatttcaggattcaacataagtttgtccaaacccaaacgctgtgctctaaatattatataaaatatttttccctattataactttccttttgttatctattctacctggaggaataaattagattatgctgtggaacaaacaacttcaatatctgagaagcttaaagtggcaaagtttccttcttatatgtgctgcgtgacagttgcaggttaaccaacttttgcaggttaacaagcccattgttctttctccaagattcaggctgaggtagcagatactccctggaccactgacagttgccatggcaaagaaatggagaaagagagtgtgctgaatattctttcccttgttttgttaaagcttttgccagaagtgatgtgtgacacatctgctcatacatcacttgtcaaag

SEQ ID NO: 351706 - DNA, 451 bp, Homo sapiens
atctcaaatctacgtttgctagacaccaaatcatatgctctttcctcattacttttctgaaaaataagaatttgcaaattcatggcattgtttcaaaagactcactgaatctctactcaacacatattctacccyctcatcttatgaaaccactctacccaggagagcagaggtaaggtgggaaataataaaatggtaatcaatgtaataataacaacaataataaacatatttctgaggcttactctgtaatttattttttcacatttatacatctggacatgtataaattatgtggccacacatgagaaactagttatatttgagcctcaccaaaccataaatctaagacaataatttttattattttaaattacaaagtcatttctgtcatacatttaagtgagcgaaagtgactgttgtcacatcacatctttctcaaaaagaaaaa

SEQ ID NO: 351707 - DNA, 549 bp, Homo sapiens
tgcgtagcattagtgctcagtattattattgcggttgtaatcattattactatcattctcattattaattagccaagtgcccagtaggagcactctttatctttattatcataaaacttgtcatctctctacttgatcatcccttcttgctctttcttctcttaccccctcctcctcttctttagccacatatcaaatgcaatcagcatatgggatatacagtgtgagcaacagttctcttattaaagaggaactgtttgacatttttggccaaagttattcagcctctcatgaatctgccttcttgagcatgtctycttgtgccttaggctggcaaagtagagtttctccatctgcaaaggaactcagatctgacccgtaaccattgcgtcctgagatgccatctctcctaattgttctttattttctttggtaacctacctgttaggtagaaagaatctaactcttaacatcatttgtgcagcagatatttattgaatccccatcacgtggtaggccctgcttctttaaatttcatgccccagagta

SEQ ID NO: 351708 - DNA, 574 bp, Homo sapiens
gaccttagtcttgagctacaggttcagaaccttattgcactgcgctatattgaggagatatagttatgctttaacattccttttatgcctatctgggttttggtctgttaaaatgacaaatctttaaacaattcctctaacacaaatattctaaacacaaatcaaggcttctgtagcatcagtgtctgacttaacttcaaataatgagattatcccagagaagagccactcatccataaggcagatccatgtaacatcaggcagagtggtgtggaatgcagcaaaggagcttgcgcctcactcaccatgagccattcataggatccaggccatgcataaattcccagcctctaaaggacatttgcaatataagtgtggattcttgggaaactacagccacctttgtatctcccgtaaacatcattggaccactttatggtgttgagtcctttgaaaagatctttaataggaggctctgtgctcctgaataggggcttgccactctggaacarccagaaaagatttcatgcagaagaagctgctgcttcaaatgaggtgtgaatgtgtaggggtt

SEQ ID NO: 351709 - DNA, 591 bp, Homo sapiens
tggatatggagtctttttagtaaagtcttagaatgagggacgacttctcttttctccatcacctctctgagatcaatagggcttaacagattgaggacggtttacagacaggagctacttccatgtcatgttttaatacacagatgcaatctaatgttcctggtcaagagggtaaacattgttgcaatacatatatttgaaaattgcttctcttcaaatatatatgtatatatatctgtatatacacaatgtgtgtgtgtgtataaaatcctgatgtctwttctacagtgctttctagttgctaaaattgatccaagttacattaaactagatgtagtctcaaacagagccaagttgtatagctctgcaactagatctagctatatgcttttggtataaacctctttttatatttatttttgcgaacatatttcttcatattatatgcaaggaatgtatttcttaatttcccagtcaattaaaatgtgctttgataaagagtaaaaaagactcagcattatctctgaggacaaatgtgcattacttaatgtaacggtatatttaaaatgtggtttgattaatgccaaatcc

SEQ ID NO: 351710 - DNA, 591 bp, Homo sapiens
tggatatggagtctttttagtaaagtcttagaatgagggacgacttctcttttctccatcacctctctgagatcaatagggcttaacagattgaggacggtttacagacaggagctacttccatgtcatgttttaatacacagatgcaatctaatgttcctggtcaagagggtaaacattgttgcaatacatatatttgaaaattgcttctcttcaaatatatatgtatatatatctgtatatacacaatgtgtgtgtgtgtataaaatcctgatgtctaytctacagtgctttctagttgctaaaattgatccaagttacattaaactagatgtagtctcaaacagagccaagttgtatagctctgcaactagatctagctatatgcttttggtataaacctctttttatatttatttttgcgaacatatttcttcatattatatgcaaggaatgtatttcttaatttcccagtcaattaaaatgtgctttgataaagagtaaaaaagactcagcattatctctgaggacaaatgtgcattacttaatgtaacggtatatttaaaatgtggtttgattaatgccaaatcc

SEQ ID NO: 351711 - DNA, 578 bp, Homo sapiens
actaaaactgctcacacattttactgtactttccacaaagtcattactaaattgtgagtaaatcattcttgaacttatagtatacaaatgtaatgaattcctttayccaggagtataaattttttaaaaaagtattccctttgacttatcagtacctgaagaatattttcagaatgaacatggttagggtccctttgctgattataaaatagccagttctttatcagagatggattcttcttttagtcagtggcttaggttggattactgcatattatttcaacttaatcttttatttcagtgatggtcctgccaaatctcatattggcatgaccaaaacttcaggctagggcttgagattaatactgtgcttgtgagatcccatagtcagaaactctatggtttgtgaaggaaacccaggatgcactcagctggcagagcttttaacatcacattcagagtgagtccagtctgctctagcatggtggcaacagctcagcagtgctaataggagtaataactcacatttgtctgtaagaaaatagaactagaagtcacagacagaaaataaatcaagg

SEQ ID NO: 351712 - DNA, 578 bp, Homo sapiens
actaaaactgctcacacattttactgtactttccacaaagtcattactaaattgtgagtaaatcattcttgaacttatagtatacaaatgtaatgaattcctttatccaggagtataaattttttaaaaaagtattccctttgacttatcagtacctgaagaatattttcagaatgaacatggttagggtccctttgctgattayaaaatagccagttctttatcagagatggattcttcttttagtcagtggcttaggttggattactgcatattatttcaacttaatcttttatttcagtgatggtcctgccaaatctcatattggcatgaccaaaacttcaggctagggcttgagattaatactgtgcttgtgagatcccatagtcagaaactctatggtttgtgaaggaaacccaggatgcactcagctggcagagcttttaacatcacattcagagtgagtccagtctgctctagcatggtggcaacagctcagcagtgctaataggagtaataactcacatttgtctgtaagaaaatagaactagaagtcacagacagaaaataaatcaagg

SEQ ID NO: 351713 - DNA, 612 bp, Homo sapiens
gtatatgcatctgaatgtgttccattccttttttgagcctcattttctccttctacctaaagggaatcataacattggctctatcttactaagaacacctgtgatttggttcagtgagatcacagatttgaaacatcttccaaaactcttaacattgatgattgtgttcaaattattattttctgattcaaaaacagatgtgttgtgggaagggtgtgaataagtagatacatgtccctaaactgcctattaactttcttcccctgaaaatccccagggtttatctttctcagaaaatgcttcagcaggtagcagcatttatagctgctgcttctttcttcataaacagtcaaaaaaggtgtcctggagttcgagaccagcctggccaatgtggtgaaaccccgtttctattaaaaatacaaaaattagctgggtgtggtggcaggcacctgtaatcccagctactcgggaggctgacgcaggagaattgcttgaayctgggaggcggagtttgcagtgagccgagactgcaccattgcactccagcctgggctacaagagagaaaactccgtcaaaaaaaaaaaaaaaaaaaaaaaaagtgtcctatcatc

SEQ ID NO: 351714 - DNA, 612 bp, Homo sapiens
gtatatgcatctgaatgtgttccattccttttttgagcctcattttctccttctacctaaagggaatcataacattggctctatcttactaagaacacctgtgatttggttcagtgagatcacagatttgaaacatcttccaaaactcttaacattgatgattgtgttcaaattattattttctgattcaaaaacagatgtgttgtgggaagggtgtgaataagtagatacatgtccctaaactgcctattaactttcttcccctgaaaatccccagggtttatctttctcagaaaatgcttcagcaggtagcagcatttatagctgctgcttctttcttcataaacagtcaaaaaaggtgtcctggagttcgagaccagcctggccaatgtggtgaaaccccgtttctattaaaaatacaaaaattagctgggtgtggtggcaggcacctgtaatcccagctactcgggaggctgacgcaggagaattgcttgaacctgggaggcggagtttgcagtgagccgagactgcaccattgcactccagcctgggckacaagagagaaaactccgtcaaaaaaaaaaaaaaaaaaaaaaaaagtgtcctatcatc

SEQ ID NO: 351715 - DNA, 585 bp, Homo sapiens
tactgcaataaaagttatgtgaatgtggtctctcccactctgtctatcaaagtatcttactgtactgtcctcagctatttttggaccatggttgaccatgggtaactgaaaccactgtaagtgaaattgtagataagggggctactatacttttcttcttacattaagagctttttgagggcaaaatttaggtcttcttgtttgtacttttttatgcttacacttcatgcaagtatttagcaaaatgctttataatgtcttcaaaatagtaccagagtaaggtctggaattttgagttccagttttaggccctttatcaactaattatgcagccatacacatattatttaaactctattaacctcaattatctcatgtaatataaggataaaaacatccactccacttggaggattaaatgccaaagagcttttaaaattctaaaatattatattactttaagaatgaaagttattaatgttgttcttataattttattattatggtagtcactcartgaccactaaatgtgtctttaaaagtgaaaaagcaaaaataagtagataataaatgtcacatttgaat

SEQ ID NO: 351716 - DNA, 534 bp, Homo sapiens
aagccaatgaacaggaaggctaggttctatacataaaatgtgcccaaatctctgtttaatctttgaactatgcaggtacaaggtagatccaagcatctcaaatgagtaaaagaagaaaacagagatttcagttgatgcataccagaggaaggccaaagtttggagtttgagttcagtcaagttaattgtttgtcaaagaaataaatgaacttcaagtaaatatatgcaaagaaacataacagaatccagagtctgtacaatatatgaaccacagtgtttgaggcacaatgctggaggtcaagggagaccaaaaagcagtatctagcaaaygacaactatggcctcttcaaaagcaggctgagaataaagatgtattagataaatggaaatggacaggatttgcctccagcagacctataccacagaaaatgctggagggagtttattaagacagaaataagattacaacagatggaaaacccaagaaggaataaaaaacactggaaatggtaaaatgtgggtaaatataaaaga

SEQ ID NO: 351717 - DNA, 581 bp, Homo sapiens
gggcttcctgcatgtggagactgccatgtttgtgcatgactgcaaccagcccagaagctgtatttacaggaaacacagagttaagtttgatggaaacaagcagtaatgttatcttttggaaaaaagcaatattaatacaggaagatcctgatataacatgatgtgaaattgctaacataataaagctatatgacatttctgcctcagtgtgagttctttctagaagtcaacctaagaaaaagaatccaggtaagtgaataaatgaggtttctctctccatctcggagtggtccctgatgttcaatataaaggatgacaatgttttcccctgcgaaagccgccctacaaattcttgcttctccccttatcagcccagtgactagccaacacaggggaaaataatacctacacactcgggatgttgcttagcacatacatgagaagcagtggggtaaagtggctaatactgcggtttctggagcaaaattaccaaggttcaaatcctggctctgccacttagagkccatgtgactttgcacaagtcacttaacctctctcaggtttggcatcgtcatttgtaa

SEQ ID NO: 351718 - DNA, 586 bp, Homo sapiens
ttaaagataagacctgaaactgtaaaagtactagaagaaaacataggggaaaatttccataattttggtctgggcaatgatttatttatttatttatttatttatttatttatttatttatttattttgagaaggagtctcactctgttgctcaggtggagtgcagtggtgtgatctyggcttactgcaacctctgcctccccaattcaagtgattctcctgtctcagcctcccaagtagctgggactagaggtgcacacgaccactcagctaatgtttgcatttttagtagagtcaaggtttcaccatgttggtcaggctggtcttgaattcctgacctcaggtgatccacccattttggcctcccaaagtgctgggattacaagtgtgagccaccatgcccagcctgggcaatgatttcttgcacatgacccccaaaacactggtaacaacagcaaagttagacaaacgggattgcatgaaactaaaaagcttctgcacagcaaaggaaataatcaacccagtgatgagaaaacctacagattgggggagaatatttgtaaaccatacatctaataaaggatta

SEQ ID NO: 351719 - DNA, 586 bp, Homo sapiens
ttaaagataagacctgaaactgtaaaagtactagaagaaaacataggggaaaatttccataattttggtctgggcaatgatttatttatttatttatttatttatttatttatttatttatttattttgagaaggagtctcactctgttgctcaggtggagtgcagtggtgtgatcttggcttactgcaacctctgcctccccaattcaagtgattctcctgtctcagcctcccaagtagctgggactagaggtgcacacgaccactcagctaatgtttgcatttttagtagagtcaaggtttcaccatgttggtcaggctggtcttgaattcctgacctcaggtgatccacccattttggcctcccaaagtgctgggatyacaagtgtgagccaccatgcccagcctgggcaatgatttcttgcacatgacccccaaaacactggtaacaacagcaaagttagacaaacgggattgcatgaaactaaaaagcttctgcacagcaaaggaaataatcaacccagtgatgagaaaacctacagattgggggagaatatttgtaaaccatacatctaataaaggatta

SEQ ID NO: 351720 - DNA, 580 bp, Homo sapiens
tctgtctacctgtgattacaatgggctctgatgatatctttgatcatgatgagactgtgacagtactgtgattgtcagagattgcaaagtggatttaggatttttgatagacttgtcaatgcatctgctttatcaggtagtttcattcccttatcacagtgacctaagtgttataggaaagcagactagcgtcactgtagacatgtcatagtagaggacatgtcagtagaatcccacagtaggctttctgcaaggctgttctgtatcaggtctgataataatagattgctgtcttttagctgtgaaattgtgttacaaccaaaacaagaattatgcgtgttcaatgtcagaatttgaaacagaggtgcagatttgttgagtgacttgccccaggtcacacagctcatcacagagagattggagagctgtatattggattcctggtcccatgtcaatgttttcttcrtacaacatcattcctgttgaatgtctgtggatttgggagtacattttcatttcaaactctaatcatgacagagaaaacatgttcccttttcactgcatagtccaagcttacagc

SEQ ID NO: 351721 - DNA, 562 bp, Homo sapiens
aggtactagtattattctcccagatagcaaggccaataaagcaaagtaaggaatagtcaagtcacttggcaaaggtcatggggctggtattttatgaggtttccagggtagactgtgagacctcaggccagtgttcctaacctakctctgaactgccttttatagacattgccagaaagcttaccaacaccaccaggtggcttatgctagagaagagggcaataataaggcagaaatcagattaacacatagagttggggaagccggagtagacccctttgagctaaatattcccaggtacatacctatccagcagagaagcccctgccagcagtgtggctttgtaagctgaaaaaagactaaatattgaataaaggttcctgaataaagatgtttacttcccttcatggctatcagtttgcccagctttagattttacttcttgcattctaagcaagaaaacacccttaaaaaagcaatttctttgtcatgtttttaaaacagataaaatctagttttcattttaccatcttatgaaatttatgttttctattaccactaa

SEQ ID NO: 351722 - DNA, 591 bp, Homo sapiens
atttactacaacatgggtgaacctggagggcattatgtaaaataatgtcagacaaaaacagatatataaactcatatatagaaactaaaatagtcaaattcatagaggcrgagagtagaataccattgtcagtggctggggagaggagaatgtggggaagtaatggttaaaggatataaaggttcagttatgcaggatataaattctggaggtctagtatacagtaaagtgtctatagctaacaatattgtattgcatacttaaaatacgctaagagggtcttatgttaaagtgttcttaccacaaaaacaaacaacaaaaacaataattataataaagcaggcaagaggaaacttgtggaggtaatggatatacttatgccctaatgatggtaatgatttcacaggcaaatatttatctccaaacttttccagatgtatacattacatatgtacagctttttatatgtcactcatatataaataaagtggtttaaaaaaggaatggggagtgaaaatgtaaaggagccatatttcttgagtttttctatatgagatgtgcacctaataggtactcaaggaatgttaatca

SEQ ID NO: 351723 - DNA, 562 bp, Homo sapiens
actaagccaagttgcagagataatagctataaggaatgaccaataacgattcaggcttgtttagagaaataagggaattaattgatgtgaaaatccttgtcactaagtatggcacctgatatattctcaaataagtgtctgaatctgagaacagatgctagggggtagagtggaaatgactccccacacttcgtgttgtcccacatagacagataacagtctagattgtttccctgacccaggagaaagcatctgctctattcccgtggtcaaatggaatagttaatatccaaccagccctgcaccaagaaagtatcacatatgctctcggccaaggagcagattatgatagcaacctatgtatctgcccataaggctaccagtaccagctgtaggtgactttaktaggcccagcaatggggatggcaggagatttctgtccacttccccccagcagtttgcccatcccacctcaacacctcattgcttcacctgtactgaattgctttagcccaaaccattcacttgttcacgttttcagctaataatttatctccctagt

SEQ ID NO: 351724 - DNA, 636 bp, Homo sapiens
ataacacagaattcactttaaggtgagcaattacagcaaacttcttcatgaatatgtactttttttttgaagggatcaatacgctgtaattgaaactcagtgatagaagaatgctctctgtataccttagagtcaaattttatataagaatcagattccacagcaagaactcaatgatatttaagaccaaatataactgagtattaagcacgatatggtagtcaaaatagatatgtgaagtcagaacccttgggttattttctcagatctgccagttaccaagcaaattatcttgagtctcttatactcatgtcttaaaaatggaagaaattttaaaatgttgaaaggaaaaatggwaatattcagttcataataatgtgttacctaattatttcaaagaacccaagggaattttgccttttattagaagagccctatctaaataaacttatcttgccagttataaaaataaatattcaccaactaattacagatttatataatacacacaaatccctcatacatatctgaaatgtatatatcttcctctatatattatattattctgctacattactgtaaaatacatacaaatgctccttcacttacaatgggggtatatcccaataaactcat

SEQ ID NO: 351725 - DNA, 636 bp, Homo sapiens
ataacacagaattcactttaaggtgagcaattacagcaaacttcttcatgaatatgtactttttttttgaagggatcaatacgctgtaattgaaactcagtgatagaagaatgctctctgtataccttagagtcaaattttatataagaatcagattccacagcaagaactcaatgatatttaagaccaaatataactgagtattaagcacgatatggtagtcaaaatagatatgtgaagtcagaacccttgggttattttctcagatctgccagttaccaagcaaattatcttgagtctcttatactcatgtcttaaaaatggaagaaattttaaaatgttgaaaggaaaaatggtaatattcagttcataataatgtgttacctaattatttcaaagaacccaagggaattttgccttttattagaagagccctatctaaataaacttatcttgccagttataaaaataaatattcaccaactaattacagatttatataatacacacaaatccctcatacatatctgaaatgtatatatcttcctctatatattatattattctgctacrttactgtaaaatacatacaaatgctccttcacttacaatgggggtatatcccaataaactcat

SEQ ID NO: 351726 - DNA, 515 bp, Homo sapiens
cataacactgagggcacaatgatctgacgttcacacttctctttcttttgatttccttttggtgttctcaagtgttttactggaatgattaactggagtgatctatgcagattacatatgtgtgtgcatgtatgtattctactaaagttgttttggtttaaatttcttggttctttctagcataggcaagaggtaaagaggcttttaaatattggaaaccatttaacatctagtcaactagattttcagctgtcgtgctccattatacattcatagaaaggattcatttttttctatctgtacttcatcaataatgaccaaaaatactgaggtttttttttttttgctttgattggggttattaacctttaatacaggtaagtcaaaggtggtgtagcttcacattggtaccccaaaaaagactgcttttagttttatcagaaatracttgttttcttgtgtaaaagctaaatgatcaaaacagagtaacagaggcagctgtgcaagagttctgt

SEQ ID NO: 351727 - DNA, 469 bp, Homo sapiens
agcatctgcctgcagttgccctgttttgacgctgggtggccaaagcgcataaggaatttgaagctctgtcttaacttttcaagcaacattttgacratgttgaatgaaggaaataatcctatatcatattaaaagtgggcaaaaaatttgtaaaggaatctatagagagtttggatggaggaatttcagaggttaaacttaagctttctggaaataattaaatcacaacaatatgtcaaatgaaaaaacaatgaactgggaactagaaaataagaattcttgttgatgctcttgagggaaaataatctatttgtaaatctggatgcctttatttatttatttatttatttatttatttatttatttagagacagagtctcactctgtcacccaggctggagagcagtggcgtgatctcggctcactgcaagctccgcctcctgggttcactccatttttctgccttagc

SEQ ID NO: 351728 - DNA, 582 bp, Homo sapiens
aggtttagtgctaaaaagttcatggaagcagctaaatgtagawaacagaaacaaatgggtgggcctctggaggtcagcaagacaaaggagaccataggggtgcatttgagcttcttgtctcgtgtatgtgtgtgtgtgtgtgtgtttgtgtgtgaaagagggataattttacagaccatgtcagcatttttcaagatttccagaaaccacttgggactctagtagctaggagaatgtaactcttaggatcagcagtattgaggcttaaagtcattattattggatattaaaataaatgtggccatatatttttccctaatcttgtaaattgaaatatattaattactccttcatttatgtctgcaggtttactatgtgaaacaaagatgtacatcactgtatactgcaaaaggcatgcagtctaatgttggataatctagcaaaagtaagacaattataacacaatgggataagtgttaagatggagggaagtatagatgtttgggaacacataggaaaaataattaatagagtgggttaccaaaattaagtatgttttcctaaagaagataactcttgtcc

SEQ ID NO: 351729 - DNA, 582 bp, Homo sapiens
aggtttagtgctaaaaagttcatggaagcagctaaatgtagaaaacagaaacaaatgggtgggcctctggaggtcagcaagacaaaggagaccataggggtgcatttgagcttcttgtctcgtgtatgtgtgtgtgtgtgtgtgtttgtgtgtgaaagagggataattttacagaccatgtcagcatttttcaagatttccagaaaccacttgggactctagtagctaggagaatgtaactcttaggatcagcagtattgaggcttaaagtcattattattggatattaaaataaatgtggccatatatttttccctaatcttgtaaattgaaatatattaattactccttcatttatgtctgcaggtttactatgtgaaacaaagatgtacatcactgtatactgcaaaaggcatgcagtctaatgttggataatctagmaaaagtaagacaattataacacaatgggataagtgttaagatggagggaagtatagatgtttgggaacacataggaaaaataattaatagagtgggttaccaaaattaagtatgttttcctaaagaagataactcttgtcc

SEQ ID NO: 351730 - DNA, 555 bp, Homo sapiens
aaagctatgatagagttacaatccagttaagttcagtgtttaaagaaattattttttactgcttagacttgaggaggatggcaatttaaacaaatatggctattcctcagcttgttgtgccttactttattgcagcagtccccaaccttttcagcaccagggaccggtttcatggaggacaatttttttcaatggacagttggtgggggataatttcgggatgaaaccatcccacctcagatcatcargcattagattctcataaggagcgcacaacctggatcccttgcatgtgcagtttacaatagggttcaggctcctgtgagaatctaatgccgcagctgatctgacaggagatggagctcaggcggtaatgctcatttgcccacagctcacctctgctgtgaggctgggttactaacagggagggtaccagtccctgggggttggagaccccttctttgctgcactttgcaaatattgtttttatttattattattattttcttttatttttacaaatttaaggtttgtggtaaccctgtgttgaataag

SEQ ID NO: 351731 - DNA, 588 bp, Homo sapiens
gatagagttacaatccagttaagttcagtgtttaaagaaattattttttactgcttagacttgaggaggatggcaatttaaacaaatatggctattcctcagcttgttgtgccttactttattgcagcagtccccaaccttttcagcaccagggaccggtttcatggaggacaatttttttcaatggacagttggtgggggataatttcgggatgaaaccatcccacctcagatcatcaggcattagattctcataaggagcgcacaacctggatcccttgcatgtgcagtttacaatagggttcaggctcctgtgagaatctaatgccgcagctgatctgacaggagatggagctcaggcggtaatgctcatttgcccacagctcaccyctgctgtgaggctgggttactaacagggagggtaccagtccctgggggttggagaccccttctttgctgcactttgcaaatattgtttttatttattattattattttcttttatttttacaaatttaaggtttgtggtaaccctgtgttgaataagtccctcagtgccattttttcagcagcatgtgctcacttcat

SEQ ID NO: 351732 - DNA, 615 bp, Homo sapiens
cctggttagcacatcttgaaaatgtccagcataggacatccagccctccacatttcaccacagaaatctgcaatctgcttagtgtgctgcatgttcctccaattccatgttgtaaatacataccttttgtttcaaattctccatgtcaatagtatttattggtgagaaaaacagaaaactataatctgttttatatcaacttattagtttgccatgaaattactattcatcttatatatttttagggaacagtcttcctcaagatctgtgtagatatcatccctcatcactaarctaatatacacaaaacaatgcaactttccagcctcagtttctttcattccctgcctcactctcccactttgctctttagccatgcccacatacttccagttccctaaaagaagcaaggaatcctcaactttttgtcacttaaatatgttactccttttgcctggagtactcttgtgtttcttttctactacgtcaatttactcttctttagattctgcctggaaaattcgttcacctagaaatacttccataaccttcccccatctctccatcactgggttactggcaccatatcgcatcagcctgtttatacttgtctgt

SEQ ID NO: 351733 - DNA, 548 bp, Homo sapiens
gccagcacagcactgggtctcaaccaaggcctactgtaaccaatccctggctaccacccatgttcacttgaggccctgaggtgctacaatcaacaygtggtgaagccagccattcctgggtccttcctttcagggcagcaagctctcactgacccaaggcagctccataggtgccatcaaaaagccaggagctagaatcaaaagccctagaagtttatctggttttctgttgtgctccagctgagatggccctcaaaccataagatgcagtccttttcactcttcttctttctaaatgcaaagaaacctcactgtggggaccacttcagaaccatggacaatactcccagtgtaagcaatttattttgtaggtgaaagaaacataaattgtggagtggggaattgaccaaaaaaatagccaattaaggcaataaagtgttcattattaagccagctatgactataagtaataagtttatttttgtagggagattctgggaagaagtttaaaacacatggctcagaattcttatactggaggataaatg

SEQ ID NO: 351734 - DNA, 578 bp, Homo sapiens
  misc_feature (1)...(578): n = A,T,C or G
nnnnnnnnnnnnnnnnnnnnnnnnnnnnnnnnnnnnnnnnnnaggaaaaactgctggcgacctgtgattgtgcttcatacaaggatcaatacaaaggagaatagcctttttagctttttccaagttctctgacttcttggagcaaattggcagtactttttggtcattctcaattaatagcactctctccctaagccagagagyctatagtcctgaggatggtaaggagaagggggagagtttctcaaataacataacagaagtgttccaggctgaagattgctttgattaaaaaaaaaaaaaaaagcaattggttttcaccttctataaaaggattaggaactcagaaatgctgagagaaaaaggcaggaagagttttgtgtattttgcaaaccttgttttgaagtgcacaaactagtgatttctagagcaatttcagggtaagaattaaactcttttaaccaatattttgaagagattttgacaattttttttacattaccatgttggtgaaaacaaattacaatcttcctctatccctaattgcatgtgtttcattcttatatttttctcagcaa

SEQ ID NO: 351735 - DNA, 578 bp, Homo sapiens
  misc_feature (1)...(578): n = A,T,C or G
nnnnnnnnnnnnnnnnnnnnnnnnnnnnnnnnnnnnnnnnnnaggaaaaactgctggcgacctgtgattgtgcttcatacaaggatcaatacaaaggagaatagcctttttagctttttccaagttctctgacttcttggagcaaattggcagtactttttggtcattctcaattaatagcactctctccctaagccagagagcctatagtcctgaggatggtarggagaagggggagagtttctcaaataacataacagaagtgttccaggctgaagattgctttgattaaaaaaaaaaaaaaaagcaattggttttcaccttctataaaaggattaggaactcagaaatgctgagagaaaaaggcaggaagagttttgtgtattttgcaaaccttgttttgaagtgcacaaactagtgatttctagagcaatttcagggtaagaattaaactcttttaaccaatattttgaagagattttgacaattttttttacattaccatgttggtgaaaacaaattacaatcttcctctatccctaattgcatgtgtttcattcttatatttttctcagcaa

SEQ ID NO: 351736 - DNA, 566 bp, Homo sapiens
agggcatagtaagcattcaataaatattagccattaattataaaatatcactcagaggcacgcactccataggttcttaggcctttttagtaacacgcgtcctatacccatagttatgaatttgcatagtaaccgttcatagaatagtaatcaagtacaaattcttttgcaaatttttttcttgcaaaccatttggaggcattggacctactgaatcttcctcatgaaattcaactgtgccctgaacttatgataatttctccttaataaattgaatggaattaatggcttcaaataagaatgatcaaatgtaaaaatatatccawgtgttagaatgaatattttccaatataaaagaaaaaagtaaaaataatataatttcagaatgttttgtttgtgtgagtaggtagatggctaaagaaaacctagaaaacaagtatacatttattttataaatattattaaatgctcccctttgccaggtattaagtgtgccctgtacaaaacttgcttgctaaaacagactttgttctaattcttatggcacatattccttagcagggact

SEQ ID NO: 351737 - DNA, 585 bp, Homo sapiens
ctagttttaacatcacatcaaggaaagaggcacctaagagggtaggaaagacagtcttgaattgctgacactacccttcccccaayccacagaaataccacacggcacaggaagagagaatctgtgtgcttgggaagcagagagcacagtgataatggaactttgcattggaactcagtgagtcctttcacaccacaagcaacacagggcagaattcagctggtgcccacagaaggagcatttagatgagccctagccagagaggaatcgcccatcccagtggtcagaacctgagttctggctagtcccaccactgcaagctaaagagctctagggtcttcaataaactagttcttgtggcctagactgcaattactgggcaagtcctggtgctgggctgggctcagagtcagtggacttgggatgcacatgatccagtgggacaccagcttgggtagccaagggagtgcttgtactgccccttctgcaatcccaggcagcacagctcacagctccaggaaaagagggaagagtgaataaagagggctttgtcttgcaatttgcataccagctcagccacagtaa

SEQ ID NO: 351738 - DNA, 560 bp, Homo sapiens
ggttgggtcttctggcaactgatcccccatcctttgggcttttcaaaaatcacctcgtgaacagaaacagtgtaattggaagggacttgttatgaataacaaaaggtgttcctttcacctttattgctcttatctcgtaggaaattccaaaagttttagaagctctacaccaggaactgggatgaagaccaaatatatttctcattataagtcacaatatcacaaggcattttaaaacatatcgtattagtagggaatatgaggtagagtaagtccaataggttatgagatgatcacckttggatggagagtttactactcacagttccaagaggaaggatcatgccatgaatggggtgggggcaccgaggaggattggtcgggaggcagaaggagcgagggaaaaacaagggcaagaatctttagtgtggtttccatggtaagtaatgggtgatgcagtgtaattaggcttaagaatggctagtttgaataatttccgtggactctggggcataggggctggccctaattgtctgatacctggctccaaggtgattaag

SEQ ID NO: 351739 - DNA, 625 bp, Homo sapiens
tagggagtacttggtaattggttctttgagaatacrtaaaggaagagagatatcaaagagagtgccaggcatttgagttggatgcctgatacagaatgctgggcggtggctgggggacacacaggaaatactcaaaaagttgaagatgcagagctctgacttgaggggaatatggtggccagaagaggtctacttgagtggaaaccacagctgtgggaggagaagctgttgtagtggatgaaatttgcaaggagacaggagtgagagaggaaaaggaaaaagagagctaaggacaggatcttgtaaagaactttggtgtattatgagtaatcgccaccaaagaaggcagagaacagaatataatcagggaatttatttcaaaatagctagaagagaagatgtgaaatgttcccaacacaaagaaatgatagatgtttgaggcgatggatttcctaaatactctgacttaattattacacattctacgcatgtaccaaaatatcacatgtaccccaaaaacacgtatatatattatgtattagtagaaaaaaaattttttaattgcatctggcaatgaaaaggtcattggtgaccgccaaagaagactgccagtaaaacaatgggg

SEQ ID NO: 351740 - DNA, 623 bp, Homo sapiens
ctgggaactctgaccttgcttctggtgccactggatgtttcagtttgcagagatgacaccagggcagcaccccagrgctgtccgcgagtgtcgcagaatgaatacgtctgtatttcagaaacattccttgcacgcttcgtgtatttcagagttctcagtcagcaccagctaattatttcccatagctttctgttagtgggtgaagattggtgcccctcatcccacacactgggaacagcaacagttcacaccaggggagtgtctgttccagacggaagagaaaaccaggagtacagcttgttgtggggctccagctgcagatcctgggccattcaactgacacagcagggccagcttttctccatgtcgggaattctttcaaggcccatctcagaatgatgttttggccaaaaaaattgtctggaagaggacagccacttttgtttttacagtgtgatcctatttatgtaaaacttaataagttcaaatagtattatatattgcagacttcatactatacaaaaaaaaaatctcacaggagattgaatttctaaatgttgaaacgaaaaccttaactttaggggaaagtataggagaatattatcaccttgaaactgataaat

SEQ ID NO: 351741 - DNA, 623 bp, Homo sapiens
ctgggaactctgaccttgcttctggtgccactggatgtttcagtttgcagagatgacaccagggcagcaccccagggctgtccgcgagtgtcgcagaatgaatacgtctgtatttcagaaacattccttgcacgcttcgtgtatttcagagttctcagtcagcaccagctaattatttcccatagctttctgttagtgggtkaagattggtgcccctcatcccacacactgggaacagcaacagttcacaccaggggagtgtctgttccagacggaagagaaaaccaggagtacagcttgttgtggggctccagctgcagatcctgggccattcaactgacacagcagggccagcttttctccatgtcgggaattctttcaaggcccatctcagaatgatgttttggccaaaaaaattgtctggaagaggacagccacttttgtttttacagtgtgatcctatttatgtaaaacttaataagttcaaatagtattatatattgcagacttcatactatacaaaaaaaaaatctcacaggagattgaatttctaaatgttgaaacgaaaaccttaactttaggggaaagtataggagaatattatcaccttgaaactgataaat

SEQ ID NO: 351742 - DNA, 552 bp, Homo sapiens
ccatacatatgatggtgatctcaaaagattacaatgaatctgaaaaatacctatcccttagcgatgcatgccatggttgtcataatgtcatagtgcaattactttattttttaataaatttagtgtagctaaaataaatttagtgtacagtaatgtaacatcccaggcctttccattcattcaccgctcactcactggctcactcagagcaacttccagtcccacaggctccattcacggtaactaccctagaccgtgtaccttttttcatcttttttttaatttttaattttttttcagacagagtctcgctctgtggcccaggctggagtgcagtggtgcagtggcacaatctcggctcactgcaacctccacctcccaggttcaaatgattctcctgcctcagcctcccgactagctgggattacagacacacaccaccacrcccagctaatttttctacttttagtagagatggggttgcaccatgttggccaggctggtctcaaactgctgaccacaagtgatccgcccacctcggcctcccaagtg

SEQ ID NO: 351743 - DNA, 602 bp, Homo sapiens
attccctattttctcccatccattctgaaactctttcttcacactcacgaccactcccttggaggtgagatatgtgcccttctccaacgtgtggagggcaggtaagctggagggcataacttacagcttaaaagaataaaaaagaacaccaaggactctggaagtttttagagcagatgtgttggtcacattcctgtgagctggggattggacatgagccatttgactgcaactccaggaggatgccttgctaaacggcctcatgcacttgcttcaggagcagggagaggcggagggacccctgatgctgtgggattgtttggccctgggaggtggacgtggccttcctttgggtccactgkgtggttaatgagatggaaacttctcaatacttatcccttggggagactggaaggagttttcagtgcagaggcagccagggacagatgaaaagtgatgtttgctgtgaccctctctatccttgctgtcctgggttcccctcccccttaggagccccctccctgctctcccccacctccatctccatcatattttgcctttaggtgaggatgctgttgaaccatgagaagccagtgtgaaaa

SEQ ID NO: 351744 - DNA, 640 bp, Homo sapiens
tggcaaccaatatgggaaaacctaattagaattaatgacaacattcttgggtaataacaattgtgttcattaggtttggtgctgttttacatgcattatttcttgtacttctcccagtaccccttatgagataagaactatcaccatcctcattcttccaaaagaggaagctggggcttagtggtgkaaatactttgcctgccagtggcagagccaaatgccagggcagacttcagagcctcgagtacctgttgtttttgtttttgttttttttttaactgcaggtcaagtttctttctaggtaatcttatttccttattttgggtcagagaatcagagatttgttcttatgtgtggatgtctttatacatgctcctgatccaagggagaggaggtgttgagccctgtggctgtagttgagaagggcaattctgagagacaggactagctggatttcctaggccaactaagaatccctaagcctagctgggaaggtgaccacttccacctttaaacacggggcttgcaacttagctcacatccaaccaatcagatggtaaggagagctcactaaaatgctaattaggcaaaaacagaaggtaaagaaatagacaatcatccattgcctgagagcacagca

SEQ ID NO: 351745 - DNA, 527 bp, Homo sapiens
actggagagctcaagaggtgaggaagcgaggcctccagggaacttcgtggcgacacatcatcttggaaatggatcctccaactctggcctacatcttgtctacaacctcatgagagaccctgagctaagtcatttttgaactcctgaccgaaagacattgtgagataataaactgtcgttgtgtatatcaccaagtattgggataatttgtcttatagcaatatataactaacacaatggaaaaggaattagatccagaagtttcgaaattaaaaaggttacttctagtggtgctgccattgcattttaccttgctagtggaagtctttagacctctttccctataatctccaatacttcccaaagctaacccaaataaacatgagatatcagttttaaaaaatcagtggactcactatgaaacaataaattcaagataaattcctgaatacsctttcccaaccaaagttattaccctaaatctctccttgacagaaattccaaaattattaccaataacttcaaaa

SEQ ID NO: 351746 - DNA, 594 bp, Homo sapiens
acacttcagcctgtgtgcagaatgaggccctccctgcccctaaaaaataaataaaccagattggccatgctcacttcacagtgaataggatggcatggaggcccaaggcaatcttggtaagttgctaagttgaagcctaatgtgaataataaasgagtttgccaacttttaactttcccaatttcagaaattctcactaatcccccaacatttatcccctttgagttccaggaggaattcttccccacattttaaactatgctgaaagtatgaaacacactgagctggatatgtctgtttgagatgaaatatcctgggggaccagtagggtctggacatcgtatacatggagacagataaccactgtcgcttatataggttctctatggtcagcaaatatccctagggggaattgtctcacagccattccctatgtgttgtatttgggtcagaaagcagttctgaggttgctgttctctccatgatctggccagttctcaccttatccagactgtggtaggcagaataatgctccccaaagatatctgtgcccaaatctctagaacctgtgactatgttatgttacatggcaaa

SEQ ID NO: 351747 - DNA, 614 bp, Homo sapiens
acaactaatacacaaaccttaagcctttcattcatgtcactccatcaaactccaagcgcgttcatggctaaggaagctgctttggggttgtggctgctgcaggggaagggtttgcaaataacttttcattctctaggaagactggccaatggaaaaaccatgcttcccttccctaaggatgaatagaaatctttagtaacttcakttggatagaaacaatatgtaaatgatatgtaaaagcaaatttctcaaaatttatgagggctgtattgcataattctatacaaacagtctggtgtgtgggatcctatttccctgaaaagatgaaaagataagctatcctatggtgaaaaattgaaggctgtatgaattgcaagggggggaaattatagttgaaatgctattatgaatctttttgaccagacctgccgaatataatattaaaatttaaacacactgtctcaaacattgctcaagaacttcacgaaaccccttcatgtggtcatgccctgttctcatggctgagtgcgcgctctgatgaatgttcccagaggacagggacaaagtgagtgtctcagctctctctgcatgatccttttaggaactcttctcac

SEQ ID NO: 351748 - DNA, 614 bp, Homo sapiens
acaactaatacacaaaccttaagcctttcattcatgtcactccatcaaactccaagcgcgttcatggctaaggaagctgctttggggttgtggctgctgcaggggaagggtttgcaaataacttttcattctctaggaagactggccaatggaaaaaccatgcttcccttccctaaggatgaatagaaatctttagtaacttcatttggatagaaacaatatgtaaatgatatgtaaaagcaaatttctcaaaatttatgagggctgtattgcataattctatacaaacagtctggtgtgtgggatcctatttccctgaaaagatgaaaagataagctatcctatggtgaaaaattgaaggctgtatgrattgcaagggggggaaattatagttgaaatgctattatgaatctttttgaccagacctgccgaatataatattaaaatttaaacacactgtctcaaacattgctcaagaacttcacgaaaccccttcatgtggtcatgccctgttctcatggctgagtgcgcgctctgatgaatgttcccagaggacagggacaaagtgagtgtctcagctctctctgcatgatccttttaggaactcttctcac

SEQ ID NO: 351749 - DNA, 614 bp, Homo sapiens
acaactaatacacaaaccttaagcctttcattcatgtcactccatcaaactccaagcgcgttcatggctaaggaagctgctttggggttgtggctgctgcaggggaagggtttgcaaataacttttcattctctaggaagactggccaatggaaaaaccatgcttcccttccctaaggatgaatagaaatctttagtaacttcatttggatagaaacaatatgtaaatgatatgtaaaagcaaatttctcaaaatttatgagggctgtattgcataattctatacaaacagtctggtgtgtgggatcctatttccctgaaaagatgaaaagataagctatcctatggtgaaaaattgaaggctgtatgaattgcaagggggggaaattatagttgaaatgctattatgaatctttttgaccagacctgccgaayataatattaaaatttaaacacactgtctcaaacattgctcaagaacttcacgaaaccccttcatgtggtcatgccctgttctcatggctgagtgcgcgctctgatgaatgttcccagaggacagggacaaagtgagtgtctcagctctctctgcatgatccttttaggaactcttctcac

SEQ ID NO: 351750 - DNA, 510 bp, Homo sapiens
gatcaattgagcaagcagggggtacgtgactgggggctgcatgcaccggtaattagaatggaacagaacaggacaggggttttcacagtgcttttctatacaatgyctggaatctatagataacacaagtagttaggtcagaggttgatttttaactaccagggtgtgtgccaggctatctgtctgtggatttcatttctgccttttagcttttacttcttctttctttggagaaatgcccagaaactgggcgtaagacactatgaggagtggtctcctcccttagtcatacctacattcttactttaataaaactgcactttcatgggaaaagcattttttttctggttttcatattaactggcttgggctgaagttatgcttaggaaagcttggacagtcggttgttgcaaccagacccaaggaggccttgtctgcctgggctgcatgaatgaggaactggggacaggtattgagactggagaggtgggaatcagatattccaaagcc

SEQ ID NO: 351751 - DNA, 510 bp, Homo sapiens
gatcaattgagcaagcagggggtacgtgactgggggctgcatgcaccggtaattagaatggaacagaacaggacaggggttttcacagtgcttttctatacaatgtctggaatctatagataacacaagtagttaggtcagaggttgatttttaactaccagggtgtgtgccaggctatctgtctgtggatttcatttctgccttttagcttttacttcttctttctttggagaaaygcccagaaactgggcgtaagacactatgaggagtggtctcctcccttagtcatacctacattcttactttaataaaactgcactttcatgggaaaagcattttttttctggttttcatattaactggcttgggctgaagttatgcttaggaaagcttggacagtcggttgttgcaaccagacccaaggaggccttgtctgcctgggctgcatgaatgaggaactggggacaggtattgagactggagaggtgggaatcagatattccaaagcc

SEQ ID NO: 351752 - DNA, 554 bp, Homo sapiens
agcagtcagcctcatttcacttacaaaaatgggttcctgagattttgctgtttatggatattttgtaaatagaatccgtttaaaggcactagaggaaatttctatttaaatgaatcctcctgggaatccctttgcattgaaaatgtgaattgatctgttccataacatggatctgycagattttctcagggtggccttgcagtgcggcaccccagggaagaattacagtagagtaatggagcgactccaggctggcggcctctgcttgtgttcccgccatctgtagcaaaggatgcctcaacctgggcagcaggattgggatgtgaaacataaaatgtgctgtgacatcaaatagacaattctggcagcctcctactcatttaaaagatgtcttgttaggtttttaagtcctttgggaggatccttctatcctcttacacaaggaatgctactcttgatgcaattaatctgaaagaggatttaaagacaatttctatgccagggcttccgctgtgtgaagccaacattaggttcaagtgtgcgataacattcga

SEQ ID NO: 351753 - DNA, 476 bp, Homo sapiens
tgtaactcctgtttctaggaaactgtgaacataaacttctttcttcatgacaatcatttctgtgcctgtgtctctcaccatagcagcttaaaacaaagcccacatgccctcatgacactaatgaatttgtagaggccctgcatcagtcaggagtgtattcaacttaagaaaatggagcatgtgaccagaagcctgaggaggtaggcactgtgtttggttcagaggcgtggtgaggtcagggctggcctctgggccatcctcttggagtttttccagtggtcaaaggtggctgctgcagatgctggcaggcaggggtgaagcaggtgaggaatttagaacaatgctggagggaggcagcactcttgaaggctgtgaattcctaagcagtagcttrgcaacttcacggggagcttgggcttatgtgccgaaggtggggaagagccatttgacatgagaaagtcaagagcaggaggctg

SEQ ID NO: 351754 - DNA, 641 bp, Homo sapiens
gataagcagttggggggtctgctttcttttttatttgctaatcaaacaagttatgagatctttccttggttttggctttgattggaagaattgttgaattagctgttccctctaagtttacttttagttccaaaatattaacatataaaccatagataaatgcagctacagctacctatgccaaaaatttcctgcacaaattctgatgacttcatgagtttgtgttagttataagaggtctaagaatgaggaaaacggtgtcatttggtaggccttcagtttagaatcacgacatagcagggatgtgactttcttaaaaccaatatcctagcattgtgcttcaccttaaaatgaatccatcactaagcttaaatgatgaggaaaatggaagaaaagagaaattctatttcttatgaatttatttttatttttattttgtgagacagagtcttgctctgttgcccaggctggagtgcagtgacaggatctcagctcactgcaacctccaccttctgagttcaagcaattctcctgyctcagtctcccgagtagctgggattacaggcatctgcctaatttttgtgttgttagtagagacggggtttcgccatgttggtcaggttggtcttgaactcctgact

SEQ ID NO: 351755 - DNA, 667 bp, Homo sapiens
gttgtagcacgtgtcagaatttcctttcttaaggctgaatatattccatttcatgtatacaccacgttttgtttatccattcatctgtcagtggatccttgagttatttgcaccttttggctattgcgaataaagstgctatgaacatgggtgtacaaatactgtcttttgagtctctgctatttctggtgtatatactcagaagtgaaaatctggatcatatgttaatgctatgtttaattttttgaggaactgctgtaatgttttccatagaggctgcaacattgtaccttcccaccagcgatacacagaagttctgattcctccacatcctcaccagtgcttgtattctctctgtatgttttactgataatagccattgtggtgggtatgaagttcattcttattttttaagaaaaaaatatacaataaaaatatgtgataaaaagagagccacaattaatattttgatgacaattcttttggacattttcttatgcatgtatgtgtctccaggtttgtttttaaaatataagatcattctgtacttttatctcctagtttttactatcattaacaatattctggttgttaatgatatttacttaattcattgttatttccttgtgatgatttcctaaaatagaattgctgagtcaagagatcg

SEQ ID NO: 351756 - DNA, 466 bp, Homo sapiens
gagccagaaccagagccaccgtctcctgactccacccgcttcctctcccatcccttcccttctccaccttccaagctacctcctgtttaacccctcccaactgtagaatttgctaatttgctttcatgatttggttcctagtgccattaagtatcactggtatgaaggtaaaccagcctggttggtgtatcccgatgtaggagtggaaattcccctcacagtgggaagagggaaagaattatacatcccagcctcccacatccacaggaccacagggtgtctgtctctcccacactcaggtcttgttcctccttgagcctcgaggcctgtcccctccctacttggctaagctgagggttctgtgcttttcttgctccaatgctgaagaatggcctgctgctttcccaggtgtcacgggcactgagaaagggccccrtggcaccaggagctaatcctcaggggtcag

SEQ ID NO: 351757 - DNA, 451 bp, Homo sapiens
tggaggttgcagtgagccgagctaagatcacgccattgcactccagcctgggcgacaagagtgaaactctgtctcaattaaaaaaaaaaaaaggaatgtaaaattcagacatgtgtttgctaagcagtcaagggtaaaagctgccatctgagggattacaccacagacctctattatacctaaagacctacttgcaaagattctctttctattcttgcaactatgagctctgctagttttaaggttttagtacccaaggaaagaacacttgcccagaagacacagtcacagttcccctgaagctgaactgtcgctgaatcattctgggcttcctatatcactgggtgaaaaggcaaaaaaaaaaaaaaaaaarggaaagaaaaaaaatagtggggaggaacgttagagtactgcttgagatgattaatcctgaccatcattggaaaataag

SEQ ID NO: 351758 - DNA, 551 bp, Homo sapiens
acatggccagagcaggataaagggccaggggaagtgctacacacttttatacaatcagatctcgtgagaactttgtcatgagaatggtaccaagggggtggtgctaaatcattcatgaaggatctacccccgttatcsaatcacttcccaccgaaccccacctccaacgctggagattacaatttgacatgagatttgggaggggacaaagatacaagccgtatcattctgtttctggcctcttcaaatctcatgtccttctcacattgcaaaatacaatcaccccttctcaatagtattccaaagttttaactcattccagcattaactcaaaagtccaaagactcatctgagacaaggcaagtatcttcctcctatggacctgtaaaatcaaaaacaacagtaacattactctcaagatacaatgcagatgcaggcgttgggtaaacgttgccattccaaaagggagaaattggccagaagaaagggactaaaggccccaggcaagtctgaaacatagcagggcagttgttaaatcttaaagctccaaa

SEQ ID NO: 351759 - DNA, 600 bp, Homo sapiens
tgcttggttgggtaatttatgcccattatctccaattgttatatagtgcatcataaatgttctcatactgttcttcagatgtgcaaagaaatttcaccttttttatttacagctggccaaatcttattcttcatggttttccaacggagatacaacattaaatgtcagaccctttggatgtatagtgtctttcagctatatactcagtcttttaggtttcctctctttccccttgctcctcttgaacatggtgtctgraatgcatgtgcttagcaccagtggtgaatgaacactctagactcatgttagttcttgggttcctggaggccctaccttgggatggctggcctgaccaactgcatagactgaagagcaatcaggttctaaccagctatttggagcttcctgctggcctaatactagagactgtgatcctggcctattaactctgtttatgaagccttcaaatgttgcagactctgaccatcccaaggtgtatgacagtccaccttctgtctcttacattctgtgtccccacatcaggacatgtaggaatacctgtatgcccttcatgccaggcgcaggccagggggagcaagc

SEQ ID NO: 351760 - DNA, 600 bp, Homo sapiens
tgcttggttgggtaatttatgcccattatctccaattgttatatagtgcatcataaatgttctcatactgttcttcagatgtgcaaagaaatttcaccttttttatttacagctggccaaatcttattcttcatggttttccaacggagatacaacattaaatgtcagaccctttggatgtatagtgtctttcagctatatactcagtcttttaggtttcctctctttccccttgctcctcttgaacatggtgtctgaaatgcatgtgcttagcaccagtggtgaatgaacactcyagactcatgttagttcttgggttcctggaggccctaccttgggatggctggcctgaccaactgcatagactgaagagcaatcaggttctaaccagctatttggagcttcctgctggcctaatactagagactgtgatcctggcctattaactctgtttatgaagccttcaaatgttgcagactctgaccatcccaaggtgtatgacagtccaccttctgtctcttacattctgtgtccccacatcaggacatgtaggaatacctgtatgcccttcatgccaggcgcaggccagggggagcaagc

SEQ ID NO: 351761 - DNA, 364 bp, Homo sapiens
gattctcttgcctcagcctcctgagtagttgggattatgggcatgcatcaccatamccagctaatttttatatttttagtagagatggagtttcaccattttggccaggcttgtctcaaactcctgacctcaggtgatccaccccccttggcctcccaaagtgctgggattacaggcgtgagccaccatgcccggccctgtcctctcactttaaatgcaggacaaggagtgaggaaaatgggaatcctgacatctgacctccttcatttatcattcacacttttcttcttttaacactgccctgggcacagaagcagggcttgccccttcctcttcctgcctagccagacccccatacctcata

SEQ ID NO: 351762 - DNA, 364 bp, Homo sapiens
gattctcttgcctcagcctcctgagtagttgggattatgggcatgcatcaccataaccagctaatttttatatttttagtagagatggagtttcaccattttggccaggctkgtctcaaactcctgacctcaggtgatccaccccccttggcctcccaaagtgctgggattacaggcgtgagccaccatgcccggccctgtcctctcactttaaatgcaggacaaggagtgaggaaaatgggaatcctgacatctgacctccttcatttatcattcacacttttcttcttttaacactgccctgggcacagaagcagggcttgccccttcctcttcctgcctagccagacccccatacctcata

SEQ ID NO: 351763 - DNA, 594 bp, Homo sapiens
ctaagtggaacactacaattgataacgaatggttttgtaataatcatggatagtgacagagtaaactctccataaataatagtgtttatttttacagtaagaatatgtataaatgtccatacagggttgcttttcctcaaccagccatagaagcaaaagtattgtactgtttcttatatgatgtgggtagtaaccgagcattgtctcacagacatgacaacttgccattttttagtactaattaccatgatatcctctctgtgaaactgtactatcgcttctgtctaaatgattaattttatgaatcctcctactccccaataacctggaattagtgttacattgtcccccgatctccaaagtcacgtaagaaaatactgaccatgtgaaattaaataaacaagtagtattacctacttcacagtctttcctgctcttcctttaagaaaayctctgttctgtttgacaatgactcctctagaagaccaaggaattgcacttaaatggcatttttctttgcccttctacagggagcaagatttcattggttcattgatggtgcacaatgtgccagaaagtcttctaagtgcacaa

SEQ ID NO: 351764 - DNA, 603 bp, Homo sapiens
tgtgatatcagtataaaggctgacattctaaagtaaatggctggatagcaatacatggaggatcaaagatcatatgacttatactatgtgaaaatatgaatgttccatctgcagacagtgcttagtgacttttggagaatgtgtggtctttcatcattccctgctcctcttctgctcaccattgatacctgcaggaaaagaataaaaaatgtcaagttattgggagtacccagcttttttgctaccatattccatccgggttttttttttcctgtaatttgttcatttaatagatgtaattatgatctatatgctagttactgtgctaaaacactaggaatagaaaaatgaattagaatttttctcagcccttgaaggttgtatagtccagagagagaggaggagaaagagagagagagagaacagataaaasaccacacaatatgacaaaagctataagaaatgagcagaattctgtggacactcagattgctaaagagactctgctgtggactgaatgtgtctactccaaaattcatatgttgaaacttatccccaatttgatgatacttgaaggtggggcctttgggaagtaattaggtc

SEQ ID NO: 351765 - DNA, 546 bp, Homo sapiens
ttttctgtaaggtatatcagctaccaataaattctatcagtttttgcctatctgataatgtttttatttcacytttggttttgaaggatagttttactgaatgtaagtctcttggttgacacactgttgagattttttttttccttccagcacttttgatacaattgacctctgaacaacacatgcttgactgtatttgtccacttacacatggattttcttctacctctaccaaccctgagatagcaagacctcttcctacttccccctagcctatgtaatgtgatgacaataagaatgaagacttttatgatgacctaattccacttaatgaatagtaaatatattttctttttcttatgattttctttttttgtttgtttctttaagacagagtctcgctctgttgcccaggctggagtgcagtggtgtaatcttggctcactgcaacctctgccttctgggttcaagtgattctcctgcctcagcctcctgagtagctgggattacaggcgttcaccactaggcatggctaatttttatatt

SEQ ID NO: 351766 - DNA, 607 bp, Homo sapiens
tattgttacaatccaggaggagaaatgctgagttccttttaaaccaatgaggccatctctgaagaactgtactctgtgtgctcacataaagtaacgaagttaccacatcaaacatgcctgcccttctttctctaaccagctctatrgtcctcattcaatgtaaatccaacattgatcatgtggatgaaatgaatctaaatgtggtagcttttctccacttggaagcttgagcctgaacatggctaattctgtacccactccatactgtccaatttccatcccctctatccccaccaataatttggtttcattctcccatattaaagtcacaccccaccaaattatatgctccccaaagagtcactctcttcttgcattcatctcttcatcttccagggttcatagcagagtgatttgcatgtaactcgtgctcaatattacttttaataaacttacaaaagaaaagaccattttagctgctggtgtttagtaaagttatctccagtattgtttgatgctagctcttatgttttctgatgtgttacaactagtatgcaacattagccagagggataattcattagttctaataatatttgttgagttt

SEQ ID NO: 351767 - DNA, 527 bp, Homo sapiens
gcagtctgtgctcatttctcgagtagctaaaccctttgacactgtggtttttaattaaaattacattaaagttaatcaaccagaaagaggctgctgtagaaggaggtttgattgcaacctgcaaagggcacgaaggctgccaacttgctaaagatgtgcctgcagatgccaatctgcgcacatgagccccacggttacagagctgccgaggagaggtcagttctgtttgcattttccctggaactgtcaaaaaaatygcgatggccgtggcatggcataaagttaaaaaaacaggcaagcctcttcaaagcacaccattccagcatttctgctactgccccaaaccactgatgtgaagctgtcatgtcccaactgcttcctcttcagatgcagttaggctcaactgagagccattaggtttgttgtttgaggaggctatagatactcttagaagatcttgtcttctacaggctaggtttctggcatatgatgctgtgattggctttgctttgctttgaaagggccaa

SEQ ID NO: 351768 - DNA, 602 bp, Homo sapiens
gtatctatattttagctagcatactgggagcaaaattatggctaattgcttattttaatatgttttagtctaataaataatatttaatatatttatattagatcaattgacatattttattatttwtatatatatgctagtatatattgtatttgcctaatatttatatttttctatgttaaatatatgctaatttgggggcttatgttttgaggttttggtgagagtccctcattatatatacaagttctatgttatgttcactaacttctctgatttgttctagtgtattttcttattttttacctcatagtaatgcaaatgttcatttatgaaaaagttgaaagtgttgcatgtcctttttaatttgcatttaaaaattcctttaattatattaatattaacaattttgtacacctgtgatgcattaatatttgaaacttatttttagatctttgcttcttagaaagtgatttgtagaccagcagccacctactgaatcagaatctacattttaataagatccccaggtgagtgtgttcagcagtacacaggtaagtttgagtagtactttttagggtctttctcatctcctgaaatta

SEQ ID NO: 351769 - DNA, 602 bp, Homo sapiens
gtatctatattttagctagcatactgggagcaaaattatggctaattgcttattttaatatgttttagtctaataaataatatttaatatatttatattagatcaattgacatattttattatttttatatatatgctagtatatattgtattygcctaatatttatatttttctatgttaaatatatgctaatttgggggcttatgttttgaggttttggtgagagtccctcattatatatacaagttctatgttatgttcactaacttctctgatttgttctagtgtattttcttattttttacctcatagtaatgcaaatgttcatttatgaaaaagttgaaagtgttgcatgtcctttttaatttgcatttaaaaattcctttaattatattaatattaacaattttgtacacctgtgatgcattaatatttgaaacttatttttagatctttgcttcttagaaagtgatttgtagaccagcagccacctactgaatcagaatctacattttaataagatccccaggtgagtgtgttcagcagtacacaggtaagtttgagtagtactttttagggtctttctcatctcctgaaatta

SEQ ID NO: 351770 - DNA, 602 bp, Homo sapiens
gtatctatattttagctagcatactgggagcaaaattatggctaattgcttattttaatatgttttagtctaataaataatatttaatatatttatattagatcaattgacatattttattatttttatatatatgctagtatatattgtatttrcctaatatttatatttttctatgttaaatatatgctaatttgggggcttatgttttgaggttttggtgagagtccctcattatatatacaagttctatgttatgttcactaacttctctgatttgttctagtgtattttcttattttttacctcatagtaatgcaaatgttcatttatgaaaaagttgaaagtgttgcatgtcctttttaatttgcatttaaaaattcctttaattatattaatattaacaattttgtacacctgtgatgcattaatatttgaaacttatttttagatctttgcttcttagaaagtgatttgtagaccagcagccacctactgaatcagaatctacattttaataagatccccaggtgagtgtgttcagcagtacacaggtaagtttgagtagtactttttagggtctttctcatctcctgaaatta

SEQ ID NO: 351771 - DNA, 584 bp, Homo sapiens
tttctttagaatattgctttctatatagcagttcccatttctttagagtattgctaagaattgatattgccaagttttaaaatgcagaatgctattatcgtgattgtaatttgcaaatccctgtttattagtgagatttagcatcttttcttggtcatttgtatttttacttttgtgaatggtttatttatatcctttgmacatttttctcttgtgtggtttatctttttctattgttttgtaggttttcttgtaaaatttggatactaattcatgttctaatcatatacgttacaaatattttctccaaatctttcatgtctctttgaactttgtttatggtattttgtgatacagatttatttaaattttgattttgtcaaaatttttggcaaggtcatgggtgtattctatattttctttactagaagttaaataaagcaccagggtttctagccataatatatacaattttgtagacaaacaatattttgtaatgtattgatacaattaacatgtttttgtataattactatatactaatattgtggtaaacgcagcaaagcttgtatagaggggcaaag

SEQ ID NO: 351772 - DNA, 586 bp, Homo sapiens
caaacatatttttgaagatgaaagagagtttaaggggaaattaatgctattcaacttaaggaaaagctattaaagagatagtgaatattgttctttattatcatcaaagaatgctataatgaattagtaataagctgaaacatgaatttgatttgacataaagaaatagttctgatagtggagaagaagakatttcttagggagtgtagtagattgcaaaaataaccacaatccagcacctctctttgtatcagtggctctagaaggccattttgcagctcctgctatcaagaggtggagcctgtgttcctacctgattctaggatatcttgtgccttgcttcagcaaatagaatgtagtggaagtaatggtgtgctagttctgcgtctaggacccgagactttatagcttctgctcttcctcttgaaatactgcccagttagcatgagctagcctgctggagtttaagagagagtccttgtcccaggcaacagccagcaaacccaagaggcagtcatctaacttactggcaactgattgcaggtatattagcaagttcagctgagtccagaagaaccatccagct

SEQ ID NO: 351773 - DNA, 553 bp, Homo sapiens
tgcaggtaaatgaaaaatgatgacgttgaaattattcaaaatcccatgaactcctccacgtgagatctgagcaaataggaagaaggaaaggcacagatacaatgaaacaacattagacatgggttttcttccaggcttagtcatggcagctccctgtgccctgaggtttgtccctggacccctctgcctgttttctcatctgcaccacactgccaaagccccttccagctgttaatgctaaattctaaactgaagcatctatgttgattcccaccttgcctacaaagtgatgtcaggtatttaccttcattttattctgattaccaattgagacttgttcataatactttaaattagggttagcaaattattccctgtgggycaaactcagcctgtcccctgattttgtatggcccaggagctaaaaatggttttacatttttaatgactgaaaagaatcaaaagaagacttattttacgatgcaataacagtatatgaaattcaaattcagtgtccacaaagaaagttttattggaacacacaagccatact

SEQ ID NO: 351774 - DNA, 609 bp, Homo sapiens
gtaagcaggtctgtcagatcagtagaatcaccttattatatggagtgcagtgcatgtcagaaacttcagggaaagtgttgaacacaacttatttctgcatgtcttgtgagccatgcactctccaaccttttcccagaatatcatttcaaagatttttgtataatgaaaatccttggaagatggagatcatatctccctccagggcaaagggtaggtttgcttatagcttyggaagccaatatcttcctccaaagtgaagggctgatatgtttattggccagcaaaaataaattcacattccctaagctcagggctgctctcctgtaacacaacctactgcatccgtctaggcccgtattgcccttgtgggacttaaggacaaagagaacaggccaaatatgcagatactcatgctgcctgctgtgccgtgcctaataaagtcctctgtctctgacccagagagtctcatgttttctaccagcatccatgaaattgtggcaggctaacttatgaggttttaaggaggttaacatcatggacactttacagtacttgctagaaagttactcaagattcctaatcgtggcacactcagtgtgaaagagtgac

SEQ ID NO: 351775 - DNA, 602 bp, Homo sapiens
cagctctctaaattgactcagctccaggtaaggtcaaaatcttctcccatattctagactttcagtttccccagtgggggttgtgtgttcgggggcaggcaatctccctttcccacttccacagtttgggcactcacaatatttagggtgtctcccaggtcctgcaagagcaatttgctttcttcagggggtctgtggatcttcccagttttcctggtttattactgtagttgttctggagcaaaaattcatgatacaagcctccacacactgctctgtctgagtcagagctgcagtctagtcctgcttcccatccacaatgatccccatgatcccgattcacttttcaacaccacatgatcaaatgtgtcacatcctttaatttctcaggcattccactgaaaagttctttttctatcccctttgtgttttcgctcttcagtgttttaaggacaataattatgaagatcatgggattaatgactaaagtttcagtattttgattttgagtcaataggaagtatttaaatgcatmtttgataggaatgtaaaataggtcatttgatagtatggcaacacggacttgagttacctgcatagac

SEQ ID NO: 351776 - DNA, 569 bp, Homo sapiens
aaagcctatctactgtgaaagcataatttcaacattcaagaagagagaaagcagccctaaatctctatgaaatcaaattaagtcagtggatggttgtatgaggaaatgaaaagaaagcaaatagaacttgttaaatgtatttgttcatgaaaatggtttataaaattcattgtgaatgaaattattgtatwtattcgtttgctaaattttatggacacagcacaaattttttcttgagaagaaaattaagaaaaaattcaaaatggggaaaaacatttaaggcattgctgtttattataatgcagcagattaatgtgaggagtttaaattactataatagtttatgtggttgaaagttgcagtggtatggtaactgtggtaggcagaataatagcccccaaatatgcccacccctgaatgtcttgaacatgtgaatacattaccttacatggcaaaggaggctttgtggttgtgatgaaaggaacagatgtcaaaatgggggtattatcttggattatctatgtgggcccaacataatcgtatgagtccttaaaagtgggtaaattttc

SEQ ID NO: 351777 - DNA, 600 bp, Homo sapiens
gcagaaaaatttcaaaaagtttatgtagatagtaggtccttaagaaggtggaacataactccacactccttaagtgtgggctgcacatagcaacttcctttcaaattctacattattgaaggaggaaaagaataactttatagtgaagaaagctgacaaacackacttcagcaaggtgatcaaaattaacatcaacagtgataattcatgatgatagtggagtaccttgatatgatttgttgagaatgacagttgatctctatagtctttcttcccaaaactcataaccccagtctaaccatgaaagaaacgtcagataagttccaactgagggacttttcaaaaatacctgatcaatacttctcaaaagcatcaaggtaatcaaaaaaggggtatcttaatatataaatattggttaattaactataagaagtgtaccataatagtgtaagatattaataacaggagaaattagttgtgggtgtagtgtacactatctccacagatattccataaatctaaaataagggtaaaataaatagcttattttaaaaaatcattggaaagggaactgatgaactcgtcttggtcagatattca

SEQ ID NO: 351778 - DNA, 359 bp, Homo sapiens
aggtccttaagaaggtggaacataactccacactccttaagtgtgggctgcacatagcaacttcctttcaaattctacattattgaaggaggaaaagaataactttatagtgaagaaagctgacaaacactacttcagcaaggtgatcaaaattaacatcaacagtgataattcatgatgatagtggagtaccttgatatgatttgttgagaatgacagttgatctctrtagtctttcttcccaaaactcataaccccagtctaaccatgaaagaaacgtcagataagttccaactgagggacttttcaaaaatacctgatcaatacttctcaaaagcatcaaggtaatcaaaaaaggg

SEQ ID NO: 351779 - DNA, 501 bp, Homo sapiens
gatggacctctctgagtggtcraaaactgtgaagacatttatatcctgtgtgagtgctcacctatagatgacctcagcagaggagaattttaataatcaaatagatacgatgacccgttctgtggacagcagtcagcctctttcctcagtacccctgtcatcacccaataggcctgtcaaaaaagtggccatggtggcaggatggaggttactcatgggctcagcaacatggacttccactcaccaaggctgacctggctatggccgcagctgagtgcccaatttgccagtggcagagaccaacactgagccctcaatatggcaccattcattggggtgatcagccagctacctggtggcaggttgattatattggacttcttccatcatggaaagggaagtggtttgacctcactggaatagatacttactccagatatgggtttgcctatcctgcaagcaatgcttctaccaagactaccatccatgggctcatggaat

SEQ ID NO: 351780 - DNA, 622 bp, Homo sapiens
atagtatagaaacttggtaagtttaaaccagatataatgggcaggtgtataggttctgaacttctaaaattgaatgcttctgtaatgtttggggaagcttggagagcctataggcagaggatcagttttgaggtgattgctgtgatctaggtatgaaatggtgaaagctggccttgggtgatgtatcagtctgttcttgcattggtataaaggaatatctgatggcctggcgtggtggctcacacctgtaatcccagcactttgggaggctgaggtgggcggatcacccsaagtcagaagttcgagaccagcctggccaaaaaggtgaaaccaggtctctattaaaaatacaaaaattagccgggtgtggtggcacatgcctgtaatcccaggtacacgggagactgaagcaggagaattgcttgcacccgggagacagaggttgcagtgagccgagatcgcgccactgcactccagcctgggtgacagagcaagatctgtctcaaaaaacaaaaacaaaaacaaaaacaaacaaacaacaaaaaagaaatatctgagactgggaaatttgtaaagaaaagaggtttaattggttcacggttctgcaggctgtacaggaaac

SEQ ID NO: 351781 - DNA, 599 bp, Homo sapiens
atacatttgtggtaagtaggaaagtttctaaagtatttgttattagggataatgcttagaaagtttgcagacccccggaaaaggtaggataatacgcactaaagaggagctagccaggacaaaaataaatagaaatcaggtttgagatgaacgrtaggctgatgagaggattaaacgtaggtggaattatccaaatagaggaaataagaatggacaaaggttgttcggagcacagatgcttttggcagacatttgtttctcattggcagatgctccataaggccaaatatagaagaatgtgctaggaaatgaaataactggatcagaaagcaaaaggaaaagaatgtagtttacctgcaccaacttagacatgtgaaatatttgaaactcaggtgcacctgcccgaaaagaggagaaggacaatatcaggaaatgaaatcctagaagcatacccatggctgaagagaacattctggcagaaagaattgttctgctgttttgaagtaacacaaatccctcaagatgaagaactagatttggaggtggaccagcagaaggtatctgtcttctcttgcttcagtagactagaagaggacgta

SEQ ID NO: 351782 - DNA, 599 bp, Homo sapiens
atacatttgtggtaagtaggaaagtttctaaagtatttgttattagggataatgcttagaaagtttgcagacccccggaaaaggtaggataatacgcactaaagaggagctagccaggacaaaaataaatagaaatcaggtttgagatgaacggtaggctgatgagaggattaaacgtaggtggaattatccaaayagaggaaataagaatggacaaaggttgttcggagcacagatgcttttggcagacatttgtttctcattggcagatgctccataaggccaaatatagaagaatgtgctaggaaatgaaataactggatcagaaagcaaaaggaaaagaatgtagtttacctgcaccaacttagacatgtgaaatatttgaaactcaggtgcacctgcccgaaaagaggagaaggacaatatcaggaaatgaaatcctagaagcatacccatggctgaagagaacattctggcagaaagaattgttctgctgttttgaagtaacacaaatccctcaagatgaagaactagatttggaggtggaccagcagaaggtatctgtcttctcttgcttcagtagactagaagaggacgta

SEQ ID NO: 351783 - DNA, 599 bp, Homo sapiens
atacatttgtggtaagtaggaaagtttctaaagtatttgttattagggataatgcttagaaagtttgcagacccccggaaaaggtaggataatacgcactaaagaggagctagccaggacaaaaataaatagaaatcaggtttgagatgaacggtaggctgatgagaggattaaacgtaggtggaattatccaaatagaggaaataagaatggacaaaggttgttcggagcacagatgcttttggcagacatttgtttctcattggcagatgctccataaggccaaatatagaagaatgtgctaggaaatgaaataactggatcagaaagcaaaaggaaaagaatgtagtttacctgcaccaacttagrcatgtgaaatatttgaaactcaggtgcacctgcccgaaaagaggagaaggacaatatcaggaaatgaaatcctagaagcatacccatggctgaagagaacattctggcagaaagaattgttctgctgttttgaagtaacacaaatccctcaagatgaagaactagatttggaggtggaccagcagaaggtatctgtcttctcttgcttcagtagactagaagaggacgta

SEQ ID NO: 351784 - DNA, 572 bp, Homo sapiens
ctaatagttttgggcatggtgttgctggaggagaagcacatgattagactgaattaatttgttattttcaatccacctggatttatgaaccattcttttttctttcctttttttttttttttttttttgagacggagtcttgctctgttgcctgttgcccaggctggagtgtagtggtgcgatcgyggctcactgcaacctttgcctcctgtgttcaagagattcttgtgcttcagcctcccaggtagctgggattatacgtgcccaccacaacgcctgactaatttttgtatttttagtagtgatggggtttcaccatgttggccaggctggtcttgaactcctgacctcaagtgatccacctgccttggtctcccaaagtgctgagattacaagcgtgagccactgcaccagaccattgtttttttttttgctttattcatactttccccagtagtgaccattgacagcatttatctgatcttcaaacctctattctttctctcagtccctcattcttagcagacagactggcttcttgcttcccatagaaaatagaagctaccaatata

SEQ ID NO: 351785 - DNA, 548 bp, Homo sapiens
ctaaatcaaggggatttcaatacttggtatgtgttgatacctttacaaattggatggaagccttcccttgcaagagagagaaagctcaggaagtggttagtcctaattcatgaaataattcctagatttgggcttccccaaaacttacaaagtgacaatggtccggcttttaaagccatgataactcagggaatttccagggcactagggatacaatatcaccttcagtgcacgtggaggccacaaacctcagggaaggttgagaaagcaaatgaaacactcaagargcacttaaggaaactaacacaagaaactcatctcccatggcctactttcttgcccatggccttgttgagaatctaaaattcccctcacaaaatggggctcagtccatatgaaatgctgtatggatgaccttttctcacaaatgacctcttacttgatcaggaaatggccaacttggtcaaagacataacttctttggaaaaataccaacaaaacattaaaaacctacctgaaggacatcacagagaaaagggaacagagtt

SEQ ID NO: 351786 - DNA, 548 bp, Homo sapiens
ctaaatcaaggggatttcaatacttggtatgtgttgatacctttacaaattggatggaagccttcccttgcaagagagagaaagctcaggaagtggttagtcctaattcatgaaataattcctagatttgggcttccccaaaacttacaaagtgacaatggtccggcttttaaagccatgataactcagggaatttccagggcactagggatacaatatcaccttcagtgcacgtggaggccacaaacctcagggaaggttgagaaagcaaatgaaacactcaagaggcacttaaggaaactaacacaagaaactcatctcccatggcctactttcttgcccatggccttgttgagaatctaaaattcccctcacaaaatggggctcagtccatatgaaatgctgtatggatgaccttttctcacaaatgacctcytacttgatcaggaaatggccaacttggtcaaagacataacttctttggaaaaataccaacaaaacattaaaaacctacctgaaggacatcacagagaaaagggaacagagtt

SEQ ID NO: 351787 - DNA, 632 bp, Homo sapiens
tatagaaagaaaagactgttaccagccaatacaaaaacacacttacatacacagaccagtgacactgtaaagcaaccacacaaacaagctgacatartaaccagctaacaatacaatgacgggatcaaatccacacatatcagtactaaccttgagtgtaaacaggctgaatgccccacttaaaagacacagagtggcaagctggataaaaaagcaagacccaatggcatgctgtcttcaagagacccatatcatacataatgagactcataggctcaaaataaagaaatggaggaaaatctaccaagcaaatggaaatcagaaaaaagcaggtgttgcaattctaatttcaggcagggcagactttaaaccaacaaagatcaaagaaggcaccaaaaagcattatataatggtaaagaattcaattcaacaggaagacctaactatcctaaatatgtgtgcacccaacacaggagcacccagattcataaagcaagttcttagagacctatgaagagccttagactcgcacacaataatagtggacgaattcaacactccaataacagtactagacagattgtttaagcagaaaactaacaaagatattcaggacctgaacttaatgttag

SEQ ID NO: 351788 - DNA, 632 bp, Homo sapiens
tatagaaagaaaagactgttaccagccaatacaaaaacacacttacatacacagaccagtgacactgtaaagcaaccacacaaacaagctgacataataaccagctaacaatacaatgacgggatcaaatccacacatatcagtactaaccttgagtgtaaacaggctgaatgccccacttaaaagacacagagtggcaagctggataaaaaagcaagacccaatggcatgctgtcttcaagagacccatatcatacataatgagactcataggctcaaaataaagaaatggaggaaaatctaccaagcaaatggaaatcagaaaaaagcaggtgttgcaattctaatttcaggcaggrcagactttaaaccaacaaagatcaaagaaggcaccaaaaagcattatataatggtaaagaattcaattcaacaggaagacctaactatcctaaatatgtgtgcacccaacacaggagcacccagattcataaagcaagttcttagagacctatgaagagccttagactcgcacacaataatagtggacgaattcaacactccaataacagtactagacagattgtttaagcagaaaactaacaaagatattcaggacctgaacttaatgttag

SEQ ID NO: 351789 - DNA, 632 bp, Homo sapiens
tatagaaagaaaagactgttaccagccaatacaaaaacacacttacatacacagaccagtgacactgtaaagcaaccacacaaacaagctgacataataaccagctaacaatacaatgacgggatcaaatccacacatatcagtactaaccttgagtgtaaacaggctgaatgccccacttaaaagacacagagtggcaagctggataaaaaagcaagacccaatggcatgctgtcttcaagagacccatatcatacataatgagactcataggctcaaaataaagaaatggaggaaaatctaccaagcaaatggaaatcagaaaaaagcaggtgttgcaattctaatttcaggcagggcagactttaaaccaacaaagatcaaagaaggcaccaaaaagcattatataatggtaaagaattcaattcaacargaagacctaactatcctaaatatgtgtgcacccaacacaggagcacccagattcataaagcaagttcttagagacctatgaagagccttagactcgcacacaataatagtggacgaattcaacactccaataacagtactagacagattgtttaagcagaaaactaacaaagatattcaggacctgaacttaatgttag

SEQ ID NO: 351790 - DNA, 540 bp, Homo sapiens
aacttatagtacttactgccacatcaaaagtaagaaagatctcagataaacaatgtaatgttacaactgaaagaattagagaagcaagagcaaatcagtcccaaagctagcaggagacaataaataaccaaaatcagagctaaagtgaaaaaaaaattgagacacaaaaatacattcaaatgatcaatgaatccaggagttgctttctgaaaaaaaaaaataataagctagataggccgctggctagactaataaagaagaaaagttccaaataaacmcaattagaaatgacaaaggggatgttaccactcaccctacagaaataaaaataaccatcccaaactgctatgaacacctctatgcacacaatctagaaaacctagaagagatggttaaatttctgtacacatacactatcccaagactgaaatagaagaaattgattccctgaacagaccaataatgagctctgaagttgaatcagtaataaataacctagcaacccaaaaaaaaaaaaaaaaaaaagcccagaaccagatg

SEQ ID NO: 351791 - DNA, 540 bp, Homo sapiens
aacttatagtacttactgccacatcaaaagtaagaaagatctcagataaacaatgtaatgttacaactgaaagaattagagaagcaagagcaaatcagtcccaaagctagcaggagacaataaataaccaaaatcagagctaaagtgaaaaaaaaattgagacacaaaaatacattcaaatgatcaatgaatccaggagttgctttctgaaaaaaaaaaataataagctagataggccgctggctagactaataaagaagaaaagttccaaataaacccaattagaaatgacaaaggggatgttaccactcaccctacagaaataaaaataaccatcccaaactgctatgaacacctctatgcacacaatctagaaaacctagaagagatggttaaatttctgtacacatacactatcccaagactgaaatagaagaaattgattccctgaacagaccaataatgagctctgaagttgaatcagtaataaataacctagcaaccmaaaaaaaaaaaaaaaaaaaagcccagaaccagatg

SEQ ID NO: 351792 - DNA, 548 bp, Homo sapiens
ggctagactaataaagaagaaaagttccaaataaacccaattagaaatgacaaaggggatgttaccactcaccctacagaaataaaaataaccatcccaaactgctatgaacacctctatgcacacaatctagaaaacctagaagagatggttaaatttctgtacacatacactatcccaagactgaaatagaagaaattgattccctgaacagaccaataatgagctctgaagttgaatcagtaataaataacctagcaacccaaaaaaaaaaaaaaaaaaaagcccagaaccagatggattcacagcctgattctaccagatataaaaagaagatctggtatcatttctcctgaaactattcaaaaaattgaggaragactcctcccccaactcatcctatgaggccagcaacatccttataccaaagccaaaatacaacgagaaaagaaatctactggccaatatttttgataaacataaatgcaaaaattctcaatccaatactaccaaagcaaacttaacacatcaaaaatattataacataa

SEQ ID NO: 351793 - DNA, 548 bp, Homo sapiens
ggctagactaataaagaagaaaagttccaaataaacccaattagaaatgacaaaggggatgttaccactcaccctacagaaataaaaataaccatcccaaactgctatgaacacctctatgcacacaatctagaaaacctagaagagatggttaaatttctgtacacatacactatcccaagactgaaatagaagaaattgattccctgaacagaccaataatgagctctgaagttgaatcagtaataaataacctagcaacccaaaaaaaaaaaaaaaaaaaagcccagaaccagatggattcacagcctgattctaccagatataaaaagaagatctggtatcatttctcctgaaactattcaaaaaattgaggagagactcctcccccaactcatcctatgaggccagcaacatccttataccaaagccaaaatacaacgagaaaagaaatctactggccaatatttttgataaacataratgcaaaaattctcaatccaatactaccaaagcaaacttaacacatcaaaaatattataacataa

SEQ ID NO: 351794 - DNA, 533 bp, Homo sapiens
cacagggattatgtgactttgcattggaactcagtgctgccctagcacggtggaaagcaacatggagcagaacttagccagcactcataaaggcagcatttagaccagcccttgccagaggtgaattgtccatcccagcagttggaacctgagttatggtaagcyctgctgccatgggctgaagtgttctgaggtcctaaataaattgaaaatgcagattggccacaaggaatgaaattcctgggcaagtcctggggctgtgctgggcttggaaccagtagacttgtggtgcatgtaatctagggagaccagctggggtgaccaagggagtacttctgtcacccctccccaactccaggcagcacagcacacagctctaaaaaagactccttcttccactaaaggagaggagagcgagagtaaagaggacttagtcttgcaacttggataccagctcagccactgtacaataggacaccaggcagagttctgagggcccccatcctagaccctagttctcagtttacatttct

SEQ ID NO: 351795 - DNA, 533 bp, Homo sapiens
cacagggattatgtgactttgcattggaactcagtgctgccctagcacggtggaaagcaacatggagcagaacttagccagcactcataaaggcagcatttagaccagcccttgccagaggtgaattgtccatcccagcagttggaacctgagttatggtaagccctgctgccatgggctgaagtgttctgaggtcctaaataaattgaaaatgcagattggccacaaggaatgaaattcctgggcaagtcctggggctgtgctgggcttggaaccagtasacttgtggtgcatgtaatctagggagaccagctggggtgaccaagggagtacttctgtcacccctccccaactccaggcagcacagcacacagctctaaaaaagactccttcttccactaaaggagaggagagcgagagtaaagaggacttagtcttgcaacttggataccagctcagccactgtacaataggacaccaggcagagttctgagggcccccatcctagaccctagttctcagtttacatttct

SEQ ID NO: 351796 - DNA, 371 bp, Homo sapiens
gctgatggtgtaagtcacagtccaaaggtcaacagctcaagacccaagaagagctgatgcttctgttctagtctgaaggaagaaaaaggccaatgacccagttcaaaagtagtcaggcaggaggaaatcccccttactcaaggaagggtcagactttttgttctattcatacctacaaatgactgaatgaggcccatccacactgaggagagcaatctgctttactcagactactagtttaaatgctaacctcattcaraaatacccttcgagacacacccagaatgatgtttgaccaaatgtctgcatggcccagttgacacataaaattaaccatcataggtaccgtactaggaaaaaaacctcgtggc

SEQ ID NO: 351797 - DNA, 612 bp, Homo sapiens
ccctgcacttttgaaaaatacagagattaataaggcacctgtgcaaaaatgactcaaactcataaaacatttcatatttttccaatacctatcagggtatgtggctgtttttacaatctcaagaattgtttctttgaatgactgayaagatcattctaaaagaatctcacatcattgctaatatgatagagcagaaatagtctgaactttggaaccagaagacatctagatccaaatcttaccttgaacccttaccagctttgtgacccgggggaaattagttaggcactgtcataggctgaataatggccccccaaagatgtccacatcctaatccccagaacctgtgaatgtgttattttacatagcaaaagggactttatagatgtcattaagtcagggatcttgagatggggatatagtattatcctggatcatccagataagttcagtataattacacaggtccttaaaggaaggtaggatggtcagagtcaaagacagagccgtgatgatggaagcagagattggaggaacacagccctactgaaacattgatttttgaacttctgccttccagaatggtaagagaacagattttaaattttgtca

SEQ ID NO: 351798 - DNA, 393 bp, Homo sapiens
caaatcttaccttgaacccttaccagctttgtgacccgggggaaattagttaggcactgtcataggctgaataatggccccccaaagatgtccacatcctaatccccaraacctgtgaatgtgttattttacatagcaaaagggactttatagatgtcattaagtcagggatcttgagatggggatatagtattatcctggatcatccagataagttcagtataattacacaggtccttaaaggaaggtaggatggtcagagtcaaagacagagccgtgatgatggaagcagagattggaggaacacagccctactgaaacattgatttttgaacttctgccttccagaatggtaagagaacagattttaaattttgtcattttaagccacta

SEQ ID NO: 351799 - DNA, 521 bp, Homo sapiens
tgaaataaggctactggggactcgggtttttccttcctctctgattgtccaaatccaatagaaatataaagtgaggctgggtgcggtggctcatgcctgtaatcccagcagtttgggaggccaaggtgggtggatcacctgaggtcaggagtttgagaccagcttggccaacatggtgaaaccycatctctactaaaaatgcaaaagattagccaggagtggtggaacacacttgtaatcccagctactcgggaggctaaggcaggagaatcgcttgatcctgggagacagaggttgcagtgagccgagatcacaccactgcactccagcctgggcaatagagcaagactccatcttggaaaaaaaaaaaaagacatataaagtgatataaaatataaaattttaaactatagtagctacaattgaaaaagtcaaaagaaacataaaatttatttttaacaacatatcttgtacaatctaatatatctaaaatattatctttacaatgtgaaatcaacata

SEQ ID NO: 351800 - DNA, 521 bp, Homo sapiens
tgaaataaggctactggggactcgggtttttccttcctctctgattgtccaaatccaatagaaatataaagtgaggctgggtgcggtggctcatgcctgtaatcccagcagtttgggaggccaaggtgggtggatcacctgaggtcaggagtttgagaccagcttggccaacatggtgaaacctcatctctactaaaaatgcaaaarattagccaggagtggtggaacacacttgtaatcccagctactcgggaggctaaggcaggagaatcgcttgatcctgggagacagaggttgcagtgagccgagatcacaccactgcactccagcctgggcaatagagcaagactccatcttggaaaaaaaaaaaaagacatataaagtgatataaaatataaaattttaaactatagtagctacaattgaaaaagtcaaaagaaacataaaatttatttttaacaacatatcttgtacaatctaatatatctaaaatattatctttacaatgtgaaatcaacata

SEQ ID NO: 351801 - DNA, 506 bp, Homo sapiens
taagggcattatttccattcatgagggatccgacctcatgacctaataatctaacaccatcaccttaggaatttgaatttcaacagataaattttggggggacaaaaactttcagaccacagcagagttatttagcaagagttgttacacagsctccagttgttgccttctccattgataagagttgtctctggtgattaacagcatccttctcttcctggtgtgggagggggagacacttttataaatggatatttacattgcctttacaaagggaaatttacaccctgcttttagacagaaaggaggaaggcagagagcttttcctgcacctgctattgcttaattatcttcagctcaaaataatccttatgataaagtggtatattttggagtggcatactctaattcctgccaccagcatatatttatagaatatttttacctgtgacttctcatcagggccagcttcatggccatgtgacctgtgtagtctcacgaggctc

SEQ ID NO: 351802 - DNA, 602 bp, Homo sapiens
caacctcatcaagtcaggcatctccctctgcaactctacttaaggcagcagattcaccagaagaactcagcaggtatatacgtggcatccaaatggtttgcgccctgcccacttctccagccaaagtcttacagatgagtctccctcagaaccaaactaggttgattctcatccttcrtcccccagacacagagtcctccactcagtttccatgccttacctgcagcgggcttccctcctgacatgcccgctccctcccagcaagctcatccaggtgtcactcttccttcaagtcacatcttggtgatgctcccactgaccactcagggtttgctgattactccttgacacatctctgatggtccttgtttctgtcattcccttgacacttagtatgatcttctttattttattagatgtattttgtatccatgtcctgactttccaattaggttgtttgcctcttaagagcaagcactgcatcttaagccccaggataccctgggggcccagtacattgttgttttaatagttagaaagtgtttctcagtccctgatgtggacaacattggtaatatccaactgaaagcttcatccatgag

SEQ ID NO: 351803 - DNA, 489 bp, Homo sapiens
tgcataagggcttcatctggaagacctcaaattttccccaccaaaaatttttaaagttttagtttgtatcatggaaagaggagattttttgatatttatatgctatgttggaggaaaaacttttttttggcttactatcaaatgtttaatctttttgtttttgtaacatgtgactatatttggtgtttataaggtagctcccctgtatggacaaatggtattctttagtatttattatcaaaggatctggcctttgatttataactttgttttcctctgcctcatacagaaataagttgtttcytgagtctgctataaggaatatcatgtatcagatattacaaggactcgcatttattcacaaacacggtaggtgattcggagtgttgtgcttttgaagagcagtgaaatgttgttatcaagtagaagttgtaggaaacattaatattttttgtagctgactcccagaaaaggttgaagagttgagag

SEQ ID NO: 351804 - DNA, 451 bp, Homo sapiens
tgatagactcaggcttggaaatactaagcattaaattaaccacaaagttaaaacagttgctgagtataagtagaaaattgggcagtaaaatattataactatccaaccaggcccccaaaagagtatataagaacttcaccactcaccttctctcttaggctcttatctccagggtgctgaggggagattaagtgagggtttataaccctctcctttcctattgaaasctctgcctgctcaaagtatcaaccaacagtcattccagtttgggccacacctctggggtttcactttacattcatttttaaaaaaatattttatagcacattgagctaactaagaagaaagtaacattccactggctcattcaacaattgtttgctgaatacccttttctgccagacattgttttaagatttggctctataaaggtaggtatgacagcatttct

SEQ ID NO: 351805 - DNA, 451 bp, Homo sapiens
tgatagactcaggcttggaaatactaagcattaaattaaccacaaagttaaaacagttgctgagtataagtagaaaattgggcagtaaaatattataactatccaaccaggcccccaaaagagtatataagaacttcaccactcaccttctctcttaggctcttatctccagggtgctgaggggagattaagtgagggtttataaccctctcctttcctattgaaagctctgcctgctcaaagtatcaaccaacagtcattccagtttgggccacacctctggggtttcactttacattcatttttaaaaaaatattttatagcacattgagctaactaagaagaaagtaacattccactggctcattcaacaattgtttgctgaatacccttttctgcyagacattgttttaagatttggctctataaaggtaggtatgacagcatttct

SEQ ID NO: 351806 - DNA, 551 bp, Homo sapiens
gaggctctgctacttctttcagacacaggtaagtcatcaggttagcaactgtgtgtataaattacaaaatggctgctgattcccctagccctccaaatctccaaagaatctctcgtgtttttcacccttattgaaaacataatgraaagggaattctgggaaatgtaattcagccctctagttaccttattaaaaagtcaccatgccactccttccccattcaaagtggagggattctctttggattctgacaaaatccttctttttttttttttttttctgtaaatagtgttggagcaagtgacctaatgatggtggtagcaggtagcatttgtttatgtttctttatttagggaaataaatctctttaaattttgaacatgggaaaaatcttgacctattaaaggcagtgacctaaaaaagaatatctgctttgtcgagtcaatctatctttcagtgggctgcctcaagttttgcactggagagtagatgatcagcaagcccttttagttttcacaaccaagccagattctccaatatactttatatca

SEQ ID NO: 351807 - DNA, 577 bp, Homo sapiens
ttcaaatcaatattttaaaaaaaaactttaaaaaagaatattgacatgtcttagttcagaagaataactataaagtgttgatttgcttttatgccctctgcacatcttgcaggtagaacaccagtcagctgagggaaagtatcctgcttctccctaggaagagattcatcaccaaggcagacagtcatcgccgagatgcgtacttggaagcccagtctgtccggccatgcactggctgggcggctggaggccgtggtatcaacccaggagtgcttctaggctgggtgtggaagaatggtcgcccaggatgaggtctcatggccttcagggaggaataacctgcaatgaaagaaaaaggccggcatgactgatatggggccaatgtaagcaaagtacaaataaatgcattttggtgacaaaaacatgagaaaataaggagttcaagaggagcatcttgtctcctacttataatcttctctactgcagttaaagacatcgttttaaagttgtcaggccaaaaataatggcatcattcttgacccctctttttttcatatmccacatataatttgtcagg

SEQ ID NO: 351808 - DNA, 566 bp, Homo sapiens
ttatggaacaattgcaaaattcacatggatttcaaagtttgaaatatatgccttcgaaaataaattttgtttttagaggcagcttctgctatttctcaggctatagatgttgttattttcttcacccacgggggcgctcgagagtaccttgcttgacaagcctgggtgctgaacaattgcagccgctaacatgatcagattttattttcaataggtttctctggccaaagtgaggcgaatgaattggggtagtaggggtagagaaagaaacctcttgtgtctgtgtaaattaaagtagcaccatgagtttgaagaatatgagtaagaaaaggtgaaatactaaggaggtaggtggtaaagcawttgctaatcagatcaaagggaaggaaggaggaagaaaagtctataatgatgccctgtccaacacacacacacacacacacacacacacacacacacacacacacacacacacacttcttgtcttttttttaataacatgtattgtcatctaacaggacttttttatttatttgtctgtagattcctagaatgtaaattccacg

SEQ ID NO: 351809 - DNA, 641 bp, Homo sapiens
attcttcagtgagatgggaagaattaaaccaattagctctgacacatatgagtttcattctatcctcttaaccaaagtcaccrtcatgacctacttgatgagagtttctgaaggctaactggtgtggcctttgctgatgcaaattaagctgtgtgtcaggaacatgatgaacagccgatcaatgttagcagtcatgctatgtgtttgccttttctagcagtagccattctagagctctgtctcttttatcaaaacaaatacttcccaaagcaggttttccatttttctctaataagataatattgaacaaatctaggcttacccttctgcaacttttcatattattctcgtttcaagaaattcttcttcaaactaaataaaagataaagagacattattccaactttaaagtcaagaaaacaaagagattttgttttttgttgatttttttatttttgctcccattcctctttttccttttcttcacctaagttcttccttctttccaaacttatgtcctttctccaacttccccaatgatttttcctcttctctttcttcttcctcctctgttattttcccttcatataaagacaagttaaatttctctttaatgctcatatgttcaatgaaaggaatcc

SEQ ID NO: 351810 - DNA, 399 bp, Homo sapiens
taactatgttatagtataagcgcttctgattctcaaagtttagggtgttgactgggtgtagtggctcacgcctgtaatcgcagcactttgggaggctgaggtgggcggatcacttgaggtcaggagtttgagacgagcctggctaacatggcggggattaggcgggtgcaggggtgtggggattcttaaaggattcttcagtgagatgggaagaattaaaccaattagctctgacacatatgagtttcattctatcctcttaaccaaagtcaccgtcatgacctacttgatragagtttctgaaggctaactggtgtggcctttgctgatgcaaattaagctgtgtgtcaggaacatgatgaacagccgatcaatgttagcagtcatgctatgtgtttg

SEQ ID NO: 351811 - DNA, 575 bp, Homo sapiens
gccaaatacgtatttgggcattatacaatagtactttcctttccggttctcaggcattatcttttatggtagtcaaaagagcagtcacatgttatcaatactttatcacaggtcatgcttcacctatagaaaggtaaaaaataactcacactgatctctcctaaaaaaacgtgtggttctcataagctctgggccatcgttatacatttattaagtggctactaagggttcttgacatggtgggaaaagcaccaaatgaaaagcaaggcactattgtggccctttcatttcaaaaaaagtgagttaggatgacaatcatctgctaggaactacaagttcacgcagatagttactttcatgatattgtcaaatatagttggacatcacacttataatactttatcttttggttcagaggcattatcttytatagcagccatgatgagcttatttaagataaaatataactgaatgctaattaacatagatttgaatgctaaattcattaggaactatgttcaaagcctaatgttgaacaaacttcagacaatagagttaagaattttttttttctg

SEQ ID NO: 351812 - DNA, 571 bp, Homo sapiens
gcttgaaaggtactccacatttttattataagagaatgtgttggaattaactgagtttgtgttgaattatacttcctctcttttttttttctctccccatcctgttttctctctttytgattggaatgaatttattaggatcttccacatgcagtgtgcatgcactgtggtagtttttaaaatttaggtgaagtttacataacatgaaattaaccattttaatgtgtataattcggtggcattttggtattttcagtattgtgtgaccacctctatctaattacaaaacattttcattactccaagaggaaacttggtacccattgagtatttactccccatttctcctggcagccatcagtctgttttctgtctttacggatttacctattctgggtatttcatataaatggaatcatatgtgtccttttatgtctggcttttttcacttaccataatgtttttgtggttcatctttattacagcataataccggtttcttactcctttttattgcagaataatattccattgtgttatcatatgtttattcattcatcagttggtggtc

SEQ ID NO: 351813 - DNA, 555 bp, Homo sapiens
attttttcacccctttcttggaaataaatgraaactttcatttatttatttattgaataagtcatatattcataaggttctaacaaaagctacaacaaacacataggtgaaaaatatatattatattagtcttctatatttgcaggttctgcatctgtggattgaaaatgtttggaagaaaaacaatgtaacaataaaaaatacaaagaaaagaacctaatactgtataacaacagtttacatagcatttacattgtgttaagcatgacaagtaatccagagatgatttaaagtatataggcagatgcgtgtaggttatatacaaatactatgccattttatataaggcactagtccccagtccccgggttatggatgggtacagatccatggcctgttaggaaccaggctgcacagcaggaggtgagtggcaggtgagtgagcattaccacctgagctccgcctcctgtcagaccagcagtggcattagattctcagaccagcagtggcattagattctcagaggagcacgaaccctattgtgaactgcacgtg

SEQ ID NO: 351814 - DNA, 555 bp, Homo sapiens
attttttcacccctttcttggaaataaatggaaactttcatttatttatttattgaataagtcatatattcataaggttctaacaaaagctacaacaaacacataggtgaaaaatatatattatattagtcttctatatttgcaggttctgcatctgtggattgaaaatgttyggaagaaaaacaatgtaacaataaaaaatacaaagaaaagaacctaatactgtataacaacagtttacatagcatttacattgtgttaagcatgacaagtaatccagagatgatttaaagtatataggcagatgcgtgtaggttatatacaaatactatgccattttatataaggcactagtccccagtccccgggttatggatgggtacagatccatggcctgttaggaaccaggctgcacagcaggaggtgagtggcaggtgagtgagcattaccacctgagctccgcctcctgtcagaccagcagtggcattagattctcagaccagcagtggcattagattctcagaggagcacgaaccctattgtgaactgcacgtg

SEQ ID NO: 351815 - DNA, 555 bp, Homo sapiens
attttttcacccctttcttggaaataaatggaaactttcatttatttatttattgaataagtcatatattcataaggttctaacaaaagctacaacaaacacataggtgaaaaatatatattatattagtcttctatatttgcaggttctgcatctgtggattgaaaatgtttggaagaaaaacaatgtaacaataaaaaatacaaagaaaaraacctaatactgtataacaacagtttacatagcatttacattgtgttaagcatgacaagtaatccagagatgatttaaagtatataggcagatgcgtgtaggttatatacaaatactatgccattttatataaggcactagtccccagtccccgggttatggatgggtacagatccatggcctgttaggaaccaggctgcacagcaggaggtgagtggcaggtgagtgagcattaccacctgagctccgcctcctgtcagaccagcagtggcattagattctcagaccagcagtggcattagattctcagaggagcacgaaccctattgtgaactgcacgtg

SEQ ID NO: 351816 - DNA, 490 bp, Homo sapiens
taatgtatttcctaaagccaaaaaaaagacattcttccacttctccatatcatcttggagaacaatttacgctcaactacacaggaaaactattctttctgagatgacctcagttgtgaccacttttttcctttatgggtcatataccagacacagtagctggttaggtaatcattattttgcctcaatttaatttctcatgtgtatgcatattttagcattgcctgtgtgtcaagactttttcatgtattgaaagaaatactacttagctgaataaaaagtgactccttcttccaaagatcttcacgtttatttggggagatgaaatgaataagcaatacagggttgcggttaaaaatatgggctatgaagtgaaaaaaacttgtctctagaattaaaaatctttgacgatgaaacccagtaatctgcttcaagcrttttaaactcaataaagttacagggtcttgatttgggagaattcaagggatac

SEQ ID NO: 351817 - DNA, 539 bp, Homo sapiens
tcagtaaatgtgacctaatgtagatcaaatgaagaccaatcagtaaagagactcccaggggaggcgctggatgacagaagctgtgtcctccatcagccccctccagctgggcagagaagatgtatatggaagttctgttctcaccatgggcagaagcagtagaaaggagaatgaattacctcacttctcaactggtaatggacaaaacaaggggctgggtatataatttaaaatttaaacmtggggatgttaagttatggctccctgcagagggctatggcatgtggggctgcccccacaaaactgtccttgccaatctgtggctaggacttcagtgtaattttatttagcatcacaaacttatgcttatcagcttcatttatttctatactttggtttcctaattcttgatagaagcacttttagaaaattttcatccgttgggtgcaatactcagtttaaaacatattttagcacccatcaagtggtaagtttgcagaaaatgccagggcatactactgaaagccaaagaggaatgg

SEQ ID NO: 351818 - DNA, 445 bp, Homo sapiens
cagaaaccaagagaattgtaaggaatcatagaagttatgtcattcacatcacygacttcaagccttaattgcattcatcaattgagctatgcacaaacttaaaacagcaaaaatggaaaaaaaaaaaactgcatggacttctggttaacagacagcctgcaaatgcaatgtgttttatttttaaaaatcaaaccaatagtaaacaagatagacactggccctgtggagactccttaattagatgtagccaaagacagcttgacctagaaacctaactccaggcctacttttattttggctgtttttttctgttgttcatatttggtgtttgttttatttttgtttgttttctaagagctgctcatgaagaaatcagacagtttccatgatatctttataaatgagttgaaaagccatgtgatattcccccctctggaagtcagtt

SEQ ID NO: 351819 - DNA, 644 bp, Homo sapiens
tttctgagtctctaaagtgataatgaagatccttaaaatattataaacaaactaggtgaccctggttatttaatattcaattatatatattaagcaaaattcattcacttagaaattttaattaagttaagatatagccagctgggtgcagtggctcatgcctgtaatcccagcactttgggagtctgaggcagactgcttgagcctaggagtttaagaccagcctggacaacgtggtgaaataccatctctacaaaaaatgcaaaacttagccagacacagtggcacatgcctatagtcccagctactggggaggctgaggtgggaggatggcttgagcctggaaggtcaaggcagcggtgagccatgattgcacaactgcactctagtctgggtgacagagcgagaccctgtctcaaaaaaaaaaaaaaaaaaaaaaaaagacatagccaatactaactagtaarttatctatatcctagacaggccagacttcaagaagtttaccatgcccataagtacagtagactcaaagtgcctagattttccctctcctaggtatctgtctacccaagagaaatgaaaacgtacatccacacaaaagcttgtacacaaatattcatagcagccttattcataatagg

SEQ ID NO: 351820 - DNA, 603 bp, Homo sapiens
taaatgacattccatgggcaggagacttggagaaagctctcactgttgtgaggtgagcggtttgtgagcggacatttatcatccctgttggcttatccatgggtgtgcctctgggtgccttgtaygctacttaagaacttgtcattaattataataatggtaacacattataatagaaactattaaggtcttactatgtgctaagtccttcacatagatcatcatatttaatcctcatcacaatcctaggaggcgggttttatttactctatttgatagatgaagaaaattaagaattccaaaatttaagtaagccgcccaagatcattcaacctggaagcagcaaggatggcctgaatcctaaactcttatccactatttccatggtgctcaaatggtagtcctcagaccagcagcaaatcagcactacctgggaaactgaaagaaatgcaaattcttggactgggcagtggctcatcacctgtaatcccagctctttgggaggtcaaggcaggaggactgcttgaggccaggagttcaagaccagcccaggcaacagaatgagactctccatctctgtaaaaaaatttttaaaaattagtt

SEQ ID NO: 351821 - DNA, 638 bp, Homo sapiens
gctcatcacctgtaatcccagctctttgggaggtcaaggcaggaggactgcttgaggccaggagttcaagaccagcccaggcaacagaatgagactctccatctctgtaaaaaaatttttaaaaattagttgtgcataaggctgcacagtgagctatgactgtgccactgtactttagcctctgtgacaaagtgagactctgtctttaaaaaaaaacaaacaaamaaaaaacaaattctcaacctgcacctcaaatctactgaattagaaattcccagggtggggaccagcaatctatgttccaaccagccctccaggtgattgatggatgctgaagttagagaattaattgcaccttgctatgctttacatgcacaaagaccacacatgtaaccagagaactataaagattgtctgggaaatgactccaaaaactttgtgtttttggccaggaacttgctgggacccgaggtttcctatctctcagtgggagggctgagaaccccatggtgtttcagagactcccttggtatctccaagtcaggacagttagcatttctcaaaattcccattaacgctgacatctgaactcagactatctgtgcctgagccccaaatggttatcaccacctctaccc

SEQ ID NO: 351822 - DNA, 638 bp, Homo sapiens
gctcatcacctgtaatcccagctctttgggaggtcaaggcaggaggactgcttgaggccaggagttcaagaccagcccaggcaacagaatgagactctccatctctgtaaaaaaatttttaaaaattagttgtgcataaggctgcacagtgagctatgactgtgccactgtactttagcctctgtgacaaagtgagactctgtctttaaaaaaaaacaaacaaaaaaaaaacaaattctcaacctgcacctcaaatctactgaattagaaattcccagggtggggaccagcaatctatgttccaaccagccctccaggtgattgatggatgctgaagttagagaattaattgcaccttgctatgctttacatgcacaaagaccacacatgtaaccagagaactataaagattgtctgggaaatgactccaaaaactttgtgtttttggccaggaacttgctgggacccgaggtttcctatctctcagtgggagggctgagaaccccatggtgtttcagagactcccytggtatctccaagtcaggacagttagcatttctcaaaattcccattaacgctgacatctgaactcagactatctgtgcctgagccccaaatggttatcaccacctctaccc

SEQ ID NO: 351823 - DNA, 657 bp, Homo sapiens
gctctagaggaaaatgttcctttgccttgcccagcttgtgacagccacccacattccttggcccttggcttccttcctccatgtgcaaaaccaacaatgttgcatgtttctgaccattgttccatgctttctgaccacattgttgcatcttgctgaccacagccaggaggggttctcctgcttataaggactcttgtgatgacgttgagaccttcaggataatccaggttatctccccatctcaaggaccttaactgaatcatatctgcaaagtcctttttaccatgtaaggtggcatatttacaggtgagacaggaaaaaaagagataatgaattcatatattatttatcaattagaggaatatataaagccatttttcctttgttccaagaccatttgctaaaatataaacctctgctttaaaaacatttttttttttagggaagaggaagtactaccacattataggcatccatagctcaaaaaatacgtctagatttcagaaccataaactaggatggaaatttgtcttataagcaaagtaataccataataatctcatctagtgtttattttccttcttataactgcstacttgatttcaatggagcactgttatgaagtaggcaagaagaagaaactcaggcttacagaag

SEQ ID NO: 351824 - DNA, 590 bp, Homo sapiens
tgggcatcttctggccttcatggagctggtagcctggtgcccctttggagtctcagtcagtgaggttgggaggacagagaaggagaggcagagagtgtctggcgcaggagaagcttggtcggsggggctttgtggagaaggtggggctcttaacctgagtcctgaaagacaggcaggacttgaggaggcaaaagggaatcttggagaatagaacagtaagggtcaaggctgaatatttaatggtaccttgcatttgggatgagaggaggcagcacagatgaatggaggaaccctggaaaaccatggtgtgttagctgggaacaactgcaagttctgtggtcacttggaagattagccagttctatcagtaccagttttaggagcttggacaagttgtgtaacttctcagagtctcagttccctcatctgttcaaaaatatatttttaagtggttcttctaaaagaattgtgcaagttagacttagcagtcaggactttaaatactgagtctttatgtaatgtgagcttatttatttgtaattttttgtactttccccactagttgcttttgatgctccacagtcctttca

SEQ ID NO: 351825 - DNA, 590 bp, Homo sapiens
tgggcatcttctggccttcatggagctggtagcctggtgcccctttggagtctcagtcagtgaggttgggaggacagagaaggagaggcagagagtgtctggcgcaggagaagcttggtcggcggggctttgtggagaaggtggggctcttamcctgagtcctgaaagacaggcaggacttgaggaggcaaaagggaatcttggagaatagaacagtaagggtcaaggctgaatatttaatggtaccttgcatttgggatgagaggaggcagcacagatgaatggaggaaccctggaaaaccatggtgtgttagctgggaacaactgcaagttctgtggtcacttggaagattagccagttctatcagtaccagttttaggagcttggacaagttgtgtaacttctcagagtctcagttccctcatctgttcaaaaatatatttttaagtggttcttctaaaagaattgtgcaagttagacttagcagtcaggactttaaatactgagtctttatgtaatgtgagcttatttatttgtaattttttgtactttccccactagttgcttttgatgctccacagtcctttca

SEQ ID NO: 351826 - DNA, 584 bp, Homo sapiens
accaaatgtcagtgcgggcatctttttttgagaaataactttgtagatattgtacctggttggggaaaaggttatttagcagacatgtctgaaaaagcgagtaggtttatttttgtgtgtgtatgtgtgttgcggcggggggaatggagaatgagcaacgttgtattatactagagaatcactcctctgaactkcagatttacagctgctgtttctgggaggccatgaagggccttgcttaaagatgaaacttctgagttggtgacttcctttgggactgcctgaaaacgaaagcataatacaattttctatgctcccagagaagtgctttttgcaagagaataaattatctgatgatggggacatgctgcatttctgaggacgatctgattagcagctaatgggacaagaaggcaaggagggggagctgtgtgaaaacgtgtggggaggagggtggcattatgtccaagtcaaaaatgtgctgttcctcctcatttcacaataaagatgatatcgccaagcatctttgctcaaaggaagtccaaaattaaccctgagtgcccaggaacaggagcagagactgt

SEQ ID NO: 351827 - DNA, 614 bp, Homo sapiens
agaagttatggaagttgcttaaggacacacagctggtaatttatgaggctggaattcagactcacatattctgagtctgtttccaagtgtacactcttgtcagtactccaagccattttggacatgtggaggggatggtcaatggggataaaagttagagtatctttccagggataaaagttagatattttgtttcttgcttccaaatttctcatagaaatctattgaaaagggccaagtaggtttctgttcttgatctaacactgtaaatttggctttaatttgttttggagagcagtcatctaaaaaacaaacsaggtgtggtggctcatgcctgtaattccagcactttgagaggctgaagcaggaggattacttgaggccagagttcaagaccaacctgggcaccatagtgagaccttgtctctacaaaaataagaatgaaaaaacttagccagacatggtggtacgcaccggtagttctagctactcaggaggctgaggtgggaggatcacttgagcctgggaggtcaaggctgcagtgagctatgattgcaccactaccttccagcctgggtgacagagtgagaccataactctaaaaaacaaaacca

SEQ ID NO: 351828 - DNA, 571 bp, Homo sapiens
tcagagggcagatgaatagcaaaagttctgggaggcggctatcctttgtggggctaagggaggggacaggagtaattgttttattttttcacaggcagggtcttgctctgttgcccaggctggaatgcagtggtatgatcacagctcactgcagcctggagctcccaggctcaagtgatcctcccaagtagctggggttacagatgtgtaccaccatgccctgataatgtgtttttatttttattttttgtagaaatggggtctggctggtctcaaactccttgcttcaagccatcctcccaccttggctgtttragatgtgatgacaggcatgagccaccgtgcctggtttaggagtaattgtctgaacaaggctgtttgaacaaagaataggctctattgcccagtgagaccatccataggcagcgcgatggggagatttcattattgggcgggaggtggaattacatgctttacagggttccttccaacttttattccatgattctgtgttttttgaaaggttagaatgctctgtggctggcagttgagtgtaattcgctattgttca

SEQ ID NO: 351829 - DNA, 435 bp, Homo sapiens
acaaagagttttgtgtaccaggactgataaggacaggtaactaaatccaactgagagacagaactctctagtgcagaatgacttaaggcagttaaatcaaaacattctgtatattctatatagagaggtaattggttgggtttctatgcttggcccagcattaggcaaataggttcataacatacctagcatattgctttgaattttcacaaatttgctagctattttctaaaaggaaacaaatacccagaagagtataggactgaactgagtatcaagatgacaacacaactgcccgggcagggaacagccgcacacagttaggaccctcggagggtgggtctcaccagctctcackgacgtgggtagaccagtaatacactctgacagtgggcaagtcagttttcattctggtgtttcacattcaaaagctac

SEQ ID NO: 351830 - DNA, 642 bp, Homo sapiens
gtatctgatgtgtaaacatctcattagtgaggggtacatcaccaccagccatgggtggtgagaattcttcagggtacccccatcctgcaactgccccagttcaaatcagataccccagagctgcaaccaagctcaagttcccagcgcagaactagatggaagtgggaaatagtccttgaaactggtgaaacagccctttccaggaataacgaaccccgcagctttaccaaataaggcaagtgaaagctaaaagccaaggaggaacaggctcaagctgtatctttcctaaaactagccagctggatgatagaaatgtgagtatctcaattccactagcctggattgcacaggggaagagaaaatgctgagaaactacaaacggaaaaacattttgccaaggagaggcctgtaacgcactcatcccagcccctgcaacaaccttcaggaagtttcaaacccacgaagctgctaaacattccctgtgaaacacataacacaaactggaacgggtgtccatgctatgattagtgagaaaaaaaaaagttagtgaaaaaacgctaactttttttycccaagtctacatttgtagagttttagagcatgaagttcagatataacatggatattatcataaagtgacac

SEQ ID NO: 351831 - DNA, 582 bp, Homo sapiens
gggcattgtgggcactgtagacagcaggttaatggcagcagaaggcagacaggcttctgggcagaaagcagtgggttccaagtgaaacccctgcttcaggccaggcatggcctgaggcctgggggctgggctgccagttccacagactagagtgagaacttacagtgctttttccagacctgcctatggccacccacaaaccaatcaatattcactttctctcctctgaagaccataaaaaccccagactcagccagactcaggcaaacaatgggacagcctgcctgaagagaggagctacccactgtggtgtcctctgagctgttctgtcactcaataaagcacctcttcaccttgctcaccctccacttgtcygcatacctcattcttcctggacatgggacaagaacttggaacctgctgaatggcagggctgaaagagctgtaacacgaacagggataaaacatgccccttgcttgccatgttgcaggcaacaagaaggagagaagaagagaagagctgcagcccttcagggagtccagacccaggagctccctgagccatggctgtggcaccctctt

SEQ ID NO: 351832 - DNA, 633 bp, Homo sapiens
cccattcttcctgtaaaccttctctatcattccagctatgagcagaaaatgattaaaagtcaaaactaaatgttgctgactagattttaacataatttatttcattttcaaatggggaaagtgaggctgaaagaggaaaatcttatttctttgactcttcattgtaaactctctgttcttcaatgctgaattagactacgacccctgaattcactgtggaattttatgcctctcgccccaccaccctcattctactctaaggaggagtagatgctatgaatcagtcccttctaaggactaacagtggctgaagattacactatactcttttaaaaataagtgaataaaagcacctgtgcatgtattgtgaaaatttcaaaggatcccacaggcaggaggggagatgagggtagcctgattgcctctctggctctttcctgcatccttctcttccactcctagggctaaaagtgccaggcttgcaccctcaggagaagcccaggccccttcttgcaggctctcccatccctctcacctgccagccccatgcygcctaaggcattgcagcctgtctctttctaattggttcctttttctcctgcactatattctggatttgctttccctcaaatc

SEQ ID NO: 351833 - DNA, 484 bp, Homo sapiens
ctgacaagcctctttcaaactatgttgtctcctattatttcaccaaacccctggattatttcctgatcttgggaaaagaagagagggttttttttgttttgttttgttttktttaaggctattgactaaatgcaaatccgaattcaaagagttaccagtataatttatttattttattgaatgataactctagcatgtagaactaagatcttcaggaaagcagcagtgatggcatcctcttagattctctttatagtcagctagagggatcctgatgcgatttaggtgtgatttagtttgtcagtggattaaactttgaactccattgtaaacaaatcagctgactctccctgcaggaattttgcttttatgagcaagacttcatttcagagcccacttttttttcttttttttttgaaagagttacatagcctacagctttcctgggtcacacttattggtgtcttcatattttaattttaat

SEQ ID NO: 351834 - DNA, 556 bp, Homo sapiens
gcttgacacaaaactctgttgtttgtccaactgttgccaagtgatactttgacatttgcatagccaggaagtactagaaaatagagctccaacatttccctgtattatttttatagtaattaggagtaaaaattatttttagatttctggcagtaactattttttgcagttccttttttaactttgtaaataaaattctatttcctggttgcctggaatgagagatttatgacaaatactagctcctggaagactgagtgacattctgtatatttttgtgagacaaattccaggattcttgggtaggaattaattcttcatggaagaacgttttcagtgggaacataatatgggaagaattactcatactcactattgcccatcattacatataaaagtacagttcttttctcgttttaattgtttaaaatgtgcaaagattggtaatttatatggaatcagaaaaacccctatgttgttccyacaggtgcgtagagtgaaagaatctatatgttgtttggatctaaatgttgctgggctacacgatagcacttgt

SEQ ID NO: 351835 - DNA, 609 bp, Homo sapiens
tttttagtagacatagggtttcaccatgttgcccaagctggtcttgaactcctgagctcaagcagtctgccaggcttggcctcccaaagtgctggaactacaggtatgagccactgtgcgtggcctgataatatgaatttaaccaagtgtgtatgatagattatcacagtttctttaaggaggtactctgtccagcccttggagtcattggcaaggatgactccaggtttttggaactctttaggaaaaataatacacaattacatatataaataaggtatgaaaataaatatttatttcgaatgagaraagaagcaacaaataatttatttaaaatctattaattaccacacacatcatgaatccagaaaaaaagtcacgatagcttttacctccacacatttaagaaagcttttctcttttaccacccacaaacttttggtactgggcactgtgggacaactttctatcacaacatgacttcaggccttgtatcttcacatctcaacactgggtgaattggcactgtgggtgctaggactattcctgaagttattaattggggatgactagtgataactgcacacagaagtcactgcaaaccccata

SEQ ID NO: 351836 - DNA, 493 bp, Homo sapiens
agctctaactcaaatcagccccactgcacatgaagtccgatcacctcgatttcatttgacygtgtcctgtgctctgtctgaaccttgatttcctcatcttgaaaatgggaatactactatattaatacctccccctgagggttgttagaattaagtaaaatattctgcatagtggactaagcacagtccctggttcatacttaatttaacgattattattaattctttctcatgattatcattaccttttcaaatcatacaattaggcttgaatttctaatttgcccccctgacctaccaggcagacaaagttgccacaaggatccaatatcaaagcaaatgataaccacaaaaatcagagcagctgctgcgatttgcacatcttctctccacctccctcttcccctggcacacacaccagccccactgactgttgagcctgtccatttcctttttccttcctaagctgggcggagatagacaggaatctcat

SEQ ID NO: 351837 - DNA, 493 bp, Homo sapiens
agctctaactcaaatcagccccactgcacatgaagtccgatcacctcgatttcatttgactgtgtcctgtgctctgtctgaaccttgatttcctcatcttgaaaatgggaatactactatattaatacctccccctgagggttgttagaattaagtaaaatattctgcatagtggactaagcacagtccctggttcatacttaatttaackattattattaattctttctcatgattatcattaccttttcaaatcatacaattaggcttgaatttctaatttgcccccctgacctaccaggcagacaaagttgccacaaggatccaatatcaaagcaaatgataaccacaaaaatcagagcagctgctgcgatttgcacatcttctctccacctccctcttcccctggcacacacaccagccccactgactgttgagcctgtccatttcctttttccttcctaagctgggcggagatagacaggaatctcat

SEQ ID NO: 351838 - DNA, 601 bp, Homo sapiens
ctttgtgtctttgctcaccctatcccctcccttccacatagaaagtcttgcctctgaccctgacatattctaagcctaccgtctttcctgtttaaatcttaatcccgtgtaaaccttttccattcatttcagaacaccttcatcactccattctctgaaactttacttcccctagagtaagtcttaatttaaaaaaaaaaaattagcatttaattatgacatttgtgtaagtttcattttgccagctagattttgaagttctctggccaaagagacagactttttaatatttccctcagtttctagcactgagcacaaagtaagtaaatggtgtgaatctaatrcttccttttaaaattattgatcgatggaatgcctccctgcctgaccagaagattatgtggtaatttcagccacctctatcatgtatgacctcagtcaatggcaacagttgaaagtcagtgtctttcagaagacactgaaaattggcacaaaaaatgtgcacagaggacagcactccactggtcattatttattaagcttcaactgtatgccaggcacttggttagatgtcgagaatagagtggtaagtaaaacaccc

SEQ ID NO: 351839 - DNA, 590 bp, Homo sapiens
agacaagctaaaatttagtggtgttttgcttgttggcttgttttttcacaggccccacagaatgggaaaatcataatcagatcttaggttgagatacaaaaagcaaaagatgaagcattgtttgcagatcagagtttggcatgtggatctcatggctgctgcaggagaatgcagcaatcctgccgtaagagtttagaatcttctggcctacagaatacagagggaaagcaaatctgagaacatcccaaacagaaagtagctgaataatagaacctgtggtagaaagagataagatcctgagctgggaacccagtgaaactctctggagaaggtagaatgtggcatggcacctcggcagagggtgtgaaagtacagatgcacaggggaagaagcagggctctccaaacatggacagygtgagcaaggactcagagatgggcgtgtgcatatgtattcaagagtgaggataagaaggaaatgcattcgatggactgaactgagggaatagtaaacaactagataaataaagctggaccacccttagagggtcttgagtgcctggctcagacatttataaggacaccataaac

SEQ ID NO: 351840 - DNA, 585 bp, Homo sapiens
cttggctgggggatggggggtggggaagagatatggcctggcaaaatgaaaagttgcttctagacaaagacagaactcttgaagtgcttcaactgggtgaaagtttgacagagaacactcaacaaccctggccaccgacaaaagaaaacaaggacatttgtctatcttggcctggaccttagcatagaaaatgttttcctacccctactctaagtggcaactatatacttgaygctgccatttcttcttttttttcctttttttttttttagacagagtctcactgtgtcacccaggctggagtccattggcgtgatatcagcttactgcagccttgacctcccaggctcaagtgatcctttcacctcagcctcccgagtagctggaactacaggcttgagccaccacacccagctaattaaaattttttttttattttttaaagacagggtctcactgtgttgccaaggtggtctgaaactcctgggttcaagcaatcctcccaccttggcctcccaacctgctaggattacaggcatgagccaccatgcccggcagattttgctattttaatgcaaaaacagc

SEQ ID NO: 351841 - DNA, 589 bp, Homo sapiens
acgtttcagccttctgattgacaaaactaaaacattgacaagtatcaagtgatggcaactattctgaacaaatgagaacatttaaacacttctgtgaacacgctttcagagtactctccaattcagagagtaaactgcaatgtctagtcatactgaatatgtacatatcttatgacttatcagtcagtccagtcttagcaatgtctttaaaattctgaggaagtccaatggtaaaataaatatcacacataatctttagaaattcgcctcccatgcgtcctttctcagaagctactagaggatgtgcttcagcaaaatgggggagtaaaacaaagaggaagaaayataattcaggaaatgggttctgacacagaagaaaattcccaaatgataactaatagaagtcatagcacctgaaccaaaggcctgcagagcaaccactgcagatttgagcagacatttggaagattccaatgaggaaagtggaactgataaattgtctggtatgtttgactgcatggatgtttacattgaaagacattttcaagggacattaaagaatatgagaaaatttaaccatggagcaggg

SEQ ID NO: 351842 - DNA, 354 bp, Homo sapiens
gtggcacacacctgtaatcccagctactcgggaggctgaggcaggagaattgcttgaacccaggaggtggaggttgcagtgagctgagattaagccactgcactccagcccaggcgacagagcaagactccatctcaaaaaaawttttttaaatttaatttttgtaggtacatagtaggtatatttatggggtacacacaatattttgatataggcacataatgcataataatcacatcagagtaaatgggatatctaccatctcaaacatttatcctttctttatgttacaaaccaattatattcttagttattttaaaatgcacaattactgttgcctgtagttgccctgtt

SEQ ID NO: 351843 - DNA, 564 bp, Homo sapiens
gttcattttacctggttttatacataacctttaaataagctttgaattagacaaaaattgttcacccttttttaaaaggacacactttttttttaagaaagaatgttttcctacaaatatattttattggaaaatatccaaataatgaaatayctattatttaatttaactttagattctaaattatgacctgtttgtctacaattatttatcccattacatttacctaattattttaattgtttatgtagattatttatgaaaactgtgatagtcatcatttaaagttttggaaccaccattgcaaaattgtaactgaaacagtgaaaaagatttaaactaactgacttcatcttgcttttagcctccaatctgtccttgttcattcctgggtgtaggccaaactatttgggaccttagcttatagtttagctttgaaacaaagacagtaacagtcctttctcaaaacaaacctcagtccctgtggactaaactgcccaaagccacaagattagaagttatggtaatcttactaaattcaagatgtagctattttttattaaa

SEQ ID NO: 351844 - DNA, 580 bp, Homo sapiens
cacaaaggagctcatggttcactgggttcagcctcctcatttttggaatagtaggaaatcaagaagaaataagtcaggtacttttgctttgaagacacttaagaattggacatagccctgaagtggttatttctgcttctctatgtgaattctgactcctagtccataaaaacgaaggctccttaattcctcctttcctctcattcatcatttagacatttgttttccactgggatggtagtgattaaatcactaaaatatgattttgatcaaaacactgaccataatacagagtttaaaaatgtaatgtatgctaacttggatacaatctgaasattccaagtcaaataggatttcagtattaatgccacaagatcattcttagagaattttggctgtattgttttttagttggtaacacttttcattacttgatcaattatagaactctcaatgtggtatatccactcagaccctaacactgttactgttttgtgattagaggaattcagtctatctttgttaaagagttccccaaatgcaactttgcagtcttaaaaccttattccacaaactgcag

SEQ ID NO: 351845 - DNA, 542 bp, Homo sapiens
actaaattactcaggtatagccattctgctcagtctgttaacctactcaggtgtatattctacaggatccttacagttttgayaataacacttctgtatatcctgatgagtttttctgcatcccagcaaatatcctctctccctaagcaagaagggcagcttctctataataaccccctcccaaatttgcttctatcttaattcacatttttgaattaagtttcttgttttatttttactttgggtttcatttctatttcaaagacaggattttatttgagcatgagtagtaatcatagtaaatatgtacattttcctttatttttatcaactatataattaggctatatttaactggagaggctgacctctttgctacttggtggtacatcaccacaaatggcatcttgctaaaaggaaaacttttaagattccagactgaatgcctttatttgcttgccccacacacagactgatcaaaatgaaaaatgaggtgtaccgtttttatcctcggagcataatgatatgaaacaatgtgcttg

SEQ ID NO: 351846 - DNA, 585 bp, Homo sapiens
ttggtctctacttcaagggacttaaagttcaactgaagatccaaggacaatttctgactgcctcaaaatgagccctactgctagaccatgcattctcaacaagggcaaagattggtgcttgaaaagcatattgaaaaaaaaaaaggtctgtagtcttccaaaggcattaaaatttcacaggggaaaaagagtggctagaaaaaacttgcctaaaaggtgccttcaggggttaataatgaaaaaaagatttgggaaactctgcaagaggaacccagaagggcctcatgtttggtaatagttggttcaattaccctgaacaaattacttaatgagtctcaccttgatacaccaccaacttcatagagttttggtttgggttaacaactacacatggccagcagcttctcaactttaatattccttcctaaaaggggccttttactaatcactctttaaagtgggtctctcttcttattttcccagcaccattggtccttttccataacttgtaattatatgccyatttccttgttttaattgggtgtctcccacactaggtggtaggctccatgatggtagggacca

SEQ ID NO: 351847 - DNA, 490 bp, Homo sapiens
aacaccaaaagcatgaaagaaagaaaaaattggtaagttggactccattaaaattaaaaacttctactctaagaaacactgttaagaaaaagacaagtcattgactaggagaaagtatttgcaaaacacacatctgataaaaaacatattctaaatataaatagagctcctaaaactcaacaagaaaaataacctaattaaaaggtgggcaaaatatctgaacagatgcctcatcaaacaagacatatagatgacaaaaaattatatgaaaagatgctcaatatcatatgcaattagggatttgcaatttaaaacaacaatgagctacaaccatatacaacagctaaaatccatactaacaccaccaaatgctggtgaggatgtggagcaacaggaactctcattcattgctggtgggaatgcaaaataatccacccacactggtggacagtaaggcagtttcttakaaaactaaacagagtcttagcat

SEQ ID NO: 351848 - DNA, 566 bp, Homo sapiens
cattcatcttttggttctctattctgtgccaagaagtagggatacagtggttaacaaaagaacaaaatctctgccctaaagaaactcacattccgttgagaggtgggagtggtcataggctaaatacttgccagtgtttactgagaaaaatatgaatgagataaaataagaggtggtactgggcattgaccaaaatagcactgaaaggtaacaattggcctgagaggcctgagggatgacaagcaatcagtcaagtaagaagttattccaggcccaaagaagacaaacatcgtaccttgaggcaggcccaggcatggcagaaatcagcttagtgtgtctagagtaggaaggtcaggttgaaatgtacaagtgaaggsagagctaaaaaagagaaaggcagcagccagatccttcaggccatagtaggtcaagtaaggagtgcagaggcaattggtttcagccagagagctacaagatttgattcatggtttatgtaagagatacttttggctgctctgtggatgaaaatctggagcggaagcaagcaggtcggttaagaggcttct

SEQ ID NO: 351849 - DNA, 593 bp, Homo sapiens
aggccagggcgtgggcccgggcgggatgccccgcgcccggcgcctccgcagccagctccagcccagcagcgctacgaggccgcatagcagcagcgcgcccccgctggggtccagccgcagcagccccagaggcgcacgcaggaggcgcgcgggccagggcgggtcctcggccggcggctgcgacggccccggagacgacatggtccgggcgccggcggcctcgggttccccttgctgcctggaggagacgcgcacgcagctgcctgacccgcggcgccagtgtcctgctctgctctggaaggtcgggggcgggcagggggtgtaggaacgcccccggattggctgcgccgcgcgcattctccccgccgccgccactcagcgacgcctgggcggaacctggaggckcgccggctgcctggcggagggggttggcgggctagcaggcgggggacctgaagtttgccccgaagtccggttacgaccctttgcagggtcgggcttggcggtgactgtccctgaaactgggatgctggcaacacaaccttgcgctctgattggctgttggtttcccttgtgtcattcgtttgtcatta

SEQ ID NO: 351850 - DNA, 593 bp, Homo sapiens
aggccagggcgtgggcccgggcgggatgccccgcgcccggcgcctccgcagccagctccagcccagcagcgctacgaggccgcatagcagcagcgcgcccccgctggggtccagccgcagcagccccagaggcgcacgcaggaggcgcgcgggccagggcgggtcctcggccggcggctgcgacggccccggagacgacatggtccgggcgccggcggcctcgggttccccttgctgcctggaggagacgcgcacgcagctgcctgacccgcggcgccagtgtcctgctctgctctggaaggtcgggggcgggcagggggtgtaggaacgcccccggattggctgcgccgcgcgcattctccccgccgccgccactcagcgacgcctgggcggaacctggaggcgcgccggctgcctggcggagggggttggcgggctagcrggcgggggacctgaagtttgccccgaagtccggttacgaccctttgcagggtcgggcttggcggtgactgtccctgaaactgggatgctggcaacacaaccttgcgctctgattggctgttggtttcccttgtgtcattcgtttgtcatta

SEQ ID NO: 351851 - DNA, 494 bp, Homo sapiens
ttgtaggtagttaatattattcagcacagtattctataacattatttgtcttctgtgaaattcacaataattctaggaatgttgctaaggttagaatgcctactttgagctggcactaagaatggcagctatttctaaatatttgacaccattttgatatctttccctttgtctggtggtgtctgtctcattgaagctgagtgaaraaaagaattcatttattcaacaaatacttactgaacgctttctatgtgccaggcattcttgtcagtgttgcgaatgaggcagtgaacaaaacaaaatcctttcatgagctttaaaaaaagctcttgaatatcctcagccaacaaaccagagcagggaggcacagaggacttgcctcgctctcaggtactctggggaaacccccttcaggatggcagatggacacaagcaggaaaggagagagtgaaaccctgatttggaaaataaagtagtcgtatgttctaatttaa

SEQ ID NO: 351852 - DNA, 370 bp, Homo sapiens
ttcaaaaagaaaaatattttggaggagataaaggattaacatgtttaagttgaaaatctttgctaagtaaactcatatacccattttatagttgttaaaaaagtgaagtaattcatatctatttgatttttaatagttcttacraatatcaggatactgaaaccccaaggtaaggatgaatattattggatgaaaggaagaaaaaataaaattttctaaacaacttttgtatcctcctgttcataaacatttaataaatctagaactcaggactgtcccactaagattaggagtaacatttaagcacacccttacatcttattttcttgtttctatagcaggcatgtcctctgacaagaagagcaaaaac

SEQ ID NO: 351853 - DNA, 448 bp, Homo sapiens
atagtttatgggcctttattacacaaaaggagagttctggtttcaggagtggttaagacatttccattccttctttgtctcaacaatcacataccataccagaggaatgttgaacagaagaacacactctatccacattgaaatgaaatgacacatctacatttctgcaccacaacatctgaagacaaagtggctatatgattggcaaatgacttaatagagtggaggatgactacacttaagcatctacagaggggaatgccagtggagtatgagaggacagaatgagaactactcccctagtttaccatgcagaatctcaaaacgggttagaaattggaggtaccagtgatcataggagacagaaatgagccagtagactgagaacaaggatagtttgraatgcacataaaataagatcaggtccttatcactgcccccacccctg

SEQ ID NO: 351854 - DNA, 585 bp, Homo sapiens
cttggctgggggatggggggtggggaagagatatggcctggcaaaatgaaaagttgcttctagacaaagacagaactcttgaagtgcttcaactgggygaaagtttgacagagaacactcaacaaccctggccaccgacaaaagaaaacaaggacatttgtctatcttggcctggaccttagcatagaaaatgttttcctacccctactctaagtggcaactatatacttgacgctgccatttcttcttttttttcctttttttttttttagacagagtctcactgtgtcacccaggctggagtccattggcgtgatatcagcttactgcagccttgacctcccaggctcaagtgatcctttcacctcagcctcccgagtagctggaactacaggcttgagccaccacacccagctaattaaaattttttttttattttttaaagacagggtctcactgtgttgccaaggtggtctgaaactcctgggttcaagcaatcctcccaccttggcctcccaacctgctaggattacaggcatgagccaccatgcccggcagattttgctattttaatgcaaaaacagc

SEQ ID NO: 351855 - DNA, 627 bp, Homo sapiens
tgttggacataaagggtatgatctaatgctaataaactaggggatcttaggcagacccgtttgttcagattcttctcctctcctccttccccccaggtatgaggcaggttctcttttagaatgaggatcttatagcctactttcaggaaaggtaggtcagagggtgacctcccaaggttttatagcttgctttgggacagaggtgttgtagtttctatgatctgttttgagggagaaatgggagaatgagaaaagaaagcaggagaaagtgagaggaaacttkgctctggggcccgtccaatctctttcagttcaaaatagttaacatgccaaagcaacatatttgggtattatgttctgaccttcagtactgtgtaactgcacaattaataccatttgtcatttgacactgggcaagttttccacaatctgtgtcttaattatcctttctgtaaagtgaaaataaaaacactcttacctcataagaaaattttggggataagttgacttaatatgtataagatacttagaataatgtttggcactttgaaactactcagtagaggctattattattctacatttataaggaataatgcaaatttatcacgtaattataatagcctt

SEQ ID NO: 351856 - DNA, 554 bp, Homo sapiens
gtctctgcaatatcgaaaacatatacaaaagtgcatttacccttctattcacacagaaacacacacacttgtgccatactcaaaaagttaaagaaaacaaaactaatggataacttcatatttttatcattattaattatggcaatcacatgtgaaaaaatatttcagtatcattatttgtttaattaaccccctacttataaactcaggctatgcatcaacatattcttagagatatttcttacacttgatcaaacaccaaagagcatagcacttaaaagcaaagcattaattcaaaactatgctgctgacattttcacactacatttgctgcattcgaaaagtggaaccagggtatgaatagaaatataattcttcaccaagtacatggaaacaaatgacagtacaattacatgattaaaaatgaattttatttatgctttttcatgcatgaactctacatatgtaatttcctgcctggtttgtaaataggctttaaagcctatttacacattattacacwtactcttccgaatgtgtaataattttcattg

SEQ ID NO: 351857 - DNA, 670 bp, Homo sapiens
taaatggtctctgcaatatcgaaaacatatacaaaagtgcatttacccttctattcacacagaaacacacacacttgtgccatactcaaaaagttaaagaaaacaaaactaatggataacttcatatttttatcattattaattatggcaatcacatgtgaaaaaatatttcagtatcattatttgtttaattaaccccctacttataaactcaggctatgcatcaacatattcttagagatatttcttacacttgatcaaacaccaaagagcatagcacttaaaagcaaagcattaattcaaaactatgctgctgacattttcacactacatttgctgcattcgaaaagtggaaccagggtatgaatagaaatataattcttcaccaagtacatggaaacaaatgacagtacaattacatgattaaaaatgaattttatttatgctttttcatgcatgaactctacatatgtaatttcctgcctggtttgtaaataggctttaaagcctatttacacattattacacatactcttccgaatgtrtaataattttcattggtgaatttctcataaaattgcaattatttctggaaaaaattagcttccaatactctaagctggaaatggaggggaagcaacataagggaaattcagaaaacatgttttca

SEQ ID NO: 351858 - DNA, 635 bp, Homo sapiens
attattaatgttacttttattattggcattgaaagtaatggcaaaaactgcgattacttttgtaccaacctcatataatccattttgccacataagtctttgagaattatttcatgagtttggaaataacgttgtaggacttttccttatttcagctaaaaatgaggttctttgtcccatgtccacgaaaattcaggctcacagacaattaagtggtgattaagacagggttgcaaggccagagtctctgctagagcacttcctgcatgctgtagaatcccaggtctacacaggaagrggaggggccaggctcctccctgctgcaaatggcatgaacttcctgaggctccacccaaatgggcaggctggttggagtttctccagggaccccctcccatatggctgtctcaataacatgcattattaaaaatgatatacactatggccattacataccactgtcatccaatgataaaaacaacatgatggcaaaagtagaaaatttgaagttggctttgtctttcaatggaatgtagttggtttgttattgttaattatctgggtcatcttaaagcaaaactggtgcctctaacctttatatttgcacaatggaccatgattacatatggcagaca

SEQ ID NO: 351859 - DNA, 612 bp, Homo sapiens
tggcttcaccctcaggatctcatctaaacctaattatctctcaaaaccccacctcttaacactatctctttgggggttaaggtttcaacctacaaattgcatgaggatataaatatacacttcacaaaggatgaattataaatgtaatcctttcttaaatcttgattgttgaaatgagaataaattatatgttgagtgtttatatttgtctgataagattctggcaagtattagaagcaagaagttatttacccaaatcatcacaaaattgtttcttcctcccagagtgaaacgtgcaggaagagcacttttaaaaaacattgaaatataattcagtaaagaaggtttttcttctctatataaagatccatcttgcctctactagcattttaaaaaaataataagaggatgtactaactacaaaaaatagtctaaaacattttaaaaagtgtagtagtggacttcttggcayaaaattgagagctattttatcttgaccatttgcactaatcggtatttctggaaatgcaggctctgttggctgttaagatgctccaaatatcttctcaccttgcctgcttctacttctgctcttctcactttgcaggaggt

SEQ ID NO: 351860 - DNA, 627 bp, Homo sapiens
caagaatgaacaaaagaaatatgggcctgtgtaaggaggccaaatctatgaatcactggcatccctgaaagagaaggtgagaaggcatacaagttgaaaaacatatttcagaatatcatccatgaaaactttcccaatcttgctagagaggcctacagtcaaattcaggaagtatagaaaactcctgaaagattctacagaagaagatattccccaagactcatattcatcagattttccaaggtctaaatgaaagaaagaatgttaaagacagatagagagaacgggctgctcacctacaaagtgaaccccatcaagctaacagcagatctctcagctgaaaccctacaagccagaagagattgagggtctatattcaacattcttaaatraataatcttcaaccaataatttcatatccagacaaactaagcttcctaagtgaggaagaaataagatccttttcagataagtaaatgttgagagaattctttaccaccaaacatgccttacaaggggtcttgaaagaagcactaaatatagaaaagaaagaccactaccagctaatacaaaaacacacttaaacacgtagacccctgtcactgtaaagcaaccatacaaacaagt

SEQ ID NO: 351861 - DNA, 599 bp, Homo sapiens
aggctcaatggacttcaagaaaacacaaagaatcaattaagacatttaacagataattttgtttaaaaaaagagattaatatgataaaacaatcaaacagaaatcctagatgtgaaaagtacaatgaactaaagaaaaaaatgtaatagagagtctcaacagcagaattattaaacattgaataaaattagaaagctcaaagacaagccatttataaatacacagtcagaggagaagaaagaaaaaagaatgaaaaggagcactaacagcttatgtggtatatgagacaacattttaaagaaratatttgggttattggagctcaggagggagttcaaaaaggcaaagtagtagaaatcttattagaagaaataataacagaaaacttttcaagcctcaagaaaaatatgaatatctagaagcaggctggatgaaagtcaccaatgagattcaacccaaattagaataacctaatatatattataattatactctaaaaagccaaataaatagagaggatcctggtaacagcaagagaaaataagcaaataacatataagggagtttcaatatacctagaaacagacatctctggagca

SEQ ID NO: 351862 - DNA, 647 bp, Homo sapiens
tcctacttgttcacacatcctcaaacttttgctttattattatcatcactagatatatttgtggaatttacacactatttaagttctccaaagttttaattcaatgccataaaagtatttttggaaaacataactttgtttaaatgattctagactataaacactagagttgtggtatatactaaatagtatttcaagtcactccctaggcaaatattattgtctttgactggggcggctgtagcaaaatgccatagacagagtggcagcaacrgaaactcatttctcagggttctagatctgggaagtccaagaaggtgtctcctctccttgtcttcacatggtggaaggagcaaggtgtatctcttgagcctcttttataagggcactgagagctttgtcctcatgacctaatcatctccctgaaaccccacctcctaataccattacattggaagttagttgtttcaacttacttatttcaggggaacttatacattgggtccatcgcaattgtaatagaaaaatttcctttgaaaaacaacttaaattactaactaaatgcaggtattgtctgatgtcttatcagtcatttttaaaatttcagattcaattatctatgcagggatctgtagagctccatgagc

SEQ ID NO: 351863 - DNA, 593 bp, Homo sapiens
caaataatccaacttatgtcaaaactaaatggatcatctaccatagtttcaggaaaataataataataatagcccatttagaaaacattaaccttagcaacttgcatacaaaattcctctaagaatacattagcatgcaagtataaatcttgcaatgtatagaatctgcttactcttagtccccaggtttttaaaacttctttgataacctaatataccaatttgagatacacatttcctgactaaggaatttcaagcttcagaaatgctgggctgtcaactttccagtcctccttactcttgcatcaattaatgygaactgatatggtgagttaaacagagctccactagcagccgcataaaacacagatatgcttgttatctattccataatggaaaaactgaatgtggaaacccagaaagtgggatgttataaatatcccctttaccatcctttgcaaacagattaaagtcctagtgacagagaggagaataaacctaataaaccttggttaaagaaatcctcctcctattaaaaagaaatatgctccacttttggactctccataaaattatcctaagagatttggaca

SEQ ID NO: 351864 - DNA, 601 bp, Homo sapiens
ttaaataaagcatgctataggactagtttaacccaggccctgaaggctcttttaatgggtctgaggattgcttctgcaaaacacatctgaatttttgatcactgcagatttaatcacagaggacaaaactctgtactgcaaatcatgctaagatctgctcaagtagaaaggacatatataaaagagggcttaaggactagaagttctagcctggtcctagatggccttttctttattctgatcttccagargattttaggataacctgctttattgaagattcaaggatctcagaattactgggaaagtaatattggatttaaataaaaccttctgagaaagtcacatcaatagggaaggaaaaaataaaatcagctatctccttgaaactacatagtgtctttgatgcgaacttgtttagctggctcaaagatggataccacaataaactaaagtgacagcgtagtcaaaaatattcagattaacagtcttggaaattatattttaatcagaagagtttagagggaattttagggacaaaagaatgataaaagagtatgtaatgaagacttggtactacagtgtttgaaaatgtttaaaa

SEQ ID NO: 351865 - DNA, 601 bp, Homo sapiens
ttaaataaagcatgctataggactagtttaacccaggccctgaaggctcttttaatgggtctgaggattgcttctgcaaaacacatctgaatttttgatcactgcagatttaatcacagaggacaaaactctgtactgcaaatcatgctaagatctgctcaagtagaaaggacatatataaaagagggcttaaggactagaagttctagcctggtcctagatggccttttctttattctgatcttccagaggattttaggataacctgctttattgaagattcaaggatctcagaattactgggaaagtaatattggatttaaataaaaccttctgagaaagtcacatcaatagggaaggaaaaaataaaatcagctatctccttgaaactacatagtgtctttgatgcgaacttgtttagctggctcaaagatggataccacaataaactaaagtgacagcgtagtcaaaaatattcagattaacagtcttggaaattatattttaatcagaagagtttagagggaattttagggacaaaagaatgataaaagagtrtgtaatgaagacttggtactacagtgtttgaaaatgtttaaaa

SEQ ID NO: 351866 - DNA, 565 bp, Homo sapiens
tgcaatggctatagccagctccataagcaccatctactggcctgtaggtcmaacttcacagcccaatataaaaccgtcaaaataagtgtgtagggctacagaagcaaagccaaaagaccctacccatcattctctatagtaacatcccctagggagggtgtaggtggaaggaaagggagagaaagaaatgtatagagaaagaaagaaagagtaaagatcgtacacactcaaaaataatcataaaaattagaactgcccccatctccacatgaggaggaactagcacaagaattctagcatcataaaaaatctgaatgtataaacaccaccagaggattgcactagctctccagaaatggtccctaaccaaaaggaaactcagaaatggaagataaagaaaataaaatatgggttgcaagaaagctcaatgagatccaagacaaagttaagaataaacaccaagaaacttctgaagcagtccagaaattatggaagagataaatatcttagaaaaaatcaattggagcttccagaattgaaaagctcacttaagaaatttcaaaat

SEQ ID NO: 351867 - DNA, 565 bp, Homo sapiens
tgcaatggctatagccagctccataagcaccatctactggcctgtaggtccaacttcacagcccaatataaaaccgtcaaaataagtgtgtagggctacagaagcaaagccaaaagaccctacccatcattctctatagtaacatcccctagggagggtgtaggtggaaggaaagggagagaaagaaatgtatagagaaagaaagaaagagtaaagatcstacacactcaaaaataatcataaaaattagaactgcccccatctccacatgaggaggaactagcacaagaattctagcatcataaaaaatctgaatgtataaacaccaccagaggattgcactagctctccagaaatggtccctaaccaaaaggaaactcagaaatggaagataaagaaaataaaatatgggttgcaagaaagctcaatgagatccaagacaaagttaagaataaacaccaagaaacttctgaagcagtccagaaattatggaagagataaatatcttagaaaaaatcaattggagcttccagaattgaaaagctcacttaagaaatttcaaaat

SEQ ID NO: 351868 - DNA, 524 bp, Homo sapiens
aaattttatcaatagtacagaccaaacagaataaaaactttcagaacctgaagacaagtcttttgaactaacccagtcagacaaacacaaagtaaaagataattttaacatgatcgaagtgtttgagaaacaggggattacaatctggggtcagtggctcacgcctgtaatcccagcactttgggaggccgaggttggtggattactttaagtcaagagtttaagaccagcctggccaacatggtgaatccacgtctctactaaaaatacaataattagatgagtgtggtggtgcacatctgtggccccactacgcaggtagctgagggaggagaatcacttcaacccaggaggcagaggttgcagtgagctgagatcacgccactgcactyaagactgggcaacagagtgaaagttcattgcaaacaaacaaacaaacaaaaaaacaaataggggattatgtaaatagataaaaactacaaattattagcattcctgagagtaaaagataaaaagttaacaac

SEQ ID NO: 351869 - DNA, 582 bp, Homo sapiens
cttacttagaatattttactttattcttacatgttccatttttttctttgttttgatttttttccactgtggttatagtatcaactctcagtaccttcgaaggtaggtgcacatgccacttattaaaatattatttattctgaccctaaaggtagcacactcattcatcatcacagtgtaggactaggatgaaagagtatcacacctaaatcatagcaagtcaaactaattgttctcaaactctagcatgcwtagaagacaccttggggatttattaaaacaaaaattgctgggcctaccctgagagttcctgattccgtcttgggcatttgtattcatctcaatttctcaagtgatgctgacgttgaaagtctagggatcatgccttgagaaccagtgacttaaacatgcacctttttaaaccactgcttctatctgcacctcatctagcttctttttatcctgttcaccagcatttactcaatgtccaaaattcaactggtaagtcatctattggaaaacttccaaactctcctggcttagatttggtacctgcatctgtcatgtctactcaggagacaa

SEQ ID NO: 351870 - DNA, 582 bp, Homo sapiens
cttacttagaatattttactttattcttacatgttccatttttttctttgttttgatttttttccactgtggttatagtatcaactctcagtaccttcgaaggtaggtgcacatgccacttattaaaatattatttattctgaccctaaaggtagcacactcattcatcatcacagtgtaggactaggatgaaagagtatcacacctaaatcatagcaagtcaaactaattgttctcaaactctagcatgcatagaagacaccttggggatttattaaaacaaaaattgctgggcctaccctgagagttcctgattccgtcttgggcatttgtattcatctcaatttctcaagtgatgctgacgttgaaagtctagggatcatgccttgagaaccagtgacttaaacatgcacctttttaaaccactgcttctatctgcacctcatctagcttctttttatcctgttcaccagcatttactcaatgtccaaaattcaastggtaagtcatctattggaaaacttccaaactctcctggcttagatttggtacctgcatctgtcatgtctactcaggagacaa

SEQ ID NO: 351871 - DNA, 496 bp, Homo sapiens
acgattcattcaatatgaagcattcaawagatatgattaaatatgcaatataattgtatatattatattattattttatccccagcatcgccaagtaccttaaacatattaggagctcagcaaatatttatagaatccatgactatcacataataaaaataaaatgcctaggtaaatattttgaaataactttagatgtttatatttcgactttcagagagcagagagaagtaataaagcataagtactataaaatttagaaagctttacttaaagtgatcgaaacaacacagaaaatttatatattcacttaggttatatgttaatctacaaacagagctcttttcaggtaagccttgattcagcaggccatacatacactctatgttctactgtttgtgacatcagcttcatttccatgttcactatgctcatccccttggtagctccagacttcatcctaatatttgcaaattgccctatgtgttacagcctt

SEQ ID NO: 351872 - DNA, 496 bp, Homo sapiens
acgattcattcaatatgaagcattcaatagatatgattaaatatgcaatataattgtatatattatattattattttatccccagcatcgccaagtaccttaaacatattaggagctcagcaaatatttatagaatccatgactatcacataataaaaataaaatgcctaggtaaatattttgaaataactttagatgtttatatttcgactttcagagagcagagagaagtaataaagcataagtactataaaatttagaaagctttacttaaagtratcgaaacaacacagaaaatttatatattcacttaggttatatgttaatctacaaacagagctcttttcaggtaagccttgattcagcaggccatacatacactctatgttctactgtttgtgacatcagcttcatttccatgttcactatgctcatccccttggtagctccagacttcatcctaatatttgcaaattgccctatgtgttacagcctt

SEQ ID NO: 351873 - DNA, 537 bp, Homo sapiens
cagacctgctgaatcacaaatggggggtcaccatattggccaggctggtcttgaactcctgacctcgtgatctgcccacctcagcctcccaaagtgctgggattacaggcgtgagccaccacgcctggccaagtacatctactctttaaagattattgagtgttttgcagaaacccaatttagtaggttggatccctgtaatgtctgtgtgaatcagtgattaggtgaactcattttgaagcacattttgtaggagcacttaatcactgcttctaaggacaagacttgacatatagagtaaccgattactgtaatttttctgcttaatcagtcttgctgtttatgtatagtaatgatggaggaaaaatatttaagttttaaacattagaaacttggcataataagaaatatctctacatactgcctctatttggccataygagactaatgcctcccagtagccatggaacatgcctttttgcatgttatgcaagtgtaactcaaccatttgtttacttattagtttatttacacaag

SEQ ID NO: 351874 - DNA, 464 bp, Homo sapiens
tctttttcgttttgttattttgcctgtatcattcccatctcctggctgtacagaacaaacaggcaggcagacagtgaaaaacatgtatttagtatccactaagtctggcactgtttcactggaaggactcagacaataatcactggaattaataagaagaataccttacacactgagaaaggcaataaagaaaataaatagaataatgtagtgakgggagtgaaggggtactactttagtttgagaacttgaagggttttctgagaaaaatgacatctagcaaagtcctcactgaggagaaaggggcaggcatatgaaaatctatgaggcaaaggaggaatatggtgggagaaagatcagagaggtttgtataatgcagcatcttgaagactgtggtgaagagtctgagatttcattctattttatttcattctatttcatttgagaaacagttaaaaatcttt

SEQ ID NO: 351875 - DNA, 577 bp, Homo sapiens
cagttaagtatatgttaatttttaaaaattactcatgacattcgttaaaacactaagggcagactttattcaagacaactgcaacatgtatagggactgctgcaatggggtattgcagcaggggagagaaattgggttcaactccaaatactaccagggaaagtgggaattaatagccaaggagcagagcacgatgggaaggtgtgtgcatagaaaattactaagaggaaatagcaagttaagaagggatactggctcaatgaacctaacaggattttggctggaggcaggccaattgttcttcacacattacctgggggatggatggggatgaagaatttctatgaatatgagggtgatcagatcttgagggcagagagtctgactaaactgacttagtgggattcttgctaaagttgggcttttgatgacataacctagaatggagccaatttaaaaaatgagttcaggggagcttgacaagggttyagtcaaggaaaatacttttgtcagctataaacagaaagtgctggagtttcctctttactttgttcataaaggatcaataaagtatttg

SEQ ID NO: 351876 - DNA, 508 bp, Homo sapiens
aatcagcacctgagccatttcaccctccctgtgcaagttgtagtatagggggaccctatacattccacatccaggcagatctcaaggaatctggagcacccactctcctggataaggagtttaggtcaccccatactctccawgcacagaacttggggccaaggaaggagttttctcagctccaagcctaggcacacctctaggtatttggtagctgcccagtggattctcctttggcactagtgtttgtgcctgccatcaagataactggaggttggcctgcccagtctgggcccacccatgttgccctctccattcctccagagttatttggggagatgaccacagttaagtggggagatcagactactataatcttcaaagattagcccattgcctgaaacaatgagagcttttcctggtaaataaggatcaggtatgtattcagtcatattggttgcagccagctctcacacataagagctatgcactggcttgtaggttgaac

SEQ ID NO: 351877 - DNA, 508 bp, Homo sapiens
aatcagcacctgagccatttcaccctccctgtgcaagttgtagtatagggggaccctatacattccacatccaggcagatctcaaggaatctggagcacccactctcctggataaggagtttaggtcaccccatactctccaagcacagaacttggggccaaggaaggagttttctcagctccaagcctaggcacacctctaggtatttggtagctgcccagtggattctcctttggcactagtgtttgtgcctgccatcaagataactggaggttggcctgcccagtctgggcccacccatgttgccctctccattcctccagagttatttggggagatsaccacagttaagtggggagatcagactactataatcttcaaagattagcccattgcctgaaacaatgagagcttttcctggtaaataaggatcaggtatgtattcagtcatattggttgcagccagctctcacacataagagctatgcactggcttgtaggttgaac

SEQ ID NO: 351878 - DNA, 535 bp, Homo sapiens
attgagaatcaacacaaaaaacttctaaagcaatccagaaaatgaagaaagagatgatcatcttaaaaagaaatcaatcagagtatctggattaggatcrctcatttaagaaatttcaaactacaatgaatatcttttttaataggaaccccaccaggctaacaatagacctctcagcagaaaacttgcaagccaggaaacattaggggcctattttcagcatttttaaagaaaataaattccaaccatgaatcctatatcctgccaaactaaactcataactgaaggagaaatataatattttccacaaaagcaagtgccaagggaatttgttaccattaggccagccttacaagagaagcaaaagagggttatcaatatgtaaacaaaaaaattacatctgctactacaaacaatactttaatacatagcctacagaccctataaaacaaccaaacaacaaaaactgcaaaacaaccagctaacaacttcacaataggatagaaacctcaaatatgaatattaaccttgaatg

SEQ ID NO: 351879 - DNA, 583 bp, Homo sapiens
cactaactagattaacaaagaaataaaccaaagaagatccaaataagcataattagaagtgacaaaggaggcactacaaccaatcccacagaaatgcaaaagttcctyatatattattctgaaggcttctatgcacacaaactagaaaatctagaggaaattgataaatttttgcaaacacacaacctctcaagatgaaatcaggaggaagttgaaactctgaacagaccaatactgagttctgaaatcaaatcagtaataataataatagaaaaacctaccaactatagaagcactggactagagggattcacagccaaattccaccagacatgcaaatgagttggtatcaatactaatgaaactgttccaaaaattcgaggatgaggtacttctccctacttcatttgatgaagccagcattattctgataccaaaacctggcagaggcaacgaaaaaaaacaaaaaaccaaaaagaaacaaacaaaaaaacacttaaggcccaaatgcctgatgaacataaatgcaaaaaatctcaataaaatagcagcaaacaaaaatcagcaggacatcaaaaagtta

SEQ ID NO: 351880 - DNA, 541 bp, Homo sapiens
aaacaagaaatcaaacgatctttctttactgataagattatttacctagaaaacccaacatctctgacaaaaagcttctaaaactgataaacaacacaagtgaagtttcaggatraaaaaaaaacgcactaaaacgagtagcatttctataatcaataaataactgagagccaaatcaagaatgcaatcccatttactatagccacacacacacaaaataaaaaacctaggaatacgtctaacaagaaggtgaaatatctctacaatagaactacaaaacaatgctgaaagaaatcatagataacacaaacaaataaaaaactttccatgtttatggattggaagaatcaatattgttaaaatgtccatactattcaaataaaactagttttaatgctattcatattaaactaccaatgtcgtttttacagaattagaaaaaactattctaaaattcacgtggaatgaaagcagagcccaaatagccaagacaatcctaagcaaaaagaacaaagctggaggcatatgctactcgacttca

SEQ ID NO: 351881 - DNA, 503 bp, Homo sapiens
tcaatttatttccgtataatattctgcattctgaccataactctatttacttatttattctattactaatggacatgtgggtgcatcagtgtttggctgtaaagttaatgcatccatcaacatttttgcacaattttttgttgtatcagtgcacatatttctgttgaatatatacagaggaaagaaattgctagaccaaagggcatatgtatatttaaatttagtaataatgaaacagtttccaaagctggttgtactcaattgcacttccactagcagtatatagtagaaacagaaataaatctacagtgtggaaaaaaaaaaaaaaaacccacacacacacaaagaaacatgcctatggggatcttggctttggatggaaggaaaaaaaaatctctcctgaaaattcatactcacaaactggccctcatatggatttgcagctagggatccaaaactttcaagctgaraatttatttctaagggatcccatgtaagtacct

SEQ ID NO: 351882 - DNA, 616 bp, Homo sapiens
actctgccactcagccattctactcctaggcatttacccaagagaaatgaaagcatatctttacataaagacttctatagaactattcatagcaaatcttaataatgtcttctccactgcctcttttgaagtgattactttttcattacrtcaataagctctaagtgatgggttagatagaacagatgtaatgttagcaaggatttttaaatgcatgtataaaaaccaaataatttcacccactaatatttaataaatatagctcacactctgctgagtgtgagttcataaagctatcttgagaatgatgcagctacccatcctccatttgttcactgatagattaaaggaaaaaggattacatggggcaaaacaatcaggttaagtttgactgaatatcctacctggtcagcctcctgcttgaagaggctgagtgagtagttcattgcctgaggtatcacaaacatggtgtcacaaaaagagcttaaagtttttatgtaaaacaattattgagattatgtttggtgaatcacagagtgcaggtattacattggccagttctctttgcctagtttcctaggactcatttctctgggactatgaagactgagggtga

SEQ ID NO: 351883 - DNA, 614 bp, Homo sapiens
tttcaaattaatcaggaaatgttaatcattgagatgggaattttgactgtagatcaaaaatgatttactgattttatactaggaaaaaaactggaattaaaaaaaggcgagttgttggttaacattttagtttctccttttcatttctgaatagtttccttctctacagatcacagacagccctacaataaagatagatgtagaggtaagaaaagtatttcaagataytaaattaagtaaaaaaaaaaaaatccataatttttctctattaattacatcaagaaagaagagcacatgatgattctgactgaatggaacagaaagccttacaatttacatatttttaagtctagctgcaaaggtctatggtatttgcatatgaattcctttcaatatgcaagatctcagagtctgcaaagtaaacccagaattgaaagaaactgaatggaaaactttgctcctcaaaaaaacgccgtctttccataaagtgatttttgtaatatctgtatttaagaggactctattctttctgagctattgtttgaagaagcctactgaaaatctattatttaaaattgaagactttgggattatattatgccatctccttcatg

SEQ ID NO: 351884 - DNA, 629 bp, Homo sapiens
gattgaaacatctttacatacaatgaaaccatacccaaagacttgtccacaaaacaggaaaaaagtgtaacataatatttcaaaataattaaaagatattgaaaatgtcatataagacataaacaagggctgggtgtggtggcttatgcctrtaatcctttgggaggctggggtaggtgatcacctgaggtcaggagttggagatcggcctggccaacatggtgaaaccttgtctctactgaaaatacaaaaaaatagctgagtatggtggcacatgcctgtaatcccagctactcgggaggctgagagaggagaattgcttgagcccaggaggcggaggttgcagtgagccaataccgtgccattgcactccagcctgggcaacagagtgagacttcatctcaaaagaaagagaaaagatatgaacaagaaaaaataaaagtattcaattataaaataaattatataaacaaagaaaaaataatttgttatgcagtataacctaaaagaaacacaattttttgaacaatgaaataatgccttgaaagaaatagcaaatacgagaaaaataaacttataaaactcaaaacaaagagagagagtaaaacaaaactaacctggaatgcaat

SEQ ID NO: 351885 - DNA, 629 bp, Homo sapiens
gattgaaacatctttacatacaatgaaaccatacccaaagacttgtccacaaaacaggaaaaaagtgtaacataatatttcaaaataattaaaagatattgaaaatgtcatataagacataaacaagggctgggtgtggtggcttatgcctataatcctttgggaggctggggtaggtgatcacctgaggtcaggagttggagatcggcctggccaacatggtgaaaccytgtctctactgaaaatacaaaaaaatagctgagtatggtggcacatgcctgtaatcccagctactcgggaggctgagagaggagaattgcttgagcccaggaggcggaggttgcagtgagccaataccgtgccattgcactccagcctgggcaacagagtgagacttcatctcaaaagaaagagaaaagatatgaacaagaaaaaataaaagtattcaattataaaataaattatataaacaaagaaaaaataatttgttatgcagtataacctaaaagaaacacaattttttgaacaatgaaataatgccttgaaagaaatagcaaatacgagaaaaataaacttataaaactcaaaacaaagagagagagtaaaacaaaactaacctggaatgcaat

SEQ ID NO: 351886 - DNA, 629 bp, Homo sapiens
gattgaaacatctttacatacaatgaaaccatacccaaagacttgtccacaaaacaggaaaaaagtgtaacataatatttcaaaataattaaaagatattgaaaatgtcatataagacataaacaagggctgggtgtggtggcttatgcctataatcctttgggaggctggggtaggtgatcacctgaggtcaggagttggagatcggcctggccaacatggtgaaaccttgtctctactgaaaatacaaaaaaatagctgagtatggtggcacatgcctgtaatcccagctactcgggaggctgagagaggagaattgcttgagcccaggaggcggaggttgcagtgagccaataccgtgccattgcactccagcctgggcaacagagtgagacttcatctcaaaagaaagagaaaagatatgaacaagaaaaaataaaagtattcaattataaaataaattatawaaacaaagaaaaaataatttgttatgcagtataacctaaaagaaacacaattttttgaacaatgaaataatgccttgaaagaaatagcaaatacgagaaaaataaacttataaaactcaaaacaaagagagagagtaaaacaaaactaacctggaatgcaat

SEQ ID NO: 351887 - DNA, 601 bp, Homo sapiens
gttgaaagttttcatatattcagtcatcagatatgattattagggttatttcccaattctaatcttctgtgaaatgtactgaaattattttttagtttataatttatcttagttttgatttaaaaacacatagtataacaatgtctatgtgtaaagaaagaaaaagtggctctgaaaattgtactagtaacaggagaacataaaaataatcaggcagtattacaaaacaaaaacaaaaataaaattaaattctagcaaagaagaaaaaaattttttaaatgaatcactttcctgaaggkttaaaccacaggataatcccaactataagaaaattggtaaaccagtttttcagtgtgaaaaactatatagtatatagtacagaaattatgaacaatgaaaagaataagatacatgcagaatagctaaaaagttgcaacctaaaagtaatcagaattttaaaagaaaaatagacaacatagagacaggattcgaataaattattggcagaggcttttccaaaattaaaggaattaatccttaaaatctgcaatctcttgttgggaatggtcaactcctttgctgagagatcttgttaacattg

SEQ ID NO: 351888 - DNA, 627 bp, Homo sapiens
cttaagcatgtttttttaacatgcattcatttttaggaaaccaagaaaaaaataagaaaatcttagacataggatctaggctacaggtttttctacattagaaagcacggaaggaaaattcagggtgtcaaatttgtagtaagtccagaaggcaaacagctcatatttaagcaggacaacaaaagatgatgagagagaactgaccaggtaatcaaagcaaaataagcaattacagaaattgatagattatctgatatatttgagtttgaaattgaatattgatagatgattgatayataaattgggtttctgaaataaggaattgtttccttaaacacaagaaattatttcaaaaggcaaattgtaatcctagaaacacacaaaaaaattatataaggaaaaaataatcatcaaagaccacttgaatctacagtgactaaaattatataatcgtaacataataagaataaaagcatattcaattcaaattttgatatatcaatactagcagaaatggcaaaataagaggatgaaaatataagatagcttaattatactttggggactgcttgagggtggagggtggtaagagggagaggatcagaaaaaatacctatagggcactgt

SEQ ID NO: 351889 - DNA, 595 bp, Homo sapiens
ggtactttatgtttgttaaagatactatataaaccagaacccaaagccatatcattgagaactactgatttactggttattactcaggtatatataaaactctacatgttaataaacttttgtttttctcctgttaatctgtcttttgttacagggatccactccaactaataacttatgagggctgagggaaaacttacttttcttccctaccttctcacacagcactttacctcctaaatcttctttctcacatcacttgataaaatgaaaattgcccaaactatggyggctaatctacaaaaatactcatttttccaggaactattttttgcataaacaatttctaaaatcaactggaatttgactgattgctcccccattcccagaccaattgtaaaatttccacccagtttctccaatacagattgtcctttcagagatttattgtgtctggcattttaaaataaagatgtatgctaatgatgtttttgtatattttcttccatagtgtattttattaggaataggtattgataaaatagagcctcctagtcagtggaatattggcctcaagtttgtcctaaatgggtta

SEQ ID NO: 351890 - DNA, 627 bp, Homo sapiens
cttaagcatgtttttttaacatgcattcatttttaggaaaccaagaaaaaaataagaaaatcttagacataggatctaggctacaggtttttctacattagaaagcacggaaggaaaattcagggtgtcaaatttgtagtaagtccagaaggcaaacagctcatatttaagcaggacaacaaaagatgatgagagagaactgaccaggtaatcaaagcaaaataagcaattacagaaattgatagattatctgatatatttgagtttgaaattgaatattgatagatgattgatacataaattgggtttctgaaataaggaattgtttccttaaacacaagaaattatttcaaaaggcaaattgtaatcctagaaacacacaaaaaaattatataaggaaaaaataatcatcaaagaccacttgaatctacagtgactaaaattatataatcgtaacataataagaataaaagcatattcaattcaaattttgatatatcaatactagcagaaatggcaaaataagaggatgaaartataagatagcttaattatactttggggactgcttgagggtggagggtggtaagagggagaggatcagaaaaaatacctatagggcactgt

SEQ ID NO: 351891 - DNA, 574 bp, Homo sapiens
ggtttgtgtttacagttattgtgaagtgaagcttgtgttatacagtgtgggacaataggaaatccaaccatgtaaataatgattatcacacaaagttattaaatactggtgcaaatcatcaagtaaattaactgaagctggcatgttgatagctgtaatcttccagaagcaataaagcatatggtggacaatggatggcatagtgctttaagtaaaagaaataactttatggaaatattttaggcattttgactcggtggtagcagagagattttcagtaagtgatcttttccactataacttttcaatcatgtaaaagttgtcttttatagcctgtatttcaatcttggctcactcactttctgtgggactgcttrggtcccatattgatgttttttgtttgtttgtttgtttgtttttaagtttatactattgttgtttttgtatttttgcaatttaacttaaggtttgctttcctagagaattgggtaaatataaacaacttgaatttttttttcaggtatacgcctatagaggcaagataagtatacagcacatacggcatatggtctag

SEQ ID NO: 351892 - DNA, 574 bp, Homo sapiens
ggtttgtgtttacagttattgtgaagtgaagcttgtgttatacagtgtgggacaataggaaatccaaccatgtaaataatgattatcacacaaagttattaaatactggtgcaaatcatcaagtaaattaactgaagctggcatgttgatagctgtaatcttccagaagcaataaagcatatggtggacaatggatggcatagtgctttaagtaaaagaaataactttatggaaatattttaggcattttgactcggtggtagcagagagattttcagtaagtgatcttttccactataacttttcaatcatgtaaaagttgtcttttatagcctgtatttcaatcttggctcactcactttctgtgggactgcttgggtcccatattgatgttttttktttgtttgtttgtttgtttttaagtttatactattgttgtttttgtatttttgcaatttaacttaaggtttgctttcctagagaattgggtaaatataaacaacttgaatttttttttcaggtatacgcctatagaggcaagataagtatacagcacatacggcatatggtctag

SEQ ID NO: 351893 - DNA, 596 bp, Homo sapiens
gtctgttgggtcacctttacctataaccagttattctaaaaacagaacatgacaggccttatgtgataggaaacattctataaagttcagggactatatttcacatataccaattatcaagggaccagactagaaactgtgctattttgtaaaaccttcgtaaaactatttgctaccatgtatagataggttctcatgtgtacagaggagttacttttatcatatattatttgtggttgctctcattcgtcctgtcagaaatgacaatatttgttctgcagataggttagggaggagaacaggctggaaaagtctagatatttctttgatagcaattagaagctgctagatgcttcaagtgcctggagataaataaaactactgtaattgcagagccatttttagaactgcacatccactgagacattttgacctgcagctataaactactagtcagtacttgaactgtttgtatcagttaattagaaaatgaatatgtaactgaatggattaattcaayaacctacacaagcacagcaatagtatctcaatacctcaaagctctactattttcttttgtttctccttttttttct

SEQ ID NO: 351894 - DNA, 528 bp, Homo sapiens
atttagtcaaatggacaatgccttggggagaaagaatgtgatttaggtagaaaggtcatgtctctgtcagatgatactgaagaacccagggttacacatgtgtgcagttggtcaacaaccattgtttactaccattaaaagccttaggctgcctttttgtaaaagccttttctttttcgtggttgaccttgactttcacattaacctgattttgtcagtatataaacagccagcaaggaaaaagaaaaagggaagtttgaatccatgttgtgatttacctttagcccagaccatagggatgcccttgggccctgcactctctctttccacacatttgttggagaattacactggaacataaaattgcttcggtttgatttgccrtggctcaactttgaccctactcccctctggggatacagacatggagtttttaccacttacactctttttgacagcccatggtaaactgaacattttagtaataatccacctctaagcaattcagagataacttttaaaatattg

SEQ ID NO: 351895 - DNA, 543 bp, Homo sapiens
ttaatatgtttcaatccccaagttaatggaattaaccttgaaatttatatattaatatccaacagtatgaattgttctatttcctcaggcttgctagacacataatatattacattttagtcatttttcagtttcaaaacactgatttctttaaaagaaattygcttacaagttatgattgttggcatcttggtatctgtattggtgagcttgaaacatctcagctgtcaaagagtagaaggaagagcttctcataaccacagctggaatggatctgcttctataaaaatgggaagtagcagctgcagggaacataaattgtgcaattgatttgattttgcaaagcaaacacattcttcgtgttatgatttagcttgctaattaggccttgcataatcaaaagaactttagaaggaagtaattctgaatcatgctcaacttctacaccttctgagatctccttataacgtttttcacatttccaaggggagataatctccaactgaatgcctcagacaacaaaagaatgggtggcaaataatg

SEQ ID NO: 351896 - DNA, 534 bp, Homo sapiens
catagtcttcactctccccactaatccatacagtctatgacataaattacaattttactgtattaagtcattaagatttcaggatttttaaaaaaataaaccgtgcacaactcatagcgtgawaaacagcagtgcaagacctgttgggaagggggaatttgttttgaagttcagacgggatggatcaaaacctgtttgtccaagagaggtaactgcctatttcttctcgttctcaaatggagaaactgaactccgaatgcttccaaaatccctcagtaaggaacgacgtgcgcaaaagacactaattcacacagtctatgacatttaaaacattataactttattgtattgttaagattttaggatggtttgttatagtagttagcacatgataattaaataaatacctcttcattatgtgtattaaatgttaaatgggtttgtgatcatgttggaaaacaaatgagattggctataaagagaattttaaagtaatctaagacaaatgaagttaattttgattttactttttaa

SEQ ID NO: 351897 - DNA, 612 bp, Homo sapiens
ttgtttatcaataatttatgaaacaaaataattgatttattggctatatattgttctttgtatcacaaattccaggaatatgaggataacagctgaggcagttagctgggaataaaaagattaaataatttyccccaggcatgggtgagggaaatggaggggcatgactgaagtcccacactcatgtctccctcagcctccataactcatataactgaaactactgtaagctatttttcttttctcatttccccttcattgatgaaaaatcttcccatggaagcattgataataaatctctgcttagattatagagatagaggttctcatcccttggtactgagaaggctcattccttgatagtcctcagtcaagtcaccgatttatataattgctgctgcttgttaaatcacctctaatcttggaatttcatgttttttgttttctcagaagaagtaaaacaatgagagatacatctacattggagattcagtccaaattttagcaaaataataaaaattcaaaaacaatggttagggctgaaatctattaacaagtgcacataattgtattctctctccagttcccatttttaccaaaaataaatcttag

SEQ ID NO: 351898 - DNA, 568 bp, Homo sapiens
tgaatacaaaccaagcattaaagttgcctaccttccttttttaaaaaatcartttttatagtgatacaatataatttctggagccaatgaaatcaataaaattcggttttaatcacagcctttgttttacttgctaactgacctaaaggctgccatagcaaaataccacagtttgggtggctgaaacaacagaaatttattttctcactgttttggaggctggaagtctatgatcaacttgttggcaagtttggtttctcctgagacctctctccttgtcttgcaaatacctgccttcttgctgttctcacacaatctttcttctgtgttcatgtgaattcatggtatctcttcatgttggattaaggcctgcttttatggcctcatttaacctaatttctcctgaaaggccttatcttcgaatgcaattatattgagagttaggacttcaacatatgaatttgggggaacatcattcagtcccactctctgcatgtcccccacaattcatgtcctctctcatgcaaaatacattcacccctcgcaatagtctgacacatcttaacta

SEQ ID NO: 351899 - DNA, 610 bp, Homo sapiens
atatcaacaggaagtcacagagtgaaggaactttgtttaatatctgtctgtcagctaactgcagtactatgggtagattggcagagtctcctggcgtttaagcaggagtcttttgtgtttgycaaagcagcttccagtctaagacaattttctatgcaactgggattgcacacactgtccaattcagagaaaattttctctatttctctctttaccattttttataaatttaagaaacttaaggaccaattctgtgttatgtagcctatgtttgtaagcttaaaattttcaattgcctttttttgtttgtttttataaaaaacactccaatattacacaggaggttttagtagtatttcatttttaaaggatataatctttttgaaaagagaaaaagaaatgatagagtattgattccagtaggaaatatctaggcatttaattttcaagctgacatgaacgtgtgcacagaaaagatattttcatttgagtaacttacttttaagtaacatatccagttgttctgggctactttgaattttattttaaaaagccctacatttgaaagtccatgaaagtctactatatccaagtagtaatgaaataaccc

SEQ ID NO: 351900 - DNA, 610 bp, Homo sapiens
atatcaacaggaagtcacagagtgaaggaactttgtttaatatctgtctgtcagctaactgcagtactatgggtagattggcagagtctcctggcgtttaagcaggagtcttttgtgtttgtcaaagcagcttccagtctaagacaatyttctatgcaactgggattgcacacactgtccaattcagagaaaattttctctatttctctctttaccattttttataaatttaagaaacttaaggaccaattctgtgttatgtagcctatgtttgtaagcttaaaattttcaattgcctttttttgtttgtttttataaaaaacactccaatattacacaggaggttttagtagtatttcatttttaaaggatataatctttttgaaaagagaaaaagaaatgatagagtattgattccagtaggaaatatctaggcatttaattttcaagctgacatgaacgtgtgcacagaaaagatattttcatttgagtaacttacttttaagtaacatatccagttgttctgggctactttgaattttattttaaaaagccctacatttgaaagtccatgaaagtctactatatccaagtagtaatgaaataaccc

SEQ ID NO: 351901 - DNA, 448 bp, Homo sapiens
ttccccttgtactgtgatgcaatggaggctttgcccagaaatcttgctctccttcgaattcctaccatatttcattctgtaccatacatttggcatttatcatatactggattaatggttatttgttatatttattttaaaaaaccttggttgagtacctacaaacttcctgacattggactaagtgctaagatacataaagaacaacatgataacatccttgccttcaaagggcttccagtatggtgtgggagaaagaaacrtaaaagaacatataccaaacagtatactgagggctctaccaagtgatgattctacctttggaatgtcaaaatcttctatcacctcctatttttttgtagtggctcactgtgctgcaggactgaatctctccatgtttacctgtatgtgggctgcttcttcccctactgtggatagagcacctacc

SEQ ID NO: 351902 - DNA, 630 bp, Homo sapiens
ggctggtcggtcggtcatcagtaaatctgtacgagctgactaagtgtcaggctgggatccagaagtgacagaggccaacaaagccctcatggggctcaaatattgcgaagagacatgtracaagtaaaccaaggaagtaattctaggtgttgacaagtacaagtcaggaaacaagcaggcgctgtggagacgtcagcagcagggagggggcaggggtgtggtcaggaaagacaccactgaggtgttgttaaagctggggacaggtgggccttggtgaatgcagggaacagcagaaggcccgctggttctgggagggcaggagtgagcaagggcagagacgggtgccgggccaaggagtattattctaggtacagctgtcactgcctgcctactcgaagccccgcagcggagctgacagaggtgacttgcctcctctgactcaggtgtacctttgcacaggtgtcctgtgagtgggcaaccctggagatcctctgcctgcccccaacacacagacactgcctttgtcctcagtggaaatgacaggtctctcacccccctccccggctgaagtgcagggaaaagatcaccccacacattttctccactgttacgtaacagatttcagcaaag

SEQ ID NO: 351903 - DNA, 630 bp, Homo sapiens
ggctggtcggtcggtcatcagtaaatctgtacgagctgactaagtgtcaggctgggatccagaagtgacagaggccaacaaagccctcatggggctcaaatattgcgaagagacatgtgacaagtaaaccaaggaagtaattctaggtgttgacaagtacaagtcaggaaacaagcaggcgctgtggagasgtcagcagcagggagggggcaggggtgtggtcaggaaagacaccactgaggtgttgttaaagctggggacaggtgggccttggtgaatgcagggaacagcagaaggcccgctggttctgggagggcaggagtgagcaagggcagagacgggtgccgggccaaggagtattattctaggtacagctgtcactgcctgcctactcgaagccccgcagcggagctgacagaggtgacttgcctcctctgactcaggtgtacctttgcacaggtgtcctgtgagtgggcaaccctggagatcctctgcctgcccccaacacacagacactgcctttgtcctcagtggaaatgacaggtctctcacccccctccccggctgaagtgcagggaaaagatcaccccacacattttctccactgttacgtaacagatttcagcaaag

SEQ ID NO: 351904 - DNA, 629 bp, Homo sapiens
cactctgcacctacagtgtgcaaggcagaaagcaaagtgtggctgaggactggagctaggactcaatctgctctgggcaccgtgagctttcatgaatactgtcaagtttgctcagagacagggacagggcctggactgggtgggtccagaaggcctacttctggagaaggtaggccttgaacaargggcaggccccaggtggctggcaaagctgaaggaggaaggtgctccaagcagagtgaacctgaatgatgcatgtggaggtgtggagggtgaagtggacaggtggacaggtgtgatccagccacagtgcctgggggctgcctgagagaagctggaggaactggtcaagggctttgaagggccttaaatatagacaaagagagcttttcctctgttcttccccattgcgctgaggggctgagggatagcggaggcctggaaaagtgaagccacgtgcccagcatcatagtgagtttgaggcagggctgtggcacatctgtgggctgctggtgcagtggtggctgtctctgaggtcccaggaggactggggagtgatgcggcaggtgccaggtgaggggaggagggggagcagggctctccagctgctgccgctgctgagctgctgc

SEQ ID NO: 351905 - DNA, 556 bp, Homo sapiens
ctgctgaatgctgcagggttgtaccctccactgcccgccacacccctcaccactctccctcccactggcaagtgccttggcagagaaggacacacacacraacttccagcctgatgttctcacccttctgtctgccagctgacattggctgctgggcccaggatgcctgtctgcggggcctacagccactgggaactgctcaagaggccggctgggctgccagacagctgacttgggggtgaccttcagagcccagcagtcactggggacatgggcactatctagaatatgagggctggagaagatgcaaccttggccaggggagtgacgtggggctcttgaggtacataatgattttgactgctgttatcaacctaaaagcactttttaagctctcgctgtaggcaacctcattaaggcctgtgcaggcaggcagaagagatatatgtgacataagtccaacgagaaagccaacattctcagacaatccacgctgagaattacaggaggggttacactcagtgcagagaaaagagaggtcctgggggctacagaa

SEQ ID NO: 351906 - DNA, 608 bp, Homo sapiens
tgcattgtttcaatctaggggacaaaaggtgaaacttttaagtaagtaaattttccacagaataaaccatgcaagtgtttggtgatgatgttttatactttttcttaatggcttaaagagaccctttgcattckgtgaaaggcagagagagggagagaaaggtgtctacacagccaggattaatccctctagcacatgttgaaaatgagtcataattgccaccaccctagtgcaggcccttatcaccccttgactatttgttgcaaaggctttttgctgcagaagcctcaaatccacattcttcaatatattctgaacactagtcattggtgcaaatttacaaattctctgttttcatgatgttacacatcttctcaaaaacttcagtgactcccatcccttacaggacagagaccaggtttccttacctggctgtcccgaacctccaagggtttccccactttctcttctagctgtatcccttcctaaaatgtgacatcaatgtagtttgaaattgcctgtgacctcctcaaaacaattttttgggggtttgaagtccagccacatcacttaccagatacatcagtggaaataagtggtttcacaac

SEQ ID NO: 351907 - DNA, 573 bp, Homo sapiens
attatatgtcagtgttatcattggcaaaagatcaaacatttctgaaatttgcagaagcaacattcctttcttgacatttaattataataaaatgaataaatattggttaccaaaacaatctaatataataccagctctgactgttctagatagaactatgtctgcaaatgtagcaagcacttttggaggtttcagacaattctaatgttttctgtttcataaatgttgatatatatgatttttgtattatgtaaattgtcaatttagaactgggcctccagtgttaaatggtaatttttaccatttcagatatgataatagaaattgggtaaggctcagccacattttctatggaaaggatagcatagagctattacccttaggcctttactataggataaagtagaaactgctgataacaataaagtcaggagtagtgcaggcattggagggataaaagtgctagcagttttgtcttggaaagaagagagaaaaacacgaccttctctttgcctgtatctccaattacattaaataatrtaatagtaactgctgaaataaattcacccccaa

SEQ ID NO: 351908 - DNA, 549 bp, Homo sapiens
attatattttaagctagtgttaaaatatttawgaaaaagtgcctttcgtgttaatatttttaacatactgaaagtgagtacatatgtatctcttcaaacagctttcaatggaaagagtcacttggacaattttcagagttgttatattatgagctctctctgcttatgaccactcacacacaaaaacaatgcaaataataatgtagttaagagcaaataaaatttaaaactgatgcattataaaaaaatgctctcaaatgcaaacttttagttaccaataagcaaaagtacaacgtgaaatattaaaattgataactataagcattgtttacaaatgtaaagaagaacatatttaaagattaatatagggaaccagattatgtttagtttgtcatctaatctgtagaatatcatcttaaaaacagcaaaagtcacacaaaataaatatcagctgagtttttactattacaaatactgtggctgttaacattttaacttttctcaatagttggaaaaagcatgctaaatcaaaatgagcccaataaatgt

SEQ ID NO: 351909 - DNA, 558 bp, Homo sapiens
ttcattcagctatctgcttatccacccctcccctcggacctcagtatgggctggaacctggacctaggcgtgacaactggtgtagtcatagacccaacaggtagataacattatatttattttacggatgargaaactggggctgagggatgttgagtgacttgtcttagggtacatagcttgtgagtagcagggccagggtcctaactcccagctaactggaaccaagactgacattctttctgttacaccatactttgttatgctatttaaaaaaagtatttagctatctgggagatgttctgatccagagtaccctatttttgaattatgctggagaaatgagttgctaccattcatcaaatgaggcaacttcaagattaggccctccaagtatgcttaagagacatttcacccaaacattgtggaatacaagttctatgaattgattctgctcttttacaacagatcaaaatgtgcaggtggagttatctcagtgtttaaaattgcatcctttgcttgcatttctaaaatggagtctccttcctggttactttc

SEQ ID NO: 351910 - DNA, 608 bp, Homo sapiens
agaattgatcaagcagaagaaagtattagtaagcttgaaaatagcctattcgaaaatacacagtcagaggagacaaaagaaaaaaaataaacaatgaagcatacccatggaatctagaaaatagccccaaaagggtaaatctaagaattattggccttaaagaggaggtagacaaagagataggagtagaaaatttattcaaatggataatatcagagaacgtcccaaacctagagaaatatcaacattcaagtacaagaaggttatggaacattatgcagatttaacccaaagaagactacctaaagacatttaataatcaaactcccaaaggtcaaggatgaagaaagaatcctaaaagcagcaagagagaagaaacaaacaacatacaatggatctgtaatacctctggaagcagayttctcagtggaaacattaggggccaggatagagtggtatgacatatttaaagtgctgaaagaaaaaaaatacccttgaagagtatagctggtgaaaatatccttcaagcatgaaggagaaataaataacttcccagaaaaacaaaagctgagggattacatcaacacaagacctgtcctagaagaaat

SEQ ID NO: 351911 - DNA, 440 bp, Homo sapiens
actattattacatactatatataaagaattgggcacaaagtagaccttaataaaaatctgttattaaaactcagtgatttgagaagtaagcctacttaggttgtggaatatttaattttggaatatgtattatcctaagggaagtaacattttgcatatggtttcactagaatgacattatggctctttctctgagtaaacaatctattctggttttrgagcagtctctcctagtttgttcatcagatttaaaggttggtatgaatcaggttgacgtaacttttttcaggagtagagatgggtatgctccttagtgttctagttgcacccttgagcaactgacgataaaaatggcattcacagtcaagcaatagttaattctatagtgaaaatactctcatactggagcagacagctgtttccatatatttctatttaaa

SEQ ID NO: 351912 - DNA, 600 bp, Homo sapiens
tatccataacttaaagtaaccagaataggttcaatggaaattgggctctgaacccaagaagaattaggcaaggagcctaaaggaaatgcagtgttctctgttctcccttctgctttctatttaatttggttttgtaagaagtcttgatttatgagacatttttaaatttattgtgtatgtggtctgttgttgactaaaatgtcattatgtgacacatgattgtataataaatacataaaccagtggcatagtactttattatcattatgaagtattatgtactgtatataattgtatgtamtatacttttatgtgactggcagcacagtaggtttgtttacaccagcatcgccacaaacatgtgagcaatacagtgcactattatggacacactatcactaaacaggagtatttcagcttcattataatcttgcaagaccaactttgtgtatgcagttcaacattgattgaaatattgttatgtggtgcatgaatgtataagagagttatatagtaggattctgaaaacaattttgactttcccttccctgaagaccttgtggtcagcaacagacattgatgagaataaaggtcctggtt

SEQ ID NO: 351913 - DNA, 574 bp, Homo sapiens
taatatacttttatgtgactggcagcacagtargtttgtttacaccagcatcgccacaaacatgtgagcaatacagtgcactattatggacacactatcactaaacaggagtatttcagcttcattataatcttgcaagaccaactttgtgtatgcagttcaacattgattgaaatattgttatgtggtgcatgaatgtataagagagttatatagtaggattctgaaaacaattttgactttcccttccctgaagaccttgtggtcagcaacagacattgatgagaataaaggtcctggtttccttattattattatttgcattgtttacattgtgattctccataatgtcttggtagtactccacacacttgactacatagtagttcattattattgccctggtcttccctgacatagctagtatttacctgattttcttggtatttctcaggctcttttgccaaatgttatgatatctgacttgaaatggcaaattttatagagctgtctcccctagactttcttttctcactgttacttcctctcaggtgctcttatcaatattcatggc

SEQ ID NO: 351914 - DNA, 489 bp, Homo sapiens
gaattttcttcaagttcactgattcttttttctgctatgtcaaatctaacgaggaaccatttgaaggcacttctcatctccttttccatgtttgtttgttcgttttagttttagcatttccatttgaatatttcttatggtttccttcctcctgctaaaattacccccctaaatcttcatgctctctaccttttccactagaatctttaacacattaatcatagaaattttaaatccactgttagatagttcaaacaatactgttatatctgagtctgcttctgttgattgctttgtctccagtccatgagtttttttccttggttttttgtatgcctcgcaatcttgtggtttttgttgttgtggactgaacatactgtgtgggatgatagagacaagagtaaatagattttatgcytagaaattggcatgcctttccttctggtagcccattggtgtgaagagttattattagtgcgccatgggctt

SEQ ID NO: 351915 - DNA, 440 bp, Homo sapiens
ttgtgggtgggaactggaatgcatagactctggacctagctgggtgcttcggagccagtagggaaaaactccactcactggaacctgctgtgttctacccctygcgggagggggagcatgggtgagcaggtgaaggagctggagcaagcacctttggaacctggcaggagcataacttcgtgcaggccctgtggcagtgactggggcaggcatgccggtgacccctgaagccccagaagaaggttcagtgcccctttagtgttgccgtctatggatggcttaagtgttaacagctcagtggagtgtcagtgtgacagccttttgcacctggacctgagttcttgtccagcatccaggaggaatgaggtctcacaaatgaatcgaagatggtaaatgtggggaattttattgctgaggaaagtggctttcagggggcaggg

SEQ ID NO: 351916 - DNA, 570 bp, Homo sapiens
tctttaaatgagagatgaaccaaacttatttctccagcagaatggcagactagatattgtgactgaccttcctactaaaaacaaataaaaattctgaataaaatctaaaacaataacttgtaaaatgcattgatgccctggcaaggaaaagaaatattcagagtccaaaaactaagtgaaagcaggaacccagagaggagagcagggccttaaaataatctttgttctgaaagcatttgcccaacctcagggaattcaagcaaggtttccatgaccttgtggggtgaggatgcaggaaacaaattctaccctttcagagatagaggcgcatagaacttattgcctcaacagaaagctgagaaatcaaaaatgcatgaagtactatcttcagtgaatccagaaaataaaagaattatccargaacagtacgccagggaaaattctttccagtgagcaaaatataaacatcttcagaccaaaacaataatgagggatttgactaacatcagatcattgctcaaagaaattctgcaggatatatttcaggcaaaaggaagtgattctagctgt

SEQ ID NO: 351917 - DNA, 571 bp, Homo sapiens
tagctaacaatatttcttgatcagaggagagaaaatcacctttactgcccattttgccacagaatgtgtcccacctggaacactatgaggattcarggtgtttctggtactgcctggtgcaatagtaattgtgctttctgcagctggaagaaatgtgacagctgatcgggagttatggagtttgaagaagcagcaatagataacatggtatttgttgaagcagcaatggcatagcatccagtgagatgttgacaagccacctacagcctatcagaggagtctgctatgcccaataaagcaagtgcagaacctttgaaacagagtttcttataagtacatctgagacaatacttgattaatctcagacatacctaggttgccaagggccatatcaattagagagtctagaagtctaaggtaccataaggtaggaagaagcatcagaattagaatattaattttaagtaacttcttcagtaccaataagcttatagggactacagaaatttaaattatgccagaaatattaaacacttggtaatttttcaaatttatgtgaccttcttgctgt

SEQ ID NO: 351918 - DNA, 431 bp, Homo sapiens
gatgaccaagtgagatttatcccaggaatgcaacaatacttcaacatatgcaaatcaatcaatctgatatatcttatcaacagaatgaaggacaaaaaccatatgatcattttgactggtgctgagaaagcatttaataaagttgaacatcccttcatgaaagaaactcttaaaaaactggatatagaaggaacatattatawcataataaaagccatatatgatagacccacagctagtatcttattgaatagacaaaaattaagagcttttacttttaaatggaacacgacaaggatgctcacttttaccactgttattcaacatagtactggaagttctagctagagcaatcagaagaaagaaaggaataaagaacatccaaattggaaaagaagaagtcaaattatccttgtttactcatgatatga

SEQ ID NO: 351919 - DNA, 431 bp, Homo sapiens
gatgaccaagtgagatttatcccaggaatgcaacaatacttcaacatatgcaaatcaatcaatctgatatatcttatcaacagaatgaaggacaaaaaccatatgatcattttgactggtgctgagaaagcatttaataaagttgaacatcccttcatgaaagaaactcttaaaaaactggatatagaaggaacatattataacataataaaagccatatatgatagacccacagctagtatcttattgaatagacaaaaattaagagcttttacttttaaatggaacacgacaaggatgctcacttttaccactgttattcaacatagtactggaagttctagctagagcaatcagaagaaagaaaggaataaagarcatccaaattggaaaagaagaagtcaaattatccttgtttactcatgatatga

SEQ ID NO: 351920 - DNA, 570 bp, Homo sapiens
ctcccatgacatttgagatatacaaagtcatatttgaatgctttgttatgaccgctgttactggaaataaattcaggtcagcagaaatcacatatgactactagtctttttccaactactggtagaaaaaacatctaaagtcytgaattcccccaaaatgtattccagacaggcctttaagttatttatgtctcaggatcattgtttcaaaaaattacaaatgtctctttataggagaatgtattaataattatgaaaacaagaatgactgtatatccaatacctgctatgtgtcaagaatgttttacattcattagttctaattttatcaacaacccaactaggttgacatttttatcaccattttgtataagtaaaaaatgcaggaaaaatagtctaattctcattttatcctcttaattgtaaagttacacttttataaaatattaaatgtacagatgtttgctagttgaaacatttgactttccccatttcacaaagatgttttcattattggtgactgtaattttacaatcatttttagttttacgattataatgtatattaaca

SEQ ID NO: 351921 - DNA, 633 bp, Homo sapiens
aatccttgctgttaactgtttagagagttatgcaaaataaatgcatttgacatttctgattcactgctcgtgagaggcaggtagtttagtgactctatacataaaacgtttgattatgtgtgaagaatcaaggaatataataaagctgattggttgctcctaagttcagtggacaaagtgatgaaagaaaatgatgaactcagggattctaactcctggctttagaagcagatactgagcctcaaatctgctaagattgtcctgagttggaatcttatctcctgtagagaaagagctgaaattgtggaaaaaaagacacaagctctaatcatgcaagtggctgacctgcaatgaaaggtgcatgcacagcttcaccaggtgtctrctgttaaagtgagggcattgaatggaaaagaatgatcctccaacatggaatggggatgtgtgggaggacactgatgaatctcggggcactgagtttgtaaactctggtgaacattttttgccagaagaaacagcttccctatccctagtagtggcaatatccccttcctgactcatgctgccatcagcctttccactttcatctgaggagataaaccctgtactgcctgaggccaaaacagtgatggc

SEQ ID NO: 351922 - DNA, 594 bp, Homo sapiens
tactacaaactcagtggcttgaacaacataaattgattawccttcagttctctagggcaaaagtcagatgaatttctcaccaagcagaaatgaaggagtcagtagagctctgttcctttctaaaggctctaagtgagaattggtttttttgttttgttttgttttgttttttttttgttttgagatgaagttttgctcttgttgcccagggtggaatgcaacggcaagattttggctcaccacaatctctgcctcccgggttcaagcaattctcctgcctcaggctcccgagtagctgggtttacaggtgtgcaccaccacgcccagctaattttgtatttttagtagagatgggtttctccatgttggccaggctggtctcgaactcccaacctcaggtgatccgcctgcttcgacctcccaaagtgccgggattacaagcatgagccactgtgcccggtcgagaattgctttattgtacattcaggttgttgcaattgtagcactagcattcctgtttcctttgaggctgtcagatgaaggtgatatctagcttgtagatgctgcctccatgccttggcttctggccccttt

SEQ ID NO: 351923 - DNA, 594 bp, Homo sapiens
tactacaaactcagtggcttgaacaacataaattgattaaccttcagttctctagggcaaaagtcagatgaatttctcaccaagcagaaatgaaggagtcagtagagctctgttcctttctaaaggctctaagtgagaattggtttttttgttttgttttgttttgttttttttttgttttgagatgaagttttgctcttgttgcccaggstggaatgcaacggcaagattttggctcaccacaatctctgcctcccgggttcaagcaattctcctgcctcaggctcccgagtagctgggtttacaggtgtgcaccaccacgcccagctaattttgtatttttagtagagatgggtttctccatgttggccaggctggtctcgaactcccaacctcaggtgatccgcctgcttcgacctcccaaagtgccgggattacaagcatgagccactgtgcccggtcgagaattgctttattgtacattcaggttgttgcaattgtagcactagcattcctgtttcctttgaggctgtcagatgaaggtgatatctagcttgtagatgctgcctccatgccttggcttctggccccttt

SEQ ID NO: 351924 - DNA, 594 bp, Homo sapiens
tactacaaactcagtggcttgaacaacataaattgattaaccttcagttctctagggcaaaagtcagatgaatttctcaccaagcagaaatgaaggagtcagtagagctctgttcctttctaaaggctctaagtgagaattggtttttttgttttgttttgttttgttttttttttgttttgagatgaagttttgctcttgttgcccagggtggaatgcaacggcaagattttggctcaccacaatctctgcctcccgggttcaagcaattctcctgcctcaggctcccgagtagctgggwttacaggtgtgcaccaccacgcccagctaattttgtatttttagtagagatgggtttctccatgttggccaggctggtctcgaactcccaacctcaggtgatccgcctgcttcgacctcccaaagtgccgggattacaagcatgagccactgtgcccggtcgagaattgctttattgtacattcaggttgttgcaattgtagcactagcattcctgtttcctttgaggctgtcagatgaaggtgatatctagcttgtagatgctgcctccatgccttggcttctggccccttt

SEQ ID NO: 351925 - DNA, 603 bp, Homo sapiens
gtgtgggtaaggcagtctccaggactcacaagaacccctatttacggagttatccatatattcagcaaactgtactaaatacttatttttagatggttctatgctcaatcaattcaaagcataagtaaatattaaaccatccatgacacataggagcccactgtcaatagtttaaaatactgacaaataaacagatggttataatagtacaaaaagggttctgatagagtattcacagcttgctgtgaaaatacattgaaggggcaattaacaaagactcagctagcttgtgacgggatatagggaaggtttttgatatggtctggctgtgtgtccccagccaaatctcatctcaaattgtaatccccacgtgtcaaggaagggrccttgtgggaagtgattgaatcatggggacattttcccccatgctgttctcatgatagtgagtgagttctcatggaagttggtggctttaaagtgtggcacttccacgtttgctctctctttctctctcctgccaccatgtaagacgagtcttgcttcccctttgccttctaccatgattctaagtttcctgaggcctccccagccatgtggatctgt

SEQ ID NO: 351926 - DNA, 562 bp, Homo sapiens
gtgcagctgtttctatcccagtggtccagatagtgatactaggatgctcataatttaggaaaataattattaaagaaaatattttgagatcttggtgttgttacagtctgcatctgaataacctgaaatattaaggcacaatgattgtaacattagtggcttttgatttgaaaattattagcgagccgtcaaaagacctggggctcaatctcagctccactgcatactagctctgtaaacctgacaagtcacttacctccatttaattttcagtttcttcatcagtcaaatggggataatagcatcttctctgcttattgtacaaggttgtgaaaaccaaatgagagagcactggtgaaaccatattgaagatcataaagattaaacataaaagtattattaggataattctgaataattgaataatttatttgttgttaggttaatccataacagcttatcaaaatgaatcattttgcatatactgttcttcctgaagttccaagcagaatagagcaagtggtgccactttrtaatacggaagcctttgatcttctgaaga

SEQ ID NO: 351927 - DNA, 594 bp, Homo sapiens
ttggcaccaatggtagataaatgttcatgtacaaagcaatgtactattggcagcccagatacctctctggaacctgctttrccttgaccatggcaaagtgaaattgattacttgcttttacattatgaagcttttttacatgtttgccacagtttttcaaaaaggtggcagttggtctttgctttactgaaagaactggaaagtctttgagtgggaaacatcagcctttatattttggtacgttgaaactgggaaattattttccccaaattctctgtcctgccattcaaggcgttggcaagggtaggcctgaggcagagaaggaatatgggaaaaactcctccaaatatcccctgcaacgatgaatgtaggccttcactttgaaggtttaacattgccagctaaagtcctagcccaaggaaataaaagttcatgttgatttttcagatcataaaaccagctagaaaagcaaatttaacaaaacatgcagcattgtccatataagaacacaagtaaccatagtgtcatgcttttttttcccccattaaggggaataagagagctatttagatgcttaaatgaagtgataaaatg

SEQ ID NO: 351928 - DNA, 594 bp, Homo sapiens
actatagatgctcccacatcaaactctcagggatccacatcacccggcttgctgcccctaccacttctctgagcagcattccctaccaactggagtgtccatggtggtcgagtggtctcctcctgccagggttccagaggcttgtggcaagaacgggttgctccctgccaatttaactcacccatttcctcggagctgttgtggcctcaaaatgagttccagtgctcggtagccccaggcagggttcccagctttctctgccttcagtccagcttctgtgtcttccctccatccactcttggtgccttccctctaaagatctgttaaaagcacacctattgtcttagtgcctcggtgagagccttttcacctggctgtgcttagtcagccatcttgccctcataaaccttcctggcaaggttttatattatcaagacatgttttgcttattttytaaattaacaacaatctggaaagctacccccaccattgtccaatgttagagacaactgattgtccggattgttgtttgtgtatagaaatgccacagatttgtgtatattgattttatattctgcagctgtactgaataca

SEQ ID NO: 351929 - DNA, 604 bp, Homo sapiens
ggatgaaacacctaaaataatttgctatgcaaaaactgtaatgatttctcaatttaggaatgaacagctagtttgtagcttcttaaagacaaatatatatatacatatatattttttaagttgttacatcatcctgattaattgagccctttctcattaaataataacctactttgtctcttttaatagtttttgatttgaagtatattttatctaagtctagccactcttgctttcttttagttaccatttgcatggactatgctcttctatgcttttactttcagtctacctcgtttcttcaggttaaaatgaatatattataggaagcatatagatattaaatatatatatatattacattaaatatatgtatatttaagttagtacatcctcctgattaattgtatatatatttaatatgtatatatataaagttgtgacataaatatatatatatatgcagtcatcatagcacctaaatatacaaagcaaatatgaacagacaaatggagaaataaatagcaatatgataayagtagaggacttcagtattccactatcaacaatggacagatcatccagacacaaaattagtaaggaa

SEQ ID NO: 351930 - DNA, 547 bp, Homo sapiens
gtgaagagagagaagccaagatactgtgagagaaagtgcagcttgactagtaacaccttggtatcccagagaaacagcaccagagcagagttactatggcaaagtacaacaactccatgatttagggtaacttgagtgaaactgtcactttctaattaaaattattccaacttggtttatactattaagatatctacatgggtcctgatggattctgatgacatttctctrtcttgcctttcccacttcttgccaaatctgaacatttattcagcaacagcaaacatactggaggcttgcagaatcaagggaatctgccctaagagatgctgcacatcactagtttcaaacaagttgttttagatgatttttcaaacagatgttttaaacttacctatttggatatgaaatggttttgttcctatctggtgtgacggagggaggttaaagaggatgtgtcagatattctctgtttgcccatctagatacatcctctacctttctctagcttgttttaatctctggaagactgacttattgggcagcc

SEQ ID NO: 351931 - DNA, 547 bp, Homo sapiens
gtgaagagagagaagccaagatactgtgagagaaagtgcagcttgactagtaacaccttggtatcccagagaaacagcaccagagcagagttactatggcaaagtacaacaactccatgatttagggtaacttgagtgaaactgtcactttctaattaaaattattccaacttggtttatactattaagatatctacatgggtcctgatggattctgatgacatttctctatcttgcctttcccacttcttgccaaatctgaacatttattcagcaacagcaaacatactggaggcttgcagaatcaagggaatctgccctaagagatgctgcacatcactagtttcaaacaagttgttttagatgatttttcaaacagatgttttaaacttacctatttggatatgaaatggttttgttcctatytggtgtgacggagggaggttaaagaggatgtgtcagatattctctgtttgcccatctagatacatcctctacctttctctagcttgttttaatctctggaagactgacttattgggcagcc

SEQ ID NO: 351932 - DNA, 615 bp, Homo sapiens
ctttataatgaaaaattataaaagaacatattgaagccatacctgaataaatgaacagacatagcactgtccttggaaggaagaaaatactataaagatgtratgtattccaaaatataaattaattttctgttgtttggattgaattttcaaagatataatatgtttaatatgacatgagataaaatgagactatgttggtttttatgaaaatcatatttgagggctctgggggtaacctctaggcgtaaggtgccctccagaacagttgacactgaagcacaagacatccatgtgaatgctgatcttcaatgaaatgttgaaggccatagaaaaagcacatgagcagcaaatcacagaattagacataatgaattgcatattttgaattgcaatcaaaatggtttactacttgaatagcaatctaaggttaaaaagctacgatttatttatttactgatagttgacaatgctaattctcagctatagaattagttaatgtattaatgtttcaatcaaaatccaagtggatttttttgcaatataacaaataaatttaaagttagatgacagaagaaatgtacaagaagcacccagatattttttaagaagaat

SEQ ID NO: 351933 - DNA, 588 bp, Homo sapiens
agtcttcaataaatatatttgaataaataagctaatattcttgattgagggtagtaatttgaacatgggaaggggaaagacgtaaaccagtcacccaggtatctgtcgcatgtcttaatttctaatttttttctccaaatattttcagttcacactttgtgtcagkcaccattcatttattcaacaaatctttactgagcacctacgataagccaggcactatttcaagaacataggacacacaacagtgaataatagagatgataaagtttacacagtattgggaattccctagcctagaccttttactaacaacatctacctaaaggttttttcagcctatttcggaaaaacaaaaacctccccatagggacttcttcaaaagctgcaacttgttttcgatttcttcattcaagccacacatttactgaaatgcctactattaggagccaggcactgctctaggcattggagaaacatcagcaaacaaaaaagacaaagtctttgacctcaagaagattgtgttctagaaacaaacaaaatacaaaataattttagatattgataagtgtcacgaataaaatgcag

SEQ ID NO: 351934 - DNA, 600 bp, Homo sapiens
ttagtaaaccatagaatatttagtaaaccatgctgtaaatagatgggctatctttcaggctctgttgatccacttatagtgtactagcagaatagatttagcrtaattctttagggacctaggatttttgaaatggtaaatgagcattgcctttaacttagtcaccagctgtattagcctctaacaagggagtcagcctattctttgaggttttgaagccagggattgacttctctctagctatgaaagtcttagatgataccttcttctaacagaactagatgtttcatctacattgaaaatctgttttgtagtgtagccatcttcatcaattatcttagctagatcacctggatcacttactggatcttctacataggcactggccactttattttgtgcttttatgttatggagatggcttcttttcttcagtctcaaaaaccaatttattctagtttcaaacttttcttctgcagcttcttcacctctatcaggcttcgtagaagtaaagagagctagggtcttgctctggattaggctttagtctgagggaatgttgtagctgatttcattttttattcagatcattaaaacttt

SEQ ID NO: 351935 - DNA, 584 bp, Homo sapiens
ggcttcttttcttcagtctcaaaaaccaatttattctagtttcaaacttttcttctgcagcttcttcacctctatcaggcttcgtagaagtaaagagagctagggtcttgctctggattaggctttagtctgagggaatgttgtagctgatttcattttttattcagatcattaaaactttcttcatatcagcaataacgctacccttctttctttctggagaagcactttaaawttccttcaataactttccctttgcattcaccacttggctgtttagtgcaagagccctaggttttggccaatatcagcttttgacatgccttcttccctaagcttaatcatttctagctttgatttaagtgagagatacacaactcttcctctcacttgaacacttagaaaccattgtagggttattaactggcttagattcaatactgttctgtctcaggaaataggaaggcctaaggacaggaacatacattcgggggacgactgagcagtggagcagtcagaacactcacatttattaactttgccatcttatttgggtgcagttcttggtgctccaaaacaattac

SEQ ID NO: 351936 - DNA, 584 bp, Homo sapiens
ggcttcttttcttcagtctcaaaaaccaatttattctagtttcaaacttttcttctgcagcttcttcacctctatcaggcttcgtagaagtaaagagagctagggtcttgctctggattaggctttagtctgagggaatgttgtagctgatttcattttttattcagatcattaaaactttcttcatatcagcaataacgctacccttctttctttctggagaagcactttaaatttccttcaataactttycctttgcattcaccacttggctgtttagtgcaagagccctaggttttggccaatatcagcttttgacatgccttcttccctaagcttaatcatttctagctttgatttaagtgagagatacacaactcttcctctcacttgaacacttagaaaccattgtagggttattaactggcttagattcaatactgttctgtctcaggaaataggaaggcctaaggacaggaacatacattcgggggacgactgagcagtggagcagtcagaacactcacatttattaactttgccatcttatttgggtgcagttcttggtgctccaaaacaattac

SEQ ID NO: 351937 - DNA, 584 bp, Homo sapiens
ggcttcttttcttcagtctcaaaaaccaatttattctagtttcaaacttttcttctgcagcttcttcacctctatcaggcttcgtagaagtaaagagagctagggtcttgctctggattaggctttagtctgagggaatgttgtagctgatttcattttttattcagatcattaaaactttcttcatatcagcaataacgctacccttctttctttctggagaagcactttaaatttccttcaataactttccctttgcattcaccacttggctgtttagtgcaagagccctaggttttggccaatatcagcttttgacatgccttcttccctaagcttaatcatttctagctttgatttaagtgagagatacacaactcttcctctcacttgaacacttagaaaccattgtagsgttattaactggcttagattcaatactgttctgtctcaggaaataggaaggcctaaggacaggaacatacattcgggggacgactgagcagtggagcagtcagaacactcacatttattaactttgccatcttatttgggtgcagttcttggtgctccaaaacaattac

SEQ ID NO: 351938 - DNA, 626 bp, Homo sapiens
aaattgcatgaaggcattatgctcccttaaaagagaaaactgttgtttcttcagataatttgtatcagtggttcctaaatatgggtacagatactatccactaaagaagtaaatttctgttccctaccctcatcccttgcctgaaagattctgagcaagatacaaacatttctcaaattttcaagttagattacattcaattgaaattaattttaagacttgaagatcaaggtcacatttagtgtaattttcaaagaaagttatcaaaccgaataggacgacaatggcaatatttatactgtcataggtgactacataaaccagatcaacacttcaagaggcaagtttaacagtggggttttatataaatttggtgaagattttgaagctgccagtatacaatgtgaggtcttaargtatatacaccagacagcaaataatatgctttatctgaaattaattatgaataaatgctcaggatcaaatgtaaatttttcccacaacacctaatgtacagaattgttgtgtttcgttttttgaaatcaaatcaaatgtggctccaagacctccacttgtcaaatatggtgaatagtttattgaatctctatttttattcatgtctttct

SEQ ID NO: 351939 - DNA, 538 bp, Homo sapiens
tgatctttgctgaattgtacttccaattgttttccagaaaagtgaaaggttatatctgaaatatatttaatttctgggtaagctttggaacctgggccaggaaggcatcatctgcatctgccagctggtctgtgctaaaccttattgcagtgtttcctaaactccagctatcaattcatgtagcagaatcacgaaaatatttcacagaacaaatcatgtgcagagaaaatgcaactcttttattttctctgtatctagcttggcctttctctaaagctctctcyccactttctggtagggaaaagaagttttagtcttctctgcttaaacctcattgaaatataataatttaaagagtcattttcaactaatgcccagtccctttaagaaaaaaaaatcccatcatctcagatttctcattctttcacatctccacttcagcttattttaaaaatgatagctgggccgggcgcagtggctcatgcctgtaatcccagcactttgggaggccgaggcaggcggatcacgaggtcaggat

SEQ ID NO: 351940 - DNA, 538 bp, Homo sapiens
tgatctttgctgaattgtacttccaattgttttccagaaaagtgaaaggttatatctgaaatatatttaatttctgggtaagctttggaacctgggccaggaaggcatcatctgcatctgccagctggtctgtgctaaaccttattgcagtgtttcctaaactccagctatcaattcatgtagcagaatcacgaaaatatttcacagaacaaatcatgtgcagagaaaatgcaactcttttattttctctgtatctagcttggcctttctctaaagctctctccccactttctggtrgggaaaagaagttttagtcttctctgcttaaacctcattgaaatataataatttaaagagtcattttcaactaatgcccagtccctttaagaaaaaaaaatcccatcatctcagatttctcattctttcacatctccacttcagcttattttaaaaatgatagctgggccgggcgcagtggctcatgcctgtaatcccagcactttgggaggccgaggcaggcggatcacgaggtcaggat

SEQ ID NO: 351941 - DNA, 538 bp, Homo sapiens
tgatctttgctgaattgtacttccaattgttttccagaaaagtgaaaggttatatctgaaatatatttaatttctgggtaagctttggaacctgggccaggaaggcatcatctgcatctgccagctggtctgtgctaaaccttattgcagtgtttcctaaactccagctatcaattcatgtagcagaatcacgaaaatatttcacagaacaaatcatgtgcagagaaaatgcaactcttttattttctctgtatctagcttggcctttctctaaagctctctccccactttctggtagggaaaagaagttttagtcttctctgcttaamcctcattgaaatataataatttaaagagtcattttcaactaatgcccagtccctttaagaaaaaaaaatcccatcatctcagatttctcattctttcacatctccacttcagcttattttaaaaatgatagctgggccgggcgcagtggctcatgcctgtaatcccagcactttgggaggccgaggcaggcggatcacgaggtcaggat

SEQ ID NO: 351942 - DNA, 550 bp, Homo sapiens
gaaccccaaatcagtagaagaaaagaaataatgaaagaccagagcagaaataaatgaaagtaaaatgaagaaagtcaaaacactatcaaggaaacaaaaagttgggttttttttaaaaagctatwcaaaattgagaaacctgtagccaatctaaggaagaaaaaggagagatcgagataaataaactccaaaattgaaaggagacattacaggctaaagctgcaaaaattcaaagggctcttgtggtgaccgtgggaaactgtatgtcaataaattggaagatctccctgaaatgaaaattacttcctgctgacgaggggacggagagttttttgggttgacagtaggagcaatgccgtctgtagatgtttttgggtagttgtctgtgaaatggccgtgatcctgttagttaaaattttccgagaaaggttaattaggcagggtaagaaaattagtcccaggcatattgttaggagagggcccagaaataggatgacccatgctatgattgtgttcccaaaccaagaacttatttggttgttttggtact

SEQ ID NO: 351943 - DNA, 550 bp, Homo sapiens
gaaccccaaatcagtagaagaaaagaaataatgaaagaccagagcagaaataaatgaaagtaaaatgaagaaagtcaaaacactatcaaggaaacaaaaagttgggttttttttaaaaagctatacaaaattgagaaacctgtagccaatctaaggaagaaaaaggagagatcgagataaataaactccaaaattgaaaggagacattacaggctaaagctgcaaaaattcaaagggctcttgtggtgaccgtgggaaactgtatgtsaataaattggaagatctccctgaaatgaaaattacttcctgctgacgaggggacggagagttttttgggttgacagtaggagcaatgccgtctgtagatgtttttgggtagttgtctgtgaaatggccgtgatcctgttagttaaaattttccgagaaaggttaattaggcagggtaagaaaattagtcccaggcatattgttaggagagggcccagaaataggatgacccatgctatgattgtgttcccaaaccaagaacttatttggttgttttggtact

SEQ ID NO: 351944 - DNA, 550 bp, Homo sapiens
gaaccccaaatcagtagaagaaaagaaataatgaaagaccagagcagaaataaatgaaagtaaaatgaagaaagtcaaaacactatcaaggaaacaaaaagttgggttttttttaaaaagctatacaaaattgagaaacctgtagccaatctaaggaagaaaaaggagagatcgagataaataaactccaaaattgaaaggagacattacaggctaaagctgcaaaaattcaaagggctcttgtggtgaccgtgggaaactgtatgtcaataaattggaagatctccctgaaatgaaaattacttcctgctgacgaggggacggagagttttttgggttgacagtaggagcaatgccgtctgtagatgtttttgggtagttgtctgtgaaatggccgtgatcctgttagttaaaattttccgagaaaggttaattaggcagggtaagaaaattagycccaggcatattgttaggagagggcccagaaataggatgacccatgctatgattgtgttcccaaaccaagaacttatttggttgttttggtact

SEQ ID NO: 351945 - DNA, 550 bp, Homo sapiens
gaaccccaaatcagtagaagaaaagaaataatgaaagaccagagcagaaataaatgaaagtaaaatgaagaaagtcaaaacactatcaaggaaacaaaaagttgggttttttttaaaaagctatacaaaattgagaaacctgtagccaatctaaggaagaaaaaggagagatcgagataaataaactccaaaattgaaaggagacattacaggctaaagctgcaaaaattcaaagggctcttgtggtgaccgtgggaaactgtatgtcaataaattggaagatctccctgaaatgaaaattacttcctgctgacgaggggacggagagttttttgggttgacagtaggagcaatgccgtctgtagatgtttttgggtagttgtctgtgaaatggccgtgatcctgttagttaaaattttccgagaaaggttaattaggcagggtaagaaaattagtcccaggcatattrttaggagagggcccagaaataggatgacccatgctatgattgtgttcccaaaccaagaacttatttggttgttttggtact

SEQ ID NO: 351946 - DNA, 428 bp, Homo sapiens
ttacagaaaacctgaatgatacccctttaactttagccagtatgtacacacacgaaattttctttacaattaaccttccaaaagttgcttaaacctttaaaacaattttttaaccttttaatgtaggcaaaaatccacattcttaggcctccttataatctttttaccaaaagtatattttactttccttacacaccttgctcataaactatttcttcggtagttttaaatacgtgttacactgctaasttttagcaacctttacttttgatgaaaaccttggtaagtctgggaatctaattacgcactaggtgtagggcctaggacccagacggaagtgcggagaaggtctggcttattccagcatttaactccatgtgtcctagggtttattcagctgcaaagcaggcaagctgtacagctaagag

SEQ ID NO: 351947 - DNA, 428 bp, Homo sapiens
ttacagaaaacctgaatgatacccctttaactttagccagtatgtacacacacgaaattttctttacaattaaccttccaaaagttgcttaaacctttaaaacaattttttaaccttttaatgtaggcaaaaatccacattcttaggcctccttataatctttttaccaaaagtatattttactttccttacacaccttgctcataaactatttcttcggtagttttaaatacgtgttacactgctaacttttagcaacctttacttttgatgaaaaccttggtaagtctgggaatctaattacgcactaggtgtagggcctaggacccagacggaagtgcggagaaggtctggyttattccagcatttaactccatgtgtcctagggtttattcagctgcaaagcaggcaagctgtacagctaagag

SEQ ID NO: 351948 - DNA, 512 bp, Homo sapiens
atggatggcaggttagaggaatcacatgcrtggtgagttacaagagtcacagattggggagtgtgatagaagcagagtgattcacgagaagaataagtattaatgtcagagaggtaataggtgcccacatcatgtacggccttattaggaatttggattttattttaatcaagatgaaaagtctggagttttcatcaaaggaaaaacatgatctggcttaaaatatactgtaggagatcaaggatagaagaaataacccattgtcattattacattaccaaatatttttcagaatcattttttgtttgctcagatgattttcaaaaacatctttagctacttaatttaacttgttaagtattcagacttgtgaagctttctaccagtttaggtttagagatcgtctcctctcttctctcctcttctcctttcctccctccctccctccctccttccctccctcccttccttcctccctcccttccttcctttctttcttccttacttccttg

SEQ ID NO: 351949 - DNA, 512 bp, Homo sapiens
atggatggcaggttagaggaatcacatgcgtggtgagttacaagagtcacagattggggagtgtgatagaagcagagtgattcacgagaagaataagtattaatgtcagagaggtaataggtgcccacatcatgtacggccttattaggaatttggattttattttmatcaagatgaaaagtctggagttttcatcaaaggaaaaacatgatctggcttaaaatatactgtaggagatcaaggatagaagaaataacccattgtcattattacattaccaaatatttttcagaatcattttttgtttgctcagatgattttcaaaaacatctttagctacttaatttaacttgttaagtattcagacttgtgaagctttctaccagtttaggtttagagatcgtctcctctcttctctcctcttctcctttcctccctccctccctccctccttccctccctcccttccttcctccctcccttccttcctttctttcttccttacttccttg

SEQ ID NO: 351950 - DNA, 512 bp, Homo sapiens
atggatggcaggttagaggaatcacatgcgtggtgagttacaagagtcacagattggggagtgtgatagaagcagagtgattcacgagaagaataagtattaatgtcagagaggtaataggtgcccacatcatgtacggccttattaggaatttggattttattttaatsaagatgaaaagtctggagttttcatcaaaggaaaaacatgatctggcttaaaatatactgtaggagatcaaggatagaagaaataacccattgtcattattacattaccaaatatttttcagaatcattttttgtttgctcagatgattttcaaaaacatctttagctacttaatttaacttgttaagtattcagacttgtgaagctttctaccagtttaggtttagagatcgtctcctctcttctctcctcttctcctttcctccctccctccctccctccttccctccctcccttccttcctccctcccttccttcctttctttcttccttacttccttg

SEQ ID NO: 351951 - DNA, 512 bp, Homo sapiens
atggatggcaggttagaggaatcacatgcgtggtgagttacaagagtcacagattggggagtgtgatagaagcagagtgattcacgagaagaataagtattaatgtcagagaggtaataggtgcccacatcatgtacggccttattaggaatttggattttattttaatcaagatgaaaagtctggagttttcatcaaaggaaaaacatgatctggcttaaaatatactgtaggagatcaaggatagaagaaataacccattgtcattattacattaccaaatatttttcagaatcattttttgtttgctcagatgattttcaaaaacatctttagctacttaatttaacttgttaagtattcagacttgtgaagctttctaccartttaggtttagagatcgtctcctctcttctctcctcttctcctttcctccctccctccctccctccttccctccctcccttccttcctccctcccttccttcctttctttcttccttacttccttg

SEQ ID NO: 351952 - DNA, 553 bp, Homo sapiens
actatgagagttcccctgattttgggttcttatggaggtgttttctactgtgtggatcgttgttaaatttgtgtccttgcgagggggctgatctgggcggccttctattctgcttttcttgctccgcctctctcagcttagttttggtttggttttgtttgtttgtttttcctctgcaatgcctaaggctaaagaatgtgatcccgtattactatcctaaatatgaaaaattctttaatgtctcgtgctgggtggaaatagtagtttgcaatgaggaataccttcaattgtacakatcaaagagtaagaaaaaaagcattgggattttttgtttttaccttgtggtccgacaacttgaaagaatattcttttattccaaagatggtacgtgggggattttgttctggaaatcagtgctaggtatttaggtatttggttggagaaaagcaaactggtttttgtctattgatatttagtatattttattttttcatgttatccatgacagtgttatgacttagcaaacaacagttacaaataactaaaactgtaa

SEQ ID NO: 351953 - DNA, 553 bp, Homo sapiens
actatgagagttcccctgattttgggttcttatggaggtgttttctactgtgtggatcgttgttaaatttgtgtccttgcgagggggctgatctgggcggccttctattctgcttttcttgctccgcctctctcagcttagttttggtttggttttgtttgtttgtttttcctctgcaatgcctaaggctaaagaatgtgatcccgtattactatcctaaatatgaaaaattctttaatgtctcgtgctgggtggaaatagtagtttgcaatgaggaataccttcaattgtacagatcaaagagtaagaaaaaaagcattgggattttttgtttttaccttgtggtccgacaacttgaaagaatattcttttattccaaagatggtacgtgkgggattttgttctggaaatcagtgctaggtatttaggtatttggttggagaaaagcaaactggtttttgtctattgatatttagtatattttattttttcatgttatccatgacagtgttatgacttagcaaacaacagttacaaataactaaaactgtaa

SEQ ID NO: 351954 - DNA, 210 bp, Homo sapiens
acaatagccagcctcatttctgcttcatctctgtggtaggaaccattccctactcttactccctcctcttgtccaacttccaccaaacactcaatccgagtcctggctgctttcttgcttaggtctgtggctggtmactgtggtgaaagagtcaaggtgggcagtgtttggggtaggaaatgagtagtggtgaagcagcagcagtgtgtg

SEQ ID NO: 351955 - DNA, 542 bp, Homo sapiens
gaacaacacaacatttacatagtctcaaaatatccattcacaagtgagttattagttacaaaggaaaaatagtaaatatatagtgcagaaactaagcaatgcattatcaccaataagggacaaataaatatcacacactctcagatgtgatttcccaaggaaacatatataacttatatattgttctagccaaatatgtatagcctatgtctaatcacaaggacacatcagagaaactcaaactgaaggacactctgtaaaataactggtgtgtatacttcagaaatattgacttgaaagacaaagacagactgaggtgctcttccagaaggaagggggctgaaaatgtgggagagccaaatgcagcaccccttcctgggctgggtcctgttagagcagggtccccaatcccgtggcctgttaggaatcaggccatgcagcaggaggtgagcagtgggctagtgaaggttcatccgtattcacagccgctccccagagcttgcattactgcytgagttctgccttctgtcagatcagcaggg

SEQ ID NO: 351956 - DNA, 578 bp, Homo sapiens
tgggtgaccaagtatactgtcaatgagtattaatatgttgaaagggatcttttttttctgagcagtaggtctcaacagtgggcttaaaatatctagtaaaccatcctgttatctaggccttgttgttccatttatagggcacaggtagagtagatctagtataattcttaagaggccattaattaccattttcagaatggtaaataagcgctggcttccacttaaagtcaccagctgcattagctcctaacaggagagtcagcytgtcctttgaaactctgaagccaggaattgacttctcctctctagctatgaaagtcctagatggcatcttcttccaatagaaggttgtttctctacattcaaaatccattgtttagtatggtcaccgtcatcaattaatgatcttagctagatcttctggataacttactgtagcttctccatcagcgcttgctccttcatcttatactgtcatgttctggagatgacttctttgcttaaatctcttgaaccaacctgtgctagcttccaatttttctcctgcagcttcctcacctccctcagctttcatagaa

SEQ ID NO: 351957 - DNA, 578 bp, Homo sapiens
tgggtgaccaagtatactgtcaatgagtattaatatgttgaaagggatcttttttttctgagcagtaggtctcaacagtgggcttaaaatatctagtaaaccatcctgttatctaggccttgttgttccatttatagggcacaggtagagtagatctagtataattcttaagaggccattaattaccattttcagaatggtaaataagcgctggcttccacttaaagtcaccagctgcattagctcctaacaggagagtcagcctgtcctttgaaactctgaagccaggaattgacttctcctctctagctatgaaagtcctagatggcatcttcttccaatagaaggttgtttctctacattcaaaatccattgtttagtatggtcaccgtcatcaattaatgatcttagctagatcttctggataacttactgtagcttctccatcagcgcttgctccttcatcttatactgtcaygttctggagatgacttctttgcttaaatctcttgaaccaacctgtgctagcttccaatttttctcctgcagcttcctcacctccctcagctttcatagaa

SEQ ID NO: 351958 - DNA, 576 bp, Homo sapiens
gcttccacttaaagtcaccagctgcattagctcctaacaggagagtcagcctgtcctttgaaactctgaagccaggaattgacttctcctctctagctatgaaagtcctagatggcatcttcttccaatagaaggttgtttctctacattcaaaatccattgtttagtatggtcaccgtcatcaattaatgatcttagctagatcttctggataacttactgtagcttctccatcagcgcttgctccttcatcttatactgtcatgttctggagatgacttctttgcttaaatctcttgaaccaacctgtgctagcttccaatttttctcctgcagcttcctcacctccctcagcyttcatagaattggagagaattagggccttgctctggattgggcgttggcttaaggaaatgttgtggctagtacgatcttctatccagaccattcgaactttctccatatcagcattaaggctgttccattttcttattatttgtgtgttcactagagtagcacttttaatttccttcaagaactgctcctttgcattaacaacttggttaactggcacaa

SEQ ID NO: 351959 - DNA, 502 bp, Homo sapiens
acaattcctctctaacctcctcaaaagcaactactatcctgaattaggtgtctctcactctcttgcagggttatgtattattgccatataaacagtgtatccatatrtaataaagattgttttacatgttccgaaactttatataaatgcaacatattgatcatatcctgaaatttgcatttttctattccacattatgtttgacatttatttcttttgatacattttcctctaattcatgcattttcccatagcagtagttcattgtttgactctaagataatttatccactctcctgttgtgaactttgtttccaacaactatgtgctatcatcaacaatgttaccatcatcattcttgtccagattgccatgtgcccacataagtttctcttgggtagatacctaggagtataatgaatgggttctaggatgtgtttgatttcaacacttgaccttaaaagatttcttcttgaatctcaaatatttttaaaaataagac

SEQ ID NO: 351960 - DNA, 484 bp, Homo sapiens
caagcaattctgcgtcagccccacaagcagctgggattacaggcacgtgccaccacgcccagccacttttgtattttttagtagagacggggtttcaccatgttggtcaggcttgtttcaaactcctgacctcaggtgatccacccacctcagcctcccaaagtgctgtgattataggcatgagccaccgcactcggcccaaacagaggtaatttatttaaaaggtagttattcaggcaacaagtcggatatgatgtctaagagcccagcttctagagtcagacttacctgtgttggaatcccagttgtactgtccacttaggtgtatgaccttgggyaagttatgtactctcactgtgcctctgtgtcacccttaaatgggaataaccaattgggataatgcagataaagcacttagcacagcccctggcacatccccagcgctcaatacaggtcagatactattatgagatgggactaacaa

SEQ ID NO: 351961 - DNA, 555 bp, Homo sapiens
agtttgattgctgcttaaaatgtcttttaaatgattgctcattgcaaccaagggttactgtagtcacagaaaggcagggaaatacagcagcagggggggattgatagtgataaagcagacatttcactttggaggaatggccaaaattccaaattgtcttgtaaagaccaacaaaaagttatataggacctaagaaaggaagagacccatacttagatgaactggtgttccatttgctgctgaaatacacgcaaaagcaaggtctatcataagccaaggcaactgaaggtagggaaatctgccaaatcccttgaaataaatcaaagaaatctcaaggcagcaagaagctgatacataatcaattcctgcatcgcccaggaccatcgttaagacattgcttcatacttaactgacagcatttttttcccctcttaatggtttatagaataacgatgcatttaatggtaagtggtatctgagatttgcttaaatctaagaactagttttattttcrtctttcaggtaccattttatataccatgcatttctttgcat

SEQ ID NO: 351962 - DNA, 590 bp, Homo sapiens
agaattatgagttgaagcaaaccctaggttgataatgctatgattmtcctaaatcaccaaagtgcatgaaatgattttaaagctccagaaatactgaagcaactttgtgataaaaattattagtcgatgcacaaggagtctataatgtcttggttttgctattgcttactaaggtgcagcaccagtttgaatttgaataccagaccaaagtggatggtgagataatccttcatctttatgacaaaggaggaattgagcaaacaatttgtacgttggttggtgtgtttgcatttgttttactggattctgccaataagaaagtgtccctggacagagatacataaggagtcagacctttgtttaaagcagtgacagaagatggatttttggctgtgcgttcagaagctaaaggtaatagtaaatttacgtatagattttcattattgtcttggtcgtgtgttttcttttaaattatatctgaaaatctcttagcaatccagaattttacaagtgactaattaagttgtgagttcttaccttttttaaaaaaacagagtagttttactctccttttcagcacttaaattctg

SEQ ID NO: 351963 - DNA, 590 bp, Homo sapiens
agaattatgagttgaagcaaaccctaggttgataatgctatgattctcctaaatcaccaaagtgcatgaaatgattttaaagctccagaaatactgaagcaactttgtgataaaaattattagtsgatgcacaaggagtctataatgtcttggttttgctattgcttactaaggtgcagcaccagtttgaatttgaataccagaccaaagtggatggtgagataatccttcatctttatgacaaaggaggaattgagcaaacaatttgtacgttggttggtgtgtttgcatttgttttactggattctgccaataagaaagtgtccctggacagagatacataaggagtcagacctttgtttaaagcagtgacagaagatggatttttggctgtgcgttcagaagctaaaggtaatagtaaatttacgtatagattttcattattgtcttggtcgtgtgttttcttttaaattatatctgaaaatctcttagcaatccagaattttacaagtgactaattaagttgtgagttcttaccttttttaaaaaaacagagtagttttactctccttttcagcacttaaattctg

SEQ ID NO: 351964 - DNA, 590 bp, Homo sapiens
agaattatgagttgaagcaaaccctaggttgataatgctatgattctcctaaatcaccaaagtgcatgaaatgattttaaagctccagaaatactgaagcaactttgtgataaaaattattagtcgatgcacaaggagtctataatgtcttggttttgctattgcttactaaggtgcagcaccagtttgaatttgaataccagaccaaagtggatggtgagataatccttcatctttatgacaaaggaggaattgagcaaacaatttgtacgttggttggtgtgtttgcatttgttttactggattctgccaataagaaagtgtccctggacagagatacataaggagtcagasctttgtttaaagcagtgacagaagatggatttttggctgtgcgttcagaagctaaaggtaatagtaaatttacgtatagattttcattattgtcttggtcgtgtgttttcttttaaattatatctgaaaatctcttagcaatccagaattttacaagtgactaattaagttgtgagttcttaccttttttaaaaaaacagagtagttttactctccttttcagcacttaaattctg

SEQ ID NO: 351965 - DNA, 550 bp, Homo sapiens
tggattctgccaataagaaagtgtccctggacagagatacataaggagtcagacctttgtttaaagcagtgacagaagatggatttttggctgtgcgttcagaagctaaaggtaatagtaaatttacgtatagattttcattattgtcttggtcgtgtgttttcttttaaattatatctgaaaatctmttagcaatccagaattttacaagtgactaattaagttgtgagttcttaccttttttaaaaaaacagagtagttttactctccttttcagcacttaaattctgtaatccttgaaggatgggtctttagtgtagtcatttatttttggtgtgctaatatgctctgcatatagcttgatcgtaagtgcagttttaagttttcctgtgtcatactgtaatgatagggttggctctgcaattattgccctgcagtactttgctgaagttatagcacagcaaatattaggatttctaaaacagctttattggcagtttacatgccatgtaattcacccactcgaagtatatagttcagtggttttcag

SEQ ID NO: 351966 - DNA, 591 bp, Homo sapiens
ctataatgtcttggttttgctattgcttactaaggtgcagcaccagtttgaatttgaataccagaccaaagtggatggtgagataatccttcatctttatgacaaaggaggaattgagcaaacaatttgtacgttggttggtgtgtttgcatttgttttactggattctgccaataagaaagtgtccctggacagagatacataaggagtcagacctttgtttaaagcagtgacagaagatggatttttggctgtgcgttcagaagctaaaggtaatagtaaatttacgtatagattttcattattgtcttggtcgtgtgttttcttttaaattatatctgaaaatctcttagcaatccagaattttacaagtgactaattaagttgtgagttcttaccttttttaaaaaaacagagtagttttactctccttttcagcacttaaattctgtaatccttgaaggatgrgtctttagtgtagtcatttatttttggtgtgctaatatgctctgcatatagcttgatcgtaagtgcagttttaagttttcctgtgtcatactgtaatgatagggttggctctgcaattattgc

SEQ ID NO: 351967 - DNA, 485 bp, Homo sapiens
tatagttcagtggttttcagtatattcacagatgttgggaaccaacactccaatcaattttagaattgtttttccacctcaaaaaaaaatcctatgccctttagcttattttctttctatttatttatttatttattttaagagatggggtcttgctcagtcgaccwgcccaggctggagtacagtggtgtaatcatagcttagtgcagccttgaactcctgggctcaagcaatcctcccatctcagcctccctagtagctaggagtacaggcatggaccacaacaccctgcctcctgtgccgtttagctttcaattctgtctctccacatacatcatctgcacccccgcagttgtagcactggcaatcaccaatctttctgcctctggattccctattgcgtgtgtttcatataaatgggattatctatcatatgggcttttgttactggattctttcacttggcataatgcttgcaaggtttg

SEQ ID NO: 351968 - DNA, 485 bp, Homo sapiens
tatagttcagtggttttcagtatattcacagatgttgggaaccaacactccaatcaattttagaattgtttttccacctcaaaaaaaaatcctatgccctttagcttattttctttctatttatttatttatttattttaagagatggggtcttgctcagtcgaccagcccaggctggagtacagtggtgtaatcatagcttagtgcagccttgaactcctgggctcaagcaatcctcccatctcagcctccctagtagctasgagtacaggcatggaccacaacaccctgcctcctgtgccgtttagctttcaattctgtctctccacatacatcatctgcacccccgcagttgtagcactggcaatcaccaatctttctgcctctggattccctattgcgtgtgtttcatataaatgggattatctatcatatgggcttttgttactggattctttcacttggcataatgcttgcaaggtttg

SEQ ID NO: 351969 - DNA, 485 bp, Homo sapiens
tatagttcagtggttttcagtatattcacagatgttgggaaccaacactccaatcaattttagaattgtttttccacctcaaaaaaaaatcctatgccctttagcttattttctttctatttatttatttatttattttaagagatggggtcttgctcagtcgaccagcccaggctggagtacagtggtgtaatcatagcttagtgcagccttgaactcctgggctcaagcaatcctcccatctcagcctccctagtagctaggagtacaggcatggaccacaacaccctgcctcctgtgccgtttagctttcaattctgtctctcyacatacatcatctgcacccccgcagttgtagcactggcaatcaccaatctttctgcctctggattccctattgcgtgtgtttcatataaatgggattatctatcatatgggcttttgttactggattctttcacttggcataatgcttgcaaggtttg

SEQ ID NO: 351970 - DNA, 485 bp, Homo sapiens
tatagttcagtggttttcagtatattcacagatgttgggaaccaacactccaatcaattttagaattgtttttccacctcaaaaaaaaatcctatgccctttagcttattttctttctatttatttatttatttattttaagagatggggtcttgctcagtcgaccagcccaggctggagtacagtggtgtaatcatagcttagtgcagccttgaactcctgggctcaagcaatcctcccatctcagcctccctagtagctaggagtacaggcatggaccacaacaccctgcctcctgtgccgtttagctttcaattctgtctctccacatacatcatctgcacccccgcagttgtagcactggcaatcaccaatctttctgcctctggattccctattgcstgtgtttcatataaatgggattatctatcatatgggcttttgttactggattctttcacttggcataatgcttgcaaggtttg

SEQ ID NO: 351971 - DNA, 541 bp, Homo sapiens
gtagcactggcaatcaccaatctttctgcctctggattccctattgcgtgtgtttcatataaatgggattatctatcatatgggcttttgttactggattctttcacttggcataatgcttgcaaggtttgtctatgctgtgacatgtatcagtacttactttttatggccacatgatactctgttacatggatacactggattttgtttatgcacttgtcagttgatggatatttaggacattgtttaccccttttggctattatgaataatgctgctataaacattggtgtataagtttttgtgtagacatttgtcttcggtgtttatctaggagcagaattgctcagatgyatataactgtctaattgaggaactgccaaactactttttgaaatggctgcattattttttattccctccagcagtgtattaaaatttcagtttctccacatcttcacaaacacttactgtgtgactttttaattgtagctattataatgtatgtgaaattgtatctccttgtggttttgatttgtat

SEQ ID NO: 351972 - DNA, 541 bp, Homo sapiens
gtagcactggcaatcaccaatctttctgcctctggattccctattgcgtgtgtttcatataaatgggattatctatcatatgggcttttgttactggattctttcacttggcataatgcttgcaaggtttgtctatgctgtgacatgtatcagtacttactttttatggccacatgatactctgttacatggatacactggattttgtttatgcacttgtcagttgatggatatttaggacattgtttaccccttttggctattatgaataatgctgctataaacattggtgtataagtttttgtgtagacatttgtcttcggtgtttatctaggagcagaattgctcagatgcatataactgtctaattgaggaactgccaaactactttttgaaatggctgcattattttttattccctccagcagtgtattaaaatttmagtttctccacatcttcacaaacacttactgtgtgactttttaattgtagctattataatgtatgtgaaattgtatctccttgtggttttgatttgtat

SEQ ID NO: 351973 - DNA, 370 bp, Homo sapiens
gttgccaggactgctgggcaagcctgggaaagagagtacctggggaaagcagcctcctgctcycccgtgccttctttgagcctgatgttcatttgatgtggtactatataatcacatccagtttaccctttgaaattccttgattgttcttttctatttccttgacactgtccttttacagaccacataatcttatctggaatactacaacagttttcttttctcagtgattttagaataacctgtcaaaaactcatctgactatagtagtacctgcttacaaccttttaattactccccattccctaccaggctgtgtagctcacttgagctctgctaggtggtgagggaatctgggtcctttttctgg

SEQ ID NO: 351974 - DNA, 370 bp, Homo sapiens
gttgccaggactgctgggcaagcctgggaaagagagtacctggggaaagcagcctcctgctcccccgtgccttctttgagcctgatgttyatttgatgtggtactatataatcacatccagtttaccctttgaaattccttgattgttcttttctatttccttgacactgtccttttacagaccacataatcttatctggaatactacaacagttttcttttctcagtgattttagaataacctgtcaaaaactcatctgactatagtagtacctgcttacaaccttttaattactccccattccctaccaggctgtgtagctcacttgagctctgctaggtggtgagggaatctgggtcctttttctgg

SEQ ID NO: 351975 - DNA, 587 bp, Homo sapiens
aacatgtggtgtttggttttctgtccttgcgatattttgctcagaatgatggtttccatatatatatatgtcagttgccaggactgctgggcaagcctgggaaagagagtacctggggaaagcagcctcctgctcccccgtgccttctttgagcctgatgttcatttgatgtggtamtatataatcacatccagtttaccctttgaaattccttgattgttcttttctatttccttgacactgtccttttacagaccacataatcttatctggaatactacaacagttttcttttctcagtgattttagaataacctgtcaaaaactcatctgactatagtagtacctgcttacaaccttttaattactccccattccctaccaggctgtgtagctcacttgagctctgctaggtggtgagggaatctgggtcctttttctggtatttgaattcagtgctacataggttactggctgggttgacaatctgaaattgtaaatcatgagtattctatgtagatagactgtcacgatttacaataaaacattgacatgtcaaagatcatggtgatgtgaggttgggtact

SEQ ID NO: 351976 - DNA, 491 bp, Homo sapiens
aatcacatccagtttaccctttgaaattccttgattgttcttttctatttccttgacactgtccttttacagaccacataatcttatctggaatactacaacagttttcttttctcagtgmttttagaataacctgtcaaaaactcatctgactatagtagtacctgcttacaaccttttaattactccccattccctaccaggctgtgtagctcacttgagctctgctaggtggtgagggaatctgggtcctttttctggtatttgaattcagtgctacataggttactggctgggttgacaatctgaaattgtaaatcatgagtattctatgtagatagactgtcacgatttacaataaaacattgacatgtcaaagatcatggtgatgtgaggttgggtactgtctgtgagaattaattgaggaaattaaaattatatggttttatttacatagagtgtataacaactagttaagggatagatgtctt

SEQ ID NO: 351977 - DNA, 370 bp, Homo sapiens
gttgccaggactgctgggcaagcctgggaaagagagtacctggggaaagcagcctcctgctcccccgtgccttctttgagcctgatgttcatttgatgtggtactatataatcacatccagtttaccctttgaaattccttgattgttcttttctatttccttgacactgtccttttacagaccacataatcttatctggaatactacaacagttttcttttctcagtgattttagartaacctgtcaaaaactcatctgactatagtagtacctgcttacaaccttttaattactccccattccctaccaggctgtgtagctcacttgagctctgctaggtggtgagggaatctgggtcctttttctgg

SEQ ID NO: 351978 - DNA, 587 bp, Homo sapiens
aacatgtggtgtttggttttctgtccttgcgatattttgctcagaatgatggtttccatatatatatatgtcagttgccaggactgctgggcaagcctgggaaagagagtacctggggaaagcagcctcctgctcccccgtgccttctttgagcctgatgttcatttgatgtggtactatataatcacatccagtttaccctttgaaattccttgattgttcttttctatttccttgacactgtccttttacagaccacataatcttatctggaatactacaacagttttcttttctcagtgattttagaataacctgtcaaaaactcatctgactatagtagtacctgcttacaaccttttaattactccccattccctaccaggctgtgtagctcacttgagctctgctaggtggtgagggaatctgggtcctttttctggtatttgaattcagtgctacrtaggttactggctgggttgacaatctgaaattgtaaatcatgagtattctatgtagatagactgtcacgatttacaataaaacattgacatgtcaaagatcatggtgatgtgaggttgggtact

SEQ ID NO: 351979 - DNA, 231 bp, Homo sapiens
ggctgggttgacaatctgaaattgtaaatcatgagtattctatgtagatagwctgtcacgatttacaataaaacattgacatgtcaaagatcatggtgatgtgaggttgggtactgtctgtgagaattaattgaggaaattaaaattatatggttttatttacatagagtgtataacaactagttaagggatagatgtcttcttatctgactttcaagtatctaagagtgg

SEQ ID NO: 351980 - DNA, 491 bp, Homo sapiens
aatcacatccagtttaccctttgaaattccttgattgttcttttctatttccttgacactgtccttttacagaccacataatcttatctggaatactacaacagttttcttttctcagtgattttagaataacctgtcaaaaactcatctgactatagtagtacctgcttacaaccttttaattactccccattccctaccaggctgtgtagctcacttgagctctgctaggtggtgagggaatctgggtcctttttctggtatttgaattcagtgctacataggttactggctgggttgacaatctgaaattgtaaatcatgagtattctatgtagatagactgtcacgatttacaataaaacattgacatgtcaaagatcatggtgatgtgaggttgggtactgtctgtgagaattaattgaggaaattwaaattatatggttttatttacatagagtgtataacaactagttaagggatagatgtctt

SEQ ID NO: 351981 - DNA, 563 bp, Homo sapiens
aatgaatgactaccagcctcttgtaacattaggactccagttcatccctttgcttcatargtgtgtcttttccttttgtatatatttgctttagtgtagaaaataggttttcttgattagaaatctaagaagaataaattgaaaactggagatttttctattgctttggattaccaaaattaatgtaatttggcactatatccctgtgccattattgtctctctggtaagtagatggtagggttttgggtgattaaatttttttccctattttgcttatttaatgggcatatgtttgtattaaaaaggggaaaataaataggaatgtagaagatgttaactaatcgtgaaagttattgggaagggttacctaatttaaaagttggccagccatggcagcactgcctgtagtcccagctgtgggggaggctgaggcaagaggatggcttgagttcaggggatagaggttacagtgagctatgattgtgccactgcatttcagcctgagggacagagccagaccctgtctcagagaaacctagaacagcaacaaacagagagagg

SEQ ID NO: 351982 - DNA, 589 bp, Homo sapiens
gttgggtgtagtgtccagtgtttaggtgtaatatgaaatatcaggaaattaatgacacaaacattagtaagaaagcaaagataagaagtcgaagtcctgagcctaatggtcctctaacatttaaaaaatagaaaagatgaaacctgcaataaaggactaggggtaattatcaaaaacatggtggggggaaagtaggttaagtattctggaattctataaaaaagttttacaaagagaaggtggagatcaactgtgtgaaatgctgctgatatataaattaagacgaaggccgaggagttatggttcaatttatagtttaacaatatggatagcacttatgttttaataygagcagcttcgttggagtgagtaggtgagaaatcatattggagtggttgctgaaatgaaagtctgatctctggattcttaaggaaaaattttattggactgcagagacataaattggatttttaattctggagtcaggatgtgctcagtaaacatgtgcccattaatgcctcctcacatttttttagctcggtattctgttatcttttaataatataataatgacttgcaaaacctacac

SEQ ID NO: 351983 - DNA, 563 bp, Homo sapiens
aatgaatgactaccagcctcttgtaacattaggactccagttcatccctttgcttcataggtgtgtcttttccttttgtatatatttgctttagtgtagaaaataggttttcttgattagaaatctaagaagaataaattgaaaactggagatttttctattgctttggattaccaaaattaatgtaatttggcactatatccctgtgccattattgtctctctggtaagtagatggtagggttttgggtgattaaatttttttccctattttgcttatttaatgggcatatgtttgtattaaaaaggggaaaataaataggaatgtagaagatgttaactaatcgtgaaagttattgggaagggttacctaatttaaaagttggccagccatggcagcactgcctgtagtcccagctgtgggggaggctgaggcaagaggatggcttgagttcaggggatrgaggttacagtgagctatgattgtgccactgcatttcagcctgagggacagagccagaccctgtctcagagaaacctagaacagcaacaaacagagagagg

SEQ ID NO: 351984 - DNA, 545 bp, Homo sapiens
aggggtgggggttagacaatctggaggtcagcagggaattcagcatgaggagacagcccttagggttctggcccagcagccccaggtgctggctctgcactgagtcatgaagtttgtgggccaggggcgttggcctctctctagctgagagtgacttccatcactgctgtcattagcctcccctgcatcaacctgtccctggggtgggagcacagtkggcacagggaccctcaggccttagttttccctgctgtaaaatgcatgtgataggctgtcatgaggtctgaaggagttaaaacctgccatgtgctcaggatgacacctagctcggtgcctcctaccctggtgccaccatccggcatcagagatgaaatacttctcccaggccccctcccctggcaccccccacactcagctctccatcagccaccccctccagggtgggacaaggaggtcctgagcctgatggggacctgacagggctgggcagcgccacctgggcctgggcgataatgggagcctgagtgtggggcctgcatggaagg

SEQ ID NO: 351985 - DNA, 545 bp, Homo sapiens
aggggtgggggttagacaatctggaggtcagcagggaattcagcatgaggagacagcccttagggttctggcccagcagccccaggtgctggctctgcactgagtcatgaagtttgtgggccaggggcgttggcctctctctagctgagagtgacttccatcactgctgtcattagcctcccctgcatcaacctgtccctggggtgggagcacagttggcacagggaccctcaggccttagttttccctgctgtaaaatgcatgtgataggctgtcatgaggtctgaaggagttaaaacctgccatgtgctcaggatgacacctagctcggtgcctcctaccctggtgccaccatccggcatcagagatgaaatacttctcccaggccccctcccctggcaccccccacactcagctctccatcagccaccccctccagggtgggacaaggaggtcctgagcctgatggggacctgacagggctgggcagcrccacctgggcctgggcgataatgggagcctgagtgtggggcctgcatggaagg

SEQ ID NO: 351986 - DNA, 607 bp, Homo sapiens
ctcctcacatttttttagctcggtattctgttatcttttaataatataataatgacttgcaaaacctacacccattttgcagcaaaccgtgacacatgtatacctgtgtaacaaacctgcatgttctgcacatttatcccagaacttaaagtatatatatacactttatatatatatatatattctctctctctctctctctctatctctctatatatatatagagagagasagagagagagacagacagacagacagagagagagagaaagaaatcccagccaagtgcggtggctcatgattgtaatcccagggctttgggaggctgagacaggtcgaccatctgaggtcaggattgagaacagcctggccaacatggtgaaaccctgtctttactaaacatacaaaaattagctgggtgtggtggggggcacctatagtcccagctacttgagaggccaaagcaggacaatcacttgaacctggaaggcaaagactgcagtgagctaagatcatgccacagcactacagcctgggtgacagggtgagactgcctcaaaaacaaaagcaaaaaacccttttaattgacaaattttacaaagactga

SEQ ID NO: 351987 - DNA, 607 bp, Homo sapiens
ctcctcacatttttttagctcggtattctgttatcttttaataatataataatgacttgcaaaacctacacccattttgcagcaaaccgtgacacatgtatacctgtgtaacaaacctgcatgttctgcacatttatcccagaacttaaagtatatatatacactttatatatatatatatattctctctctctctctctctctatctctctatatatatatagagagagacagagagagagacagacagacagacagagagagagagaaagaaatcccagccaagtgcggtggctcatgattrtaatcccagggctttgggaggctgagacaggtcgaccatctgaggtcaggattgagaacagcctggccaacatggtgaaaccctgtctttactaaacatacaaaaattagctgggtgtggtggggggcacctatagtcccagctacttgagaggccaaagcaggacaatcacttgaacctggaaggcaaagactgcagtgagctaagatcatgccacagcactacagcctgggtgacagggtgagactgcctcaaaaacaaaagcaaaaaacccttttaattgacaaattttacaaagactga

SEQ ID NO: 351988 - DNA, 589 bp, Homo sapiens
aaagcggctctagggcagagcataaattacgagggtcctcccagggagcgcgggcctgagtgggaatgagtgacccgcgtgcaatctcgaccctgacaggacaggactggcctcagccgaccaggctcagttctttccattcctgatatttgacggaaggaggcacccagttccttgaaggaactgaggggcagggaaggaagaaaggtacttaggctcagaaggggccaccaggcatccrttaacaagggaaacaaaaggacggcccatctatgcctgtagcccaggcgtaggtcatactttccaccagaggtggggacagcaccctcagggcagcagggaatggccctctctggcctctctggccccgtggcctccaggagctcaccttgtctgaaggagcttcctcccgggaagatgaggtagcacagggtggggtgagaccacgtgggcacaggtccctggcacggggaggcccccgacccatgacctgcccagtgtcatgtctatatctgtgtgtttaaggcgtgcttgcatgttgtgtgtggccgcagagtctccctcccctctcagcacctgtgggggatgt

SEQ ID NO: 351989 - DNA, 607 bp, Homo sapiens
ctcctcacatttttttagctcggtattctgttatcttttaataatataataatgacttgcaaaacctacacccattttgcagcaaaccgtgacacatgtatacctgtgtaacaaacctgcatgttctgcacatttatcccagaacttaaagtatatatatacactttatatatatatatatattctctctctctctctctctctatctctctatatatatatagagagagacagagagagagacagacagacagacagagagagagagaaagaaatcccagccaagtgcggtggctcatgattgtaatcccagggctttgggaggctgagacaggtcgaccatctgaggtcaggattgagaacagcctggccaacatggtgaaaccctgtctttactaaacatacaaaaattagctgggtgtggtggggggcacctatagtcccagctacttgagaggccaaagcaggacaatcacttgaacctggaaggcaaagactgcagtgagctaagatcatgccacagcactacagcctgggtgacwgggtgagactgcctcaaaaacaaaagcaaaaaacccttttaattgacaaattttacaaagactga

SEQ ID NO: 351990 - DNA, 515 bp, Homo sapiens
gctttgacaactagttagttcacatatgtaaaataagtctacctgtctgtatgcataattaagatgtaacagtagtgtggtaatgacttgttaaagcaattagaatggcagtggatcatggcacaatttaccttaaaagccrtgagcagaatacatcacaagctatgatacaatgaatagtcattaggtttaaagtagtatccacatataaaaacacaaagcatattttagctctttaaatgaaagcttcattcagtcaatattggtcttcctgtagatgcatttatgaaacaaaaccacaaaacatacagcttacccgcttctcaaaactcattgcacaataggttgagggacttctctacaccaggacctattattaaaaccagtaagtcctcagtgaaaatcatttatttgcccggagtgtcatctgatgtgtctgttgtaggcagctgtggcagtggtgggtggtttagtgacacggaccctgcccacatctgtccatccatcagtgggct

SEQ ID NO: 351991 - DNA, 515 bp, Homo sapiens
gctttgacaactagttagttcacatatgtaaaataagtctacctgtctgtatgcataattaagatgtaacagtagtgtggtaatgacttgttaaagcaattagaatggcagtggatcatggcacaatttaccttaaaagccatgagcagaatacatcacaagctatgatacaatgaatagtcattaggtttaaagtagtatccacatataaaaacacaaagcatattttagctctttaaatgaaagcttcattcagtcaatattggtcttcctgtagatgcatttatgaaacaraaccacaaaacatacagcttacccgcttctcaaaactcattgcacaataggttgagggacttctctacaccaggacctattattaaaaccagtaagtcctcagtgaaaatcatttatttgcccggagtgtcatctgatgtgtctgttgtaggcagctgtggcagtggtgggtggtttagtgacacggaccctgcccacatctgtccatccatcagtgggct

SEQ ID NO: 351992 - DNA, 406 bp, Homo sapiens
cccttttgcccctatttaacctttaacttcttaaaagctccttcyccaaatacagtcacactgggagatagggcttcaggttaggaattctggggggacataattctctccagaacagacactaatatcatgagtgctcagattgctagtgaatatgttcttgttacaattattttcactttgcagttttaaataatgaatacttggataaaaaatacccactgtattcttattttttcaacacttcttacttgcatggattctaaacagaagtccaatgtaattcttatgtctgtttctctgtagacaatgtgtttcttcctctgccttattttaatattttatctttgttacaggttttctacggtttgaatatgatattcctaggtatatttttaaaatattc

SEQ ID NO: 351993 - DNA, 614 bp, Homo sapiens
ctcaataagactaaggaagggcttgtttaaattagttcccctcacagttgattctaatcttgcaatgaacagatttaatgtactagtgagttaaattttaaagtaattataaagccatttactctatcataaatgaatgaaatgtaagaatcayacttaaaacacgtctttcattttaatgaatggtatctttcatttatatacaaaggaattcacttgccagcagcatttaaatataggaatagtctcgtcttttctctagtgccttttataaagcagtgccatttctaactaggtgtatttgtctcctagctattcagtaactacactataggtatctaatagattcaagaaaagattggaaaattgagaagatttagcattttaaacatttgaaaaatgttgctacaaagcatagattatgaatgcattagtaaaataaattgacaccttatgtgagaatcattaagttggtttaattatatcacagaagtatgggctcactaatatttataccaatttatgctaattaaaccagaaagtttctgtaggtaattcagctctgagcaccatttaatagggttatgccaaacagaaccaatggttatataata

SEQ ID NO: 351994 - DNA, 614 bp, Homo sapiens
ctcaataagactaaggaagggcttgtttaaattagttcccctcacagttgattctaatcttgcaatgaacagatttaatgtactagtgagttaaattttaaagtaattataaagccatttactctatcataaatgaatgaaatgtaagaatcatacttaaaacamgtctttcattttaatgaatggtatctttcatttatatacaaaggaattcacttgccagcagcatttaaatataggaatagtctcgtcttttctctagtgccttttataaagcagtgccatttctaactaggtgtatttgtctcctagctattcagtaactacactataggtatctaatagattcaagaaaagattggaaaattgagaagatttagcattttaaacatttgaaaaatgttgctacaaagcatagattatgaatgcattagtaaaataaattgacaccttatgtgagaatcattaagttggtttaattatatcacagaagtatgggctcactaatatttataccaatttatgctaattaaaccagaaagtttctgtaggtaattcagctctgagcaccatttaatagggttatgccaaacagaaccaatggttatataata

SEQ ID NO: 351995 - DNA, 614 bp, Homo sapiens
ctcaataagactaaggaagggcttgtttaaattagttcccctcacagttgattctaatcttgcaatgaacagatttaatgtactagtgagttaaattttaaagtaattataaagccatttactctatcataaatgaatgaaatgtaagaatcatacttaaaacacgtctttcattttaatgaatggtatctttcatttatatacaaaggaattcacttgccagcagcatttaaatataggaatagtctcgtcttttctctagtgccttttataaagcagtgccatttctaactaggtgtatttgtctccyagctattcagtaactacactataggtatctaatagattcaagaaaagattggaaaattgagaagatttagcattttaaacatttgaaaaatgttgctacaaagcatagattatgaatgcattagtaaaataaattgacaccttatgtgagaatcattaagttggtttaattatatcacagaagtatgggctcactaatatttataccaatttatgctaattaaaccagaaagtttctgtaggtaattcagctctgagcaccatttaatagggttatgccaaacagaaccaatggttatataata

SEQ ID NO: 351996 - DNA, 521 bp, Homo sapiens
tgctataaagtcaagctcaattccttaaagtggtctggttgtatctgcygttcgagttaaagccttgataaaacaaacagtgtctccaattgaatcctgttaccaaaaatagattcttattgaaattatgcaaataattatattgccataatttaggaatgctcacgaatggcttctgaattctggagaaatcagttagagagacagataaatggctcaaatttttgttcacaatgtagtttttctaacgtagggtaagttaaaaatagctgaaaagaaaaaaaattcttgactttggaaaacaaaacataaagagaatcaacaatgtttccaatggaagggccatgaataaaatcttttccttcttttataagttcagtccaatgtaactaaatcttgttctgcttgatttcaaatagcaattctcattcagttttttgtgttttgcttgatttcaattggaaattctcattcagctttttagagtcctggaagattttcctagtccaatggtatgatcc

SEQ ID NO: 351997 - DNA, 601 bp, Homo sapiens
aatcttgttctgcttgatttcaaatagcaattctcattcagttttttgtgttttgcttgatttcaattggaaattctcattcagctttttagagtcctggaagattttcctagtccaatggtatgatccccaaagttatctgaaaccatatttaagagaacttgtcagagtcctttccattaaaaataatttagatgatagctgattgtaaaggcttttttttttttttgagacatggtctggttctatcactcaggatggagtgcagtggcatgatcttggctcaccacaatttctycctcccaaactcaagccatcctcctacctcagcctccgaagtagttgggaccataggcatgcaccatcatgctggctaatttttgtatttttgtagagacagggttttaccatgttgcccaggatgctttcaaacttctgagttcaagcaattcacccacctcggccttgcaaagtgctgggatttttacacgtgtgagccaccgtgccctgcaccacgcccagcaccgtgccctgcacagcctccagcagcacgcccagcctgtaaagggttttagagaaaaactttaaacaatcactgtgg

SEQ ID NO: 351998 - DNA, 577 bp, Homo sapiens
ccagcctgggtgacaaagcaagattgtgtctcagagaaaaaaaaaagaagatttagtgttacttatcttttggcaatgcttcccatacaatgttatcaaataagatttagcaaagatgtcaaaaaattgaaaacatttgaccaaaacagaatgacagtttattgttttttattttattatttttttgagacagggtctcaccctgttgcccaggctggagtgcagtggtgaaatcatggctcactgcagcctcaacctcccaggctcaggtgatcctccaccttcgtatcccaagtagccaggactatgagcacttgttatgacacatagctagcttttgtattttcagtagagatgcggttttgccattttgcccaggctggacttgaactcctgggctcaagtgatccacccaccttggcctcccaaasggccggaattacagacaagagccgctgcacacagccacatgtcatttttaaataacagtcattcatttaattagcatgacaaccaaaagacatcaaaagcaacgtagaaggttacatggatgtgataactgaaaaccctcagtttt

SEQ ID NO: 351999 - DNA, 359 bp, Homo sapiens
aaatgtaaatataaaacacagtcaaaaatgtatgctgacaagtctgaagagatttctattttytatttttattttatcaatactttttaaattatttgtatttataaaagaactcttttgtctgggcacagtggttcatgcctgtatgccagcactttgagaggctgaggcaagaggatcacttgagctcaggagtttgagaccagcctgggcaacatagtgagacccaatctctactaagaataagataaaaaattgccaggcatggtggtgcatgcctattgtcccagctactagagaggatgaggcaggaggattgcttgagcctgggaggttgagataacagtgagctatgatcc

SEQ ID NO: 352000 - DNA, 393 bp, Homo sapiens
tttctattttttatttttattttatcaatactttttaaattatttgtatttataaaagaactcttttgtctgggcacagtggttcatgcctgtatsccagcactttgagaggctgaggcaagaggatcacttgagctcaggagtttgagaccagcctgggcaacatagtgagacccaatctctactaagaataagataaaaaattgccaggcatggtggtgcatgcctattgtcccagctactagagaggatgaggcaggaggattgcttgagcctgggaggttgagataacagtgagctatgatcccactactgcactccagtctggggaacagagtgagaccttagagtgagaacttgtctcaaaaagagaaaaaaataaagaattgtttc

SEQ ID NO: 352001 - DNA, 527 bp, Homo sapiens
tcataattttacctatttcccaactttttgttattkgatctctccaccaaaccagttggtctgcttctgtctttgcagctggtttctgtagatgctgttcagctgctggtaacatctggcctttgggcaggctcaaaaatttgaaagttaataatgcaagattcaattgtgtatgggctatcccataatccctgtttctcccccgtttttgtttttattatcagttgttcatctgtatgaaatcttaactgagcattttcaattaactgtgtggaatgacccatgtatgaagaatcagaaatcacattaacaggcatatcaaaagcagtcaacacctcaattacagctacaagctccactttttgagctgaagtatagggtgtctggaaaactttagcttttgatccagaataagaacctttaccattactagacccatctgtgaaacaatgaaaacgcttagcaggctgcaggttgtttactgcaggaattgtaaatgcaaaccgttcacagtcttgctcagcgaa

SEQ ID NO: 352002 - DNA, 527 bp, Homo sapiens
tcataattttacctatttcccaactttttgttattggatctctccaccaaaccagttggtctgcttctgtctttgcagctggtttctgtagatgctgttcagctgctggtaacatctggcctttgggcaggctcaaaaatttgaaagttaataatgcaagattcaattgtgtatgggctatcccrtaatccctgtttctcccccgtttttgtttttattatcagttgttcatctgtatgaaatcttaactgagcattttcaattaactgtgtggaatgacccatgtatgaagaatcagaaatcacattaacaggcatatcaaaagcagtcaacacctcaattacagctacaagctccactttttgagctgaagtatagggtgtctggaaaactttagcttttgatccagaataagaacctttaccattactagacccatctgtgaaacaatgaaaacgcttagcaggctgcaggttgtttactgcaggaattgtaaatgcaaaccgttcacagtcttgctcagcgaa

SEQ ID NO: 352003 - DNA, 527 bp, Homo sapiens
tcataattttacctatttcccaactttttgttattggatctctccaccaaaccagttggtctgcttctgtctttgcagctggtttctgtagatgctgttcagctgctggtaacatctggcctttgggcaggctcaaaaatttgaaagttaataatgcaagattcaattgtgtatgggctatcccataatccctgtttctcccccktttttgtttttattatcagttgttcatctgtatgaaatcttaactgagcattttcaattaactgtgtggaatgacccatgtatgaagaatcagaaatcacattaacaggcatatcaaaagcagtcaacacctcaattacagctacaagctccactttttgagctgaagtatagggtgtctggaaaactttagcttttgatccagaataagaacctttaccattactagacccatctgtgaaacaatgaaaacgcttagcaggctgcaggttgtttactgcaggaattgtaaatgcaaaccgttcacagtcttgctcagcgaa

SEQ ID NO: 352004 - DNA, 580 bp, Homo sapiens
tagacccatctgtgaaacaatgaaaacgcttagcaggctgcaggttgtttactgcaggaattgtaaatgcaaaccgttcacagtcttgctcagckaaaagggtagtaaagaaacagtcttttaaatctgtgactattaaaggccaattttttggaattatagtagagaagggaatcctggctgttatatttccataggttgtataacggaattgatggctcttaagtcagttaacattctccatttacctgattttttcttaattatgaaaactggagaattccaaggggaaaatgttggagctatgtgcccattttctaattgttcagtaactaatttctctaaagcatccagtttccctttgcttagcagccattattctatccaaattggcttatctgttaaccattttaaaggtataggttctggaggcttaactatggccaccatcaaaaatggtatcctaatctttggcaggaactttgtctttccgtttgaagcagttctttcaaaccttgcaattttttttctactcctataccagggaaatgccccattttgtgcatcatatgttgacttt

SEQ ID NO: 352005 - DNA, 580 bp, Homo sapiens
tagacccatctgtgaaacaatgaaaacgcttagcaggctgcaggttgtttactgcaggaattgtaaatgcaaaccgttcacagtcttgctcagcgaaaagggtagtaaagaaacagtcttttaaatctgtgactattaaaggccaattttttggaattatagtagagaagggaatcctggctgttatatttccataggttgtataackgaattgatggctcttaagtcagttaacattctccatttacctgattttttcttaattatgaaaactggagaattccaaggggaaaatgttggagctatgtgcccattttctaattgttcagtaactaatttctctaaagcatccagtttccctttgcttagcagccattattctatccaaattggcttatctgttaaccattttaaaggtataggttctggaggcttaactatggccaccatcaaaaatggtatcctaatctttggcaggaactttgtctttccgtttgaagcagttctttcaaaccttgcaattttttttctactcctataccagggaaatgccccattttgtgcatcatatgttgacttt

SEQ ID NO: 352006 - DNA, 288 bp, Homo sapiens
tttggaattatagtagagaagggaatcctggctgttatatttccataggttgtataacggaattgatggctcttaagtcagttaacattctccatttacctgattttttcttaattatgaaaactggagaattccaaggggaaaatgttggmgctatgtgcccattttctaattgttcagtaactaatttctctaaagcatccagtttccctttgcttagcagccattattctatccaaattggcttatctgttaaccattttaaaggtataggttctggaggcttaa

SEQ ID NO: 352007 - DNA, 580 bp, Homo sapiens
tagacccatctgtgaaacaatgaaaacgcttagcaggctgcaggttgtttactgcaggaattgtaaatgcaaaccgttcacagtcttgctcagcgaaaagggtagtaaagaaacagtcttttaaatctgtgactattaaaggccaattttttggaattatagtagagaagggaatcctggctgttatatttccataggttgtataacggaattgatggctcttaagtcagttaacattctccatttacctgattttttcttaattatgaaaactggagaattccaaggggaaaatgttggagctatgtgcccattttctaattgttcagtaactaatttctctaaagcatccagtttccctttgcttagcagccattattctatccaaattggcttatctgttaaccattttaaaggtataggttctggaggcttaactatggccaccatcaaaaatggtatmctaatctttggcaggaactttgtctttccgtttgaagcagttctttcaaaccttgcaattttttttctactcctataccagggaaatgccccattttgtgcatcatatgttgacttt

SEQ ID NO: 352008 - DNA, 590 bp, Homo sapiens
ctatgtgcccattttctaattgttcagtaactaatttctctaaagcatccagtttccctttgcttagcagccattattctatccaaattggcttatctgttaaccattttaaaggtataggttctggaggcttaactatggccaccatcaaaaatggtatcctaatctttggcaggaactttgtctttccgtttgaagcagttctttcaaaccttgcaattttttttctactcctataccagggamatgccccattttgtgcatcatatgttgactttgagggctgtataattgttatggaattagaacttgtgctccccattgtcataataaatctctcccccataaatgtataggtacagaagttgcaattggttgaacagtcccaggttgtccattgggcccttcacaatgcaaagtatagctactctgatacacttctggagctttagcagtttccactgtgttaaattgagtgggctgaattggccacatggacggccagtgctgtagagaaataattgaaatgtccactcctaccaaaaaaaaaaaaaatagtatctaccaaacctttaaagttctttccctgg

SEQ ID NO: 352009 - DNA, 590 bp, Homo sapiens
ctatgtgcccattttctaattgttcagtaactaatttctctaaagcatccagtttccctttgcttagcagccattattctatccaaattggcttatctgttaaccattttaaaggtataggttctggaggcttaactatggccaccatcaaaaatggtatcctaatctttggcaggaactttgtctttccgtttgaagcagttctttcaaaccttgcaattttttttctactcctataccagggaaatgccccattttgtgcatcatatgttgactttgagggctgtataattgttatggaattagaacttgtgctccccattgtcataataaatmtctcccccataaatgtataggtacagaagttgcaattggttgaacagtcccaggttgtccattgggcccttcacaatgcaaagtatagctactctgatacacttctggagctttagcagtttccactgtgttaaattgagtgggctgaattggccacatggacggccagtgctgtagagaaataattgaaatgtccactcctaccaaaaaaaaaaaaaatagtatctaccaaacctttaaagttctttccctgg

SEQ ID NO: 352010 - DNA, 590 bp, Homo sapiens
ctatgtgcccattttctaattgttcagtaactaatttctctaaagcatccagtttccctttgcttagcagccattattctatccaaattggcttatctgttaaccattttaaaggtataggttctggaggcttaactatggccaccatcaaaaatggtatcctaatctttggcaggaactttgtctttccgtttgaagcagttctttcaaaccttgcaattttttttctactcctataccagggaaatgccccattttgtgcatcatatgttgactttgagggctgtataattgttatggaattagaacttgtgctccccattgtcataataaatctctcccccataaatktataggtacagaagttgcaattggttgaacagtcccaggttgtccattgggcccttcacaatgcaaagtatagctactctgatacacttctggagctttagcagtttccactgtgttaaattgagtgggctgaattggccacatggacggccagtgctgtagagaaataattgaaatgtccactcctaccaaaaaaaaaaaaaatagtatctaccaaacctttaaagttctttccctgg

SEQ ID NO: 352011 - DNA, 590 bp, Homo sapiens
ctatgtgcccattttctaattgttcagtaactaatttctctaaagcatccagtttccctttgcttagcagccattattctatccaaattggcttatctgttaaccattttaaaggtataggttctggaggcttaactatggccaccatcaaaaatggtatcctaatctttggcaggaactttgtctttccgtttgaagcagttctttcaaaccttgcaattttttttctactcctataccagggaaatgccccattttgtgcatcatatgttgactttgagggctgtataattgttatggaattagaacttgtgctccccattgtcataataaatctctcccccataaatgtataggtacagaagttgcaattggttgaacagtcccaggttgtccattgggcccttcacaatgcaaagtatagctactctgatacacttctggagctttagcagtttccactgtgttaaattgagtgggctgaattggccacatggayggccagtgctgtagagaaataattgaaatgtccactcctaccaaaaaaaaaaaaaatagtatctaccaaacctttaaagttctttccctgg

SEQ ID NO: 352012 - DNA, 608 bp, Homo sapiens
gttatttcacaggtaggatgtttatcagtaatttgatttacccaataagctgccttgccttttttatttgtgcttccaaatcctccagttcatttaatttcactttttcccattcccacatacggctcwctcaggagctgtgctatgcgcactcctggctgtgctttccagggaacagaactaaatatcacaatttgaatttcctcattgtaatctgaatcaatgactccagtgtgtatttgtaccccttttaaacttaaactagaccttcctaaaagtaatcccattgtccctgctcgcaacggtccacagactcctgttgggaccttttgcgggggttccccaggcagaaggctcacagcttttgtgcagcatagatctactgcagcactatgggctgtggtggggaaagataacgtatgggggtgagggaatggcctgagatggaaatgccctggtttagaacagggcctgggatgggcccctcagggagttttccaaaatcgggttcccttctttatcaaacttagagtgacactgattagcccaaagttttccttttttacattttggacatatttcaggatcagcagttttgttttttcccc

SEQ ID NO: 352013 - DNA, 608 bp, Homo sapiens
gttatttcacaggtaggatgtttatcagtaatttgatttacccaataagctgccttgccttttttatttgtgcttccaaatcctccagttcatttaatttcactttttcccattcccacatacggctcactcaggagctgtgctatgcgcactcctggctgtgctttccagggaacagaactaaatatcacaatttgaatttcctcattgyaatctgaatcaatgactccagtgtgtatttgtaccccttttaaacttaaactagaccttcctaaaagtaatcccattgtccctgctcgcaacggtccacagactcctgttgggaccttttgcgggggttccccaggcagaaggctcacagcttttgtgcagcatagatctactgcagcactatgggctgtggtggggaaagataacgtatgggggtgagggaatggcctgagatggaaatgccctggtttagaacagggcctgggatgggcccctcagggagttttccaaaatcgggttcccttctttatcaaacttagagtgacactgattagcccaaagttttccttttttacattttggacatatttcaggatcagcagttttgttttttcccc

SEQ ID NO: 352014 - DNA, 608 bp, Homo sapiens
gttatttcacaggtaggatgtttatcagtaatttgatttacccaataagctgccttgccttttttatttgtgcttccaaatcctccagttcatttaatttcactttttcccattcccacatacggctcactcaggagctgtgctatgcgcactcctggctgtgctttccagggaacagaactaaatatcacaatttgaatttcctcattgtaatctgaatcaatgactccagtgtgtatttgtaccccttttaaacttaaactagaccttcctaaaagtaatcccattgtccctgctcgcaacggtccacagactcctgttgggaccttttgcgggggttccccaggcagaaggctcacagcttttgtgcagcatagatctactgcagcactatgggctgtggtggggaaagataacgtatgggggtgagggaatggcctgagatggaaatgccctggtttagaacagggcctgggatgggcccctcagggagtttyccaaaatcgggttcccttctttatcaaacttagagtgacactgattagcccaaagttttccttttttacattttggacatatttcaggatcagcagttttgttttttcccc

SEQ ID NO: 352015 - DNA, 608 bp, Homo sapiens
gttatttcacaggtaggatgtttatcagtaatttgatttacccaataagctgccttgccttttttatttgtgcttccaaatcctccagttcatttaatttcactttttcccattcccacatacggctcactcaggagctgtgctatgcgcactcctggctgtgctttccagggaacagaactaaatatcacaatttgaatttcctcattgtaatctgaatcaatgactccagtgtgtatttgtaccccttttaaacttaaactagaccttcctaaaagtaatcccattgtccctgctcgcaacggtccacagactcctgttgggaccttttgcgggggttccccaggcagaaggctcacagcttttgtgcagcatagatctactgcagcactatgggctgtggtggggaaagataacgtatgggggtgagggaatggcctgagatggaaatgccctggtttagaacagggcctgggatgggcccctcagggagttttccaaaatcgggttcccttctttatsaaacttagagtgacactgattagcccaaagttttccttttttacattttggacatatttcaggatcagcagttttgttttttcccc

SEQ ID NO: 352016 - DNA, 312 bp, Homo sapiens
agctttatgtagattatctctcatatcatcacaggccttgttataatcaactaaatgtgctttccctctgataggtcrcagagcagcctggcaataaggattagcattgtcaaaaccaataactgcaacactatatcctaagcagccaaatctgcaatcatctttttaagagactcctgtaaccaagctataaaatccacatatggttctcttggtccctgttttatagcactaaaggaagggtattgttctccacatgaagtgatttattccaagctctaatgcacacttctctaagctgttctatggcat

SEQ ID NO: 352017 - DNA, 312 bp, Homo sapiens
agctttatgtagattatctctcatatcatcacaggccttgttataatcaactaaatgtgctttccctctgataggtcacagagcagcctggcaataaggattagcattgtcaaaaccaataactgcaacactatatcctaagcagccaaatctgcaatcatctttttaagagactcctgtaaccaagctataaaatccacatatggttctcttggtccctgttttatagcactaaaggaagggtattgttctccacatgaagtgatttattccaagctctaatgcacactyctctaagctgttctatggcat

SEQ ID NO: 352018 - DNA, 422 bp, Homo sapiens
ttaaattgtaagaactgagcaggagttagacaagctagagtaaaagtgtcccagtcagtaggaatcatccgactggaaacagcaacattctttaacagtcccatttcaaaaggagaacctggtccatactgatttatagcttgtttaatttttttgagtaatttaaaaggaaaaggctcaaatgtagctataatatttccctgttgatctggggggtgtattcaaacagggaactgccaagcctctaaatcccacttttgtctagcttgctgtattcctgcctgaatagaactaagagcagtcgctcaaggcgctgctcgaacmgtcaccagggcaactacttttcacccagtgtcctccagaaaagaaagatctggagggtcgttttcttcaaaatagtaatgagggtgtgcagaaggata

SEQ ID NO: 352019 - DNA, 418 bp, Homo sapiens
cctgcctgaatagaactaagagcagtcgctcaaggcgctgctcgaacagtcaccagggcaactacttttcacccagtgtcctccagaaaagaaagatctggagggtcgttttcttcaaaatagtaatgagggtgtgcagaaggatagggatgaacctctccctccttttctgctttagctttaggtgacaaataaacctggtctgtaacctctactgttactttgttatactctccttcctcctcatcatcagtgtgaaaaagttccaaggtagaacgaaccacagcccacacttgtcctattgctaccctgatgcttccgagctccccttcttactcaccackgggattgctttaagagtactcgggtgtcctccagctagttccacattctccaatcgttgctccagcgatccttt

SEQ ID NO: 352020 - DNA, 508 bp, Homo sapiens
ggccctctctgtctgggatctaatagcagtttgacactctgcattagcattattgtatgcaagaagctgtattacaacatcctgagctgttttgatcatttrcggctttatacacagcctcttggagctgagcaataaaattaatatatggttctttaggtccttgtcagacagaactgaaataaggatacttttccccggtaacatttatccttttctatgcatgtaagcacatgaagcacagctgaacaatggcaacatcttccattagtgcttgattctctaatcaaccccagttagggccaactcatattaactgatcaaagaaaacaggcacaggtggctgcacttgtgtgttttcttttgcctgagtttgagcttcatcagcctaccaagttttaaactgcaagtactgagatggagtgagaacaggttttgtcaaagtatcctaattatatggtagtaatctattatcaagagccatatttttaaataaagtttgcacaaa

SEQ ID NO: 352021 - DNA, 508 bp, Homo sapiens
ggccctctctgtctgggatctaatagcagtttgacactctgcattagcattattgtatgcaagaagctgtattacaacatcctgagctgttttgatcatttgcggctttatacacagcctcttggagctgagcaataaaattaatatatggttctttaggtccttgtcagacagaactgaaataaggatacttttccccggtaacrtttatccttttctatgcatgtaagcacatgaagcacagctgaacaatggcaacatcttccattagtgcttgattctctaatcaaccccagttagggccaactcatattaactgatcaaagaaaacaggcacaggtggctgcacttgtgtgttttcttttgcctgagtttgagcttcatcagcctaccaagttttaaactgcaagtactgagatggagtgagaacaggttttgtcaaagtatcctaattatatggtagtaatctattatcaagagccatatttttaaataaagtttgcacaaa

SEQ ID NO: 352022 - DNA, 508 bp, Homo sapiens
ggccctctctgtctgggatctaatagcagtttgacactctgcattagcattattgtatgcaagaagctgtattacaacatcctgagctgttttgatcatttgcggctttatacacagcctcttggagctgagcaataaaattaatatatggttctttaggtccttgtcagacagaactgaaataaggatacttttccccggtaacatttatccttttctatgcatgtaagcacatgaagcacagctgaacaatggcaacatcttccattagtgcttgattctctaatcaaccccagttagggmcaactcatattaactgatcaaagaaaacaggcacaggtggctgcacttgtgtgttttcttttgcctgagtttgagcttcatcagcctaccaagttttaaactgcaagtactgagatggagtgagaacaggttttgtcaaagtatcctaattatatggtagtaatctattatcaagagccatatttttaaataaagtttgcacaaa

SEQ ID NO: 352023 - DNA, 553 bp, Homo sapiens
ctcatattaactgatcaaagaaaacaggcacaggtggctgcacttgtgtgttttcttttgcctgagtttgagcttcatcagcctaccaagttttaaactgcaagtactgagatggagtgagaacaggttttgtcaaagtatcctaattatatggtagtaatctattatcaagagccatatttttaaataaagtttgcacaaaaagagagttcagtccatattgactaatggcttgcttaaattctttagtaacttaaaagagaaagcagcctaattagctatattctgtcctacttgctggattatagtaacgggaaattgccatgcttcaaggtctcccttggctttagctttttgaatagaattttgtctascaccaccaattgctccaggttttaatgttgtaactacaggagcagtaagtttttcagctaatttattttctcacccatttagaggagagagaggaggtggccattcacttaattcagcaggtggagccaacgggctagtaaaacatacttttaaaagtttttctttcttttctttaatc

SEQ ID NO: 352024 - DNA, 553 bp, Homo sapiens
ctcatattaactgatcaaagaaaacaggcacaggtggctgcacttgtgtgttttcttttgcctgagtttgagcttcatcagcctaccaagttttaaactgcaagtactgagatggagtgagaacaggttttgtcaaagtatcctaattatatggtagtaatctattatcaagagccatatttttaaataaagtttgcacaaaaagagagttcagtccatattgactaatggcttgcttaaattctttagtaacttaaaagagaaagcagcctaattagctatattctgtcctacttgctggattatagtaacgggaaattgccatgcttcaaggtctcccttggctttagctttttgaatagaattttgtctaccaccaccaattgctccagrttttaatgttgtaactacaggagcagtaagtttttcagctaatttattttctcacccatttagaggagagagaggaggtggccattcacttaattcagcaggtggagccaacgggctagtaaaacatacttttaaaagtttttctttcttttctttaatc

SEQ ID NO: 352025 - DNA, 553 bp, Homo sapiens
ctcatattaactgatcaaagaaaacaggcacaggtggctgcacttgtgtgttttcttttgcctgagtttgagcttcatcagcctaccaagttttaaactgcaagtactgagatggagtgagaacaggttttgtcaaagtatcctaattatatggtagtaatctattatcaagagccatatttttaaataaagtttgcacaaaaagagagttcagtccatattgactaatggcttgcttaaattctttagtaacttaaaagagaaagcagcctaattagctatattctgtcctacttgctggattatagtaacgggaaattgccatgcttcaaggtctcccttggctttagctttttgaatagaattttgtctaccaccaccaattgctccaggttttaatgttgtaactacaggagcagtaagtttttcagcyaatttattttctcacccatttagaggagagagaggaggtggccattcacttaattcagcaggtggagccaacgggctagtaaaacatacttttaaaagtttttctttcttttctttaatc

SEQ ID NO: 352026 - DNA, 553 bp, Homo sapiens
ctcatattaactgatcaaagaaaacaggcacaggtggctgcacttgtgtgttttcttttgcctgagtttgagcttcatcagcctaccaagttttaaactgcaagtactgagatggagtgagaacaggttttgtcaaagtatcctaattatatggtagtaatctattatcaagagccatatttttaaataaagtttgcacaaaaagagagttcagtccatattgactaatggcttgcttaaattctttagtaacttaaaagagaaagcagcctaattagctatattctgtcctacttgctggattatagtaacgggaaattgccatgcttcaaggtctcccttggctttagctttttgaatagaattttgtctaccaccaccaattgctccaggttttaatgttgtaactacaggagcagtaagtttttcagctaatttattttctcacccatttagaggagagagaggaggtggccattcacttaattcrgcaggtggagccaacgggctagtaaaacatacttttaaaagtttttctttcttttctttaatc

SEQ ID NO: 352027 - DNA, 584 bp, Homo sapiens
tctctcccattcatccaacttcatagtcctttgttctggaaaccatgggcaaaactgctttactgtackaaagagtgataacaaattctaagtactaattttcattccccatctttgtatgtcctcgggtgtcttttgatgttgtgtcctctgctttcacatgctccagccttccttcaccgggtctttgtcaccccatgttgggcgccaggaatgttggggtgatcagacccaacactaggtcatgggggtgatgaagtccggcagagtcaaaggaatgagaaaaagacagtttgagagagaaagtgggaccaggagaccatcacgagtgtggagtctgcaaagtccccaagctctgggagcccacgctatttgttggtgctcaaacaaacaggtggtgaggatttaggggttgaaaggaaacggtgtatcaagtgaatgagaaacatatggccctgcctcagcttctcttccaacactcagcttttctcccaacacattccccttatgaacaggaataaaatagggatgcctgttctcaccactcctgtttaacaagtcctagccagagcaatcaggcaaga

SEQ ID NO: 352028 - DNA, 573 bp, Homo sapiens
tcatcctcctcttcctcatctgagtctgcctcatcatctgtttgaaatggctcaagggctgcctttattagtgcccacactgaccatacagaaactagaatttctgctccatctttatatgccttttaaaaaatctcttccaattctctcccattcatccaacttcatagtcctttgttctggaaaccatgggcaaaactgctttactgtactaaagagtgataacaaattctaagtactaawtttcattccccatctttgtatgtcctcgggtgtcttttgatgttgtgtcctctgctttcacatgctccagccttccttcaccgggtctttgtcaccccatgttgggcgccaggaatgttggggtgatcagacccaacactaggtcatgggggtgatgaagtccggcagagtcaaaggaatgagaaaaagacagtttgagagagaaagtgggaccaggagaccatcacgagtgtggagtctgcaaagtccccaagctctgggagcccacgctatttgttggtgctcaaacaaacaggtggtgaggatttaggggttgaaaggaaacggtgt

SEQ ID NO: 352029 - DNA, 584 bp, Homo sapiens
tctctcccattcatccaacttcatagtcctttgttctggaaaccatgggcaaaactgctttactgtactaaagagtgataacaaattctaagtactaattttcattccccatctttgtatgtcctcgggtgtcttttgatgttgtgtcctctrctttcacatgctccagccttccttcaccgggtctttgtcaccccatgttgggcgccaggaatgttggggtgatcagacccaacactaggtcatgggggtgatgaagtccggcagagtcaaaggaatgagaaaaagacagtttgagagagaaagtgggaccaggagaccatcacgagtgtggagtctgcaaagtccccaagctctgggagcccacgctatttgttggtgctcaaacaaacaggtggtgaggatttaggggttgaaaggaaacggtgtatcaagtgaatgagaaacatatggccctgcctcagcttctcttccaacactcagcttttctcccaacacattccccttatgaacaggaataaaatagggatgcctgttctcaccactcctgtttaacaagtcctagccagagcaatcaggcaaga

SEQ ID NO: 352030 - DNA, 584 bp, Homo sapiens
tctctcccattcatccaacttcatagtcctttgttctggaaaccatgggcaaaactgctttactgtactaaagagtgataacaaattctaagtactaattttcattccccatctttgtatgtcctcgggtgtcttttgatgttgtgtcctctgctttcacatgctccagccttccttcaccgggtctttgtcaccccatgttgggcgccaggaatgttggggtgatcagacccaacactaggtcatgggggtgatgaagtccggcagagtcaaaggaatgagaaaaagacagtttgagagagaaagtgggaccaggagrccatcacgagtgtggagtctgcaaagtccccaagctctgggagcccacgctatttgttggtgctcaaacaaacaggtggtgaggatttaggggttgaaaggaaacggtgtatcaagtgaatgagaaacatatggccctgcctcagcttctcttccaacactcagcttttctcccaacacattccccttatgaacaggaataaaatagggatgcctgttctcaccactcctgtttaacaagtcctagccagagcaatcaggcaaga

SEQ ID NO: 352031 - DNA, 584 bp, Homo sapiens
tctctcccattcatccaacttcatagtcctttgttctggaaaccatgggcaaaactgctttactgtactaaagagtgataacaaattctaagtactaattttcattccccatctttgtatgtcctcgggtgtcttttgatgttgtgtcctctgctttcacatgctccagccttccttcaccgggtctttgtcaccccatgttgggcgccaggaatgttggggtgatcagacccaacactaggtcatgggggtgatgaagtccggcagagtcaaaggaatgagaaaaagacagtttgagagagaaagtgggaccaggagaccatcacgagtgtggagtctgcaaagtccccaagctctgggagcccacgctatttgttggtgctcaaacaaacaggtggtgaggatttaggggttgaaaggaaacggtgtatcaagtgaatgagaaacatatggccctgcctcagcttctcttccaacactcagcttttctcccaacacattccccttatgaacaggaataaaatagggatgcctgttctcaccacycctgtttaacaagtcctagccagagcaatcaggcaaga

SEQ ID NO: 352032 - DNA, 566 bp, Homo sapiens
tcatactataacctaaggccacaatagacaaaatagcatggtagcgatatgaaaacagacacaaagaccaatgaaacagaatagagaacccgaaaataaacatgcacctayagccatcagctttcccaggataacacaaagagagccaagtggcacctgcacattacgctgtggaagaaaaacccaagctcaagaaacctcaacttgtattatgggaagttcacttggctgtacccttcccaagagggagaaattatctgcattatactagacagtaaataaacttttcctttgttccagaaggaggtactggttttctattccaaggctgttttctatacaaacatgcttgaaaacaatcatttggaacaagaaagtcagcgtccatacttgcaaaatgtgcggaaatcaaagagacccaaaaactgtttctctaccaatttctatttttttaaaatcacattttccccatataataagcttttaatatgtgataatattctgaaattgtcttagcatttacccccatttctgagtccagaaggatacaataaatttaatttaat

SEQ ID NO: 352033 - DNA, 566 bp, Homo sapiens
tcatactataacctaaggccacaatagacaaaatagcatggtagcgatatgaaaacagacacaaagaccaatgaaacagaatagagaacccgaaaataaacatgcacctatagccatcagctttcccaggrtaacacaaagagagccaagtggcacctgcacattacgctgtggaagaaaaacccaagctcaagaaacctcaacttgtattatgggaagttcacttggctgtacccttcccaagagggagaaattatctgcattatactagacagtaaataaacttttcctttgttccagaaggaggtactggttttctattccaaggctgttttctatacaaacatgcttgaaaacaatcatttggaacaagaaagtcagcgtccatacttgcaaaatgtgcggaaatcaaagagacccaaaaactgtttctctaccaatttctatttttttaaaatcacattttccccatataataagcttttaatatgtgataatattctgaaattgtcttagcatttacccccatttctgagtccagaaggatacaataaatttaatttaat

SEQ ID NO: 352034 - DNA, 566 bp, Homo sapiens
tcatactataacctaaggccacaatagacaaaatagcatggtagcgatatgaaaacagacacaaagaccaatgaaacagaatagagaacccgaaaataaacatgcacctatagccatcagctttcccaggataacacaaagagagccaagtggcacctgcacattacgctgtggaagaaaaacccaagctcaagaaacctcaacttgtattatgggaagttcacttggctgtacccttcccaagagggagaaattatctgcattatactagacagtaaataaacttttcctttgttccagaaggaggtactggttttctattccaaggctgttttctatacaaacatgcttgaaaacwatcatttggaacaagaaagtcagcgtccatacttgcaaaatgtgcggaaatcaaagagacccaaaaactgtttctctaccaatttctatttttttaaaatcacattttccccatataataagcttttaatatgtgataatattctgaaattgtcttagcatttacccccatttctgagtccagaaggatacaataaatttaatttaat

SEQ ID NO: 352035 - DNA, 599 bp, Homo sapiens
ccaatttctatttttttaaaatcacattttccccatataataagcttttaatatgtgataatattctgaaattgtcttagcatttacccccatttctgagtccagaaggatacaataaatttaatttaatttagtaacacttcaaatagtagtgattgtaatagcagagctagtttgtagcataaagaaaaaataataatattaggtgacacaaataatgctagccaccatttctaagtgtcatggtaagtacagtgattattttctttttttctgactcttttttattgkattttttattttttttcccataggttattggggtacggtggtatttggttcgggtccatgaataacttctttactggttatttgtgagatttgggtgcacctatcacccgaacagtgtacactgcaccttatttgttatcttttatccctcgccccccaccctattaaataatagacaaaaaataatgggtttagaataaatgagttcaaatgaattgtcaaacgtatgtgggaaaagtggaatcagtttgtgagaaaaaggaaaaaaactcaacagaaatgctgataaagcatcatcccttcatggc

SEQ ID NO: 352036 - DNA, 639 bp, Homo sapiens
tggcagctacctcaggagttacaaagcagacgtggttccaggacagtgtatgtcagggcaaagctgtcctaggaggctattaggagttggttatgrcatagacattgtaagtcagatggtctcattactttcaatgacaaaaccaaaattacttttgtatcagcctaatacaacggcctggcaagagcacagaaaaagtccctgtgctgttaggtggggacctctgatgcagcacaattccttcattcccttctccaaaacccccctcttccaattccactgaagagagaatctgatggaagtgctgtgtaagtaggctcagatatatctaccactatagatagtagaggtgattcataaatccaagcctatcaaatacatcataaagttacacgtttaatttttttttgaaattagggatcatgatataaaagttatcagaatcaaaactgtcagtaatctttaaaaagaaaagaaaaaacctggacaaatagattcagagaaggccttgaagagagggttctcatgcttctaggcctgatacaaactgtcacaaaataccacaaaatccacaaccttgcacaaaggccatagcaaccttacacaaaatacacttctgtgaggacatctatccaacaa

SEQ ID NO: 352037 - DNA, 639 bp, Homo sapiens
tggcagctacctcaggagttacaaagcagacgtggttccaggacagtgtatgtcagggcaaagctgtcctaggaggctattaggagttggttatggcatagacattgtaagtcagatggtctcattactttcaatgacaaaaccaaaattacttttgtatcagcctaatacaacggcctggcaagagcacagaaaaagtccctgtgctgttaggtggggacctctgatrcagcacaattccttcattcccttctccaaaacccccctcttccaattccactgaagagagaatctgatggaagtgctgtgtaagtaggctcagatatatctaccactatagatagtagaggtgattcataaatccaagcctatcaaatacatcataaagttacacgtttaatttttttttgaaattagggatcatgatataaaagttatcagaatcaaaactgtcagtaatctttaaaaagaaaagaaaaaacctggacaaatagattcagagaaggccttgaagagagggttctcatgcttctaggcctgatacaaactgtcacaaaataccacaaaatccacaaccttgcacaaaggccatagcaaccttacacaaaatacacttctgtgaggacatctatccaacaa

SEQ ID NO: 352038 - DNA, 554 bp, Homo sapiens
gtgtaagtaggctcagatatatctaccactatagatagtagaggtgattcataaatccaagcctatcaaatacatcataaagttacacgtttaatttttttttgaaattagggatcatgatataaaagttatcagaatcaaaactgtcagtaatctttaaaaagaaaagaaaaaacctggacaaatagattcagagaaggccttgaagagagggttctcrtgcttctaggcctgatacaaactgtcacaaaataccacaaaatccacaaccttgcacaaaggccatagcaaccttacacaaaatacacttctgtgaggacatctatccaacaaccacctgctcaaacttcagctgacatcgaccttgttgttgatctttatagtcaaagataactataacaaaacaattatataagcctcttcatttttcctttatttttttctactcccccataattccaggttgatcgcttttcttttaaagaccttgtcttcctttaccatttgaatctacacagtttgctttgtcatgcatattcccattgcagtgtcct

SEQ ID NO: 352039 - DNA, 554 bp, Homo sapiens
gtgtaagtaggctcagatatatctaccactatagatagtagaggtgattcataaatccaagcctatcaaatacatcataaagttacacgtttaatttttttttgaaattagggatcatgatataaaagttatcagaatcaaaactgtcagtaatctttaaaaagaaaagaaaaaacctggacaaatagattcagagaaggccttgaagagagggttctcatgcttctaggcctgatacaaactgtcacaaaataccacaaaatccacaaccttgcacaaaggccatagcaaccttacacaaaatacacttctgtgaggacatctatccarcaaccacctgctcaaacttcagctgacatcgaccttgttgttgatctttatagtcaaagataactataacaaaacaattatataagcctcttcatttttcctttatttttttctactcccccataattccaggttgatcgcttttcttttaaagaccttgtcttcctttaccatttgaatctacacagtttgctttgtcatgcatattcccattgcagtgtcct

SEQ ID NO: 352040 - DNA, 554 bp, Homo sapiens
gtgtaagtaggctcagatatatctaccactatagatagtagaggtgattcataaatccaagcctatcaaatacatcataaagttacacgtttaatttttttttgaaattagggatcatgatataaaagttatcagaatcaaaactgtcagtaatctttaaaaagaaaagaaaaaacctggacaaatagattcagagaaggccttgaagagagggttctcatgcttctaggcctgatacaaactgtcacaaaataccacaaaatccacaaccttgcacaaaggccatagcaaccttacacaaaatacacttctgtgaggacatctatccaacaaccacctgctcaaacttcarctgacatcgaccttgttgttgatctttatagtcaaagataactataacaaaacaattatataagcctcttcatttttcctttatttttttctactcccccataattccaggttgatcgcttttcttttaaagaccttgtcttcctttaccatttgaatctacacagtttgctttgtcatgcatattcccattgcagtgtcct

SEQ ID NO: 352041 - DNA, 554 bp, Homo sapiens
gtgtaagtaggctcagatatatctaccactatagatagtagaggtgattcataaatccaagcctatcaaatacatcataaagttacacgtttaatttttttttgaaattagggatcatgatataaaagttatcagaatcaaaactgtcagtaatctttaaaaagaaaagaaaaaacctggacaaatagattcagagaaggccttgaagagagggttctcatgcttctaggcctgatacaaactgtcacaaaataccacaaaatccacaaccttgcacaaaggccatagcaaccttacacaaaatacacttctgtgaggacatctatccaacaaccacctgctcaaacttcagctgacatcgaccttgttgttgatctttatagtcaaagataactataacaaaacaattatakaagcctcttcatttttcctttatttttttctactcccccataattccaggttgatcgcttttcttttaaagaccttgtcttcctttaccatttgaatctacacagtttgctttgtcatgcatattcccattgcagtgtcct

SEQ ID NO: 352042 - DNA, 528 bp, Homo sapiens
tagctactttttttttaaaagatgactatgctttctagaatatttctaagaaattgcctaagtcaccactgttcaccaagaggcctttgttttttcctcttcttaaccatgggaaaggaatgtaggagggtagggagtggatattttctaacctggaaaaaactcattttaccctatataatttttkttagcaaattccttctttgcacttactccacaatctttccaaattctcccaaatgctcaagcttttaaaaaagaaaagacagaaagatagcaggttattaggttttccaccaaaccttttctttctattcctttacatcagtgagcttagaatatctctgctcctggaactgggaaagggacttgggaaaagaaagaaaaaaaaagctcccaaagtttaacatcacaaaacattatagtcactgctattttattatttatttatttatttatttacttttgagctggagtcttgttctgccaccaggctggagtgcagtggtgcgatctctgctcactgca

SEQ ID NO: 352043 - DNA, 559 bp, Homo sapiens
gtgtgttgaatttatgtcagagccaggttctttcctatttgatgtctctcacaaaattccagtgtttatgtcctaggaggtgcccaataaattctagagttgatacaagctgtaattttagagaaattaaattagcaagtagaattagattatatacaacctaatcaacttttttttttttcctgaggatgaccaagatttgggcttcagtgacaatagttatcccctaaatatttatactcaatctaggatcaccagtaaaattttgaatagaggtgatgaacacacacatccttttcttgtcctaatctatgtggtttaaacatttacgctttcacaattaaatataatattgtttatatgttttgttgtggatgctttccaccacttcgagaaaatttctttttctagcttgctgagagtttttttttttttttaatcagcaatagatatttctccaaagaaaatatccaaattaccaacaggtacatgaaawaaatgctcagcatcactaatcatcagggaaatgcaaatcaaaaccacaaagagatattgcctc

SEQ ID NO: 352044 - DNA, 487 bp, Homo sapiens
ttgtactaccaccgatagctggcactagctctttgatactgttatcattctgctgtagaaagtacccgtgaactggaaaaagtccacaatagaatagctagtcattcaacactatcaaattttaggtgactttttgaaaaratagtatctcttgttgcaagaaatggtccatctgtgatttcaagtctctcgcttgagtgaattggatggaagtggtgaatttcagccaaagtggccaaagaaatcctgttcctgtgataatgacgccatcagcctctgcacctctgtcttcccttctgccacatgttgcctgttctccgtgactttggtaagagcttccttgtgtatgaggatgatgtccaggatgttggtctggtgtccctgagacagcactaacaggtccatggctgggtccaggtccttcctggactcattggcaaagagcttactgatgttcttgaaggcatctctggtgaagtggatggcc

SEQ ID NO: 352045 - DNA, 459 bp, Homo sapiens
aagaattgagattgggatgattctcaggctcattgcagcattatttacactaatcaaaatgtggaaataaggttaatgtttattggcagatgaatagataaagaaaatgtggtatattcatacaacggaatattattcagctttaaaacaagaaaatccggcaatatgcaacatggatgaacctagaggacattaatgctacgtaaagtaaatcagtcacagaaggacaaactgtatgattccacttgtataaagtatctaagatagccaaattaattagaatcacagattagaatggtgatagccctttaagttgaaatcaattttrcattcctgggttttgtagttttgctatcaggattctgactcataaaacaagtttggaatttcccccttcttctgaaataatttaaaaattttatttttttaaaacgtttgaaagaattcaccagtaaaact

SEQ ID NO: 352046 - DNA, 459 bp, Homo sapiens
aagaattgagattgggatgattctcaggctcattgcagcattatttacactaatcaaaatgtggaaataaggttaatgtttattggcagatgaatagataaagaaaatgtggtatattcatacaacggaatattattcagctttaaaacaagaaaatccggcaatatgcaacatggatgaacctagaggacattaatgctacgtaaagtaaatcagtcacagaaggacaaactgtatgattccacttgtataaagtatctaagatagccaaattaattagaatcacagattagaatggtgatagccctttaagttgaaatcaattttgcattcctgggttttgtagttttgctatcaggattctgactcataaaacaagtttggaattycccccttcttctgaaataatttaaaaattttatttttttaaaacgtttgaaagaattcaccagtaaaact

SEQ ID NO: 352047 - DNA, 493 bp, Homo sapiens
catttaatcttgtgaatttttttataagtttcttttcaagraattcaccctttcatccaagtaatgaaaattagtataaaatgtttcacaatattccattatcttgttaatgtctcttgtgtctacaactgtacaatcttattaatccctgatatttataatttgcgttttctttctttctcacagaactaacttttggccatgttaattttctcctgtgtctgttttctgtctcattgatttctaatttctgttttattttctttcttctacttgttttggacttaatttgctctcttgttttagattttctttttaaggtagaaaattagtgcacttgttttgaacttctcttttttagaataagcatttatacaaaaaatttactctgggtctgcttaacttatcccacatattttgatatagtatatttttatttgtattcagttcaatgtattttaaggtgtttcttatgatttctttcttgagctaa

SEQ ID NO: 352048 - DNA, 493 bp, Homo sapiens
catttaatcttgtgaatttttttataagtttcttttcaaggaattcaccctttcatccaagtaatgaaaattagtataaaatgtttcacaatattccattatcttgttaatgtctcttgtgtctacaactgtacaatctyattaatccctgatatttataatttgcgttttctttctttctcacagaactaacttttggccatgttaattttctcctgtgtctgttttctgtctcattgatttctaatttctgttttattttctttcttctacttgttttggacttaatttgctctcttgttttagattttctttttaaggtagaaaattagtgcacttgttttgaacttctcttttttagaataagcatttatacaaaaaatttactctgggtctgcttaacttatcccacatattttgatatagtatatttttatttgtattcagttcaatgtattttaaggtgtttcttatgatttctttcttgagctaa

SEQ ID NO: 352049 - DNA, 493 bp, Homo sapiens
catttaatcttgtgaatttttttataagtttcttttcaaggaattcaccctttcatccaagtaatgaaaattagtataaaatgtttcacaatattccattatcttgttaatgtctcttgtgtctacaactgtacaatcttattaatccctgatatttataatttgcgttttctttctttctcacagaactaacttttggccatgttaattttctcctgtgtctgttttctgtctcattgatttctaatttctgttttattttctttcktctacttgttttggacttaatttgctctcttgttttagattttctttttaaggtagaaaattagtgcacttgttttgaacttctcttttttagaataagcatttatacaaaaaatttactctgggtctgcttaacttatcccacatattttgatatagtatatttttatttgtattcagttcaatgtattttaaggtgtttcttatgatttctttcttgagctaa

SEQ ID NO: 352050 - DNA, 493 bp, Homo sapiens
catttaatcttgtgaatttttttataagtttcttttcaaggaattcaccctttcatccaagtaatgaaaattagtataaaatgtttcacaatattccattatcttgttaatgtctcttgtgtctacaactgtacaatcttattaatccctgatatttataatttgcgttttctttctttctcacagaactaacttttggccatgttaattttctcctgtgtctgttttctgtctcattgatttctaatttctgttttattttctttcttctacttgttttggacttaatttgctctcttgttttagattttctttttaaggtagaaaattagtkcacttgttttgaacttctcttttttagaataagcatttatacaaaaaatttactctgggtctgcttaacttatcccacatattttgatatagtatatttttatttgtattcagttcaatgtattttaaggtgtttcttatgatttctttcttgagctaa

SEQ ID NO: 352051 - DNA, 534 bp, Homo sapiens
ttataatttgcgttttctttctttctcacagaactaacttttggccatgttaattttctcctgtgtctgttttctgtctcattgatttctaatttctgttttattttctttcttctacttgttttggacttaatttgctctcttgttttagattttctttttaaggtagaaaattagtgcacttgttttgaacttctcttttttagaataagcatttatacaaaaaatttactctgggtctgcttaacttatcccacatattttgatatagtatatttttatttgtattcagttcaatgtattttaaggtgtttcttatgatttcttycttgagctaaagggcattttaaggtgtatttaaatcttccaatagcgtagactttcctgggtagcttgttttcacccatttcaactcattttcattatggtcagaaagtatactttctatgattacagtgttttgaaacttcttgagagatattttgtggtctatagcctattgataaatgtttcatgtgtagcataatagaacat

SEQ ID NO: 352052 - DNA, 534 bp, Homo sapiens
ttataatttgcgttttctttctttctcacagaactaacttttggccatgttaattttctcctgtgtctgttttctgtctcattgatttctaatttctgttttattttctttcttctacttgttttggacttaatttgctctcttgttttagattttctttttaaggtagaaaattagtgcacttgttttgaacttctcttttttagaataagcatttatacaaaaaatttactctgggtctgcttaacttatcccacatattttgatatagtatatttttatttgtattcagttcaatgtattttaaggtgtttcttatgatttctttcttgagctaaagggcattttaaggtgtatttaaatcttccaatagygtagactttcctgggtagcttgttttcacccatttcaactcattttcattatggtcagaaagtatactttctatgattacagtgttttgaaacttcttgagagatattttgtggtctatagcctattgataaatgtttcatgtgtagcataatagaacat

SEQ ID NO: 352053 - DNA, 534 bp, Homo sapiens
ttataatttgcgttttctttctttctcacagaactaacttttggccatgttaattttctcctgtgtctgttttctgtctcattgatttctaatttctgttttattttctttcttctacttgttttggacttaatttgctctcttgttttagattttctttttaaggtagaaaattagtgcacttgttttgaacttctcttttttagaataagcatttatacaaaaaatttactctgggtctgcttaacttatcccacatattttgatatagtatatttttatttgtattcagttcaatgtattttaaggtgtttcttatgatttctttcttgagctaaagggcattttaaggtgtatttaaatcttccaatagcgtagactttcctgggtagcttgttttcacccatttcaactcattttcattatggtcagaaagtatactttctatgattacagtgttttgaaacttcttgasagatattttgtggtctatagcctattgataaatgtttcatgtgtagcataatagaacat

SEQ ID NO: 352054 - DNA, 487 bp, Homo sapiens
ttgtactaccaccgatagctggcactagctctttgatactgttatcattctgctgtagaaagtacccgtgaactggaaaaagtccacaatagaatagctagtcattcaacactatcaaattttaggtgactttttgaaaagatagtatctcttgttgcaagaaatggtccatctgtgatttcaagtctctcgcttgagtgaattggatggaagtggtgaatttcagccaaagtggccaaagaaatcctgttcctgtgataatgaygccatcagcctctgcacctctgtcttcccttctgccacatgttgcctgttctccgtgactttggtaagagcttccttgtgtatgaggatgatgtccaggatgttggtctggtgtccctgagacagcactaacaggtccatggctgggtccaggtccttcctggactcattggcaaagagcttactgatgttcttgaaggcatctctggtgaagtggatggcc

SEQ ID NO: 352055 - DNA, 616 bp, Homo sapiens
atagctttctgttgtaatattgcttgtttggaggtctactttttcttaatatagccacrtaagatttcttgtgcttgttgtttccttggtatacttggaaattatttaactctcaacttatctataccataatatttggcatgcatctcttataggtacttttattatatagttggacaatctgtgttttatttggagtatttaaattacatttgaaataattattgataaggttggagttaagcctactatttttgctttttttttttttttttttttttttttttggaaacggagtttggccctgtcccccaggctggagtgcaggggcgggatctcccctcactgcaagctttgcctcccggattcatgccattttcctgcctaaacatccggagtagctgggactacaagggcccaccaccatgcccggctaatttttgcatttttagaaaaaatggggtttcaccgggttagccaggatggtctcaatctcctgacctcgggatccactggcctcggcctcccaaagggctgggattacaggctgagccaccgcccccagcctattttgctcttatcttctatttggcccatcatttttggctcctctggt

SEQ ID NO: 352056 - DNA, 616 bp, Homo sapiens
atagctttctgttgtaatattgcttgtttggaggtctactttttcttaatatagccacataagatttcttgtgcttgttgtttccttrgtatacttggaaattatttaactctcaacttatctataccataatatttggcatgcatctcttataggtacttttattatatagttggacaatctgtgttttatttggagtatttaaattacatttgaaataattattgataaggttggagttaagcctactatttttgctttttttttttttttttttttttttttttggaaacggagtttggccctgtcccccaggctggagtgcaggggcgggatctcccctcactgcaagctttgcctcccggattcatgccattttcctgcctaaacatccggagtagctgggactacaagggcccaccaccatgcccggctaatttttgcatttttagaaaaaatggggtttcaccgggttagccaggatggtctcaatctcctgacctcgggatccactggcctcggcctcccaaagggctgggattacaggctgagccaccgcccccagcctattttgctcttatcttctatttggcccatcatttttggctcctctggt

SEQ ID NO: 352057 - DNA, 503 bp, Homo sapiens
aattttaggtgactttttgaaaagatagtatctcttgttgcaagaaatggtccatctgtgatttcaagtctctcgcttgagtgaattggatggaagtggtgaatttcagccaaagtggccaaagaaatcctgttcctgtgataatgacgccatcagcctctgcacctctgtcttcccwtctgccacatgttgcctgttctccgtgactttggtaagagcttccttgtgtatgaggatgatgtccaggatgttggtctggtgtccctgagacagcactaacaggtccatggctgggtccaggtccttcctggactcattggcaaagagcttactgatgttcttgaaggcatctctggtgaagtggatggcctagtctagttccaaggcctggctgaggctgaagaaaaactggccaccctctccccctctttctaaaagcctgtcactgtaatatgcttgcttgtcaactcattggctgtgaggatgagctgagtggcctgtgt

SEQ ID NO: 352058 - DNA, 616 bp, Homo sapiens
atagctttctgttgtaatattgcttgtttggaggtctactttttcttaatatagccacataagatttcttgtgcttgttgtttccttggtatacttggaaattatttaactctcaacttatctataccataatatttggcatgcatctcttataggtacttttattatatagttggacaatctgtgttttatttggagtatttaaattacatttgaaataattattgataaggttggagttaagcctactatttttgctttttttttttttttttttttttttttttggaaacggagtttggccctgtcccccaggctggagtgcaggggcgggatctcccctcactgcaagctytgcctcccggattcatgccattttcctgcctaaacatccggagtagctgggactacaagggcccaccaccatgcccggctaatttttgcatttttagaaaaaatggggtttcaccgggttagccaggatggtctcaatctcctgacctcgggatccactggcctcggcctcccaaagggctgggattacaggctgagccaccgcccccagcctattttgctcttatcttctatttggcccatcatttttggctcctctggt

SEQ ID NO: 352059 - DNA, 616 bp, Homo sapiens
atagctttctgttgtaatattgcttgtttggaggtctactttttcttaatatagccacataagatttcttgtgcttgttgtttccttggtatacttggaaattatttaactctcaacttatctataccataatatttggcatgcatctcttataggtacttttattatatagttggacaatctgtgttttatttggagtatttaaattacatttgaaataattattgataaggttggagttaagcctactatttttgctttttttttttttttttttttttttttttggaaacggagtttggccctgtcccccaggctggagtgcaggggcgggatctcccctcactgcaagctttgcctcccggattcatgccattttcctgcctaaacatccggagtagctgggactacaagkgcccaccaccatgcccggctaatttttgcatttttagaaaaaatggggtttcaccgggttagccaggatggtctcaatctcctgacctcgggatccactggcctcggcctcccaaagggctgggattacaggctgagccaccgcccccagcctattttgctcttatcttctatttggcccatcatttttggctcctctggt

SEQ ID NO: 352060 - DNA, 503 bp, Homo sapiens
aattttaggtgactttttgaaaagatagtatctcttgttgcaagaaatggtccatctgtgatttcaagtctctcgcttgagtgaattggatggaagtggtgaatttcagccaaagtggccaaagaaatcctgttcctgtgataatgacgccatcagcctctgcacctctgtcttcccttctgccacatgttgcctgttctccgtgactttggtaagagcttccttgtgtatgaggatgatgtccaggatgttggtctggtgtccctgagacagcactaacaggtccatggctgggtccaggtccttcctggactsattggcaaagagcttactgatgttcttgaaggcatctctggtgaagtggatggcctagtctagttccaaggcctggctgaggctgaagaaaaactggccaccctctccccctctttctaaaagcctgtcactgtaatatgcttgcttgtcaactcattggctgtgaggatgagctgagtggcctgtgt

SEQ ID NO: 352061 - DNA, 503 bp, Homo sapiens
aattttaggtgactttttgaaaagatagtatctcttgttgcaagaaatggtccatctgtgatttcaagtctctcgcttgagtgaattggatggaagtggtgaatttcagccaaagtggccaaagaaatcctgttcctgtgataatgacgccatcagcctctgcacctctgtcttcccttctgccacatgttgcctgttctccgtgactttggtaagagcttccttgtgtatgaggatgatgtccaggatgttggtctggtgtccctgagacagcactaacaggtccatggctgggtccaggtccttcctggactcattggcaaagagcttactgatgttcttgaaggcatctctggtgaagtggatggcctagtctagttccaaggcctggctgaggctgaagaaaaactggccaccctctccccctctttctaaaagcctgtcactgtaatatgcttgcttgtcaactcattggctgtgaggwtgagctgagtggcctgtgt

SEQ ID NO: 352062 - DNA, 605 bp, Homo sapiens
ttcattgctttttaaagtgtcatttctgatgacaggtagatgacctatttgtttccacgtatgtaaattattttctccctccctttagctactttcaagatttactctttttttttgcccagtggtttgactatggtatgtctacatttggttctgtatatttttattctgttctttgagtttcttaaacctgtaagttgatatatgctgacaattaggaaaacttttggtctttactttttcaaatagctttttctgtctcattttcttctctactctttctaggagtccaattatattagtgctagactggtcatawttttattatttttctcctttgtattagctgtattgggaaattgttcttgatctgtttttaagtgcactgatagttttttctgccatctttaatttactggtatgtgcataaaatgacacttttatataagatactctgtctctcagttctaaaatttgtcctattatctctttatcatttttacttctctgttgagattctccatatattccctcttatgaccatctattccttaaatccttgaatatgcttataatagcttattttaaatttcttatcttctaat

SEQ ID NO: 352063 - DNA, 605 bp, Homo sapiens
ttcattgctttttaaagtgtcatttctgatgacaggtagatgacctatttgtttccacgtatgtaaattattttctccctccctttagctactttcaagatttactctttttttttgcccagtggtttgactatggtatgtctacatttggttctgtatatttttattctgttctttgagtttcttaaacctgtaagttgatatatgctgacaattaggaaaacttttggtctttactttttcaaatagctttttctgtctcattttcttctctactctttctaggagtccaattatattagtgctagactggtcataattttattatttttctcctttgtattagctgtattgggaaattgttcttgatctgtttttaagtgcactgatagttttttctgccatctttaatttactggtatgtgcataaaatgacacttttatataagataytctgtctctcagttctaaaatttgtcctattatctctttatcatttttacttctctgttgagattctccatatattccctcttatgaccatctattccttaaatccttgaatatgcttataatagcttattttaaatttcttatcttctaat

SEQ ID NO: 352064 - DNA, 605 bp, Homo sapiens
ttcattgctttttaaagtgtcatttctgatgacaggtagatgacctatttgtttccacgtatgtaaattattttctccctccctttagctactttcaagatttactctttttttttgcccagtggtttgactatggtatgtctacatttggttctgtatatttttattctgttctttgagtttcttaaacctgtaagttgatatatgctgacaattaggaaaacttttggtctttactttttcaaatagctttttctgtctcattttcttctctactctttctaggagtccaattatattagtgctagactggtcataattttattatttttctcctttgtattagctgtattgggaaattgttcttgatctgtttttaagtgcactgatagttttttctgccatctttaatttactggtatgtgcataaaatgacacttttatataagatactctgtctctcagttctaaaatttgtcctattatcyctttatcatttttacttctctgttgagattctccatatattccctcttatgaccatctattccttaaatccttgaatatgcttataatagcttattttaaatttcttatcttctaat

SEQ ID NO: 352065 - DNA, 605 bp, Homo sapiens
ttcattgctttttaaagtgtcatttctgatgacaggtagatgacctatttgtttccacgtatgtaaattattttctccctccctttagctactttcaagatttactctttttttttgcccagtggtttgactatggtatgtctacatttggttctgtatatttttattctgttctttgagtttcttaaacctgtaagttgatatatgctgacaattaggaaaacttttggtctttactttttcaaatagctttttctgtctcattttcttctctactctttctaggagtccaattatattagtgctagactggtcataattttattatttttctcctttgtattagctgtattgggaaattgttcttgatctgtttttaagtgcactgatagttttttctgccatctttaatttactggtatgtgcataaaatgacacttttatataagatactctgtctctcagttctaaaatttgtcctattatctctttatcatttttacttctctgttgagattctccatatattcyctcttatgaccatctattccttaaatccttgaatatgcttataatagcttattttaaatttcttatcttctaat

SEQ ID NO: 352066 - DNA, 439 bp, Homo sapiens
tagtcttttttctgtagtcaaacaccaaactttcactcctgagctatatgcaatggttgaaatctctgctctgtactagcaatttagctgttgttttctgctrgattctatggagtctctttttatgaatgtgaaatgtagcagccatcatatatctgaatgaagtttaagtgctgattttagatttttactctgtgacattctcctctgtgactttcagttgtgtgagatgtcctcccatgtcattcaaatttcccagttcttcttttctgtcagcctggaactctgtactcttattcctcaagctagtaaaactcaccgctttactcttagacatctaattttgcacagactgggaagtgtcatcaggtgtgaagttacattgatgcaaatttaaatcattgcaattttctttattcaatggtcaaatacttcatca

SEQ ID NO: 352067 - DNA, 551 bp, Homo sapiens
cagctaatgaagcatacccacatatttgaaagtaagaaaagtgttaagaggaactgtagatatcattttagttgatgtaaggatggaaaataaataaccaackttcactggtgaactttgtcttcaatcattgttttcccgtgggtaagtggctaattttctggcctagaggtgaaattggtgtgttggtaagaattgatttaatgataacctgcttttgtctttttaaaaattgtgaatccaccattgtttctggtcctgttttatacttatgcagtgtataatctctcatgcaaaatttagttctttgtttctcagcttaaactggattttgatgagcagttttcaccttcaaatgaaagaaatggccttggttgatgttagacaaaagtaacaagaaggaattaaagaaatttgtttgtcatcttgtaacattaaataaatgaaactgaaaattcaacaattctgcttcataaaaaagtagaaagtttctactgtttttcattattttcaaagctatatcattaaatgaaatttctgcctcatggaag

SEQ ID NO: 352068 - DNA, 595 bp, Homo sapiens
tcttcttttctgtcagcctggaactctgtactcttattcctcaagctagtaaaactcaccgctttactcttagacatctaattttgcacagactgggaagtgtcatcaggtgtgaagttacattgatgcaaatttaaatcattgcaattttctttattcaatggtcaaatacttcatcagtggttgaatattctactatttctgcctgttttctgtttctcattaccatcaaatgtgtatttaattttttttagagttaatagtttttttccctgcatttgagttagacctgagctactaccacattttgtaattcaaactttttgtctaacaatgttttaaaaaactctttatttggagggaattctcaaatttctaaatactctacaaacattaggatcagggctcacattcccagtttcccttgtagccagatgtgcatatggaacatggcctcagctaatgaagcatacccacatatttgaaagtaagaaaagtgttaagaggaactgtagatatcattttagttgatgtaaggatggaaaataaataaccaactttcactggtgractttgtcttcaatcattgttttcc

SEQ ID NO: 352069 - DNA, 551 bp, Homo sapiens
cagctaatgaagcatacccacatatttgaaagtaagaaaagtgttaagaggaactgtagatatcattttagttgatgtaaggatggaaaataaataaccaactttcactggtgaactttgtcttcaatcattgttttcccgtgggtaagtggctaattttctggcctagaggtgaaattggtgtgttggtaagaattgatttaatgataacctgcttttgtctttttaaaaattgtgaatccaccattgtttctggtcctgttttatacttatgcagtgtataatctctcatgcaaaatttagttctttgtttctcagcttaaactggattttgatgagcagttttcaccttcaaatgaaagaaatggcyttggttgatgttagacaaaagtaacaagaaggaattaaagaaatttgtttgtcatcttgtaacattaaataaatgaaactgaaaattcaacaattctgcttcataaaaaagtagaaagtttctactgtttttcattattttcaaagctatatcattaaatgaaatttctgcctcatggaag

SEQ ID NO: 352070 - DNA, 551 bp, Homo sapiens
cagctaatgaagcatacccacatatttgaaagtaagaaaagtgttaagaggaactgtagatatcattttagttgatgtaaggatggaaaataaataaccaactttcactggtgaactttgtcttcaatcattgttttcccgtgggtaagtggctaattttctggcctagaggtgaaattggtgtgttggtaagaattgatttaatgataacctgcttttgtctttttaaaaattgtgaatccaccattgtttctggtcctgttttatacttatgcagtgtataatctctcatgcaaaatttagttctttgtttctcagcttaaactggattttgatgagcagttttcaccttcaaatgaaagaaatggccttggttgatgttagacaaaartaacaagaaggaattaaagaaatttgtttgtcatcttgtaacattaaataaatgaaactgaaaattcaacaattctgcttcataaaaaagtagaaagtttctactgtttttcattattttcaaagctatatcattaaatgaaatttctgcctcatggaag

SEQ ID NO: 352071 - DNA, 595 bp, Homo sapiens
tgccactacgcccagcgaatttttgtatttttaatagagacagagttttactatttattttagagatgggtttggcccagctggtcacgaactcctgacctcaggtggtctacccgccttggcctcccaaagtgctgggattataagtgtgagccactgcacctggcctctctttttaaaattttatttgcagattgttcattgttagtttatggaaatgcaactgacttgtgtgtgttactgtatcctgaaactttgttgaatttcattattttaccagtattttgggaatttcaggatttttacccattacatcctgttgtctgtgaacaaaattttgtactttttcctttccaatttgcatcctttttattactttctcttgactaattattctgagtagaaattccagtactgtgatgaatagaagtggcaggaagagatgttgytatcttattcctgatcctagaggaaaagattttagtctttcaccattgagtatgatgttagctgtgagcttttcctgtataatctttatttactgaggagtttccatatattactaattctttgagtgtttttattacaaaaggtg

SEQ ID NO: 352072 - DNA, 597 bp, Homo sapiens
acttaaactagcaattacaatttgattattatgattatagaatctcgggatttctcttccttcttgtcaaggactttacctgatgtttgtctcattaaaaaaaaatgagactgattacactctactcaagactgaagacatgtactttaacctgtctctgttaccagtaaaccaaagccttaactttcagagtctgtcagggaccctgtgtggtccctggatcaaccacccatgggcttatgaatgtgttgaccgctggcatatgagaartaattgtcaattaggttatgtgacccttcctctttctatttataactccaatgtttctgaacactgaagtagttcatcgaaattactttccaggattagacaaaccatacctgcaaaccaaggaggtgaattttggccaatgtttggcagaagtcacttgcaatggtggggagtaacctctcatgaacgtataattagaaatctgtcaaccactctaggtaaattagcgaatgaactagctgaagccatagctaccaaacaaagatctttagactctttagccaggatagtcatggatgacggaataactttaggctgcatagtggt

SEQ ID NO: 352073 - DNA, 597 bp, Homo sapiens
acttaaactagcaattacaatttgattattatgattatagaatctcgggatttctcttccttcttgtcaaggactttacctgatgtttgtctcattaaaaaaaaatgagactgattacactctactcaagactgaagacatgtactttaacctgtctctgttaccagtaaaccaaagccttaactttcagagtctgtcagggaccctgtgtggtccctggatcaaccacccatgggcttatgaatgtgttgaccgctggcatatgagaaataattgtcwattaggttatgtgacccttcctctttctatttataactccaatgtttctgaacactgaagtagttcatcgaaattactttccaggattagacaaaccatacctgcaaaccaaggaggtgaattttggccaatgtttggcagaagtcacttgcaatggtggggagtaacctctcatgaacgtataattagaaatctgtcaaccactctaggtaaattagcgaatgaactagctgaagccatagctaccaaacaaagatctttagactctttagccaggatagtcatggatgacggaataactttaggctgcatagtggt

SEQ ID NO: 352074 - DNA, 597 bp, Homo sapiens
acttaaactagcaattacaatttgattattatgattatagaatctcgggatttctcttccttcttgtcaaggactttacctgatgtttgtctcattaaaaaaaaatgagactgattacactctactcaagactgaagacatgtactttaacctgtctctgttaccagtaaaccaaagccttaactttcagagtctgtcagggaccctgtgtggtccctggatcaaccacccatgggcttatgaatgtgttgaccgctggcatatgagaaataattgtcaattaggttatgtgacycttcctctttctatttataactccaatgtttctgaacactgaagtagttcatcgaaattactttccaggattagacaaaccatacctgcaaaccaaggaggtgaattttggccaatgtttggcagaagtcacttgcaatggtggggagtaacctctcatgaacgtataattagaaatctgtcaaccactctaggtaaattagcgaatgaactagctgaagccatagctaccaaacaaagatctttagactctttagccaggatagtcatggatgacggaataactttaggctgcatagtggt

SEQ ID NO: 352075 - DNA, 644 bp, Homo sapiens
gccagaccccatgcttgctcacacaccccttgccactccacgcagtctcccttggcaaacatgggatccaacctggtagcatgagctgagcacagcctgccaggctaagtgggcggggcccaagcaaaactcaggtaaaggtgccaccagccatagaggtttctgtccagaaaagtgacactccaaagatcccgtaacaccgctactcttcccagcctctggaaactctcagtctactctccatcttgatgagttcaattgttttaatttttagctcccacaaatgtgtgagaacatgcaaagtctttctgtgcctggctcattgtacttaacataatgttccctagttccatccaygttgttgcaagtgacagaatcttattgtttttcatggctgaagagtactccattgtgtacatgtactacattttctttatcccttcatctgttgatgcacacttaggttgcttccaaatcttggctattatgaatagtactgaaataaatatgggaatgcagatatctctttcatatactaattttccctcccttgggtatatacccagcagtgggattgctgtatcatatgatagttctatttttaattttttgagggacctccatattgttctccatagtgaaag

SEQ ID NO: 352076 - DNA, 569 bp, Homo sapiens
tactaattttccctcccttgggtatatacccagcagtgggattgctgtatcatatgatagttctatttttaattttttgagggacctccatattgttctccatagtgaawgtactaatttacattcccaccaacagagtaagagggttctcttttccctacattcttgcaagcatttgttattgcctgtcttttgcataaaagccattttaatgggggtaagatgatatcttattgtagttttgatttgaatttctctgatgatcggtgatattgagcatcttttcatatacctatttgacatttatatatcttcttttttgtttttgctcattttttgagacagtgtctcactctgtcacccaggctggagtgcagtggtataatgatggcttactgtagttatgtctaccagggttcaagcaatcctcccacctcagcctcctgagtagctgggaccacaggcatgcatcaccatgcccaggtaggttttaaaattatttgctatgtttttcaggttggtcttgaactcctgggctcaagtggtccaactgtcttggctccccaaaa

SEQ ID NO: 352077 - DNA, 569 bp, Homo sapiens
tactaattttccctcccttgggtatatacccagcagtgggattgctgtatcatatgatagttctatttttaattttttgagggacctccatattgttctccatagtgaaagtactaatttacattcccaccaacagagtaagagggttctcttttccctacattcttgcaagcatttgttattgcctgtcttttgcataaaagccattttaatgggggtaagatgatatcttattgtagttttgatttgaatttctctgatgatcrgtgatattgagcatcttttcatatacctatttgacatttatatatcttcttttttgtttttgctcattttttgagacagtgtctcactctgtcacccaggctggagtgcagtggtataatgatggcttactgtagttatgtctaccagggttcaagcaatcctcccacctcagcctcctgagtagctgggaccacaggcatgcatcaccatgcccaggtaggttttaaaattatttgctatgtttttcaggttggtcttgaactcctgggctcaagtggtccaactgtcttggctccccaaaa

SEQ ID NO: 352078 - DNA, 569 bp, Homo sapiens
tactaattttccctcccttgggtatatacccagcagtgggattgctgtatcatatgatagttctatttttaattttttgagggacctccatattgttctccatagtgaaagtactaatttacattcccaccaacagagtaagagggttctcttttccctacattcttgcaagcatttgttattgcctgtcttttgcataaaagccattttaatgggggtaagatgatatcttattgtagttttgatttgaatttctctgatgatcggtgatattgagcatcttttcatatacctatttgacatttatatatcttcttttttgtttttgctcattttttgagacagtgtctcactctgtcacccaggctggagtgcagtggtataatgatggcttactgtagttatgwctaccagggttcaagcaatcctcccacctcagcctcctgagtagctgggaccacaggcatgcatcaccatgcccaggtaggttttaaaattatttgctatgtttttcaggttggtcttgaactcctgggctcaagtggtccaactgtcttggctccccaaaa

SEQ ID NO: 352079 - DNA, 534 bp, Homo sapiens
tgagcatcttttcatatacctatttgacatttatatatcttcttttttgtttttgctcattttttgagacagtgtctcactctgtcacccaggctggagtgcagtggtataatgatggcttactgtagttatgtctaccagggttcaagcaatcctcccacctcagcctcctgagtagctgggaccacaggcatgcatcaccatgcccaggtaggttttaaaattatttgctatgtttttcaggttggtcttgaactcctgggctcaagtggtccaactgtcttggctccccaaaatgctggaattacaggtgtgagccactgcgcctgacctgmatgccttcttttgagaaatgtctgttcagattttttgcccatttaaataattggattattagtttttttcttatagagttgtttgaactccttatatattctggttattaatcccttgtcagatatatagtttgcaaatattttcttccattctgtggattgtcttttcactttgtccattgttttctttactatgcag

SEQ ID NO: 352080 - DNA, 509 bp, Homo sapiens
atgttttctttcagtagtttcttgtccttgatttaagtctttaacccatttggatttgatttttgtatatagcacaagagagggttctagtttaattattctgccaatgactttgggaggatgaggtgggcagatcatgagggcaggatatcaagaacatcctggctaacacggtgaaactccgtctctactaaaaatacaaaaaaaaaaaaatagctgggcgtggtgggggcatttgtactcccagctacttgggaggctgaggaggagaatggtgtgaacccgggaggtggagcttgcagtgagcccagatcgcgccactgcactgcagcctgagcaacagagctagactccatctcaaaaaaaaaaaaattctgccaatgaatatctagttttcccagcacaatttggtgaagagactgtcctctcccccatgtatattcttggcaccttcattgaaaatgagttagttgtaaatgtraggatttatttctgggttctgtattctg

SEQ ID NO: 352081 - DNA, 336 bp, Homo sapiens
tggttaggatataactctctatcagtgcctgacaggtatctatcaagaagtctcagaaaaaataccaagaaacatcacaaccaaatgcatgaatcttgaatgaaatctggctctaaacaaacaaataccagctataaagatattcttggtagcactttgaggggccaaggtgagcagattccctgagctcaggagttccagaccaccctgggcccagtctttactaaaatacaaaaaattarccaggcatggtgacaggtgggcctgtcgtcccagctactcaggaggctgaagaaggagaatcgcttgaacccaggaggcagaggttgcagtgag

SEQ ID NO: 352082 - DNA, 601 bp, Homo sapiens
caaaacattaatgattattcaatctaggtgctcactattctgttcttttctgtatgttagaatttttttcaaaacaaaaagctggggagaaggagaaaaaattctaagagtcaaagaaactgtgtaatccccatttttatcacttttttgtgaccaagtgatttmactcaccattttattcatcagttccctatctacatacttagagcaaatgagataacatagaatgctttgcaaagtaaaaagcatgatacagaatatataatctcatcgtaaccaacaagctctgaagtttaatcacatccacacatctggcttcttttcccctaccttcttatggttgtagatttcaccattgtaacagagccacatatatggatatgtcttcacttaaattgtctgcattccaaacagcgggtccactaccaccaatgggtgaaatccaaagcagcagctggtgtatccattaacattctcaaaacaggatgcatctggacccctgtgtgcaatcttcatagcacacagacactaaacagaaaggcagtcattgctgtcaaacaggacccaaatgccacacacagtgcaatgaagctataagctc

SEQ ID NO: 352083 - DNA, 601 bp, Homo sapiens
caaaacattaatgattattcaatctaggtgctcactattctgttcttttctgtatgttagaatttttttcaaaacaaaaagctggggagaaggagaaaaaattctaagagtcaaagaaactgtgtaatccccatttttatcacttttttgtgaccaagtgatttcactcaccattttattcatcagttccctatctacatacttagagcaaatgagataacatagaatgctttgcaaagtaaaaagcawgatacagaatatataatctcatcgtaaccaacaagctctgaagtttaatcacatccacacatctggcttcttttcccctaccttcttatggttgtagatttcaccattgtaacagagccacatatatggatatgtcttcacttaaattgtctgcattccaaacagcgggtccactaccaccaatgggtgaaatccaaagcagcagctggtgtatccattaacattctcaaaacaggatgcatctggacccctgtgtgcaatcttcatagcacacagacactaaacagaaaggcagtcattgctgtcaaacaggacccaaatgccacacacagtgcaatgaagctataagctc

SEQ ID NO: 352084 - DNA, 601 bp, Homo sapiens
caaaacattaatgattattcaatctaggtgctcactattctgttcttttctgtatgttagaatttttttcaaaacaaaaagctggggagaaggagaaaaaattctaagagtcaaagaaactgtgtaatccccatttttatcacttttttgtgaccaagtgatttcactcaccattttattcatcagttccctatctacatacttagagcaaatgagataacatagaatgctttgcaaagtaaaaagcatgatacagaatatataatstcatcgtaaccaacaagctctgaagtttaatcacatccacacatctggcttcttttcccctaccttcttatggttgtagatttcaccattgtaacagagccacatatatggatatgtcttcacttaaattgtctgcattccaaacagcgggtccactaccaccaatgggtgaaatccaaagcagcagctggtgtatccattaacattctcaaaacaggatgcatctggacccctgtgtgcaatcttcatagcacacagacactaaacagaaaggcagtcattgctgtcaaacaggacccaaatgccacacacagtgcaatgaagctataagctc

SEQ ID NO: 352085 - DNA, 601 bp, Homo sapiens
caaaacattaatgattattcaatctaggtgctcactattctgttcttttctgtatgttagaatttttttcaaaacaaaaagctggggagaaggagaaaaaattctaagagtcaaagaaactgtgtaatccccatttttatcacttttttgtgaccaagtgatttcactcaccattttattcatcagttccctatctacatacttagagcaaatgagataacatagaatgctttgcaaagtaaaaagcatgatacagaatatataatctcatcgtaaccaacaagctctgaagtttaatcacatccacacatctggcttcttttcccctaccttcttatggttgtagatttcaccattgtaacagagccacatatatggatatgtcttcacttaaattgtctgcattccaaacagcgggtcmactaccaccaatgggtgaaatccaaagcagcagctggtgtatccattaacattctcaaaacaggatgcatctggacccctgtgtgcaatcttcatagcacacagacactaaacagaaaggcagtcattgctgtcaaacaggacccaaatgccacacacagtgcaatgaagctataagctc

SEQ ID NO: 352086 - DNA, 566 bp, Homo sapiens
caaatggccagataatttggaataaacaccctacagaaaaaatatatattcaagttgcataagtcactttgagcaatcctttgtggatatttcatttatatctaaatgaaccacaggtttagctggcttttctggaaaaccagaagcaaataatgtatgattataatgaaaaccatctcaagcaatttggaaatgaagtaccacatgtcctatgctgtcccttccatamacttgacaaaacagcctataacaaattgtttactttgagatttagtaggaaaattccatgagatttaaatgagatgactactaataagccatctacatttgattctattccaattaaaaatgggttaggaaagtgctttgaatatcaagtgtgttcatcagggaatcatttacctaagtcttcctaacactgtttagtgaatattaagcctgatgtagtaaatacacgctaaccactaaattgaaggggaaagagggagaacaaagaggcatgtaaagtacacttacttcttctagtaggaaaaagccaattaaaactatcacctattagttttatt

SEQ ID NO: 352087 - DNA, 566 bp, Homo sapiens
caaatggccagataatttggaataaacaccctacagaaaaaatatatattcaagttgcataagtcactttgagcaatcctttgtggatatttcatttatatctaaatgaaccacaggtttagctggcttttctggaaaaccagaagcaaataatgtatgattataatgaaaaccatctcaagcaatttggaaatgaagtaccacatgtcctatgctgtcccttccataaacttgacaaaacagcctataacaaattgtttactttgagatttagtaggaaaattccatgagatttaaatgagatgactactaataagccrtctacatttgattctattccaattaaaaatgggttaggaaagtgctttgaatatcaagtgtgttcatcagggaatcatttacctaagtcttcctaacactgtttagtgaatattaagcctgatgtagtaaatacacgctaaccactaaattgaaggggaaagagggagaacaaagaggcatgtaaagtacacttacttcttctagtaggaaaaagccaattaaaactatcacctattagttttatt

SEQ ID NO: 352088 - DNA, 566 bp, Homo sapiens
caaatggccagataatttggaataaacaccctacagaaaaaatatatattcaagttgcataagtcactttgagcaatcctttgtggatatttcatttatatctaaatgaaccacaggtttagctggcttttctggaaaaccagaagcaaataatgtatgattataatgaaaaccatctcaagcaatttggaaatgaagtaccacatgtcctatgctgtcccttccataaacttgacaaaacagcctataacaaattgtttactttgagatttagtaggaaaattccatgagatttaaatgagatgactactaataagccatctacatttgaytctattccaattaaaaatgggttaggaaagtgctttgaatatcaagtgtgttcatcagggaatcatttacctaagtcttcctaacactgtttagtgaatattaagcctgatgtagtaaatacacgctaaccactaaattgaaggggaaagagggagaacaaagaggcatgtaaagtacacttacttcttctagtaggaaaaagccaattaaaactatcacctattagttttatt

SEQ ID NO: 352089 - DNA, 566 bp, Homo sapiens
caaatggccagataatttggaataaacaccctacagaaaaaatatatattcaagttgcataagtcactttgagcaatcctttgtggatatttcatttatatctaaatgaaccacaggtttagctggcttttctggaaaaccagaagcaaataatgtatgattataatgaaaaccatctcaagcaatttggaaatgaagtaccacatgtcctatgctgtcccttccataaacttgacaaaacagcctataacaaattgtttactttgagatttagtaggaaaattccatgagatttaaatgagatgactactaataagccatctacatttgattctattccaattaaaaatgggttaggaaagtgctttgaatatcaagtgtgttcatcagggaatcatttacctaagtcttcytaacactgtttagtgaatattaagcctgatgtagtaaatacacgctaaccactaaattgaaggggaaagagggagaacaaagaggcatgtaaagtacacttacttcttctagtaggaaaaagccaattaaaactatcacctattagttttatt

SEQ ID NO: 352090 - DNA, 512 bp, Homo sapiens
ctttgaatatcaagtgtgttcatcagggaatcatttacctaagtcttcctaacactgtttagtgaatattaagcctgatgtagtaaatacacgctaaccactaaattgaaggggaaagagggagaacaaagaggcatgtaaagtacacttacttcttctagtaggaaaaagccaattaaaactatcacctattagttttattggaatcagtcttacaggaggtcaaacttcctactgtygctacctattctcaatatttttcttatttcttcctaaacttctagagctgtgctgtccaataaatatgtgagccacgtatgtaattttaaatgtactagtaagccccattaaaagaaaaggtgaaattaattttaaatatacttaactcagtatgtcccaaatagtaatcatagtaataattttaacatgtaataaatataaaaaaaatcaagcagatattctacactgttcttcccactccaacgacaaaatccagtgtatttaacacaaca

SEQ ID NO: 352091 - DNA, 559 bp, Homo sapiens
aaaaggcatgctagttcttttgcttttttgtgtacttggcctcctgtgtccctaaacagatctcttctcagcagagtttgctcagcaagtcacttgatgagtcttgcagtctacagagggggtagggaatggcaggagttggcataggagtgagaggggaggaggcaaggtgaggggggccaggtgaggagggtggcacttgaaggggagttcaagactagcctgggcaacatggtgagaccactgcccctcaccaccgccatttttgttctcactctggtctcacacacatgcacaaattaaatttaatttaaaaattaaaaaattgttttaaaataagtgaagtatttacatggattatgtatacattcattttgtagaactatagatcccatgtaactgggaactctttactcttctaacacaacatttatttagccacaaataaaagaagaccagtgatgtagcctgtacacaaaaaagtaagaaaacactggttaggctggggcaggggtrgggggaagagatctacaaaattaaaattttattgggaagcatc

SEQ ID NO: 352092 - DNA, 569 bp, Homo sapiens
aatgtaaatcccctgcgatatggggagtaaaatcattctctctggctaggcgcggtggctcacacctgtaatcccagcactttgggaagccgaggtgggtggatcacgaggtcaggagatcgagrtcatcctggctaacatggtgaaaccccgtctctactaaaaatacaaaaaattaaccgggcgcggtggtgggcgcctgtagtcccagctactagggaggctgaggcaggagaatggtgtgaacctgggaggcggaccttgcagtgagccaagatcaggccactgcactccagcctgggcgacagagcgagggtctgtctcaaaaaaaataaaataaaatcattctctccctccctggatattatggtgggagcgcgagcgggctcgggggttgccaggcagctgctgcctgcacacagagggcgactgcagcttgggcgcccaggcggcggagcatggtctgggtggcctctggaatgcgtgagcgccagacctgaggatcaccctgggtggagccacctaccccggtcttcctctgctggagcctggagcagctggaatggcca

SEQ ID NO: 352093 - DNA, 569 bp, Homo sapiens
aatgtaaatcccctgcgatatggggagtaaaatcattctctctggctaggcgcggtggctcacacctgtaatcccagcactttgggaagccgaggtgggtggatcacgaggtcaggagatcgaggtcatcctggctaacatggtgaaaccccgtctctactaaaaatacaaaaaattaaccgggcgcggtggtgggcgcctgtagtcccagctactagggaggctgaggcaggagaatggtgtgaacctgggaggcggascttgcagtgagccaagatcaggccactgcactccagcctgggcgacagagcgagggtctgtctcaaaaaaaataaaataaaatcattctctccctccctggatattatggtgggagcgcgagcgggctcgggggttgccaggcagctgctgcctgcacacagagggcgactgcagcttgggcgcccaggcggcggagcatggtctgggtggcctctggaatgcgtgagcgccagacctgaggatcaccctgggtggagccacctaccccggtcttcctctgctggagcctggagcagctggaatggcca

SEQ ID NO: 352094 - DNA, 569 bp, Homo sapiens
aatgtaaatcccctgcgatatggggagtaaaatcattctctctggctaggcgcggtggctcacacctgtaatcccagcactttgggaagccgaggtgggtggatcacgaggtcaggagatcgaggtcatcctggctaacatggtgaaaccccgtctctactaaaaatacaaaaaattaaccgggcgcggtggtgggcgcctgtagtcccagctactagggaggctgaggcaggagaatggtgtgaacctgggaggcggaccttgcagtgagccaagatcaggccactgcactccagcctgggcgacagagcgagggtctgtctcaaaaaaaataaaataaaatcattctctccctccctggatattatggtgggagcgcgagcgggctygggggttgccaggcagctgctgcctgcacacagagggcgactgcagcttgggcgcccaggcggcggagcatggtctgggtggcctctggaatgcgtgagcgccagacctgaggatcaccctgggtggagccacctaccccggtcttcctctgctggagcctggagcagctggaatggcca

SEQ ID NO: 352095 - DNA, 557 bp, Homo sapiens
gacgagtctccaatttgttttctgcctcttaggagcttataaaactaaagttcacaattaatggggaagggaggagacagatgatcttcattgccttagttataaacttgctttggtctatggtgatcctgtgttaaactgtgaaatagaatctatcatcctggctctctgaggcccttgacttcacccttttagtgcttttcttacttattttcaaaccttcacctctctcacattgaaaascccaactcttaataccctctctaaaaaactaccccttcccaccaaccaccaccaccaccgacctcactctatcatctaaatctgtttcaagatataaaaatcttggtaatttagatcttaacacaaattgcctactaccttttcaaaaagcaagttaagcctgattctaattgtgggatgaaaagttttttccctaggaagaaattttaaatatcatcaagcatgttgagaggtgctagcgagggcatggagcaaggaatcaaattccataggtgattgttttctctctctttgtataaaaatgtccttgcccc

SEQ ID NO: 352096 - DNA, 557 bp, Homo sapiens
gacgagtctccaatttgttttctgcctcttaggagcttataaaactaaagttcacaattaatggggaagggaggagacagatgatcttcattgccttagttataaacttgctttggtctatggtgatcctgtgttaaactgtgaaatagaatctatcatcctggctctctgaggcccttgacttcacccttttagtgcttttcttacttattttcaaaccttcacctctctcacattgaaaaccccaactcttaataccctctctaaaaaactaccccttcccaccaaccaccaccaccaccgacctcactctatcatctaaatctgtttcaagatataaaaatcttggtaatttagatcttaacacaaattgcmtactaccttttcaaaaagcaagttaagcctgattctaattgtgggatgaaaagttttttccctaggaagaaattttaaatatcatcaagcatgttgagaggtgctagcgagggcatggagcaaggaatcaaattccataggtgattgttttctctctctttgtataaaaatgtccttgcccc

SEQ ID NO: 352097 - DNA, 557 bp, Homo sapiens
gacgagtctccaatttgttttctgcctcttaggagcttataaaactaaagttcacaattaatggggaagggaggagacagatgatcttcattgccttagttataaacttgctttggtctatggtgatcctgtgttaaactgtgaaatagaatctatcatcctggctctctgaggcccttgacttcacccttttagtgcttttcttacttattttcaaaccttcacctctctcacattgaaaaccccaactcttaataccctctctaaaaaactaccccttcccaccaaccaccaccaccaccgacctcactctatcatctaaatctgtttcaagatataaaaatcttggtaatttagatcttaacacaaattgcctactaccttttcaaaaagcaagttaagcctgattctaattgtgggatgaaaagttttttccctakgaagaaattttaaatatcatcaagcatgttgagaggtgctagcgagggcatggagcaaggaatcaaattccataggtgattgttttctctctctttgtataaaaatgtccttgcccc

SEQ ID NO: 352098 - DNA, 557 bp, Homo sapiens
gacgagtctccaatttgttttctgcctcttaggagcttataaaactaaagttcacaattaatggggaagggaggagacagatgatcttcattgccttagttataaacttgctttggtctatggtgatcctgtgttaaactgtgaaatagaatctatcatcctggctctctgaggcccttgacttcacccttttagtgcttttcttacttattttcaaaccttcacctctctcacattgaaaaccccaactcttaataccctctctaaaaaactaccccttcccaccaaccaccaccaccaccgacctcactctatcatctaaatctgtttcaagatataaaaatcttggtaatttagatcttaacacaaattgcctactaccttttcaaaaagcaagttaagcctgattctaattgtgggatgaaaagttttttccctaggaagaaattttaaatatcatcaagcatgttgagaggtgctagygagggcatggagcaaggaatcaaattccataggtgattgttttctctctctttgtataaaaatgtccttgcccc

SEQ ID NO: 352099 - DNA, 425 bp, Homo sapiens
ctgggtgtccacattaggcctgatgtccasctggggcctaggtacccactgggggcttcctgttaacctgggggctggtgtcattctggggcctaatgaccacctgggttgtattattcacctagggcctggtgtccacttggggcttgagtgtaaccttggacctggcacccacacaggacttgggtatcaaactggccccttggtgtccagttaaggcatcatgtgaacctggcgcctgagtgtccacttggggccaaatgactactgggggcctgaatgtcaacctagaatctgaggtttactaggggcctaggtatccacctggggcccaatgtccacctgagcctgggtgtcaacctggggcctgatgtaaacctctagttcagtgtccaccttgggcttgatgtcaacctggagcctga

SEQ ID NO: 352100 - DNA, 425 bp, Homo sapiens
ctgggtgtccacattaggcctgatgtccacctggggcctaggtacccactgggggcttcctgttaacctgggggctggtgtcattctggggcctaatgaccacctgggttgtattattcacctagggcctggtgtccacttggggcttgagtgtaaccttggacctggcacccacacaggacttgggtatcaaactggccccttggtgtccagttaagrcatcatgtgaacctggcgcctgagtgtccacttggggccaaatgactactgggggcctgaatgtcaacctagaatctgaggtttactaggggcctaggtatccacctggggcccaatgtccacctgagcctgggtgtcaacctggggcctgatgtaaacctctagttcagtgtccaccttgggcttgatgtcaacctggagcctga

SEQ ID NO: 352101 - DNA, 425 bp, Homo sapiens
ctgggtgtccacattaggcctgatgtccacctggggcctaggtacccactgggggcttcctgttaacctgggggctggtgtcattctggggcctaatgaccacctgggttgtattattcacctagggcctggtgtccacttggggcttgagtgtaaccttggacctggcacccacacaggacttgggtatcaaactggccccttggtgtccagttaaggcatcatgtgaacctggcgcctgagtgtccacwtggggccaaatgactactgggggcctgaatgtcaacctagaatctgaggtttactaggggcctaggtatccacctggggcccaatgtccacctgagcctgggtgtcaacctggggcctgatgtaaacctctagttcagtgtccaccttgggcttgatgtcaacctggagcctga

SEQ ID NO: 352102 - DNA, 425 bp, Homo sapiens
ctgggtgtccacattaggcctgatgtccacctggggcctaggtacccactgggggcttcctgttaacctgggggctggtgtcattctggggcctaatgaccacctgggttgtattattcacctagggcctggtgtccacttggggcttgagtgtaaccttggacctggcacccacacaggacttgggtatcaaactggccccttggtgtccagttaaggcatcatgtgaacctggcgcctgagtgtccacttgggkccaaatgactactgggggcctgaatgtcaacctagaatctgaggtttactaggggcctaggtatccacctggggcccaatgtccacctgagcctgggtgtcaacctggggcctgatgtaaacctctagttcagtgtccaccttgggcttgatgtcaacctggagcctga

SEQ ID NO: 352103 - DNA, 563 bp, Homo sapiens
gggacctagtgtgcacctgagaccaggggatgtacctggggcctggtgtctacctggtgcctaggtatccacttgaggcctaatgttcatctggaatctggtatccacctggggccttgtaattacctggggtctgggcatccacctagggcttgagtatcctcctggggccttgagttttactggggactcgtgtctgccttggacctgggtgtacatctgtggcctaatgtacaccttgagagtgatgtcaacctggggacagatgtcctcttggggtctgagtgtacacctggtgtctgatgtctgcctgaggacttgtgttcayctgagacctgatattcacctggggactgggcgtccacgaggggctgatgtccagctggacactggatatccacctggggcttaaggatccacccagaaactgatgtcaaactggggcctgatgcctacctgcggactaggtatccatgtgaggcttgatgttcatccgcagccagacgtccatctgatgcttgatgtccaccttagtcctgggtgtctactggagacctcatgtt

SEQ ID NO: 352104 - DNA, 454 bp, Homo sapiens
gggttgatgacataaactaaatataacctgaaaaaggttcaacattatgttttattttgacagtgctacccatgtgacttaacatgttaaatagtcctgtttacctctcttttgggtgcttcaagggcctctgtagtatcccaaakttaaaggtcaaaaaagacaattttgaagttgaaatttgattttgggaagcctattaaatatattaaaagtttaaacacttgatgttatgaaatagaattccaggtcaccgtaagtcattcatttacttaaaatcatgacttaaaaaagttttaaagggcaaaaatctttactcattgatagagggaagacatcttcacaaacgatctgcctcttgtttttcctttttttttttttttttggtagtttatttaaaaggcaaacaaatttttcattattttttaatattacctgaacatcttctttaaag

SEQ ID NO: 352105 - DNA, 454 bp, Homo sapiens
gggttgatgacataaactaaatataacctgaaaaaggttcaacattatgttttattttgacagtgctacccatgtgacttaacatgttaaatagtcctgtttacctctcttttgggtgcttcaagggcctctgtagtatcccaaatttaraggtcaaaaaagacaattttgaagttgaaatttgattttgggaagcctattaaatatattaaaagtttaaacacttgatgttatgaaatagaattccaggtcaccgtaagtcattcatttacttaaaatcatgacttaaaaaagttttaaagggcaaaaatctttactcattgatagagggaagacatcttcacaaacgatctgcctcttgtttttcctttttttttttttttttggtagtttatttaaaaggcaaacaaatttttcattattttttaatattacctgaacatcttctttaaag

SEQ ID NO: 352106 - DNA, 626 bp, Homo sapiens
tccagaaattaaggatcctatttttacctaaaatattggctttactcccaggttcccttcattaacttagccaatgatttttttttcctgcctaagcgtgcgagaaaaatgaaacaaaggggtagaacacaaaaatccctgtgaattttcaaaagccaaatgttacaatcttccaatattatcatttactaccactttccttctgacccagtcagatgtaggaggcctctaactggaactggattcaagccaattaactactggatcaaatctgatcctggacccggtcccttttctgttataacttctaaaacatccagccagtcatggctggatagcagtttggaacagaaatttgctcaaagaaactcagagctcaaaacacaaatccatggagctctgaaatccgagagaaaatttaccatgatcyccagctgctccgagagatcaaaggacacaagtgttacagaatcctgaggtgtcacttttctgcctgaaacctctggctggtggcacctttacctgtgttttgctcgggcccactgggttagttctgtccactcagctcatgctagtggtctggatcccacacctgccaagggcgagctgggtacagagcagtgaag

SEQ ID NO: 352107 - DNA, 614 bp, Homo sapiens
tgccagctccctgtgaggctgcagctggaccaggccgactgcaaacarcttccactgtgggtatcagggaatgcagtggcacccagaagcttggagatgcaggacctgcagagccccaaagaaggtgtcacagccctggttggaggagctcctaggtctgtgttccctgaagggacacagctcttctctccttctctcttctcttcttcttgcctgcaatttggcaagaaaggatagcgtttcagccctgtttatgttacacctctttcagccctgctagttggcaggtcctgagttcttgtcctgagtccaggaaaaatgaggtatgtggacaagtagaaggtgagcaaggtgaagaggtgctttattgagccacagtacagctcagaggagacctgcagtgggtagctcctttctgcaggcaggtcatcccaacgtctgttcagctctcagcagctgagaggagacgcacggtgggtagctgtgcccatagtgcccaggcgttcgagctgaggagggccttccggccactgctgagccactcttagccacacctcagcctccctcctgtgcttgtcagtgcccaaattctggagggggccgaggtggcaggg

SEQ ID NO: 352108 - DNA, 614 bp, Homo sapiens
tgccagctccctgtgaggctgcagctggaccaggccgactgcaaacagcttccactgtgggtatcagggaatgcagtggcacccagaagcttggagatgcaggacctgcagagccccaaagaaggtgtcacagccctggttggaggagctcctaggtctgtgttccctgaagggacacagctcttctctccttctctcttctcttcttcttgcctgcaatttggcaagaaaggatagcgtttcagccctgtttatgttacacctctttcagccctgctagttggcaggtcctgagttcttgtcctgagtccaggaaaaatgaggtatgtggacaagtagaaggtgagcaaggtgaagaggtgctttattgagccacagtacagctcagaggagacctgcagtgggtagctcctttctgcaggcaggtcatcccaacgtctgttcagctctcagcagctgagaggagacgcacggtgggtagctgtgcccatagtgcccaggcgttcgagctgaggagggccttccggccactgctgagccactcttagccacacctcagcctccctcctgtgcttgycagtgcccaaattctggagggggccgaggtggcaggg

SEQ ID NO: 352109 - DNA, 642 bp, Homo sapiens
ctcttctctccttctctcttctcttcttcttgcctgcaatttggcaagaaaggatagcgtttcagccctgtttatgttacacctctttcagccctgctagttggcaggtcctgagttcttgtcctgagtccaggaaaaatgaggtatgtggacaagtagaaggtgagcaaggtgaagaggtgctttattgagccacagtacagctcagaggagacctgcagtgggtagctcctttctgcaggcaggtcatcccaacgtctgttcagctctcagcagctgagaggagacgcacggtgggtagctgtgcccatagtgcccaggcgttcgagctgaggagggccttccggccactgctgagccactcttagccacacctcagcctccctcctgtgcttgtcagtgcccaaattctggagggggccgaggtggcagggggctggcatgtcarcactgccctgagcttgcacaaaccaggccaggttgtgactgtgcccaggtttggcctcaacttggatctgaatttggagtgggctctggaagcagagagatgccagggggcaggaccaggtacaactgagcctgcgggacaggggggcttgctgggcctctgagagtgcagagatgcctgggtttgcagtcatg

SEQ ID NO: 352110 - DNA, 616 bp, Homo sapiens
tcaggttccttccttgtacctcagcactctgggggtcattagaagccttagcaacactgctcaccacagtatagctccagaggccctagcagtcctgctcccacggatcccacttctgacaccatctattaaaagaaaatcttcagctgaattaaatttaaaggagcttaattgagcaatgaaggattcacgaatcaggcagcccccagaatcacagcagattcagtgagactccagcacagacacatggtggaagatttatagacaataaagggaacatgatgtacaaaaatctgaagtgaggagtgaggtctagaagcaactgggtccattacagttctcagcagtgaggtccagaaacaactggactggttacagtgctcagcatttgccttatttgaacacagctgaacactcagcagtgtgtgagtggcagaagtttggctgttgggattggccasgactcagctactgttttaggcacatactcctaagttaggttttcagtctttctacctattaagttaggttgcagtttgtccacagggactcaaatctagaagtacagagtccttcccaggccatatttagttcactgtaacagttcctattatga

SEQ ID NO: 352111 - DNA, 574 bp, Homo sapiens
ctggactggttacagtgctcagcatttgccttatttgaacacagctgaacactcagcagtgtgtgagtggcagaagtttggctgttgggattggccaggactcagctactgttttaggcrcatactcctaagttaggttttcagtctttctacctattaagttaggttgcagtttgtccacagggactcaaatctagaagtacagagtccttcccaggccatatttagttcactgtaacagttcctattatgacctcactgatagttctttttctctgaattctcctttcttctcaacagcttatccaaatgttccattggtccctgttcatcttgccctgcagttctccttgactgattcagccctttgtggtttgcagtcctgtttctctacagcttggacctcttcagtctttccatcataggtttaactctctgttgaatgcttctttgtagctatccaaatttaccttaagctcaaaaaattcgaagtgaaagccacatcctcttctcttccttatgtgtatggcattactaccatgcagccagtgacccaaaatgggatttcttctgg

SEQ ID NO: 352112 - DNA, 574 bp, Homo sapiens
ctggactggttacagtgctcagcatttgccttatttgaacacagctgaacactcagcagtgtgtgagtggcagaagtttggctgttgggattggccaggactcagctactgttttaggcacatactcctaagttaggttttcagtcttyctacctattaagttaggttgcagtttgtccacagggactcaaatctagaagtacagagtccttcccaggccatatttagttcactgtaacagttcctattatgacctcactgatagttctttttctctgaattctcctttcttctcaacagcttatccaaatgttccattggtccctgttcatcttgccctgcagttctccttgactgattcagccctttgtggtttgcagtcctgtttctctacagcttggacctcttcagtctttccatcataggtttaactctctgttgaatgcttctttgtagctatccaaatttaccttaagctcaaaaaattcgaagtgaaagccacatcctcttctcttccttatgtgtatggcattactaccatgcagccagtgacccaaaatgggatttcttctgg

SEQ ID NO: 352113 - DNA, 634 bp, Homo sapiens
cattacagttctcagcagtgaggtccagaaacaactggactggttacagtgctcagcatttgccttatttgaacacagctgaacactcagcagtgtgtgagtggcagaagtttggctgttgggattggccaggactcagctactgttttaggcacatactcctaagttaggttttcagtctttctacctattaagttaggttgcagtttgtccacagggactcaaatctagaagtacagagtccttcccaggccatatttagttcactgtaacagttcctattatgacctcactgayagttctttttctctgaattctcctttcttctcaacagcttatccaaatgttccattggtccctgttcatcttgccctgcagttctccttgactgattcagccctttgtggtttgcagtcctgtttctctacagcttggacctcttcagtctttccatcataggtttaactctctgttgaatgcttctttgtagctatccaaatttaccttaagctcaaaaaattcgaagtgaaagccacatcctcttctcttccttatgtgtatggcattactaccatgcagccagtgacccaaaatgggatttcttctgggcttttcttgcttagattcaggctca

SEQ ID NO: 352114 - DNA, 574 bp, Homo sapiens
ctggactggttacagtgctcagcatttgccttatttgaacacagctgaacactcagcagtgtgtgagtggcagaagtttggctgttgggattggccaggactcagctactgttttaggcacatactcctaagttaggttttcagtctttctacctattaagttaggttgcagtttgtccacagggactcaaatctagaagtacagagtccttcccaggccatatttagttcactgtaacagttcctattatgacctcactgatagttctttttctctgaattctcctttcttctcaacagcttatccaaatgttccattggtccctgttcatcytgccctgcagttctccttgactgattcagccctttgtggtttgcagtcctgtttctctacagcttggacctcttcagtctttccatcataggtttaactctctgttgaatgcttctttgtagctatccaaatttaccttaagctcaaaaaattcgaagtgaaagccacatcctcttctcttccttatgtgtatggcattactaccatgcagccagtgacccaaaatgggatttcttctgg

SEQ ID NO: 352115 - DNA, 574 bp, Homo sapiens
ctggactggttacagtgctcagcatttgccttatttgaacacagctgaacactcagcagtgtgtgagtggcagaagtttggctgttgggattggccaggactcagctactgttttaggcacatactcctaagttaggttttcagtctttctacctattaagttaggttgcagtttgtccacagggactcaaatctagaagtacagagtccttcccaggccatatttagttcactgtaacagttcctattatgacctcactgatagttctttttctctgaattctcctttcttctcaacagcttatccaaatgttccattggtccctgttcatctygccctgcagttctccttgactgattcagccctttgtggtttgcagtcctgtttctctacagcttggacctcttcagtctttccatcataggtttaactctctgttgaatgcttctttgtagctatccaaatttaccttaagctcaaaaaattcgaagtgaaagccacatcctcttctcttccttatgtgtatggcattactaccatgcagccagtgacccaaaatgggatttcttctgg

SEQ ID NO: 352116 - DNA, 540 bp, Homo sapiens
gttaggttttcagtctttctacctattaagttaggttgcagtttgtccacagggactcaaatctagaagtacagagtccttcccaggccatatttagttcactgtaacagttcctattatgacctcactgatagttctttttctctgaattctcctttcttctcaacagcttatccaaatgttccattggtccctgttcatcttgccctgcagttctccttgactgattcagccctttgtggtttgcagtcctgtttctctacagcttggacctcttcagtctttccatcataggtttaactctctgttgaatgcttctttgtagctatccaaatttaccttaagctcaaaaaattcgaagtgaaagccacatcctcttctcttccttatgtgtatggcattactaccatgcagccagtgacccaaaatgggatktcttctgggcttttcttgcttagattcaggctcatctggtgtcaagccttgttgcttttgtttccttgttcttttatttttatttatttttctttttttgagaca

SEQ ID NO: 352117 - DNA, 540 bp, Homo sapiens
gttaggttttcagtctttctacctattaagttaggttgcagtttgtccacagggactcaaatctagaagtacagagtccttcccaggccatatttagttcactgtaacagttcctattatgacctcactgatagttctttttctctgaattctcctttcttctcaacagcttatccaaatgttccattggtccctgttcatcttgccctgcagttctccttgactgattcagccctttgtggtttgcagtcctgtttctctacagcttggacctcttcagtctttccatcataggtttaactctctgttgaatgcttctttgtagctatccaaatttaccttaagctcaaaaaattcgaagtgaaagccacatcctcttctcttccttatgtgtatggcattactaccatgcagccagtgacccaaaatgggatttyttctgggcttttcttgcttagattcaggctcatctggtgtcaagccttgttgcttttgtttccttgttcttttatttttatttatttttctttttttgagaca

SEQ ID NO: 352118 - DNA, 558 bp, Homo sapiens
cacacagttgcagccaagctggattgtgtgaaagcacagcggggtggtgtgcagggtggctcactagtggttgggagkggatgttgctgaaggctcactagtggttgggagtcggtgttgctagagggtcaatgggggatgtcaatgcatgtagctagtcatggactggccgtgtggtttccatcatggggtctcaggggagtgggatttcctgcctggtgactggctttctcctggataagtgttctgttttctcagcctggcttctgaagtccccaaataccacctttgttaccttctgttggccaagcaagtcagtagtctgggcaaggtttaaggggaattggttctcacagagagaggagcaggaaagatgttgtcacctttagtctaccagaaatatgatttttataacaagtttgttccaaatacattccagttccccttgtgaatacttttttgacttacagggtatttcaaagtttattacttggttttcagacatttgaggcttttctggatatcaatttgttgttggtttctaatttaatttcaggt

SEQ ID NO: 352119 - DNA, 558 bp, Homo sapiens
cacacagttgcagccaagctggattgtgtgaaagcacagcggggtggtgtgcagggtggctcactagtggttgggagtggatgttgctgaaggctcactagtggttgggagtcggtgttgctagagggtcaatgggggatgtcaatgcatgtagctagtcatggactggccgtgtggtttccatcatggggtctcaggggagtgggatttcctgcctggtgactggctttctcctggataagtgttctgttttctcagcctggcttctgaagtccccaaataccacctttgtyaccttctgttggccaagcaagtcagtagtctgggcaaggtttaaggggaattggttctcacagagagaggagcaggaaagatgttgtcacctttagtctaccagaaatatgatttttataacaagtttgttccaaatacattccagttccccttgtgaatacttttttgacttacagggtatttcaaagtttattacttggttttcagacatttgaggcttttctggatatcaatttgttgttggtttctaatttaatttcaggt

SEQ ID NO: 352120 - DNA, 338 bp, Homo sapiens
gcagctgccaagggcgaccccgcgggggtggagygctgcctggcgcgcaggagcggagacctggatgccctggacaagcagcacaggtagcggggactcagcccggggtgggagggggtccccaggcccggcttccccactgcccctgggacggggcctttcagggctctgggcaccctcagagcagcggagccaaacggactgtcagctgttttccatccctcataattccatggctggagcagttggagaatttgagtgatttaactcacaaagttaagcatacacagtgttgttatttttaacatacacgttgaaaacatggtttatatacatta

SEQ ID NO: 352121 - DNA, 338 bp, Homo sapiens
gcagctgccaagggcgaccccgcgggggtggagcgctgcctggcgcgcaggagcggagacctggatgcccyggacaagcagcacaggtagcggggactcagcccggggtgggagggggtccccaggcccggcttccccactgcccctgggacggggcctttcagggctctgggcaccctcagagcagcggagccaaacggactgtcagctgttttccatccctcataattccatggctggagcagttggagaatttgagtgatttaactcacaaagttaagcatacacagtgttgttatttttaacatacacgttgaaaacatggtttatatacatta

SEQ ID NO: 352122 - DNA, 338 bp, Homo sapiens
gcagctgccaagggcgaccccgcgggggtggagcgctgcctggcgcgcaggagcggagacctggatgccctggacaagcagcacaggtagcggggactcagcccggggtgggagggggtccccaggccyggcttccccactgcccctgggacggggcctttcagggctctgggcaccctcagagcagcggagccaaacggactgtcagctgttttccatccctcataattccatggctggagcagttggagaatttgagtgatttaactcacaaagttaagcatacacagtgttgttatttttaacatacacgttgaaaacatggtttatatacatta

SEQ ID NO: 352123 - DNA, 338 bp, Homo sapiens
gcagctgccaagggcgaccccgcgggggtggagcgctgcctggcgcgcaggagcggagacctggatgccctggacaagcagcacaggtagcggggactcagcccggggtgggagggggtccccaggcccggcttccccactgcccctgggacggggcctttcagggctctgggcaccctcagagcagcggagccaaacggactstcagctgttttccatccctcataattccatggctggagcagttggagaatttgagtgatttaactcacaaagttaagcatacacagtgttgttatttttaacatacacgttgaaaacatggtttatatacatta

SEQ ID NO: 352124 - DNA, 520 bp, Homo sapiens
tatacatacaaacatactatggtcttgttttatcaaaaaatatgtacaaaatataaaatttgtaatttctgagcatttgtattttaagtaaagttcttttcctttttcttatctgtgattgctgcagtgagcatgtacaaaacttctagtaaagtttattaataaagraataatccttgggaagacaggaatatgaatcttacaatattaaaaataatttctcactttctattttttatcattattgagtgtattgttatcttctttgaacttttagcctcttcagaagtaaaaagggaatatttttatctgtttccagattttattatctatatattttattatgtacatatgtttttcttatgtattcattcaatttatgcaaacaatgatagattaatcatttcattttaattgtattcttaaataaaaataacatatattactattgcaaaaatattgctttataggagtttatttaaaaatattgaactccccaactgtatttttccattctttc

SEQ ID NO: 352125 - DNA, 561 bp, Homo sapiens
tgctgcagtgagcatgtacaaaacttctagtaaagtttattaataaagaaataatccttgggaagacaggaatatgaatcttacaatattaaaaataatttctyactttctattttttatcattattgagtgtattgttatcttctttgaacttttagcctcttcagaagtaaaaagggaatatttttatctgtttccagattttattatctatatattttattatgtacatatgtttttcttatgtattcattcaatttatgcaaacaatgatagattaatcatttcattttaattgtattcttaaataaaaataacatatattactattgcaaaaatattgctttataggagtttatttaaaaatattgaactccccaactgtatttttccattctttcattccatttattcatcaaacataacctgagtacctgttatgtagcagacatattctgctatctctcaggtcccttctatccttaaaaacttcatgtttacctgccctgcctgcacaagctgagagatttaaaataggaatattgggacttattctccttg

SEQ ID NO: 352126 - DNA, 561 bp, Homo sapiens
tgctgcagtgagcatgtacaaaacttctagtaaagtttattaataaagaaataatccttgggaagacaggaatatgaatcttacaatattaaaaataatttctcactttctatttttwatcattattgagtgtattgttatcttctttgaacttttagcctcttcagaagtaaaaagggaatatttttatctgtttccagattttattatctatatattttattatgtacatatgtttttcttatgtattcattcaatttatgcaaacaatgatagattaatcatttcattttaattgtattcttaaataaaaataacatatattactattgcaaaaatattgctttataggagtttatttaaaaatattgaactccccaactgtatttttccattctttcattccatttattcatcaaacataacctgagtacctgttatgtagcagacatattctgctatctctcaggtcccttctatccttaaaaacttcatgtttacctgccctgcctgcacaagctgagagatttaaaataggaatattgggacttattctccttg

SEQ ID NO: 352127 - DNA, 520 bp, Homo sapiens
tatacatacaaacatactatggtcttgttttatcaaaaaatatgtacaaaatataaaatttgtaatttctgagcatttgtattttaagtaaagttcttttcctttttcttatctgtgattgctgcagtgagcatgtacaaaacttctagtaaagtttattaataaagaaataatccttgggaagacaggaatatgaatcttacaatattaaaaataatttctcactttctattttttatcattattgagtgtattgttatcttctttgaacttttagcctcttcagaagtaaaaagggaatatttttatctgtttccagattttattatctatatattttattaygtacatatgtttttcttatgtattcattcaatttatgcaaacaatgatagattaatcatttcattttaattgtattcttaaataaaaataacatatattactattgcaaaaatattgctttataggagtttatttaaaaatattgaactccccaactgtatttttccattctttc

SEQ ID NO: 352128 - DNA, 561 bp, Homo sapiens
tgctgcagtgagcatgtacaaaacttctagtaaagtttattaataaagaaataatccttgggaagacaggaatatgaatcttacaatattaaaaataatttctcactttctattttttatcattattgagtgtattgttatcttctttgaacttttagcctcttcagaagtaaaaagggaatatttttatctgtttccagattttattatctatatattttattatgtacatatgtttttcttatgtattcattcaatttatgcaaacaatgatagattaatcatttcattttaattgtattcttaaataaaaataacatatattactattgcaaaaatattgctttataggmgtttatttaaaaatattgaactccccaactgtatttttccattctttcattccatttattcatcaaacataacctgagtacctgttatgtagcagacatattctgctatctctcaggtcccttctatccttaaaaacttcatgtttacctgccctgcctgcacaagctgagagatttaaaataggaatattgggacttattctccttg

SEQ ID NO: 352129 - DNA, 561 bp, Homo sapiens
tgctgcagtgagcatgtacaaaacttctagtaaagtttattaataaagaaataatccttgggaagacaggaatatgaatcttacaatattaaaaataatttctcactttctattttttatcattattgagtgtattgttatcttctttgaacttttagcctcttcagaagtaaaaagggaatatttttatctgtttccagattttattatctatatattttattatgtacatatgtttttcttatgtattcattcaatttatgcaaacaatgatagattaatcatttcattttaattgtattcttaaataaaaataacatatattactattgcaaaaatattgctttataggagtttatttaaaaatattgaactccccaactgtatttttccattctttcattccatttattcatcaaacataacctgagtacctgttatgtagcagacatattctgctatctctcaggtcccttctatccttaaaaacttcatgtttacctgmcctgcctgcacaagctgagagatttaaaataggaatattgggacttattctccttg

SEQ ID NO: 352130 - DNA, 415 bp, Homo sapiens
ctttaactgcccactcaaaagtttatcagtcttaaatactaatattaatcatgggaatgtcttatttccatatattctgtaagcataaatattgaataaaatgagccatatgtattcatttgaatcatgagtttcctttgtcttcaatttgtttgaaaatcaaggaattaatttgtttgaaaaatgcattattattatttcagtgttctatccccatagtacctttaagcaggyggacaagccagcagcctcacccactcaaggaagcccagatggccaggttccaacagcatgagtagctgccacctgatggctgatggagcagagtcctgaggaaaagcagatggcactggggccctaactctagggcagaataactgatgtactgtgactggcagcatgtgaggttggtgat

SEQ ID NO: 352131 - DNA, 593 bp, Homo sapiens
ccaggtttcagttatatatcttttgtttccctctaaagaatttcatttaacatttcttgcaagacaggtctcctggcaataagtttcttgaatttttatttttctgaggaaggccttaattctccttcacttttgaagggtggtttcagtgggtacagaaacttaggttggtgggtttttttctgtcaacagtttgaatttttcatttcactgtcttcttgctttcacagtttctgcawtgttgaatgcagttcttatctttgtgtctctgtaggtaaggtgttttctgccccacctctggtttctttcagagttttcctttatcttttatttcatatagtttgaaaattatatgtccaagtgtaggttgttggcatttattctgcctggtgttctcggagcttcctggatctttggtttggtgtctgacattaatactggaagttctcagacatggttgttgcagaactttcttctatttcttctcctcctggtattctcattactctgtttcaccttttgtagttgtcccacagtcttggatatcatcttctgttcttttcagtgtttcttttctttagttttcgaagttt

SEQ ID NO: 352132 - DNA, 593 bp, Homo sapiens
ccaggtttcagttatatatcttttgtttccctctaaagaatttcatttaacatttcttgcaagacaggtctcctggcaataagtttcttgaatttttatttttctgaggaaggccttaattctccttcacttttgaagggtggtttcagtgggtacagaaacttaggttggtgggtttttttctgtcaacagtttgaatttttcatttcactgtcttcttgctttcacagtttctgcattgttgaatgcagttcttatctttgtgtctctgtaggtaaggtgttttctgccccacctctggtttctttcagagttttcctttatcttttatttcatakagtttgaaaattatatgtccaagtgtaggttgttggcatttattctgcctggtgttctcggagcttcctggatctttggtttggtgtctgacattaatactggaagttctcagacatggttgttgcagaactttcttctatttcttctcctcctggtattctcattactctgtttcaccttttgtagttgtcccacagtcttggatatcatcttctgttcttttcagtgtttcttttctttagttttcgaagttt

SEQ ID NO: 352133 - DNA, 593 bp, Homo sapiens
ccaggtttcagttatatatcttttgtttccctctaaagaatttcatttaacatttcttgcaagacaggtctcctggcaataagtttcttgaatttttatttttctgaggaaggccttaattctccttcacttttgaagggtggtttcagtgggtacagaaacttaggttggtgggtttttttctgtcaacagtttgaatttttcatttcactgtcttcttgctttcacagtttctgcattgttgaatgcagttcttatctttgtgtctctgtaggtaaggtgttttctgccccacctctggtttctttcagagttttcctttatcttttatttcatatagtttgaaaattatatgtccaagtgtaggttgttggcatttattctgcctggtgttctcggagcttcctggatctttggtttggtgtctgacattaatactggaagttctcagamatggttgttgcagaactttcttctatttcttctcctcctggtattctcattactctgtttcaccttttgtagttgtcccacagtcttggatatcatcttctgttcttttcagtgtttcttttctttagttttcgaagttt

SEQ ID NO: 352134 - DNA, 593 bp, Homo sapiens
ccaggtttcagttatatatcttttgtttccctctaaagaatttcatttaacatttcttgcaagacaggtctcctggcaataagtttcttgaatttttatttttctgaggaaggccttaattctccttcacttttgaagggtggtttcagtgggtacagaaacttaggttggtgggtttttttctgtcaacagtttgaatttttcatttcactgtcttcttgctttcacagtttctgcattgttgaatgcagttcttatctttgtgtctctgtaggtaaggtgttttctgccccacctctggtttctttcagagttttcctttatcttttatttcatatagtttgaaaattatatgtccaagtgtaggttgttggcatttattctgcctggtgttctcggagcttcctggatctttggtttggtgtctgacattaatactggaagttctcagacatggttgttgcagaactttcttctatttcttctcctcctggtattctcattactctstttcaccttttgtagttgtcccacagtcttggatatcatcttctgttcttttcagtgtttcttttctttagttttcgaagttt

SEQ ID NO: 352135 - DNA, 545 bp, Homo sapiens
gaatttttcatttcactgtcttcttgctttcacagtttctgcattgttgaatgcagttcttatctttgtgtctctgtaggtaaggtgttttctgccccacctctggtttctttcagagttttcctttatcttttatttcatatagtttgaaaattatatgtccaagtgtaggttgttggcatttattctgcctggtgttctcggagcttcctggatctttggtttggtgtctgacattaatactggaagttctcagacatggttgttgcagaactttcttctatttcttctcctcctggtattctcattactctgtttcaccttttgtagttgtcccacagtcttggatatcatcttctgttcttttcagtgtttcttttctttagttttcgaagtttctgatgataaatcctcaagctcagagattcttwactcagctgagtccagtctactaataagccatcagaggtattcttcagttatttaccacattttttaccactacattatgttgaagtttcttacgatgtctgtctttctgatta

SEQ ID NO: 352136 - DNA, 562 bp, Homo sapiens
ctgtctttctgattacattacccatctacacttgaatgctgtctacttcattcattaggcccttagcatattctccagaggtttaaaaaaaattccaaaatcatatctttgtctgcttctgaagcttgctctgttgacacaaattgtatttttttctttttttggattttagtatgccttgcaattttttccctttattctcatgmatgaagcacccactaaaggtgactgctgttagtatacctttagtaatgcggtgatgaggtgacagggcaggtgatgctctcttagtctctttaggctactataacaaaatactttagactgagtaattcataaacaacagagattattgctcacagatctggaggctggaaagtccaagactaaaggggcaggatatttagtgtttggtgaaggtcaaacattcagacactcgcaacgactatagtgacagcagcagtcttcaggaatcctatgtgagggaaaaacattcagaccacagcaggagtgctcgggaatcctatgtgagggacaaacattcagatcacagcaggagtgt

SEQ ID NO: 352137 - DNA, 562 bp, Homo sapiens
ctgtctttctgattacattacccatctacacttgaatgctgtctacttcattcattaggcccttagcatattctccagaggtttaaaaaaaattccaaaatcatatctttgtctgcttctgaagcttgctctgttgacacaaattgtatttttttctttttttggattttagtatgccttgcaattttttccctttattctcatgaatgaagcacccactaaaggtgactgctgttagtatasctttagtaatgcggtgatgaggtgacagggcaggtgatgctctcttagtctctttaggctactataacaaaatactttagactgagtaattcataaacaacagagattattgctcacagatctggaggctggaaagtccaagactaaaggggcaggatatttagtgtttggtgaaggtcaaacattcagacactcgcaacgactatagtgacagcagcagtcttcaggaatcctatgtgagggaaaaacattcagaccacagcaggagtgctcgggaatcctatgtgagggacaaacattcagatcacagcaggagtgt

SEQ ID NO: 352138 - DNA, 562 bp, Homo sapiens
ctgtctttctgattacattacccatctacacttgaatgctgtctacttcattcattaggcccttagcatattctccagaggtttaaaaaaaattccaaaatcatatctttgtctgcttctgaagcttgctctgttgacacaaattgtatttttttctttttttggattttagtatgccttgcaattttttccctttattctcatgaatgaagcacccactaaaggtgactgctgttagtatacctttagtaatgcggtgatgaggtgacagggcaggtgatgctctcttagtctctttaggctactataacaaaatactttagactgagtaattcataaacaacagagattattgctcacagatctggaggctggaaagtccaagactaaaggggcagratatttagtgtttggtgaaggtcaaacattcagacactcgcaacgactatagtgacagcagcagtcttcaggaatcctatgtgagggaaaaacattcagaccacagcaggagtgctcgggaatcctatgtgagggacaaacattcagatcacagcaggagtgt

SEQ ID NO: 352139 - DNA, 429 bp, Homo sapiens
tccttctgtgcctttgttctattctctctccacttctcatccagatgccaagccctcttccatcaattgtcttaaaactccaaatggtcagttgcctctaaactttcctctgtcccatgaacaagttactcaggcaaacgtagaatttaagcttggaccaagctgaatcaagagctgcaattaaaggtttccctaagcccagaggggaccagcgaatacttatagaagattttggatttcctctgaatgcataaggctctgggtaacctrattctatagaccaaatgttattgtccccctcaaattcaagtgctgatatctaattccctatgtgatatttggaggtagggccttggggaatgattagctcatgaaggcaggggccacaggagtgggattaatagcccctattgaaggcaccatagagag

SEQ ID NO: 352140 - DNA, 468 bp, Homo sapiens
aaaactgctaacccaagtaaaacaaaaattgaatatcaaggaaatattttccagatttgcatgctaaatcaccaatattgaaattgtttagatatataatttaaataaactccatggtctaagccaaattacctataactcatcagttaccagtgccatgcacctaatttgaagaaacagctggtattcaagaggatgtaagtctaatgttaattaagcacggacttatgaagaaccaggatggccacctttccgtcttaagtccttaaaacttttgttattaaaagttctgcattccataactcatcatggaaagagaaaatgatccaaattaaatatattgctgtggtgatctctaaattgctaaaatagtttataatcaatgtttggtttgtcraacctatattcctaggaaaacaatcaaaacttcaggtgcatttggttacctgatgggccatttaaacattt

SEQ ID NO: 352141 - DNA, 468 bp, Homo sapiens
aaaactgctaacccaagtaaaacaaaaattgaatatcaaggaaatattttccagatttgcatgctaaatcaccaatattgaaattgtttagatatataatttaaataaactccatggtctaagccaaattacctataactcatcagttaccagtgccatgcacctaatttgaagaaacagctggtattcaagaggatgtaagtctaatgttaattaagcacggacttatgaagaaccaggatggccacctttccgtcttaagtccttaaaacttttgttattaaaagttctgcattccataactcatcatggaaagagaaaatgatccaaattaaatatattgctgtggtgatctctaaattgctaaaatagtttataatcaatgtttggtttgtcaaacctatattcctaggaaaacaatcaaaacttcaggtrcatttggttacctgatgggccatttaaacattt

SEQ ID NO: 352142 - DNA, 616 bp, Homo sapiens
tatataatttaaataaactccatggtctaagccaaattacctataactcatcagttaccagtgccatgcacctaatttgaagaaacagctggtattcaagaggatgtaagtctaatgttaattaagcacggacttatgaagaaccaggatggccacctttccgtcttaagtccttaaaacttttgttattaaaagttctgcattccataactcatcatggaaagagaaaatgatccaaattaaatatattgctgtggtgatctctaaattgctaaaatagtttataatcaatgtttggtttgtcaaacctatattcctaggaaaacaatcaaaacttcaggtgcatttggttacctgatgggccatttaaacattttataaagggatttcattcagttgtcattttcagtgcatgttttctgattgtaaaaaagctcttccatgcaagagggttgatgttaaaacagtagattattatgctgaagtgtattttcaccagmtaaagaaagacttttatggttcacagaggacagccaaccccttcacaatctagaatctgatgactggatcttctgagaacatcagaggactgcccttgccattcacatgacagcaa

SEQ ID NO: 352143 - DNA, 616 bp, Homo sapiens
tatataatttaaataaactccatggtctaagccaaattacctataactcatcagttaccagtgccatgcacctaatttgaagaaacagctggtattcaagaggatgtaagtctaatgttaattaagcacggacttatgaagaaccaggatggccacctttccgtcttaagtccttaaaacttttgttattaaaagttctgcattccataactcatcatggaaagagaaaatgatccaaattaaatatattgctgtggtgatctctaaattgctaaaatagtttataatcaatgtttggtttgtcaaacctatattcctaggaaaacaatcaaaacttcaggtgcatttggttacctgatgggccatttaaacattttataaagggatttcattcagttgtcattttcagtgcatgttttctgattgtaaaaaagctcttccatgcaagagggttgatgttaaaacagtagattattatgctgaagtgtattttcaccagataaagaaagmcttttatggttcacagaggacagccaaccccttcacaatctagaatctgatgactggatcttctgagaacatcagaggactgcccttgccattcacatgacagcaa

SEQ ID NO: 352144 - DNA, 611 bp, Homo sapiens
cagaacaaaccaaaccaaaatggagtcactcatgytaaatggaacataatcaaactaagactttaaggaaacacataaatcctagaacaaaccaggttttgtttttctcctgtaaacaggatgttccagcataagaagacaccttctactcaagtccttgttccaccttttcaaatctcactgttctatttcccagtgggtttctaaaccaaataagtacatttgcaagggtaatagtgacaccagtgactgaagttttggccaatctctcaaaattgagaaaataaccaaagggaaggcattgttaaagtgaactaagtatgtcctgagaaggactccataattatatatatgagtccttgtggatgacctgcaacctaccttaataggtaaacaagaatgaaaacctaacttgagtgtatgcacctcaaacaacagctacatcttggtcaatcccaatggccaaacttcaaccactcaggcactgccaaatgttcaaactgtgctcaaacaaggcaaacgctgagttgtttctgtacctcacttccgatttcggtatgccacttcccttttgtctacaaatcttcttccaccacatgactgtgctggag

SEQ ID NO: 352145 - DNA, 611 bp, Homo sapiens
cagaacaaaccaaaccaaaatggagtcactcatgttaaatggaacataatcaaactaagactttaaggaaacacataaatcctagaacaaaccaggttttgtttttctcctgtaaacaggatgttccagcataagaagacaccttctactcaagtccttgttccaccttttcaaatctcactgttctatttcccagtgggtttctaaaccaaataagtacatttgcaagggtaataktgacaccagtgactgaagttttggccaatctctcaaaattgagaaaataaccaaagggaaggcattgttaaagtgaactaagtatgtcctgagaaggactccataattatatatatgagtccttgtggatgacctgcaacctaccttaataggtaaacaagaatgaaaacctaacttgagtgtatgcacctcaaacaacagctacatcttggtcaatcccaatggccaaacttcaaccactcaggcactgccaaatgttcaaactgtgctcaaacaaggcaaacgctgagttgtttctgtacctcacttccgatttcggtatgccacttcccttttgtctacaaatcttcttccaccacatgactgtgctggag

SEQ ID NO: 352146 - DNA, 611 bp, Homo sapiens
cagaacaaaccaaaccaaaatggagtcactcatgttaaatggaacataatcaaactaagactttaaggaaacacataaatcctagaacaaaccaggttttgtttttctcctgtaaacaggatgttccagcataagaagacaccttctactcaagtccttgttccaccttttcaaatctcactgttctatttcccagtgggtttctaaaccaaataagtacatttgcaagggtaatagtgacaccagtgactgaagttttggccaatctctcaaaattgagaaaataaccaaagggaaggcattgttaaagtgaactaagtatgtcctgagaaggactccataattatatatatgagtccttgtggatgacctgcaacctaccttaataggtaaacaagaatgaaaacctaacttgagtgtatgcacctcaaacaacagctacatcttggycaatcccaatggccaaacttcaaccactcaggcactgccaaatgttcaaactgtgctcaaacaaggcaaacgctgagttgtttctgtacctcacttccgatttcggtatgccacttcccttttgtctacaaatcttcttccaccacatgactgtgctggag

SEQ ID NO: 352147 - DNA, 611 bp, Homo sapiens
cagaacaaaccaaaccaaaatggagtcactcatgttaaatggaacataatcaaactaagactttaaggaaacacataaatcctagaacaaaccaggttttgtttttctcctgtaaacaggatgttccagcataagaagacaccttctactcaagtccttgttccaccttttcaaatctcactgttctatttcccagtgggtttctaaaccaaataagtacatttgcaagggtaatagtgacaccagtgactgaagttttggccaatctctcaaaattgagaaaataaccaaagggaaggcattgttaaagtgaactaagtatgtcctgagaaggactccataattatatatatgagtccttgtggatgacctgcaacctaccttaataggtaaacaagaatgaaaacctaacttgagtgtatgcacctcaaacaacagctacatcttggtcaatcccaatggccaaacttcaaccamtcaggcactgccaaatgttcaaactgtgctcaaacaaggcaaacgctgagttgtttctgtacctcacttccgatttcggtatgccacttcccttttgtctacaaatcttcttccaccacatgactgtgctggag

SEQ ID NO: 352148 - DNA, 548 bp, Homo sapiens
gtctttttaagttttttgtctgttttttcttctgtaagtttattgcagctggaatcccccctcccctctctaaaccaatgtataaaagaaaatctagcccattctttagggccgagagtatttcctgtgttagccgtctctcagtcaccagctaataaaggactcctgaattcgtctcaaagtgtggcatttctctstaactcgtttgggtacgacagtttcaactatggtagaagactcgagtaagacaaatacagcccccctaaatttgactattatttaggttaatggtgagtttagaagaaataagttaagactacacagagtgggctaaattgcaaataaacactgaaaatatttcccagaaaatatgactttgaacaggctgctgcacaccctgcatgtagagataaactaagaaaaatgtgtggagagttatttaaggacctgtggttaactcagtcctcaagatgttctgggtttcatccatgagtcaaggaggacctcccaaaagctgtttgggaccacactctttgagcaaggagcat

SEQ ID NO: 352149 - DNA, 548 bp, Homo sapiens
gtctttttaagttttttgtctgttttttcttctgtaagtttattgcagctggaatcccccctcccctctctaaaccaatgtataaaagaaaatctagcccattctttagggccgagagtatttcctgtgttagccgtctctcagtcaccagctaataaaggactcctgaattcgtctcaaagtgtggcatttctctgtaactcgyttgggtacgacagtttcaactatggtagaagactcgagtaagacaaatacagcccccctaaatttgactattatttaggttaatggtgagtttagaagaaataagttaagactacacagagtgggctaaattgcaaataaacactgaaaatatttcccagaaaatatgactttgaacaggctgctgcacaccctgcatgtagagataaactaagaaaaatgtgtggagagttatttaaggacctgtggttaactcagtcctcaagatgttctgggtttcatccatgagtcaaggaggacctcccaaaagctgtttgggaccacactctttgagcaaggagcat

SEQ ID NO: 352150 - DNA, 548 bp, Homo sapiens
gtctttttaagttttttgtctgttttttcttctgtaagtttattgcagctggaatcccccctcccctctctaaaccaatgtataaaagaaaatctagcccattctttagggccgagagtatttcctgtgttagccgtctctcagtcaccagctaataaaggactcctgaattcgtctcaaagtgtggcatttctctgtaactcgtttgggtacgacagtttcaactatggtagaagactcgagtaagacaaatacagcccccctaaatttgactattatttaggttaatggtgagtttagaagaaataagttaagactacacagagtgggctaaattgcaaataaacactgaaaatatttcccagaaaatatgactttgaacaggctgctgcacaccctgcatgtagagataaactaagaaaaatgtgtggagagttatttaaggacctgtggttaactcagtcctcaagatgttcygggtttcatccatgagtcaaggaggacctcccaaaagctgtttgggaccacactctttgagcaaggagcat

SEQ ID NO: 352151 - DNA, 632 bp, Homo sapiens
acgtttcatccatccatccatcaatcaaatctacctatctttatttatttattgggcgaaatacctgaactttgcctttccttccctgatttctgccacaaactaggcaaggagttctgcctaggggtttttcagagctccggctaccaccgaggttcctaacagggaaattgccagcttgaatgcttggggttgatgtgggagtgcgtgtgaaacgggtgtggggtgaaagggcagtgaactttgtaggtgggtagatgggggtgtgaagggctttcaggtaagaggcacagaggaaactgggagaggcagcgaaagcacttcacgcctcagatmaccagaagatgctcccaccagcaccgtgacagtttgccagtgccatggcaacacaggaagtccccaccccttgccatggaaacagctggaagttactgcccatttctagctatttctgagtaacccgccccttaattagcatgtcattaaaagtgaattataaaaatgactacaagccacccctaggctgctactctgggagcacaacccacagagggctccctgccctgcaggagcggacgcaggggctgtacaccgccaatggtctccatagagctgctttattccaccacagg

SEQ ID NO: 352152 - DNA, 632 bp, Homo sapiens
acgtttcatccatccatccatcaatcaaatctacctatctttatttatttattgggcgaaatacctgaactttgcctttccttccctgatttctgccacaaactaggcaaggagttctgcctaggggtttttcagagctccggctaccaccgaggttcctaacagggaaattgccagcttgaatgcttggggttgatgtgggagtgcgtgtgaaacgggtgtggggtgaaagggcagtgaactttgtaggtgggtagatgggggtgtgaagggctttcaggtaagaggcacagaggaaactgggagaggcagcgaaagcacttcacgcctcagatcaccagaagatgctcccaccagcrccgtgacagtttgccagtgccatggcaacacaggaagtccccaccccttgccatggaaacagctggaagttactgcccatttctagctatttctgagtaacccgccccttaattagcatgtcattaaaagtgaattataaaaatgactacaagccacccctaggctgctactctgggagcacaacccacagagggctccctgccctgcaggagcggacgcaggggctgtacaccgccaatggtctccatagagctgctttattccaccacagg

SEQ ID NO: 352153 - DNA, 632 bp, Homo sapiens
acgtttcatccatccatccatcaatcaaatctacctatctttatttatttattgggcgaaatacctgaactttgcctttccttccctgatttctgccacaaactaggcaaggagttctgcctaggggtttttcagagctccggctaccaccgaggttcctaacagggaaattgccagcttgaatgcttggggttgatgtgggagtgcgtgtgaaacgggtgtggggtgaaagggcagtgaactttgtaggtgggtagatgggggtgtgaagggctttcaggtaagaggcacagaggaaactgggagaggcagcgaaagcacttcacgcctcagatcaccagaagatgctcccaccagcaccrtgacagtttgccagtgccatggcaacacaggaagtccccaccccttgccatggaaacagctggaagttactgcccatttctagctatttctgagtaacccgccccttaattagcatgtcattaaaagtgaattataaaaatgactacaagccacccctaggctgctactctgggagcacaacccacagagggctccctgccctgcaggagcggacgcaggggctgtacaccgccaatggtctccatagagctgctttattccaccacagg

SEQ ID NO: 352154 - DNA, 599 bp, Homo sapiens
cacatgtggattttgatgtcctagtcaaagtgcaggtgaacaacacacagtttatttgatgttctctaatgaaaaaagaccctctcagcccccttcagctgcagtataacttttctacacatgctcagatttccccatgcaagcacacacacaaagggtcacagaatggcacatgtgcaagctggacaagccaatggcaggatccccacagatgggacctaagtgcatgactcgttgkgtatttttcttattctctgctctggggggttagcatactgaaaatgtcaataaggcctgtagatatccctgcgagcagcaatgataaggaaaagtagaaacacttagaacacagaaagtcaagctgttggagaaattggactgtagtgtaaaggtatagatgacatggtgaaaatgtgtgatagagatattgaagatatttaaggactagagctacctgcattcataacagaacaagaggtcatgtcagtttataaaattaaagagagacttccaagacaaaagcccttgataatgaggcagatgactctggagaaacattataaaaaaccatctggcagaatgcctcctcagcctcagag

SEQ ID NO: 352155 - DNA, 599 bp, Homo sapiens
cacatgtggattttgatgtcctagtcaaagtgcaggtgaacaacacacagtttatttgatgttctctaatgaaaaaagaccctctcagcccccttcagctgcagtataacttttctacacatgctcagatttccccatgcaagcacacacacaaagggtcacagaatggcacatgtgcaagctggacaagccaatggcaggatccccacagatgggacctaagtgcatgactcgttgggtatttttcttattctctgctctgkggggttagcatactgaaaatgtcaataaggcctgtagatatccctgcgagcagcaatgataaggaaaagtagaaacacttagaacacagaaagtcaagctgttggagaaattggactgtagtgtaaaggtatagatgacatggtgaaaatgtgtgatagagatattgaagatatttaaggactagagctacctgcattcataacagaacaagaggtcatgtcagtttataaaattaaagagagacttccaagacaaaagcccttgataatgaggcagatgactctggagaaacattataaaaaaccatctggcagaatgcctcctcagcctcagag

SEQ ID NO: 352156 - DNA, 599 bp, Homo sapiens
cacatgtggattttgatgtcctagtcaaagtgcaggtgaacaacacacagtttatttgatgttctctaatgaaaaaagaccctctcagcccccttcagctgcagtataacttttctacacatgctcagatttccccatgcaagcacacacacaaagggtcacagaatggcacatgtgcaagctggacaagccaatggcaggatccccacagatgggacctaagtgcatgactcgttgggtatttttcttattctctgctctggggkgttagcatactgaaaatgtcaataaggcctgtagatatccctgcgagcagcaatgataaggaaaagtagaaacacttagaacacagaaagtcaagctgttggagaaattggactgtagtgtaaaggtatagatgacatggtgaaaatgtgtgatagagatattgaagatatttaaggactagagctacctgcattcataacagaacaagaggtcatgtcagtttataaaattaaagagagacttccaagacaaaagcccttgataatgaggcagatgactctggagaaacattataaaaaaccatctggcagaatgcctcctcagcctcagag

SEQ ID NO: 352157 - DNA, 599 bp, Homo sapiens
cacatgtggattttgatgtcctagtcaaagtgcaggtgaacaacacacagtttatttgatgttctctaatgaaaaaagaccctctcagcccccttcagctgcagtataacttttctacacatgctcagatttccccatgcaagcacacacacaaagggtcacagaatggcacatgtgcaagctggacaagccaatggcaggatccccacagatgggacctaagtgcatgactcgttgggtatttttcttattctctgctctggggggttagcatactgaaaatgtcaataaggcctgtagatatccctgcgagcagcaatgataaggaaaagtagaaacacttagaacacagaaagtcaagctgttggagaaattggactgtagtgtaaaggtatagatgacatggtgaaaatgtgtgatagagatattgaagatattkaaggactagagctacctgcattcataacagaacaagaggtcatgtcagtttataaaattaaagagagacttccaagacaaaagcccttgataatgaggcagatgactctggagaaacattataaaaaaccatctggcagaatgcctcctcagcctcagag

SEQ ID NO: 352158 - DNA, 528 bp, Homo sapiens
aggtatagatgacatggtgaaaatgtgtgatagagatattgaagatatttaaggactagagctacctgcattcataacagaacaagaggtcaygtcagtttataaaattaaagagagacttccaagacaaaagcccttgataatgaggcagatgactctggagaaacattataaaaaaccatctggcagaatgcctcctcagcctcagaggactcacctcctagttgctcaactcctgatatttcttctcacctaaaaaaagaaaaaaaatacaatgtacagtaaccttttaatcaaaacgcagccttgtaggtggagcctgaaagcttgccattgtttatacagctgtttaacagctgatgcaggtattctggtgatgctactgtgttgcttattattttttactgtattaatggcatgtcatatttttacttatgtgtgaataattgtgtgaaaatgattgctcatcagtagcatataaattcagagtcagaaatgatggtcagtgatgtcagacagccacagatt

SEQ ID NO: 352159 - DNA, 602 bp, Homo sapiens
tacgtatgcaatataagataatttcagagaaactgcataacacaaacaagcaaaatgaataatttaaaaaatcatattctcacctacccagagatagtcacacacaatacctagttgtatacattttcagacaatttttctggcaaaacattccaaaatttcctctttagctatttttatcctttttaataatgtatattttaatttttttcttgttatttctcaaattctctagtttagttttttcacctttgaccccttttattttccatattataattttgtgacacatttttacccttctattagttttctcacactgtttttgtttcttctagtttttaaaaatagtctgttattcttttaactaagtttttcattcactttgctttttattgtttacagggttcttattccttaattcttttcattctaggtttatgaatgacccacaaatatggagaaatactccctaaacagggatgacagggggctcatcccacaccagtccttcrtgatcctcatagcagggatcatatctcccctcaatgctgaatcacctaaaatgtatgtaaagcaagaaagaaaaactataaactgaa

SEQ ID NO: 352160 - DNA, 524 bp, Homo sapiens
cacttctatcaacttttccaagtgagtaaactgagaatcaagatgcgattggtctttacacggcaaattaccgacttttggacttttcctatataagcacaaagcagctggcttccatactttatgagaccacatatcagtgcytaacattccaaaccacaacaacaagaagcaaagaaaaagtcccaccaatagaataggcttttagagaactgtcttctctctggtgatgtctgggctgatttcaatctgaatcttttctgtgctacaatatatgtgaccagactctggaatgtagtcacttttaaacttagtcattaatattgatgccatgaaattcttcagactgtgaacctgtgggacaggtcctattttctctagagtacccatcacatttgtggcatttgttcaatacaaattattaataaattatcataactctttcaaaggaaagacatggggttgttatcttttgctagaagacccttatttatatcttacaaaatatcatactagttaagacc

SEQ ID NO: 352161 - DNA, 524 bp, Homo sapiens
cacttctatcaacttttccaagtgagtaaactgagaatcaagatgcgattggtctttacacggcaaattaccgacttttggacttttcctatataagcacaaagcagctggcttccatactttatgagaccacatatcagtgcctaacattccaaaccacaacaacaagaagcaaagaaaaagtcccaccaatagaataggcttttagagaactgtcttctctctggtgatgtctgggctgatttcaatctgaatcttttctgtgctacaatatatgtgaccagactctggaatgtagtcacttttaaacttagtcattaatattgatgccatgaaattcttcagactgtgaacctgtgggacaggtcctattttctctagagtacccatcacatttgtggcatttgttcaatacaaattattaataaattatcataactctttcaaaggaaagacatggkgttgttatcttttgctagaagacccttatttatatcttacaaaatatcatactagttaagacc

SEQ ID NO: 352162 - DNA, 496 bp, Homo sapiens
aaaactacatatatttacttatctatatatatgtacacatataagcaaacacacactacaaaaatttgacttcctacatataaaggaaaagaacatctaagccacaaaaaataacaatttggtggtggtgacagaaaaatctcctttgcttgtggaaaggccattacagatcaatagttgaacagctaatatgtatacagtgcttacgaagtgccaggctcaatctaagtatttttacatatattaacttactgaattctcacaacagctttattttactttgtttttatttttttaggttcaggttmttactctgttgcccaggccagagtgcagtgacacaatcatagctcactgcagccctgaactcctggcctcaacttcaagccatcctcctgcctcagcctccctagtagctgggactacaggtgcacactactacactgcactaattttttttttttgatagacacaagatctagctttgctgcctagg

SEQ ID NO: 352163 - DNA, 646 bp, Homo sapiens
acagtgtaaattataccaaaacatccctctaacactttttaatcattaagtgtttattaagaaaataatctgtacccagttccacactgggaggtattttctcttgtggcatttttttgtcttacctaatgttgtattccctatggataaggatttaataacagatcctccatcttaggtggtcatacaattgctattttctgcagtattaaaaaacctctttcactacaagacaagctcaactgtaggactgcctgagaacatgaacccagagagcaatttaacagagtgatttttgtgtatatgcttgtatgccagagagatgggataaaaacggacggccttgtatgatcttctccattaaactgctttgctaatctctttcctcttaggttgtataagtaaatgttctgattgtgtcttttctcctcaaatcctcccttatttgctgccgctaactggtcactcctttacagagaggtggctcctaagatctaactactgctgagygcaagaaatttcttcattcaaccctagctccctataggatataagctgagactcatggggatcagagaccataaacaagataagatgtatttgtagagatgatccctagctgcagtaaacttttccataagacctc

SEQ ID NO: 352164 - DNA, 479 bp, Homo sapiens
cccattacacagaacctagggtgcctccttcctgtaccacgtacttacccacctagagcactctacatattcggtgtttgttttatttttatgtagtatttttattcatattctagatccatactagctttgggtaaattacacaaagttgtgtaactctctgtgcttcagtttatacatctgaaaaaatggaataataataattgtggattaaacaaattaatatatacacatgaaaagtgtctagaatacagcaagtgaccaaaaaaatgtttttgttcttaatgttgttgttgcatggtatttcccttgccaggaattctcagctttttaaaacatatggaccatgtctttttttcttttttaatttccagcctttagcacaaagcctggaacacagytgataaatagaaagttttgaggcaaggtgatggtaaacccagtattgtattgattactacaattctcaggactgagac

SEQ ID NO: 352165 - DNA, 560 bp, Homo sapiens
aatttcttatcaaattaaaaatatgaacatcagcccatcaaacaagtctctatagccccctaagtgtcatagagagatgttagtattggcaagaaaagtkcatgaagtctattacttctgccaaaattgcctggaatttcctggcattccatttcaacagaatatcagtttaacagtatggctgaccaatgctcaaccaggcaagggtcttaagagttaatatttattataatatccacacaattaagacaacatataactctaaagtaattttatacatacaaaaatacttgcaaactaatatgtttatcaatttttttcttctctttttccccttcactttttaaataacactacttatgtggccttgagaaatttgtttaacttttctgagatttggtttctcatccacaaaatggggataatattatcataataaatgtttaccatgagaatcgggtaagtatgttgcttagaacagctcaacaagtgctccataaatggtagttcctgatataactaatagatactgatgacagcaatatgcaattaagaggcag

SEQ ID NO: 352166 - DNA, 579 bp, Homo sapiens
tgagtttaataatctcaatgkgcatttaataatctataaaagtggtatttgaacccaggtaatctggcttaaaactcacatgcataactgctactacacttttaaagattacgacagttgatgtttttaagatgccaacatttggagaaagctgaatagattcagccatgtcattcgttcattgtttgaataaatattaataaagccagaaactatagatgttcctccacttatgatggggttacatcctgataagcccatcattaagccaaaaatatcaaaagtcaaaatgcatttaatacccaaataaacccatcatagagtcaaaaaaaaaagtataaattgaaccatcatgagttgggaaccattaatatgctcttttaggagcaggacatagacgtgaacaaaacagataagggacctgactactgtggcttatattccaccagagtgagaaagataataagcaaataacaaataagataatttcaaataagaaaaagcggtacaaggaaaatgtgatgaaaagaggaaaactatttttggtaggatgaccagggaaagtctttcagaaaaggt

SEQ ID NO: 352167 - DNA, 556 bp, Homo sapiens
aaaagccaggcacataaacacataagcatatttaatacagaaacaattcaaacataatataaaggtttaaactttatgtttaaaacattggattcttagagtggtattcaattccatactatgaaataaagcataacatatcagaactatttttactgcctgaacttttagaactatttaagagtctaataagtcttggatgcagcaagtaggaacctcaaaaggtttgcttttctttatcagargattcgttcttttttttttttttttttttgagatgaagtcttgcccagtggcccaggctggagggcagtggtgtgatctcagctcactgcaacctccgcctcctaggttcaagcaattctcctcctgagtagctaggattacaggtgtgcaccaccacccccagctaatttttgtatttttagtagagacggggtttcaccatgttggtcaggctggtctcgttcttcagaagtgggtgagtaggcaagcacactttttctctcttgactcttgcatagaattgacttttggtttaatctgtccagtgcaa

SEQ ID NO: 352168 - DNA, 598 bp, Homo sapiens
atcataataagtaatggtgaaagacagtgcattatccttaagatgggggtgaagaaaaggatatctttttcagcatatctatttaaaaattcatctatacattcaaagtaatctgaatcaaaattccaacttttgtagatgttaagctgattcttaaaattgtataaatatttagggcaaaggaactagaatagccaaattaagagagagtgacatcagcaagagagccaatkaattagaagcccctagtgcccattcccctcacaaagacatccagaacaatgaataaacagcgatattttcatgaaaataactgagggagagtgctggagtgcatctgaggcataacaaaaaccctggtaagcacagaaactagggatagacacacagagaacagaaggaaattctgatccttcaccaccccatcccccaaatgggatcagctggaaactaggagaaacctctctctacaatgaggaggtaagcaaggggagcctagcaacccccatcaacacattggacacctagagaactcaccaatggggtcccctgcagtgctcacaggcagtaagcccaactgaggtagctgcctggagca

SEQ ID NO: 352169 - DNA, 334 bp, Homo sapiens
aactggcacactaaaattaactacaggtgaaattcttaatctatgaaagccacactagaaagtttgaaagagatgattgttccaccagatgcataagcatgaatccagggacacaataaacatgaaaaagcaaggaaatatgayagcaccagaggaacatcgtaactgtgtagtaagagaacccaatgaaaaggaaatcaatgaattaccaaaaaaagaagctaaaataataatcctaaggaaactcaatgaaatataagaaaatacagatgaacaattcaacaaaatcagaaatacaattcacaatatgaatgaaaattcaacagataggaat

SEQ ID NO: 352170 - DNA, 492 bp, Homo sapiens
  misc_feature (1)...(492): n = A,T,C or G
ttgacctcatttgccccctgacagaatcactggtatagcaagtagggccattctattcattaagtacctgaggtacaatgtgggaattaccaaggacttaagcctgtgaaaatgttgagaactaaaaaaatattaattggctttaaaataagaattataaaactgtaaaactgaaatntattaggaagtttaatgggaaagtctgtaaaatgtaacatcatgtcatcttcattaattgctaaatttagaaatccataataacttattacatttaaagacaatttatatgttaaacttttctcacttctcaagatttcccaagtattcataatgattgctaagaaggtawaactaataataaattaaatgagttatttatagttagttatagataattttccaaaaacaaaattataaaaagccctttgatttttacaaagcaaaatgatatttaatatgaaaacattttaatatgtttgatatgttgtggga

SEQ ID NO: 352171 - DNA, 582 bp, Homo sapiens
ctgttcctgtgttaatttgctgaggataatggtttccagcctcattcatgtccctgcaaaggacatgaactcattccttgttatggctgcatagtattccatggtgtatatgtgccacattttctttatccagtctatcattgatgggcatttgggttggttccaatctttgctattaagacacatgcacaagctggtgaatcttaggtgacatcatcacaatgcactttagattgcatctaagtttttattatcataaacaaggctgaaatggacaatctttgtacatgtatttgagcaatgtttctggcatttctgagaataattctattttcaagaagtgatcataacttytaaggcatatgctacctgaggaaaataattatctctttttctttcttcctttttcaccctcctaccctcaattttttctttttaaatagcttttttgaagagaattaaaaataaaaacaagaacaaatatggtaaatttttttttttaggcaatcattttattcctttgctgaaaactctactttaaagagcacgcacaaatattatgtaagataagagataaaaata

SEQ ID NO: 352172 - DNA, 582 bp, Homo sapiens
ctgttcctgtgttaatttgctgaggataatggtttccagcctcattcatgtccctgcaaaggacatgaactcattccttgttatggctgcatagtattccatggtgtatatgtgccacattttctttatccagtctatcattgatgggcatttgggttggttccaatctttgctattaagacacatgcacaagctggtgaatcttaggtgacatcatcacaatgcactttagattgcatctaagtttttattatcataaacaaggctgaaatggacaatctttgtacatgtatttgagcaatgtttctggcatttctgagaataattctattttcaagaagtgatcataacttttaaggcatatgctacctgaggaaaataattatctctttttctttcttcctttttcaccctcctaccctcaattttttctttytaaatagcttttttgaagagaattaaaaataaaaacaagaacaaatatggtaaatttttttttttaggcaatcattttattcctttgctgaaaactctactttaaagagcacgcacaaatattatgtaagataagagataaaaata

SEQ ID NO: 352173 - DNA, 582 bp, Homo sapiens
ctgttcctgtgttaatttgctgaggataatggtttccagcctcattcatgtccctgcaaaggacatgaactcattccttgttatggctgcatagtattccatggtgtatatgtgccacattttctttatccagtctatcattgatgggcatttgggttggttccaatctttgctattaagacacatgcacaagctggtgaatcttaggtgacatcatcacaatgcactttagattgcatctaagtttttattatcataaacaaggctgaaatggacaatctttgtacatgtatttgagcaatgtttctggcatttctgagaataattctattttcaagaagtgatcataacttttaaggcatatgctacctgaggaaaataattatctctttttctttcttcctttttcaccctcctaccctcaattttttctttttaaatagcttttytgaagagaattaaaaataaaaacaagaacaaatatggtaaatttttttttttaggcaatcattttattcctttgctgaaaactctactttaaagagcacgcacaaatattatgtaagataagagataaaaata

SEQ ID NO: 352174 - DNA, 504 bp, Homo sapiens
atatttaattgtcttatttcttttcccagtcaaataaagactagcttatacatttaaaatttcctatataagtgtcattttcaaraaagatcatttcctgagctatggcgtcttcaagatctttgagctgacactctatcagaactaagcttcttccttattaggccacagctcctccttgtggttgacagatgtaatacccttaaatgccagccacaggggcagttaaagaaacaaagttgatgtgatcatattaggattaactctaggataaaaagtactagcatgatttgtctttaatacatatccctagattctcactcattcatctgatcagctaatccagcacagagattcactggtagcacttgagagacaatccagagtgcaatgttagtctaagaatctttttcaaatctgtggtggtttaaagtcgcatatgagtcttagctactcaaaactagttctaagcaacactggttttgctttgatctacggtaaatt

SEQ ID NO: 352175 - DNA, 661 bp, Homo sapiens
cccggctaatttttgtatctttggtagagacagggtttcgccatgttggccaggctggtctcaaactcctgacctcaggtgatctgcccaccttggcctcccaaaatgctggagattacacggkgcccagcctttccttctttttttttttttttcttaaaacagggtctcactttgtcccctaggctgaagtacggggggccaatcaaggctcactgaagccccaacctcctggactcaagggatcctcctgcctcagcctcccaagtagatgggactacaggcacttgccactacattcagctattttttttttctattttttgtagagacagagtttcccaggctagtctcaaactcctgggttcaagcaatcctcccgcctcagtctccgaaggtgttgggattacaggtgtgagccactgcacttggccataaactgtatttttgacaacatcctatatatccttatcagcaactgcagtggggaggagtaaggaaaggagagagtacttcttttcaaatggattcagcaaagtcacagaaatggctcccattggacaagtatgggtcacctatctatctgtggatgcatagctttagtggacaagtctaggtcatgtgtccaggcttaagtatatccaaaatggatgatggaaaa

SEQ ID NO: 352176 - DNA, 661 bp, Homo sapiens
cccggctaatttttgtatctttggtagagacagggtttcgccatgttggccaggctggtctcaaactcctgacctcaggtgatctgcccaccttggcctcccaaaatgctggagattacacggggcccagcctttccttctttttttttttttttcttaaaacagggtctcactttgtcccctaggctgaagtacggkgggccaatcaaggctcactgaagccccaacctcctggactcaagggatcctcctgcctcagcctcccaagtagatgggactacaggcacttgccactacattcagctattttttttttctattttttgtagagacagagtttcccaggctagtctcaaactcctgggttcaagcaatcctcccgcctcagtctccgaaggtgttgggattacaggtgtgagccactgcacttggccataaactgtatttttgacaacatcctatatatccttatcagcaactgcagtggggaggagtaaggaaaggagagagtacttcttttcaaatggattcagcaaagtcacagaaatggctcccattggacaagtatgggtcacctatctatctgtggatgcatagctttagtggacaagtctaggtcatgtgtccaggcttaagtatatccaaaatggatgatggaaaa

SEQ ID NO: 352177 - DNA, 534 bp, Homo sapiens
acaaaatgaaggacaaaaatcacatgatcatctcaatagacacagaagtatttaataaaattcaacatcctttataataaaactctcaacaagttaggtataggaggagtgtatctcagcattytaaagactatatataacaaacccacagccaacattatactgaaaggggaaaagttgaaagcttttcttgtaagatctagaacaagacaaggatgtctagtctcactatttctattcaatatagtattggatatgcttgccacagcaattagacaaaagaaagtaataaatgccatccaaattggaaaggagtgagtcaaattgtcaattgtttacaaatggcatgatcttatatatagaaaactctaaaagctacaccccaacaaacatatgaaaaaatgttccacagcactaatcatcagagaaatgcaaatcaaaaatgacaatgagaccatctcacatcactcagaatacctatcattaaaaagtcaaaaaacaacagatactggtgaggcttcagaaaaaaattca

SEQ ID NO: 352178 - DNA, 586 bp, Homo sapiens
tgggacatttttgggacactgtcaggggaatcacagacttgagtgaaggccagagtaccaggcttaacaagagccattaagggagcttcagatggctaggaaacaggacccttaggaaaaacctmataacaagaagagtaaagtcaattttccctggcatgatgagcaaactcctactattatttattttcagccttttcaagattcagaagctcattaaaaagtgtttgattatctgtgatcagcttgtggacacagaccggctgtgctagggtaggagaaggacaatctagactctagggttctaacttttatttaaacagacaccaggatttactctcagcctttgagttcactcaggaaagctgaagccacgctaggttaacagacagattttaatataggcaattggaggactaaaaaaatcacataataatgctgaagagacacaaaggtaataactgcagaaagcatttgccatcctagggctgccagaacaaagggaagagattgagttatccaagtctagaaggcaggagaaaccctctgtcagtgaaacttaatatctgaagaagacagcagagtc

SEQ ID NO: 352179 - DNA, 570 bp, Homo sapiens
ctctatcaattttatttatcttttcaaagaaccagctttttgtttcatttatcttttgtattattttgttttaatttaatttacttctactgkgatctttgttatttttttcttcggctaggtttgggtttagattgttcttgtttctccagttccatgaggtgtgaccttagattgcctatttgtgcactttcagactttttaatgtaggcatttaattaatgctatgaactttcctcttaacactgcttttgctgtatcccaatgggtttaataggttgtaccactattattactcagttcaaaaagcttttaaatctccatcttgatttcatcatttacccaacagtcactcaggagcaggttatttaatttccatgtatttgtatagttttgaagattccctttggagttgatttccaattttattccactgtcgttggagagagtacttgatataattttgattttttaaaattttttgaggctcattttgtggcctatcatatggtctatcttggagaatgttccatgtgctgatgaatagaatgtatatgctgcagttgttgg

SEQ ID NO: 352180 - DNA, 608 bp, Homo sapiens
aagaacaatccccctttgcagttgcttaagttttatttgcttcctttctctcagccacttatcgtttcttcattattttgatctgaaggctattgagaagaagcagatacaagaaatgccctctgccctgtccttatttgtctaaaagcaggacatagtttgtaaagttgtccccaccctctcactactaggaaggataaaagttaatcaagagcaactctagatcctttatcaacccagagaaatctacataataaactttactaactagcctttattttacattagttcccccatatagttacccttccactatttgctgccctagaaacacaaagaccttttcatttgcctgtcacttctttaaaaatttattgttcttttgttaacttgggatgtcactagaaactttccaaactgaaatgcaaagagaaaaacagaatgaaaaacaaaataaaacaaaacaaggcaaaaaaaaaaaaaaacagaatttaacatttaaaaactaarataaatttcaaagtgtgtaatgtgtaatgggaatagagagaacttaatggaaaaaatatttggagtaataatggccaaaaacctccccaaattaatga

SEQ ID NO: 352181 - DNA, 526 bp, Homo sapiens
ttttgtggggagcatgaccctgctaacaccttgatttcagacttctggcctccagaactgtgagagaacactctgttgttgtaagccacccagtttgtgataatttgttacagcagccccggaaaatgaatrcaatgatattagagtgtgtttgagttttaaatatgaaccaaagtaaatgctttctaagttatttcaaccaagaataggtttaggcttcctttgggaaaggctctcattaagccccaaggtaaaaggatgcttttctcattatgcctggaagcttgactcagattgtgctgctaatggactcatgaaaactccggagtcacagaatgagccataacccaaatttgcgacaaagtttcactggcaggaaggagaatgggggtgagagagtaggcacaggggcatcggggcaggtctatctctagacctggagaacaatgtaccattgggtgtgactaagggtggggaaatcagctcatatttgactacacacatgaggcagcacactcctagaaag

SEQ ID NO: 352182 - DNA, 589 bp, Homo sapiens
tgggtaatttataaagaaaaggggtttaattgactcacggttctgcaggctgtataggaagcatactggcttctagggaggcctcaggaaacttaccatgatggtggaaggtgaaggggaagcaggcacatctttcatagccagggcaggaggaagagacagagggaggaggtacctcacacttttcaacatccagatctggtgaggactctgtcatgagacagcactagagggatggtactaaaccattagaaaccacccccataagccagtcacctcccaccaagccccacctccaacactggggattacaattcaatgtgagatttgggtrggaacacagacccaaaccatatcagttggcaaaattaaatggcctttcatttctccttctacaaaaataagaactactctctttcctcttagaataagcatgtttaatctttgcttctgatgtataattttggcctggaagataattaaaaatatggtattggtgagtttatatatggtgacaacagaaactcatgaaaagttggcatcacattattttcttacttgctgtttttccaaatagtcattgaatata

SEQ ID NO: 352183 - DNA, 552 bp, Homo sapiens
tgtgcatgggcaggacagacctggacgtggctggtaacraaagaagtctccaaagtttttctctttgtgttagctgggactcttcagtcctagctataacataatcgatttgagctaatttaagcaaaaagaagaattcattctaaggtggcaggagtgcttcatggatctcgaatatgtggggaggcaggctgcctctggaaggggcaggaaccaggaacaggtgtgccatctctgggcctggcctctgcatccccccatgtgagggatttgttcttgccttcctctgctgactggctttctctgtgtctatgcgtgtggtcaagctctaacctgaagcacaaacaagaacactcttaacttcagtgtgcactggcagcccaggacacgggctgtggtcacctctctcagacttggagtgtttgactggggtgtctgatgcatgtgaaactggcccaattttcccacagaactgtagtttctgtggtttctacagtttcttttgaataaacatagaaattgatcccccaatgttaaaacttaagaaagtta

SEQ ID NO: 352184 - DNA, 465 bp, Homo sapiens
gagttctttatctattctggataccagaccrttatcagacaccatcccctcactttctttgtgtctttgctcaaatgtcaccttatcagaaaagtctctccaaagtactacatattttaaaaggcaactcttcttcattctcctcagctgtttttctgctttttttttcatagcattgattactacctaaagtattatttatttctctgtgtgtgttttggggggtgggggatggtggtattaaaacagggttttgctattttgtttgtgtctgttcctgcacctagaacagagctgatgacatttaagctcccaatatacaattgtagaatgaatgaatgagaatagatagagctgcctaattcttttgataggtgaagacagtatatcattgtagtttgataaactgtgacccttaaaacacaatttctctgctcatctaatgtttaagttttaagagatatt

SEQ ID NO: 352185 - DNA, 481 bp, Homo sapiens
aggcaagcactgctgggcctgaccaggctatttataggttagaagagaggttgatggggtgggaggagtgctttgtagtgaggcctgataagagactccttagcaagtatcttcccttacggtctgcagaactaggactgggtcacagcattaaggggccccatctcatacctactgaatcagcacctctgcatgtagcacccaggcatctgtattttttggtcaaacttctaaaaagatgatgctattatgcagccagtatcaaaaactgctccagagaagaaataaacatatcattctgtcccaagtggtggagataattgggtagaaacacatttctagatattcttcctctgaagttgcctaataacatcaattatttgcttttccttttgtggcactgaatcttctaaaattctctcgctccttagtcatcctcyactttagacacacgtgcaagaaaatacggagcacatgcatc

SEQ ID NO: 352186 - DNA, 544 bp, Homo sapiens
tggaatttccactcagaaaatcttggcaccaatttcttcaaaacaatagcaagttacaggcaggaactgggaaacctccattacattagtggctggcactgtgggctaaccagggggaggtgatcctggtgtcttttccctgttcagcaggacctggtagccctctgattcttactcatgggtttcaaggcaggatggcaacttcttctaaagcagaccttcctcatagaggaatgccttgttaaaatataagcagccccaacacaaacgtttgtaagaatgatcgtgtctaaattaaggcagtttgatagacagtaacagaaagccaccaaacatagctcaaaccgaaagggaagtatatgagaagaacaccaaaaacattttaccatccttcatggccgatggtgcagctggatgtcagaaaggctcatgcaaggctggaaccaagaccaagagtgacwttgtggaatgaaacagctactctcttcctctcactctccctatcccccaccatgcccaggttcaaggacagctaagtttttct

SEQ ID NO: 352187 - DNA, 609 bp, Homo sapiens
agtagctgtatgactttaggcaagataccaaatcccactaaacctcagcttgctcatttgtaaaatagggatgtcctactttgttgagtagatataagaattaaggaccatgcagtagatataagaattaaggcatgaaatacactatctgccacacagcaaagatgaaatacacagctgtttttatcccgttgccctttaagaaggcagtttcaaaagaagccagtttgttttgccagagttctgaagggaatgggtagctagaagcaggaagagcaaacgttgatatcatgtgtttgaagagcttgccaacaaaggggagaagaaatggggctgagatagaagacagaatgggcaagaaaatgactttycttaaaagcaagagaccttgccctcagttaccactctggttagtgatagaaaaaaacgcagctgggaagagaagactgaaggtgctggagaggacccacccagaagaagagaatgttttagtgtttttaaaattcccatcgggatcagtttggctttcaaataattgacaagttgccaaacctagaatttgctctgggctgagcagatagtctttttataaaacttttccccccagct

SEQ ID NO: 352188 - DNA, 586 bp, Homo sapiens
ttcacacatcttcaatagccttcatgaaagaaaaatgtaagaaaatgaggtttattagacagtcactatctaacattttttaaagtactgttacccttttccaaactcattcagtttaaggacaatttayatactgacttaatttaataaattaaatttagatttgctaggcgtaagaggtgaatctatgaataaacctcacaagaagcaagagggaataaaatgatccaaaaggaaatcacaaaataactcggatacacaagcacaaggacattgtgacactattatccactgcaataaaaatttgtgaccctaacacaatcattgttttttcagaggccactgaaactactgactgataaagtcactgtgtcacttagcctgatcagtttgagcccaaaggaatggctagaacgggggctgcaactagctatagcttaagttcactattgttactagagccaaaaagagacaatcaagaacaaaaataaagtgaaaccactgaggaaataacattctaaaaactaatcctaggagctggaagtgctgctaataataaaggcttatgtgaagaataaacagcact

SEQ ID NO: 352189 - DNA, 601 bp, Homo sapiens
tcctgccaataaaagtctgcctacagtgtcacaaatgtttcaacaatgtctgaaaaataaaagggcagctttttctttgcctattcttttgaaagactttctcctcaaaagccttcaatggttgcctaaaaaaattttggttaaacaggcactattccagatgaaaaatattccaacggacttgaattttttaaatcatcatttttcacttactaagtctctgtaagaatcctaagtataaaaaaaggctcaaacatgtatctcaacaaaataaatactctggcaaccaactgctagttgtgctacagaaattgaatgaagtctttaacatttggctttgctaatttggattcattaagttaagactgtgatacataaaatacagtactttcttcaggcccagtttagatgtaattcatttctttccttattttttaattcttaayttctagactatatgggatagagtacttcaaaggtaacttttctttataaattttcagcattttacgataatgctatattttgtttagatgattcaggactaaagactcaagaaattaaagatcctttcaaaacattctgaacttctaagtacagt

SEQ ID NO: 352190 - DNA, 575 bp, Homo sapiens
aactctaaaactcatctgttttccctacactattgagcaactcctcttggctgtgagtttcctaagggcaaagagtatcttactcatcactgcatctccagtactgagcatggaatgatacattataggtacttgaacatctgtctaagaggttggaagggataggattaagctcacagatgataaagactgactgaatttgaatcccagttaaatccaattcaaatcgagtatgatcaaatcataatttgtcagttgtgtgagcttggaaaagttactgtattgtgatttccttatctgcacatgtggatgataacagaatttaccttaccaggttgctaggaggaccaaataagttaacacataaagtagttagaacaaggcytagtacaaagcactaaataaatgtggactattgttattatttgttatacaaatcagcaactaggagcaattaggtaagattataaagtatttggaacataaaagcttaaagaatcaaccaaattacaccatataagaaggaatcagaagtatagcaaaaataaagaattttaaaaattaagaaataaaca

SEQ ID NO: 352191 - DNA, 521 bp, Homo sapiens
tgcaccttctgtgctcatgtgcatactttattttattagtctgttctcaagctgctaatgaagacatacctgagactgggtaatttataaaggaaagatgtttagtgaactcagggttctgcatggctggagaagcttacaatcattgcggaagttgaaggaggagcaaggtcacgtcttacatgagagaaggcaagagagattgtgcaggggaactctgtttataaaatcatcagatcttgtgagactaattcactaccacaagaacagcataggggaaattgcycgcatgattcaattatcttcatctgggcctgcccttgacatgtggggattattacaattcaaattgacacttgagtggggacacagcgaaaccatatcattcattatcccatgaaactttacttaaaaacacatgttcaaagataacattatttagaatgtgaaaatggtgacagcacttcattatatcaagcacaggcctttctgagcatgacaccttgagcagctgcacagat

SEQ ID NO: 352192 - DNA, 601 bp, Homo sapiens
atgacatggttgtctttgtagaaaatttcaagaaatctacagaaacacttccataaaataattgagtttagcaagacctaaggatacaagaccgacacaaaaattcaattatatcactatatgctaacaatgaatattcatgaaccaaaataaaaatacaataccatttataatgcctccaaataacatgaaatacttacacatatggttaaaataggtacagttatctgtatgttgaaaattataaaatgttgatgaaataaataaaagaagaccaaagaaatgggaattgtactatgcttattgattgaaagactggatatagtaaagatgtcaattctccctacaatgatctataggtttaatgcaatttctatcaaaatccyagcaaatatatgtgtttacatagataagcacagtctatatagaaatgtgtaggtcattaaagagctgaaagaatcttgatcagtaaaaataaattgggaagaagtactctatctgacatcaaagcttactatgtagctacaataattaggtggtataagtgtggtgtgttattggttgggagttagacacatagatcattagaatagaacaaaga

SEQ ID NO: 352193 - DNA, 579 bp, Homo sapiens
ttattgctcagtgaggaaataaccagcagtaaaggtgctatagtttgagtaatcctggtcacaagagttaggagttgaggggatggaatagatgaacgaaccgtttccctcccaaagaccctggatgcaatgccatctgctgacaatattgaatctctcttttggtgtcaggaacatagggaaaacccttattcttcatttggaggaactatggaaaaaaaccaggttatgcattcctccagctcacctaagcgacttgcacattctaatgttgctgactctggccatcaagagttatttattcataaggcgtcaaagaaaatcttgaagccttcactgatagtgaagagaaaatctcccacctggctagggtggggtgaagaaggtgcacagaaggaaaagaaagaaatttactcaatatttaaataagtgagatgaagtaagtaacacttccataggggccactgaacaatgacttagacccacattcataaaataaggagcaaaggaagagggacaggaagcactaagtctggagaggggcacarctacatgtgagtattttcattagcatcatct

SEQ ID NO: 352194 - DNA, 582 bp, Homo sapiens
gaagctggaaaccatcattctcagcaaactatcacaagaacagaaaaccaaacaccgcatgttctcactcataagtgggagttgaaaaatgagaacacattgacataagaaggggaacatctatcaaactcttaaagaagagcccagaccaattctactcaaactcttttaaaaaaaagtgaagaggagaaaacacttgcaaattcactctataaggccagcattagtgtgacaccaaaacgaaatcaaggacacaatctaaaaaggaaaytataggccaatatcttgatgaacatagatgtaaaaattctcaacaaaatactagcaaaccaaattcaacaacacattaaaaagatcattcatcatgatcaagtgggattcatctcagggatgcaaggatgcttcaacatatgcaaacaaataaataggaaacaaaactatatgtttatttcaatagatattgaaaaagcattcaataaaacttaatactctttcgtgacaaaaaatcccaacaaactgcatatagaactagcatacttcaacacaatcaagcctgtatatgacaaacccatagctaacatc

SEQ ID NO: 352195 - DNA, 582 bp, Homo sapiens
gaagctggaaaccatcattctcagcaaactatcacaagaacagaaaaccaaacaccgcatgttctcactcataagtgggagttgaaaaatgagaacacattgacataagaaggggaacatctatcaaactcttaaagaagagcccagaccaattctactcaaactcttttaaaaaaaagtgaagaggagaaaacacttgcaaattcactctataaggccagcattagtgtgacaccaaaacgaaatcaaggacacaatctaaaaaggaaattayaggccaatatcttgatgaacatagatgtaaaaattctcaacaaaatactagcaaaccaaattcaacaacacattaaaaagatcattcatcatgatcaagtgggattcatctcagggatgcaaggatgcttcaacatatgcaaacaaataaataggaaacaaaactatatgtttatttcaatagatattgaaaaagcattcaataaaacttaatactctttcgtgacaaaaaatcccaacaaactgcatatagaactagcatacttcaacacaatcaagcctgtatatgacaaacccatagctaacatc

SEQ ID NO: 352196 - DNA, 582 bp, Homo sapiens
gaagctggaaaccatcattctcagcaaactatcacaagaacagaaaaccaaacaccgcatgttctcactcataagtgggagttgaaaaatgagaacacattgacataagaaggggaacatctatcaaactcttaaagaagagcccagaccaattctactcaaactcttttaaaaaaaagtgaagaggagaaaacacttgcaaattcactctataaggccagcattagtgtgacaccaaaacgaaatcaaggacacaatctaaaaaggaaattataggccaatatcttgatgaacatagatgtaaaaattctcaacaaaatactagcaaaccaaattcaacaacacattaaaaagatcattcatcatgatcaagtgggattcatctcagggatgcaaggatgcttcaacatatgcaaacaaataaataggaaacaaaactatatgtttatttcaatagatattgaaaaagcattcaataaaacttaatactctttcrtgacaaaaaatcccaacaaactgcatatagaactagcatacttcaacacaatcaagcctgtatatgacaaacccatagctaacatc

SEQ ID NO: 352197 - DNA, 528 bp, Homo sapiens
ctgaccctaagactagttttacctaccattgtcacccaccaatcagaggttgccagttcctgaaaaactacactgaagccaatgaactttctttcaaaatgactctatgtaacatgwttttcccaataaaaccccaaccaccaaattctttattcttcgggcatcccagtttgtgcctatccctcaaattgcaattctatttttgtatatattttcaaatgaaaacatttgctcagagttttgtctctacagtttatttgattttgacatatttattgtcataagtggagtctgaattgaacttgcctggagagattctatggcccccagaaccatggcgtgaggtaccaatacatggaccccttgagccccactttggtgtgtaccctttttgcctggtgagtctctacctcggatccaaaccccatgtcctgctgtctgagttgtacagttttatttgaaattagattttctgagggttttttccactcctgtttatgaaggacttcccttcttttaaagaagtct

SEQ ID NO: 352198 - DNA, 581 bp, Homo sapiens
atacttcaacacaatcaagcctgtatatgacaaacccatagctaacatcatactgataaaaaactgaaagcttttcctgtagcacctggaacaaaaatgtccactttacacatttattcaatatagtactgaaagtactaaccagagctaataggcaagggaagcgaagagagggtatcaaaattagaaaaaaagaagtcaaattatcattgttcacagacaatatgatcctatawttggaaaaaaaaaacaaactgaggactccaccaaaaaaactgttggaactgataaaacaagttcaataaagttgcagaatacaaaaacagggtgcaaaatcaatagcatttctatacaccaacagtgaactcatttttgagaaaggcaccaagaatataccttttgaagaaagacagtctctactataaatggtcctgggaaaactggatattcacatggacaagaataaaactacatccctctcactacataccaaaatcaaatcaaaatgcattaaaagcttaaatgtcagcgctgaaactataaaactactagaagacctcaaaagcactgtcagccaaagc

SEQ ID NO: 352199 - DNA, 528 bp, Homo sapiens
ctgaccctaagactagttttacctaccattgtcacccaccaatcagaggttgccagttcctgaaaaactacactgaagccaatgaactttctttcaaaatgactctatgtaacatgtttttcccaataaaaccccaaccaccaaattctttattcttcgggcatcccagtttgtgcctatccctcaaattgcaattctatttttgtatatattttcaaatgaaaacatttgctcagagttttgtctctacagtttatttgattttgacatatttattgtcataagtggagtctgaattgaacttgcctggagagattctatggcccccagaaccatggcgtgaggtaccaatacatggaccccttgagycccactttggtgtgtaccctttttgcctggtgagtctctacctcggatccaaaccccatgtcctgctgtctgagttgtacagttttatttgaaattagattttctgagggttttttccactcctgtttatgaaggacttcccttcttttaaagaagtct

SEQ ID NO: 352200 - DNA, 558 bp, Homo sapiens
gctgaggataatgacttccagattcatccatgtccctacaaaggatatgatctcgttccttttatggctgcatagtattccatggtgtatatgtaccacattgtccttatctagtctatcattgatgggcatttgcattgattccatgtgtatttgtaatttttacatgatgattactttattcttcattttaaaaaatttttatttcatcacaaatttttattttctctcccatttctcttatatttttcattgcaatgttgtcctggaatttctgtctgttcatatcctacatgtatggatagtcctgarcttcccagcctcagcaccttcttgctctcaactttccctggattgacttttataactacgagttatggtgacgactcctaaatcttatctctgacatggagcttttcccttaacttcaagtctatgcacccagttgtctgttgaaatctaccacaggcatctcaaactcggtgtgtccaacaagaaacatttttttacactctacaaatctactctcctatacaatttcaactccctgttgatggc

SEQ ID NO: 352201 - DNA, 580 bp, Homo sapiens
aacagagctacccatcttaactactactgtgatcttccagattttttgctatccaatgaggtagccactagtcacacataactatttgaacttaaactaattaaataagagaaaataatcaatttatctatatcattagtcacattttaagttaccaacagccatatttccatyatcacagaaaattctattcacagcgacccatgtattctagttcttctttgcccatcatgtgtttttttaatttctttgtctcctggttctaattctcaattcactgtagacatttcatgcaagttcctgatcctgtgccagaatttgatgcccatccctggtccaatcattttggagtaggaagagaaagatccactgtcaaatgtgcagggcatgtggacaggggagcaatgtatgtactctgtcttttctctattttccatataaaatgtccatattgcacaggattataaattatccattactattaatttttcccttatgaaggaaaattagccttaattttttaattcatcccattcctcctgttcttgtaagatttttattaggttagaaattggtaact

SEQ ID NO: 352202 - DNA, 579 bp, Homo sapiens
gtttaatactgattcatgccacttgaatattttcttatttttgtagagtgacacgtttgactgaagtcctttacccattttgctaaaatttttttaaattatcaaataaagaagtaatttctattacaaaccaacaaattatttaaacaaatgaaaattttaggtcatatatgtctatatagtataaatctaatttcaataaaattttaatattaaaattttgctgtatctaatatacatgcatataaatacattctatgtatccttaaaatacttaaacacatattacttcttttattctcagaagtatcctggaacatttaaaaattataacgatggcatctggtgccctgtgattctcatcaagaattcctaacactgattttcattttgtttttaggcagttactttagaggggaaaatatagactctcaaactaatggaaacattcctacaaagtatatgggaattcacrgcagttttactgctaaaaaaaaaatgtcaaagagaagcttcccattaaggccccaagtgaaaaagaatgccaacaacaattaagctgaagcagctttactggcc

SEQ ID NO: 352203 - DNA, 567 bp, Homo sapiens
caatggcagcagtgggtcccctgtgccctgcttccctgaggcagccaactgtgctgttgtcatccttgtgtggccaggtgagaccttttgccaggcctggaacttgtgccgctctggagcctaaccctgcatcacttctcttgcccaccactgctgcagggagggcacagggcgtaggtggagctgggcccagagtgctgccaagcttcagggacccagcaggaggcagggacaagtgagatcccccgtgaagcccactgccctgggggctgctgtgatggggctggccaagcctacatctggcaggggagcagtgtggtcaggmacagaggggcaggcagagaggggaccagcaaagacctggagcccccgccccaggctgtaaggacatgggcatctctgcactctgcacccttggtgtctgggaaggcctttccttcccctgcaggcttatgggtgtctgcttccactgcctggcctttccccactactgatgccctctccagtctcagagtagggttggcaccaagcccaggtactgtcacagccccggtaggtgtggtcacg

SEQ ID NO: 352204 - DNA, 464 bp, Homo sapiens
ccctgtgccctgcttccctgaggcagccaactgtgctgttgtcatccttgtgtggccaggtgagaccttttgccaggcctggaacttgtgccgctctggagcctaaccctgcatcacttctcttgcccaccactgctgcagggagggcacagggcgtaggtggagctgggcccagagtgctgccaagcttcagggacccagcaggaggcagggacaagtgagatcccccgtgaagcccactgccctgggggctgctgtgatggggctggccaagcctacatctggcaggggagcagtgtggtcaggaacagaggggcaggcagagaggggaccagcaaagacctggagcccccgccccaggctgtaaggacatgggcatctctgcactctgcacccttggkgtctgggaaggcctttccttcccctgcaggcttatgggtgtctgcttccactgcctggccttt

SEQ ID NO: 352205 - DNA, 567 bp, Homo sapiens
caatggcagcagtgggtcccctgtgccctgcttccctgaggcagccaactgtgctgttgtcatccttgtgtggccaggtgagaccttttgccaggcctggaacttgtgccgctctggagcctaaccctgcatcacttctcttgcccaccactgctgcagggagggcacagggcgtaggtggagctgggcccagagtgctgccaagcttcagggacccagcaggaggcagggacaagtgagatcccccgtgaagcccactgccctgggggctgctgtgatggggctggccaagcctacatctggcaggggagcagtgtggtcaggaacagaggggcaggcagagaggggaccagcaaagacctggagcccccgccccaggctgtaaggacatgggcatctctgcactctgcacccttggtgtctgggaaggcctttccttcccctgcaggcttatgggtgtctgcttccactgcctggcctttccccactactgatgccctctccagtctcagagtagggttggcrccaagcccaggtactgtcacagccccggtaggtgtggtcacg

SEQ ID NO: 352206 - DNA, 590 bp, Homo sapiens
ttcccaactgtgtttgtggtggaaagaagagtcaccaagctgactcgtggatgttttgctgagcagcagagggagagtcacctcacgcatctgccagattttcttcttcatccagggaggcattgtgaagttaacaatataagctaagggattgtctctttcaaaaatagtttcagagaatagagggggctccactcttctcacacctctatcaagttgttcccactttccaaactatttgacattgcttcctatatgtcatcaagcaaactaataaataaacaatgaaggaacctccttcctaccttataccctgtgaaaatggctgaattttcactttctaaaacaattcagtgttggctacttactcagaatttcttttttttagattgagtttgttttttttttaatcattgagaaactgaaggtagctaaaataacatagtacattggaattcaaaatgtgattgagagaccagaggaatcagtactaactattasaaatgcagaatctcagaccccatcccattcctaaccaatcagcagttgcatttaacaagagattccagtgatgtgtgtgcacattaaag

SEQ ID NO: 352207 - DNA, 605 bp, Homo sapiens
  misc_feature (1)...(605): n = A,T,C or G
ttactccattattttattatttactccatatattttattgaattttttctaagtagaatattttcaaacatagattttcagcatttaagtcctattgaatgctatctcctcactccactacaccctgcaaatttcttttagataattaggactaagtctgagccatttcttttactggccactctgaaatttgcaaactcttcttggtatcattaatttttctatggatgttgtgatggggcaaagttttttgctacccctggcggaagttcctttgaacatggagcacaaactgataaataatcttctgctgggtagaaacagtaatgtgctgaagccagctatgcctacccaagacagtcaattgtatgcataatttcccaatgccatgttcactgacatcattttggcagctraaaaattacctatggtaggagtatttacaaccattggaaatactacaaaatagggcacttataagcccatttttattaatttattgtttcctttgtattattgcctgaagttaactaaaaaggtagcacagattgtaaaatagtcatctcaaatagcagtatatggtagctagttacaggnnnnnnnnn

SEQ ID NO: 352208 - DNA, 596 bp, Homo sapiens
tgagaagagatgctacacttcaggcaacaaatmttgtcagtggtggaccatggtaagtgattttgccattcaaaaatgaaagtaaggattatcgcatggaagaaagtacttctgagatatttgctttcaataggcatttcaacattaaaatatgcttagaaaaccaaagagtgggcggagcactgtggctcacacctgtaatcctagcattttgggaggccaaggtgggtggatcacctgaggtcaggagttcgagaccagcctggacaacatagtgaaaccccatctttactaaaaatacaaaaattaccatgcctgtaatcccagctactcgggaggctgaggcaggataattgcttgaatccaggaggcagaagttccagtgagctgagatcactctgctgcattctagcctatgtgacagagcgagactctgtctcaaaaaaaaaaaagaaaagaaaagaaagaaaatacaggaccatttgtagtaacagctacccagctctgcaaaagctacaaaactaattcacttataaagccttataggaattacggaaatgtgtagagtgtaaacctaaatgccataagtagctact

SEQ ID NO: 352209 - DNA, 596 bp, Homo sapiens
tgagaagagatgctacacttcaggcaacaaatcttgtcagtggtggaccatggtaagtgattttgccattcaaaaatgaaagtaaggattatcgcatggaagaaagtacttctgagatatttgctttcaataggcatttcaacattaaaatatgcttagaaaaccaaagagtgggcggagcactgtggctcacacctgtaatcctagcattttgggaggccaaggtgggtggatcacctgaggtcaggagttcgagaccagcctggacaacatagtgaaaccccatctytactaaaaatacaaaaattaccatgcctgtaatcccagctactcgggaggctgaggcaggataattgcttgaatccaggaggcagaagttccagtgagctgagatcactctgctgcattctagcctatgtgacagagcgagactctgtctcaaaaaaaaaaaagaaaagaaaagaaagaaaatacaggaccatttgtagtaacagctacccagctctgcaaaagctacaaaactaattcacttataaagccttataggaattacggaaatgtgtagagtgtaaacctaaatgccataagtagctact

SEQ ID NO: 352210 - DNA, 596 bp, Homo sapiens
tgagaagagatgctacacttcaggcaacaaatcttgtcagtggtggaccatggtaagtgattttgccattcaaaaatgaaagtaaggattatcgcatggaagaaagtacttctgagatatttgctttcaataggcatttcaacattaaaatatgcttagaaaaccaaagagtgggcggagcactgtggctcacacctgtaatcctagcattttgggaggccaaggtgggtggatcacctgaggtcaggagttcgagaccagcctggacaacatagtgaaaccccatctttactaaaaatacaaaaattaccatgcctgtaatcccagctactcgggaggctgaggcaggataattgcttgaatccaggaggcagaagttccagtgagctgagatcactctgctgcattctagcctrtgtgacagagcgagactctgtctcaaaaaaaaaaaagaaaagaaaagaaagaaaatacaggaccatttgtagtaacagctacccagctctgcaaaagctacaaaactaattcacttataaagccttataggaattacggaaatgtgtagagtgtaaacctaaatgccataagtagctact

SEQ ID NO: 352211 - DNA, 608 bp, Homo sapiens
cactatgttatgatgcactttgttataatggagaacatttccttttgccacccacagggaattttcttctttagctttcttgaaaacccctacttatcataggagagcttgttccctgaagctgtatgccttacctttccagtcagacttcgctttgtttattgcttccattatgtactrcatgttatcatacagaatatttagtgtggtgttgtgaagagaggtttccccagcatttgctccccagagcttagagagctcagcagcactgtatctggtgtacaatagtttctcatttatgatcttttttgaaagtacaaatgataaattctactggatttttttttaattagtgaaataagctagtaaaacagccagtctttgagatctaatcagaaccaccttctctggagagatagcagaggcaaatagctaagttaattgaaatggttaactaaataaaattaagatagaatcatgaaaagacgatcaacagtattttgcacaatggcattattttggtgacaatttctaagtggtaacaagcatggaatgtttatgacattgaaattagaagaaaagtgagacatcactttatacacacacac

SEQ ID NO: 352212 - DNA, 627 bp, Homo sapiens
atcgtttttagtataagagaagtccktcaattactcgtacttttccaaggtatttgaaatattcatctgaacacacacatacacacacattctatttctatggctcatattagctttattgacctttccatttcctatgatatcaaatatctaaactcaaaaataaaaaaataatattttcatactatattagtcataatattttggaactgaaactgcgttcactggattttttcagtttatcattcttgtgtggctcttttctcctttacttagtatagtcacagctatcaattaatggcataatttttggacatgcatgtataaacacacaaacacacctatatatatagctagtgaataataaagatatttagttatcatttatttataataatgaaatcttcctttttaaatgattaaaacaactaatattaatagaaaaaagaatgaagtaaggtgattatatttcagataaatggaaacacacttgcctcatgagctattttatatcaatgacttcagggactgagttatcttctacttaatggtatacatggatacaatatcaaaaatatatttccccttatatttaaaaaaacaaaaccaaaagttgcattttaaaaa

SEQ ID NO: 352213 - DNA, 566 bp, Homo sapiens
aaaatagggtctagatgcaaaatacaaaaaaactattttatatgtaattaaaaggccattaaaaatctatagtagaataaaggatcattcaatacaggctgcaaaactattaataatcagttaatttactcctaaattcaacaaatgtttattgagtttctattacatactaggcacagtttagtattggaaatgtagcagtgaagaaacaagatacctaataccatggatataacattatggtaaggtgacaagacaaaaactgaattagtaaataaactattaacaattgatataataagaaaaaggcatttacatgatagatgaggtagaaagaatgagaggagttacaatagataagagtcagacaagtccttcatgaggagtgatrtcttaactaagtgttgaaggactaaatcaagcaatcacagaattgctttagtatagactacagaacgtctatatttcacttggtgaattagtataaagtggacacatataaaacgtccaacctgttcaagaaatgaagcattgccaggatctcaaaagcccccataatgaacctt

SEQ ID NO: 352214 - DNA, 566 bp, Homo sapiens
aaaatagggtctagatgcaaaatacaaaaaaactattttatatgtaattaaaaggccattaaaaatctatagtagaataaaggatcattcaatacaggctgcaaaactattaataatcagttaatttactcctaaattcaacaaatgtttattgagtttctattacatactaggcacagtttagtattggaaatgtagcagtgaagaaacaagatacctaataccatggatataacattatggtaaggtgacaagacaaaaactgaattagtaaataaactattaacaattgatataataagaaaaaggcatttacatgatagatgaggtagaaagaatgagaggagttacaatagataagagtcagacaagtccttcatgaggagtgatgtcttaactaagtgttgaaggactaaatcaagcaatcacagaattgctttagtatagactacagaacgtctatatttcacttggtgaattagtataaagtggacacatataaaacrtccaacctgttcaagaaatgaagcattgccaggatctcaaaagcccccataatgaacctt

SEQ ID NO: 352215 - DNA, 554 bp, Homo sapiens
tacttctattttataatatgtcatccctttcttatgaggtctacaacagatgaccaccacatctggcaatgaacatgcaggaaggagaaagggtaaaggtgaaagagaagttatatccgtctactttaaggcataacaaactggttaagtatatcactttttctcacatctcattgtcccagaaaagtgagtgtgcttgaccagattttggaggtgcataataattgttagtaacaaaatattttatgaaaaaaaactatcattttcaggaaaacatcttaatgaggagcattagttagaaggaagcttgcttgtgagaacrgagtagcaggagaaatgactccaaaaaaacaattacattgatgggcattaccagcgacagggcatttcaggctggagagaataggaaagctgaaagagatacacggagccgcataaaaagaaaaggataaaaagatttttttttaacacaagaaaatcaggcattcaatattaaccagcctgtgtccctatgttataatttatggcttctatctcttcagaaatgttgaaca

SEQ ID NO: 352216 - DNA, 483 bp, Homo sapiens
ggagcatttcatggaattggaaaaagatctcccctccaggcctgccagtggtgatgaagctggacgtgagagttccagtaatcagtctcagtacagctgcaaayggaagtgcaatcagaattgtggtttttttgtagttttttttttgtagtttggattacaagagaaaaaaaattagatgtgtgtgtcaataacaacctctatttgcacctggtaattcattgtccaaataatacttttggaaaaaccaaaaacttcgttaaactttaaggagtgatttctacctagtttagctgtagatttttattatgctcttttcaaaaatgcacttaggtttatttaagacctctttattttggaatggatgggtatttccaaatatattacataagagactttctaaaaattgtgaaataatagatgaataaaaacaagggagataaatgtcttgtatctctctatcagacagcagagaggtacagg

SEQ ID NO: 352217 - DNA, 557 bp, Homo sapiens
gaaagtctgtctttgcttcatgacccatgaccctgtgaacaggacactagactcacctgtttctatccatttaacaaatgttgtttgtgtccacaccatgagccagtaagcattctacatcctgaggactgagcaattaacatggcagttgtcttggagctataatctctgatctcagtcatgaggaaaagatgataaaatsaaaatagcccaaatgaagaaacattttaggtgatatttgtgacctatcttattaagtcctccaaaatttgtatcttatcttcaaacccctatttgtcctatattgggtttcaacaagtttgcatgcaataacatcttgtagacacaaatttccaaaaaacaaattaaaagttcactactattagatgtatcacaaattataaacttatgtgactattaaattcttcactcttctattaattccctcaatttgtattatgagaaaatatattacttgtactactcgccaaaatgaaaaaaatcatttattacccaaggtttaattattagaagaacttgagaattaagctaaatga

SEQ ID NO: 352218 - DNA, 557 bp, Homo sapiens
gaaagtctgtctttgcttcatgacccatgaccctgtgaacaggacactagactcacctgtttctatccatttaacaaatgttgtttgtgtccacaccatgagccagtaagcattctacatcctgaggactgagcaattaacatggcagttgtcttggagctataatctctgatctcagtcatgaggaaaagatgataaaatgaaaatagcccaaatgaagaaacattttaggtgatatttgtgacctatcttattaagtcctccaaaatttgtatcttatcttcaaacccctatttgtcctatattgggtttcaacaagtttgcatgcaataacatcttgtasacacaaatttccaaaaaacaaattaaaagttcactactattagatgtatcacaaattataaacttatgtgactattaaattcttcactcttctattaattccctcaatttgtattatgagaaaatatattacttgtactactcgccaaaatgaaaaaaatcatttattacccaaggtttaattattagaagaacttgagaattaagctaaatga

SEQ ID NO: 352219 - DNA, 366 bp, Homo sapiens
acaaaagtcttatatgcatctcaaggaattaatcaccaaagctattctctcttttgggtgctaggccmcaaaataaacaggcctcacaataaacagtttgagacacatctaaaaccaacattttcaagttttctcactcttgttttagtgtatggatcactgtgaatctctagtttgcaaataattaatggatgacaattatgctgctttccacagtaccatttcttgttaatcttggctggtcatgcaacttgtacgaggactcattttaaatcatagcgataaatcctgattagtgaaatgtgcatacaagtttctcaacatattgtactgtgaaatactggattaacaaatgtatgtttgtat

SEQ ID NO: 352220 - DNA, 366 bp, Homo sapiens
acaaaagtcttatatgcatctcaaggaattaatcaccaaagctattctctcttttgggtgctaggccccaaaataaacaggcctcacaataaacagtttgagacacatctaaaaccaacattttcaagttttctcactcttgttttagtgtatggatcactgtgaatctctagtttgcaaataattaatggatgacaattatgctgctttccacagtaccatttcttgttaatcttggctggtcatgcaacttgtacgaggactcattttaaatcatagcgataaatcctgattagtgaaatgtgcatacaagtttctcaacatattgyactgtgaaatactggattaacaaatgtatgtttgtat

SEQ ID NO: 352221 - DNA, 612 bp, Homo sapiens
atgcacacctacaacttcacttaaaacatttattgaagtattgagacactaatstcctttagaaattaaaataaaatgaatttagatgacaagaatttcttctatcattagacaaatcctcgtgcccctttgtcccataacacttttgttaggtgttattaacctaatacttcatactgagagagtttaggagatttcttaaggtgatacttaaaagaaagaaaaaagaacttcttttatgtcagataaataaggctgagacattacacaggcattatatattttagagtaaggaaactgtattttaagaaagataaatctaggtggcaatctaaccccacatgtatttcttgtcttacaaaatctccatttatctgtatgagtagaaaacagtttcatgtgtggtatgttaggtcctcctataatcatctccaaagaaataagtcccatataattgcaaaactacagcaaactaaaatgattttccttttaaatgaagacttttaatttggggtaaaaggaaaaacaaaaattgcatcaattactcattcccttcatttcacaccctggcatacaaaataaaatatgcttattgttggctggtatggaggg

SEQ ID NO: 352222 - DNA, 612 bp, Homo sapiens
atgcacacctacaacttcacttaaaacatttattgaagtattgagacactaatctcctttagaaattaaaataaaatgaatttagatgacaagaatttcttctatcattagacaaatcctcgtgcccctttgtcccataacacttttgttaggtgttattaacctaatacttcatactgagagagtttaggagatttcttaaggtgatacttaaaagaaagaaaaaagaacttcttttatgtcagataaataagkctgagacattacacaggcattatatattttagagtaaggaaactgtattttaagaaagataaatctaggtggcaatctaaccccacatgtatttcttgtcttacaaaatctccatttatctgtatgagtagaaaacagtttcatgtgtggtatgttaggtcctcctataatcatctccaaagaaataagtcccatataattgcaaaactacagcaaactaaaatgattttccttttaaatgaagacttttaatttggggtaaaaggaaaaacaaaaattgcatcaattactcattcccttcatttcacaccctggcatacaaaataaaatatgcttattgttggctggtatggaggg

SEQ ID NO: 352223 - DNA, 515 bp, Homo sapiens
tattaacctaatacttcatactgagagagtttaggagatttcttaaggtgatacttaaaagaaagaaaaaagaacttcttttatgtcagataaataaggctgagacattacacaggcattatatattttagagtaaggaaactgtattttaagaaagataaatctaggtggcaatctaaccccacatgtatttcttgtcttacaaaatctccatttatctgtatgagtagaaaacagtttcatgtgtggtatgttaggtcctcctataatcatctccaaagaaataagwcccatataattgcaaaactacagcaaactaaaatgattttccttttaaatgaagacttttaatttggggtaaaaggaaaaacaaaaattgcatcaattactcattcccttcatttcacaccctggcatacaaaataaaatatgcttattgttggctggtatggaggggttctcttttagtatattttttggtgatgaatatgacctgccttctcttggaccaatca

SEQ ID NO: 352224 - DNA, 612 bp, Homo sapiens
atgcacacctacaacttcacttaaaacatttattgaagtattgagacactaatctcctttagaaattaaaataaaatgaatttagatgacaagaatttcttctatcattagacaaatcctcgtgcccctttgtcccataacacttttgttaggtgttattaacctaatacttcatactgagagagtttaggagatttcttaaggtgatacttaaaagaaagaaaaaagaacttcttttatgtcagataaataaggctgagacattacacaggcattatatattttagagtaaggaaactgtattttaagaaagataaatctaggtggcaatctaaccccacatgtatttcttgtcttacaaaatctccatttatctgtatgagtagaaaacagtttcatgtgtggtatgttaggtcctcctataatcatctccaaagaaataagtcccatataattgcaaaactayagcaaactaaaatgattttccttttaaatgaagacttttaatttggggtaaaaggaaaaacaaaaattgcatcaattactcattcccttcatttcacaccctggcatacaaaataaaatatgcttattgttggctggtatggaggg

SEQ ID NO: 352225 - DNA, 515 bp, Homo sapiens
tattaacctaatacttcatactgagagagtttaggagatttcttaaggtgatacttaaaagaaagaaaaaagaacttcttttatgtcagataaataaggctgagacattacacaggcattatatattttagagtaaggaaactgtattttaagaaagataaatctaggtggcaatctaaccccacatgtatttcttgtcttacaaaatctccatttatctgtatgagtagaaaacagtttcatgtgtggtatgttaggtcctcctataatcatctccaaagaaataagtcccatataattgcaaaactacagcaaactaaaatgattttccttttaaatgaagacttttaatttgrggtaaaaggaaaaacaaaaattgcatcaattactcattcccttcatttcacaccctggcatacaaaataaaatatgcttattgttggctggtatggaggggttctcttttagtatattttttggtgatgaatatgacctgccttctcttggaccaatca

SEQ ID NO: 352226 - DNA, 515 bp, Homo sapiens
tattaacctaatacttcatactgagagagtttaggagatttcttaaggtgatacttaaaagaaagaaaaaagaacttcttttatgtcagataaataaggctgagacattacacaggcattatatattttagagtaaggaaactgtattttaagaaagataaatctaggtggcaatctaaccccacatgtatttcttgtcttacaaaatctccatttatctgtatgagtagaaaacagtttcatgtgtggtatgttaggtcctcctataatcatctccaaagaaataagtcccatataattgcaaaactacagcaaactaaaatgattttccttttaaatgaagacttttaatttggggtaaaaggaaaaacaaaaattgcatcaattactcattcccttcatttcacaccctggcatacaaaataaaatatgcttattgttggctggtatggaggggttctcttttagtatattttttggtgatgratatgacctgccttctcttggaccaatca

SEQ ID NO: 352227 - DNA, 619 bp, Homo sapiens
acatctgcttttttattatttccctctgattgtgtttttgttttatctgttgtgtctttgtgcacgcctttagtttcagctttttaatgccatgttttggccatatttcttgtatacaggctaatgttggcttttccttcataagccaaatttaaaatgtttttattttaatagacaagcgaagcactttcatctttattgatataatggatrtacttggtctcaactggatcatatcatcatactttatgtgtgctatgtatattatgctgtgtttctctctttggtgtgtttattattattttttaaattttctggtagtaggaaggtttgtatttttattctgttggctatctttatgtgtataccttttgttatgctcttaagccccttcttttcttacttaacattttactatctgggaagccaatttaaatggtatcctttgactcccacctgctacctacacagcagtcaagagtggtctattttcccctttctctctgcatttacttcctagtcttttagttgcattttttctacttcatcagaacatataatatctacacattatttttccaaacgtgccctcactttttgttttaatcttagctctaca

SEQ ID NO: 352228 - DNA, 522 bp, Homo sapiens
ggcaagctctcagttcactgcagcctctgcctcctgggtgcaagtgattctgctgccttagcctcctgagtagctgggattacaggcatgtgccaccacgcctggctaatttgtgtatttttagtagagacaggatttcacgatgttggtcaggcttgtctcgaactcctgacctcggttatctgcccgcttcggccttttgaagtgctgggattacaggcatgagccatggygcccgactgatgtttatttttattataatttagttcaacatattttctaataaccattatgatttcatcccagatccatgaattatttataagtgaactatttttaaatttccagacatatggtgagtttctagttatctctatgtgattggcttccagcctaattccacaatgaccacagaatctttcttctgtttttaatcctttgaaatttgttgagacgttatgacccagcttatgggcaattttggtaaattttctatgcatactatggttgtcagtatcagtg

SEQ ID NO: 352229 - DNA, 619 bp, Homo sapiens
ttctagttatctctatgtgattggcttccagcctaattccacaatgaccacagaatctttcttctgtttttaatcctttgaaatttgttgagaygttatgacccagcttatgggcaattttggtaaattttctatgcatactatggttgtcagtatcagtgttttataatgtcaatttttctaaattgttttgttcaaataatctataactttactgatttgtaaactgtttgttctatctggtactgagagaggcttattaaaatatcccactctgattacagatttgtttttcctgtatttctttgttttatatatcatgagattatgttattaaatacattcaaatttagaatatctgtctctttctggtgaactaaaccttttagttcaccatttttcattttgttgatgtttctgcagttatctcttttgctctggtctctctatgcttcagactgataatttctttatttcttttaacctgtcatttagtttggtaattctctctccagtgaatctgctgttaatctcatcgatttaattctgaatttcaaataatgatttttatagttatagaatttcgtttttatctttactatttgcagtcctctgcaag

SEQ ID NO: 352230 - DNA, 619 bp, Homo sapiens
ttctagttatctctatgtgattggcttccagcctaattccacaatgaccacagaatctttcttctgtttttaatcctttgaaatttgttgagacgttatgacccagcttatgggcaattttggtaaattttctatgcatactatggttgtcagtatcagtgttttataatgtcaatttttctaaattgttttgttcaaataatctataactttactgatttgtaaactgtttgttctatctggtactgagagaggcttattaaaatatcccactctgattacagatttgtttttcctgtatttctttgttttatatatcatgagattatgttattaaatacattcaaatttagaatatctgtctctttctggtgaactaaaccttttagttcaccatttttcattttgttgatgtttctgcagttatctcttttgctctggtctctctatgcttcagactgataatttctttatttcttttaacctgtcatttagtttggtaattctctctccagtgaatctgctgttaatctcatcgatttaattctgaatttcaaataatgatttytatagttatagaatttcgtttttatctttactatttgcagtcctctgcaag

SEQ ID NO: 352231 - DNA, 563 bp, Homo sapiens
tttacatctccacttctagcctgaaaaacctaaggatctaaaatgaatggtatgacatttaaaaaccacagagttttttaaaaattgagatttccataatataagaattatttgcaaatggacaagaataatacaataatacacaaaagcggaaataatttttacaatgatggaatataggtatgtgtgtgggttttttccttttaaataaacttattgaaaacactcttacatctttgactattggaaataaaatggtggatttgggacccagatcccagtcttcactgggcatcttcctctattggctccagtacactcctccgtagaggctaatgctccagcatattgaaatactgctgctgcgggtgcagatcctggctcaccttgagctctcagctttgagtagccaaggcagcacccccaggataaccagagagaccagccaccacttcccaaggcaagaaaaataataattatatgaaggaagaaattttttggatgtctttttcaaaatggraagataaaacacccaagtgaataaagacattaaaaatagagtt

SEQ ID NO: 352232 - DNA, 520 bp, Homo sapiens
cacagttcgctctgaaatcctgaaatttgctctgcaatctttagattttgagataatacagtacagctgcacaaaagttaattttcaactttgttagaacatagttctttaaaattccctgattttttattctaactcaccttgaacgcattagagtgagtacaggtgatctaaatcatttagtctaatgtccatttggggcctggaattacccatagagtttccatgaaggcctagataattatgtagtaatgcactcactcatattagagatgtgttttaaaaatcttaaggaaacaggccttggacatttctattagacaactctctccctaccttccacctctgccaaaaagtaaaaataaaatccaaaaaataattgtatcaaaatcctctggtttatttcattctcttagtcatggtagagaaagtttacttgatctttmttctcttaccaaagcaaacttctccctcttaagatggctcaattttataaattcatgttttcatattactctaa

SEQ ID NO: 352233 - DNA, 573 bp, Homo sapiens
taggtttttgtgggttgtgtttccattatcatttgtttcaagacatttttcaattttcttcttaatttcttcactgaccccctggtcattcaggaacgtattatctaatttctatatatttatttagtttccaaaattcctcatggtgttaatttccagttttattccattgttgtcagagaagatacttcatattatctgaatgtttttaaatgttttaagacttgtattgtgacctaacatatggcctatccttgagaatgatacatgtgctcaggaatagaatgtgtattctgcagccgttggatgaaatgttctgtaaatatctattagatccatttgatctgtagtacagattaagtctgatgttgctttgttgattttctgtctggaagatctgtccagtgctgaaagtgggggtgttgaactatccatctgttattgtactgggtgatccctctctttagttctaataatatttgctttatatatctgggtgctccagtgttgggtgcatattttttataattgktatattcattcgtggaattgacccctctattattatatagt

SEQ ID NO: 352234 - DNA, 558 bp, Homo sapiens
tctctctgttctcctttcatatttccttttccttctccctgctctcttttattctctttggcaatgacttttaaaatctatgatatcaggggaacccacccccaatatttcaacataggttctattttccataagtgttggccggctgagaaagagagagagtacagagagaggaattttacagctgggcctctgggggtgacatcagctatcagtaggaccgtgatgcccacctgagccttaaagccagcaagttttattaaggattagaaaaggggaggggggtgcmagaacagggagtaggtcacaaagatcacatgcttcaaagggcaaaaaggagaataagatcacatgcttctaagggcaaaatcagaaacttctgataagggtccaacaaagatcacaaggcaaatggcaaaagcaaagatcacaagtcaaagggcaaaagcagaattactgataagggtctatgttcagtggtgtacgtattgtcttgataaacatcttaaacaacagaaaacagggtttgagagcagagaactggtctgacctcaaatt

SEQ ID NO: 352235 - DNA, 476 bp, Homo sapiens
accagggcatacttctgtccttatctcaaccacataagacagacactcccagagcagccatttatagacctcccctccaggaatgcattcyttccccagcgtattaattattaatattccttgctaggaatagaatttagcaatatcttccctacttgcacgtccgtttataggctctctgcaagaagaaaaatatggcactattttgctcgaccccgcaggcagtcagaccttatggttgtcttcccttgttccctgaaaattgctgttattctgttctttttcaaggtgcactgatttcatattgttcaaacacacatgttttgcaatcaatttgtacagttaacacaattatcatagtggcactgaggtgatgtacatcctcagcctatgaagataacaggattaagagattaaagtaagacaggcataagaaattatgaaagtattatttgggaactggtaaatgtccatga

SEQ ID NO: 352236 - DNA, 476 bp, Homo sapiens
accagggcatacttctgtccttatctcaaccacataagacagacactcccagagcagccatttatagacctcccctccaggaatgcattccttccccagcgtattaattattaatattccttgctaggaatagaatttagcaatatcttccctacttgcacgtccgtttataggctctctgcaagaagaaaaatatggcactattttgctcgaccccgcaggcagtcagacyttatggttgtcttcccttgttccctgaaaattgctgttattctgttctttttcaaggtgcactgatttcatattgttcaaacacacatgttttgcaatcaatttgtacagttaacacaattatcatagtggcactgaggtgatgtacatcctcagcctatgaagataacaggattaagagattaaagtaagacaggcataagaaattatgaaagtattatttgggaactggtaaatgtccatga

SEQ ID NO: 352237 - DNA, 476 bp, Homo sapiens
accagggcatacttctgtccttatctcaaccacataagacagacactcccagagcagccatttatagacctcccctccaggaatgcattccttccccagcgtattaattattaatattccttgctaggaatagaatttagcaatatcttccctacttgcacgtccgtttataggctctctgcaagaagaaaaatatggcactattttgctcgaccccgcaggcagtcagaccttatggttgtcttcccttgttccctgaaaattgctgttattctgttctttttcaaggtgcactgatttcatattgttcaaacacacatgttttgcaatcaatttgtacagttaacacaattatcatagtggcactgaggtgatgtacatcctcagcytatgaagataacaggattaagagattaaagtaagacaggcataagaaattatgaaagtattatttgggaactggtaaatgtccatga

SEQ ID NO: 352238 - DNA, 483 bp, Homo sapiens
aaaaggataaaattccaaagaaactttatctcctgaagcctagttttttttaattgcatgtcttcccatgctaataacagtgatatgttgaaaatctttatacaactatctcctacaactttccagtgtccaactattcctcaaaaccaatatatccataggtttctcagtatgtctacaattcaaccccaggatactatttctaaggtttgtttctgggaactatttctgataccaattacagtgttatttaaggttaaccagaaaaaaaatagacagcacattaaaatcaatatttagggggatgtttaataaatcaagtccttttacaaattgtgtttgtgttttagggaattaaaaaggaggagagaagtggcaatacagagcagttgagctagtagtgggtttagacatttttaataactggctttctagaaaaaaayctataacaaaaataaaccaaaaaacctaatttgtagctat

SEQ ID NO: 352239 - DNA, 509 bp, Homo sapiens
aaacattcaatctataactatgtgtatatagagaaatatgtatatgtttgtaaaaatatatattaattatattcctgtktatcttgttagctagctactacttacttgtccttaaatgatgtacaatcagtaaattattgttaaaaatatgtttataatatatagattcatttatatctaaatttgaaccacatattaaactgcatttttattaagcttaatcatagaactgaatgtcataatctttatgatgtattaaattacatttttaaaattattattctcttttgttatcctctatttagctgttttcctacattaagactaagctgtagcctcgtgtccctcattaattcttttgttcaacctaactaatcattatctactcactctctgcccctctgcagcaatattgtctttgtttaccttctttcaaagtaaactggtgttttattatattttgtgcatattaatgaatgtgtcaatacaagagatgttgttaggaaaca

SEQ ID NO: 352240 - DNA, 604 bp, Homo sapiens
taagcaacttgaagttatactgcaaaataacgcaaatattttaggtgtytttttctcatagtattcataatgaacagtgattctattgtaaaatgcatgcatttagtagaaatttataagttacagaaaaaagacactaattacatgtcaagagaaatctaaatgcaatattcctgctatgttaaacatggtgtgcaatttattgaattaaggataatcaaattgcaaaacttctaaaaaagtgcaagatttgatagctgcaatagaagactttgaataataaaagaaaaaagatgagttggtgaagacataatctttcttcatctaggtaataacaatgtttgagatgttattaacataattataatagttgtactgtctttattatttagtattttcctagacagatatcttactgtttttctataagaatctaaaaacggtctttagaaatatatcagtatttttgtaattggaaaaatcattaattttacatgagtattttgttctcattcctttttttaagactgagcagtttaagatatttatgaattatccaaaataagacattcaaaaaagtttatatgcatctggaaacaacaca

SEQ ID NO: 352241 - DNA, 551 bp, Homo sapiens
aaagggaatttattagggtatgtggctcatgcaatagtggaggctgagaagtagcatgatgggccatttgcaagctagagaaccaaggaagcattttgcatggctcagtccaattttaaaggtctcagaaccagcaaaactgattgggtaacactcagtctgaggccaaaggcccaaaaacctattggggtgtgtgcgtgttgtgggtgcaggctggtggggggcagaaggtgttgagagagaaggtggttggtgcaggtcccagagtcctaaggtataaaatcttgmgttctggtgtccacggccagaaaaaagggtggtccagctccaggagagagagaacaaattccacttttctctcccttttttattctgtcaggctcccagcaaattgaatggtgcctgcccacattgaagggagttctttctcactcagtctaccaactcacaccaattgcctccaaaaacaccctcacagacacactcagatttaatgcttagccggctccctaggtatcccgtaatccagtcaaactgatacctaaaattaa

SEQ ID NO: 352242 - DNA, 579 bp, Homo sapiens
cccattaaaaatgaaagcagccatctatgttatctcataagaataaaagtgaccgtgaatacctaatgaaaactgaagtagaaaaaaatagtacttaactatgaattcctctaaaaattgactgtgattaatttgggacagcaaattaagttttttcctatatatcaaattttcacatcatataatgtatagcctaagaagtcctcaaatttttattggtacatcataaacatgctctttctatggtggtattatattaataggtgtggatagattccttaaatactaaattggataaggtaaaattttatttttctctttaaagcataaaaatagaaatcttcaaaytgggtcagggagaagtaaggtatctacccaacattcatgtgttgttatcttattttcttagaaatttgataccatattactaaccatgaatccatataatcatatttcaatctaaaaactttttttttcctagatttggtttgtaaagatgggcaaaatattaacaaaactgtatttactatttcactaattcatatctgagtttaaaatttgtaacttttttctcaattg

SEQ ID NO: 352243 - DNA, 576 bp, Homo sapiens
gtgagcctttttcttttttttctttttttgctagactccttaccttccttgagcttctttcaaattctctgcaactttttctaccacgttaggctcagtaatgtgtttttattcccgctcacttcaagaatccctgtccattgattgtgccttttcgtaccctagtactttatcttatgacctgatttactggacgtatgcctggaagttagaccatgcttggagaagygtgataccctatttaaatcagctgcctcaaacacaaactcaagcattcaatatcactctatcttccacaacaacacttcatttctgttttagaggtaacaagcaggtagaagttccaactgaaatgcttctttatatattcatacaacgtatcgtgtgcttatctacctatgtcatttcatataatttacacttacactgatatctttttttttcagttagggttccattagataaacacaatcactaggaaatagacacatgcgtatctggattttctacagggattcaaggttcacagttgtggggattgtttaggcttgataagtagtcactctatgactggtg

SEQ ID NO: 352244 - DNA, 577 bp, Homo sapiens
aaatgttgcaaataatggttaaattagggaaaatgatccaagttttttttttttttcattgcaggcaaaraactagggaatatggttcacttacccaaatatagttcacttttttctttatttacaacccaaaaatatttacttatcaccattctatgcttgtcattgttataggctatgggaatataaagataaatatcacacatatgaatcctcttctcgtggagcctgaaacccagaagaagagacaagcaaggaaaaagaaaatcacttcgatgaagtaattgtaattgttttaaaaaccaagaaggaaacaaacaagttctaaaataaatgataacaggtaggacctatttcttggtaaggaaaagtggaagacctcactaatgagctgagctttaagtggattaatgaggaataatatttacccaggtatagagaggaggaaagtccaacatgggacctggtctgattgaatatcattccattacctgtcacgggcaaggagaagtggcagaatatgtggttaggaacagaacaaaaactcaatcatgaagatcttcgtaggtcatgttag

SEQ ID NO: 352245 - DNA, 577 bp, Homo sapiens
aaatgttgcaaataatggttaaattagggaaaatgatccaagttttttttttttttcattgcaggcaaaaaactagggaatatggttcacttacccaaatatagttcacttttttctttatttacaacccaraaatatttacttatcaccattctatgcttgtcattgttataggctatgggaatataaagataaatatcacacatatgaatcctcttctcgtggagcctgaaacccagaagaagagacaagcaaggaaaaagaaaatcacttcgatgaagtaattgtaattgttttaaaaaccaagaaggaaacaaacaagttctaaaataaatgataacaggtaggacctatttcttggtaaggaaaagtggaagacctcactaatgagctgagctttaagtggattaatgaggaataatatttacccaggtatagagaggaggaaagtccaacatgggacctggtctgattgaatatcattccattacctgtcacgggcaaggagaagtggcagaatatgtggttaggaacagaacaaaaactcaatcatgaagatcttcgtaggtcatgttag

SEQ ID NO: 352246 - DNA, 407 bp, Homo sapiens
ccactaagattcaaaaatagttttcttctattgcctcttccaacagataaaatcttctcactgaagatcataattaggttatttaacgtattagtccattcttgcaatgctacaaagaagtacctgagactgtgtaatttataaagaaaagaggtttaattggytcatggttctgcaggctgtacagaaagcatagtggtttctgcttctggggaggtctcaggaaacttacaatcatggtagaaggcaaaagagaagcagacacgtcttacatggccagagtaggaggaagagaaagagatgggagaggtgctacacacttttaaataaccaaatcttgtgacaatcctatcacgagaacagcaccaaagggatggtgttaaatcattcacgaaagacccgtcccc

SEQ ID NO: 352247 - DNA, 608 bp, Homo sapiens
gatagaggaaaggccctttgaggcacagggagaaagtgtctgtcaacaagccaggaaaagggatcttactggaaactaacatcatggcagcttggtcttctagcttccaaaactgtgagaaaataaatttctatgtttcagtcacccaagtattctgttttggcagtccaggcagagtaatgcaaccacttaatctacagatctatttaagcactggtacttgtgatttcagaagatggattcaaatcagaatcacctattacatatttttaagtttctatctggaatatttcctcaatctttcctcgactttcaggatcttgactcttttgagggttagtgaccagacgttttgtagactttcctttatttgggcttgtctaatttccatacaataaaattcaagaaaaatgaaggtatgatttcagtgtattctatgaagtaatacattcaaatrtgtcctctttttggtgatgtgcacttcacttgattagagatgtatttgtaaggcttctccactatgtaatcatcaagcttttactttatttatttatgtaagtggtcttatcaatttactcaattgattgtaattgataactatcattagt

SEQ ID NO: 352248 - DNA, 634 bp, Homo sapiens
tggtgaatttttgtaactgttggcaagtagtggcaatctttttactgaaatgataaatatgatattaataatgcatgtagatgtatagtgattctaccatttcttcaaaatagaaatatatccccttgaatttagcaaatattattgctgtgcccatccacatccattgacaggtttgatgagaccgcacatcctgttttcctttttcaggcagcaaaagctgtttcatggaacaagtgttttagattaaaatgaataggtaggaaataaaactataatgtaaatctagacccatagttgaatagttgacagctgcatgtctaaggaaaaaaatagtcaatmtttttcatgatgatagattgaaatgggattagaatacagctggatttcatctggtacatctcaacagtacacatttccctcagacttaaaagaaatctctggatgaacttaaagggctaagctatttatcaatcataaattctgttgtttgtccttaaatacagatattggcaattttcatgtatctatgctggcatttcaaaataagagttatattgctaaatactctttgcaataaattcaagtttgccaatatataactatatgatgactgctcctctgagaccccacc

SEQ ID NO: 352249 - DNA, 595 bp, Homo sapiens
tgctaaagcaaaccaacacacaaaaatcaacactggagaaatatgacagaattcagattcttcaaaacacagcatttaaaatgtccaagaaacaccctgtgttaatcagggttctccagagaaatagaaccaataggagattagacagataaatagatgagagaggatttattagggaaattggcaaatgcagttatggaggctgaagagtcccacaatagaccaactgtaagatgaagaaacagggagctggaagcatggatatttaaagcccagaagcctctaaaccagggagcccaatggtataactctcagtcttaggctaaaggcttgagaacatgggagcagggcctgctggtgaaagtctttgagccccaaagctggacaactggaattctaatgtccaaaggaagaataagaaggatttcttaggtctagaagaaagtacacaattcamcttctggctttttgtttagttggttggatggtgcctgcccacattgggtgaaggtatatttcttagccagtgtgctgattcaaatgccaatcttctctaaaagacacccttatattatccagaaataatgctgtacca

SEQ ID NO: 352250 - DNA, 554 bp, Homo sapiens
attgatttactccttatagctttattgagtatgagatttcagttgaataatttttcaccatcatgaagatgtaattccattacctactgacgtcatttgtttataatgatgactttgctaccagtataatattcatacattgttagattatttatcacatatctctgcaaaatcttaagatgtctgacatcctgcagtttaactaactttctatgtatacaagatagtaagctttactaygtcaacccagataagctggaactacattttccagaacccccttacctttgtcgtaacaagtgagattagttacaagacaaatttccatgggatttggaaagcagtaaggaaagaatcttttcttttcttttttctttttccttcaatttttttgtattaaagttatgttagggcactaggctctgtgtagttacatatctgccagttcacctgtttggcctgagcagcacccaggccatgagtagctcctgaatctccccatggtttgggtcaaatgttcatgtatgtgaagttccatgggaaagaatgccaga

SEQ ID NO: 352251 - DNA, 513 bp, Homo sapiens
aagtttagtagtacggtctgctttcgcttgtcttgattggtgtgaaagcatcaatggttttatccaccactcgttttgtaccatgagtttaaatttcaacacagtaaaaaaggcaaatatatcagtttactatcattgtggaaatagttttgatctccaggtctcccygaaactgcaaacatcttgagtacctcatggtatatggcacagctctggaaaactgctgtggtagcggaaatgaaatctgaactctatccttgattccaaggtttatctcccagggttgtgggggggaaaaggaagaagagaaaggaagaaaagaaaattaatgtaaataatattaactgcaaagaaaacaaatgcaattattattagcaatagtagtagtagcagtggtagcaatagtagtagtattaacttagttattatggatgattatattgacctgacacatacaactttaaattaaaactaattagttgggcaaatgtaacagtcttccattacactttt

SEQ ID NO: 352252 - DNA, 581 bp, Homo sapiens
tgattgcttatattatctttgaaatatttatacacagcgtattatttcctgaattgtgtattaaaaaattaagggactgaaacatcaagaaagcattgattttccgttcctgagttacttcacttagaataatagtctccagttgcatccaggttgctgcgaatgccatttattcattcctttttatagctttagtagtatttcttcrtacatatataccacagtttctttatccattcattgattgatgggcatttgggctggttccacattttggcaattgtatattgtgctgctataaacatgtgtgtccaagtatctttttcgtataatgacttcttttcctctgggtagatatccagtagtggaattgctgtatcaaatagaagatctacctttagttctttaaggaatctccacactgttttccttagtggttgtactagtttacattgccaccagcagtgtagaagtgttcccttttcactgcatctgtgcctacatttatcactttttgattttttgattatggctattcttgcaggagtaaggtggtatcgcattgtggtttttatttgcat

SEQ ID NO: 352253 - DNA, 581 bp, Homo sapiens
tgattgcttatattatctttgaaatatttatacacagcgtattatttcctgaattgtgtattaaaaaattaagggactgaaacatcaagaaagcattgattttccgttcctgagttacttcacttagaataatagtctccagttgcatccaggttgctgcgaatgccatttattcattcctttttatagctttagtagtatttcttcatacatatataccacagtttctttatccattcattgattgatgggcatttgggctggttccacattttggcaattgtatattgtgctgctataaacatgtgtgtccaagtatctttttcgtataatgacttcttttcctctgggtagatatccagtagtggaattgctgtatcaaatagaagatctacctttagttctttaaggaatctccacactgttttccttagtggttgtactagtttacattsccaccagcagtgtagaagtgttcccttttcactgcatctgtgcctacatttatcactttttgattttttgattatggctattcttgcaggagtaaggtggtatcgcattgtggtttttatttgcat

SEQ ID NO: 352254 - DNA, 555 bp, Homo sapiens
gtataactgggagctaaacattgggtaataatggacacaaagatgggaacaacagacactgggacctgctagagcggggagggagagagctgggcaagggttgagaaactaactgttgggkaccatgctcactatctgggtgatgggctcattcatattccaaatctcagcatcatgcaatacacccatgtaacaaactggcacatgtaccccttgaatctaaaataaacgttaaaattattttaataaaacaatttaattgacaaaattgtatatatttatggtatacaatgcgatgttttggaatatgtatatatacatcatggactggctaaattaaactaatatatacatcacttcacatgcttatcatatttttgtggtgagaacacttaaaatgaactctcagtgatttttaagtatgcagtgcattgttattaattatggttaccatgttgtacaatagacctcctgaatttatttgtcctgcctaattgaaattttgtttcttttaactaataaccctcaaattcctcctcttccagtccctgggaa

SEQ ID NO: 352255 - DNA, 555 bp, Homo sapiens
gtataactgggagctaaacattgggtaataatggacacaaagatgggaacaacagacactgggacctgctagagcggggagggagagagctgggcaagggttgagaaactaactgttgggtacyatgctcactatctgggtgatgggctcattcatattccaaatctcagcatcatgcaatacacccatgtaacaaactggcacatgtaccccttgaatctaaaataaacgttaaaattattttaataaaacaatttaattgacaaaattgtatatatttatggtatacaatgcgatgttttggaatatgtatatatacatcatggactggctaaattaaactaatatatacatcacttcacatgcttatcatatttttgtggtgagaacacttaaaatgaactctcagtgatttttaagtatgcagtgcattgttattaattatggttaccatgttgtacaatagacctcctgaatttatttgtcctgcctaattgaaattttgtttcttttaactaataaccctcaaattcctcctcttccagtccctgggaa

SEQ ID NO: 352256 - DNA, 555 bp, Homo sapiens
gtataactgggagctaaacattgggtaataatggacacaaagatgggaacaacagacactgggacctgctagagcggggagggagagagctgggcaagggttgagaaactaactgttgggtaccatgctcactatctgggtgatgggctcattcatattccaaatctcagcatcatgcaatacacccatgtaacaaactggcacatgtaccccttgaatctaaaataaaygttaaaattattttaataaaacaatttaattgacaaaattgtatatatttatggtatacaatgcgatgttttggaatatgtatatatacatcatggactggctaaattaaactaatatatacatcacttcacatgcttatcatatttttgtggtgagaacacttaaaatgaactctcagtgatttttaagtatgcagtgcattgttattaattatggttaccatgttgtacaatagacctcctgaatttatttgtcctgcctaattgaaattttgtttcttttaactaataaccctcaaattcctcctcttccagtccctgggaa

SEQ ID NO: 352257 - DNA, 555 bp, Homo sapiens
gtataactgggagctaaacattgggtaataatggacacaaagatgggaacaacagacactgggacctgctagagcggggagggagagagctgggcaagggttgagaaactaactgttgggtaccatgctcactatctgggtgatgggctcattcatattccaaatctcagcatcatgcaatacacccatgtaacaaactggcacatgtaccccttgaatctaaaataaacgttaaaattattttaataaaacaatttaattgacaaaattgtatatatttatggtatacaatgcgatgytttggaatatgtatatatacatcatggactggctaaattaaactaatatatacatcacttcacatgcttatcatatttttgtggtgagaacacttaaaatgaactctcagtgatttttaagtatgcagtgcattgttattaattatggttaccatgttgtacaatagacctcctgaatttatttgtcctgcctaattgaaattttgtttcttttaactaataaccctcaaattcctcctcttccagtccctgggaa

SEQ ID NO: 352258 - DNA, 593 bp, Homo sapiens
aatgtttaaaatcataagatgcaatattttgttatttttatgtattttatgttcaactgaacttttttaagcttatagaatacacctactcagcaaggtgtagaggaactcactggggaaagcacagtcttctcattacacagtgcaggggcgactgcatagccacatgcagaagaatgaatgtgaactcctatttcaccccagaaggaaaaaagaaagcaaaatgtatcattgccctaattataggagctaatgtaataaatcaattagaagaaaaaatagggttattcatgacytaaggcatacaaaaattcatagaaatacaggaaaagcacaagcaacaaaagaaaacatagataatttgattccatcaaaatctgtttaaaagattttctgcttcaaaaggcatcatcaagaaaacccacaaatatgtggaaattaaacaatgcacattaaaaataagaaatataagaataataactgctttaaaataataactgctatataaaaaaacacagaatgaatggcttatgtgaacagaaatgtatttctcacagttctggaggatggaaatctgaaatcagagtgcccag

SEQ ID NO: 352259 - DNA, 594 bp, Homo sapiens
tgtaatttcaataccaattttgggaaaaaccaactttcagttcataataaactccaaggaactagaaaaagaagaacaaactaaacccaaagttagcaaaagtaaagaaataataagtattaaagcagtgatgaataaaatagagaacaaagaaaaacaaatttaaatattaacaaaaacaagagtggatttttaaagaagataaaattgaaaaaaatctagagaaactaagaaagatagaaaactaaaataaaattagcaatataagagaaggcatttcaactaatgtcatagaaatgaaaagaattataacagactactakgagtaattctacactaacaaactgcgtaacatagaagaaatgaattaattcctggaaacatttaacttatcaagagtgaatcactcctaaatttcaaaaaaatctgaacagacttgtaagtggtgaaaaaattggagtagtaaaaaacatctcaataaagaaaagtgcataacgagaaggctccattggagaataataccaaacatttcaagaataattttatttttttgagaaaaggtctcacttctgacacccaggctgaagtgcagtc

SEQ ID NO: 352260 - DNA, 655 bp, Homo sapiens
ttgtctaatttggaaattactaaaatggagattcaaatgatgaaggaagcagtgaatagaaaaaaagacatgtaaagaatgttrtaaatagaaaatgtactttttgcaatgaaggattataaaaagagtaattttctacaaaaaaaactagtataataaattcttgtcctggagtaaaatgactagttatttaagaaagaagtaaagaagtaatatgagacaagtgagaaagtcccagcatgtgatagatggtctctgtaagttgacacaaggttcataaaggggacattattaaagaaattttgtatgtgattaagttagctgtaatttaaaaaacatagactttctaaaaatggtctacatattgaaattaggttttcttaaggtattcatttgctaaattacagaaaattttgcctttcattcctaactagtttcttttaaaacttctcatatttgtgtctccaaatttcaatcatggttgtgtcttgttgttttcagctctttctccctttaaaaaggcctaggataatggctctctcctttagcttttgcaccaacttctgtgagtttttctcctctgattctgatatttattgtggtctgatgctaaagcgttttgacttaaaattctttgagagcaaagttttttccc

SEQ ID NO: 352261 - DNA, 546 bp, Homo sapiens
gcaattttgagctatttgttttattttttctacttcttttgccctgtttccattgttgtaaagtttaaagaccacattaagagttggctcatagggctttgtgtccccattgctgttttgtgtagcttcctcctaatgtcagggtagattgactaataaaatatatgtccaggagagcctgcccttctaggaagtctgggtctgcaatcgtatatttcctgagcgcctcaaccaatacatgtcccaaatacatatggcttaaccatacatgtctttctccactttttttctatggcacagaaaacaggagacaatatttacaagtcatgacctaaattaaacagcatattcaacttaacaaattcctctataaacttytatggatccactgaaaaatggccatctgtttccttttatgaagtcaaatcacatctagaaaatggcacacataccgtaagtgttccctcatttctatcaactacctcctgcaatggagacagctttgactttaggggctgatatggggtcccactcctggtggtactg

SEQ ID NO: 352262 - DNA, 546 bp, Homo sapiens
gcaattttgagctatttgttttattttttctacttcttttgccctgtttccattgttgtaaagtttaaagaccacattaagagttggctcatagggctttgtgtccccattgctgttttgtgtagcttcctcctaatgtcagggtagattgactaataaaatatatgtccaggagagcctgcccttctaggaagtctgggtctgcaatcgtatatttcctgagcgcctcaaccaatacatgtcccaaatacatatggcttaaccatacatgtctttctccactttttttctatggcacagaaaacaggagacaatatttacaagtcatgacctaaattaaacagcatattcaacttaacaaattcctctataaacttttatggatccactgaaaaatggccatctgtttccttttatgaagtcaaatcacatytagaaaatggcacacataccgtaagtgttccctcatttctatcaactacctcctgcaatggagacagctttgactttaggggctgatatggggtcccactcctggtggtactg

SEQ ID NO: 352263 - DNA, 546 bp, Homo sapiens
gcaattttgagctatttgttttattttttctacttcttttgccctgtttccattgttgtaaagtttaaagaccacattaagagttggctcatagggctttgtgtccccattgctgttttgtgtagcttcctcctaatgtcagggtagattgactaataaaatatatgtccaggagagcctgcccttctaggaagtctgggtctgcaatcgtatatttcctgagcgcctcaaccaatacatgtcccaaatacatatggcttaaccatacatgtctttctccactttttttctatggcacagaaaacaggagacaatatttacaagtcatgacctaaattaaacagcatattcaacttaacaaattcctctataaacttttatggatccactgaaaaatggccatctgtttccttttatgaagtcaaatcacatctagaaaatggmacacataccgtaagtgttccctcatttctatcaactacctcctgcaatggagacagctttgactttaggggctgatatggggtcccactcctggtggtactg

SEQ ID NO: 352264 - DNA, 630 bp, Homo sapiens
agctaggaggggatcccttaggcgtggcttcctggtgcctggaagtaacrtgagtcagtaaaatgccttaaaagcctgtacaaaaggaacctcctcccattttcctttgtatttttcacagaacaagtctaattgcaaagtatcattgtaatgcaaagaatgatgcctaggccagatctgttggttttctaatttgtattaaacttaaactacatagcaatacaaaatgagttttttttttaataggtgaatttgaattcgctccaataacataaaacacaccctagtggcaagtcccctgggacgctcatcattgtccccatgtctaataaggatttctgctggacacagaggtttttctaagtctagtaagatggaaagcaagtggactcttgttatttttcccttttagattcccacctcctgtagagaaggtgtaagtgcagttagcaagggttacacaagtggattataagcatttagcagtgaatgaaatataacaaaagaagtatttttgttaaaaaagtgtagaaggaaaactgtaaataaagtgacaattagaaaagaaaatgttgttatggaaaatgataactttagggcagaaaacaggagaaggcaagaccaagattt

SEQ ID NO: 352265 - DNA, 630 bp, Homo sapiens
agctaggaggggatcccttaggcgtggcttcctggtgcctggaagtaacgtgagtcagtaaaatgccttaaaagcctgtacaaaaggaacctcctcccattttcctttgtatttttcacagaacaagtctaattgcaaagtatcattgtaatgcaaagaatgatgcctaggccagatctgttggttttctaatttgtattaaacttaaactacatagcaatasaaaatgagttttttttttaataggtgaatttgaattcgctccaataacataaaacacaccctagtggcaagtcccctgggacgctcatcattgtccccatgtctaataaggatttctgctggacacagaggtttttctaagtctagtaagatggaaagcaagtggactcttgttatttttcccttttagattcccacctcctgtagagaaggtgtaagtgcagttagcaagggttacacaagtggattataagcatttagcagtgaatgaaatataacaaaagaagtatttttgttaaaaaagtgtagaaggaaaactgtaaataaagtgacaattagaaaagaaaatgttgttatggaaaatgataactttagggcagaaaacaggagaaggcaagaccaagattt

SEQ ID NO: 352266 - DNA, 592 bp, Homo sapiens
tccacaaatgaaatattttacagttcctgccctttcaaagtccaggttgtggacaaataattgtagcatttttacgtttccaagttaagattgtatgaagatcaattctacacaatctctcattttttgtttataaaaaatattttattatatattattgttttgttgaggtgtcagttaaatacaataaaawgtatggatctcaaatgtacagtttaattggttttaacaaatgcattcagttaacttgtgtaacccacactcctatcaaatcacaggacttttccaccaccccagaaagttatcttggccccttgaaactcaggcttctcctttgaaagcagtcacagatctgatttctacctctatgggttagttttacttattctaggaattcttatatttagagtaatatagtatgctgatttttctgtctgttccctttcattgagatttttaaattgtgtgtgtgattcatcatggggccttgagattcagtagtttgttccttttttgttgatgattgatatccctttttatgggtatcttacagtttatccattctcagaacacttgacaccagagcagtttt

SEQ ID NO: 352267 - DNA, 592 bp, Homo sapiens
tccacaaatgaaatattttacagttcctgccctttcaaagtccaggttgtggacaaataattgtagcatttttacgtttccaagttaagattgtatgaagatcaattctacacaatctctcattttttgtttataaaaaatattttattatatattattgttttgttgaggtgtcagttaaatacaataaaatgtatggatctcaaatgtacagtttaattggttttaacaaatgcattcagttaacttgtgtaacccacactcctatcaaatcacaggacttttccaccaccccagaaagttatcttggccccttgaaactcaggcttctcctttgaaagcartcacagatctgatttctacctctatgggttagttttacttattctaggaattcttatatttagagtaatatagtatgctgatttttctgtctgttccctttcattgagatttttaaattgtgtgtgtgattcatcatggggccttgagattcagtagtttgttccttttttgttgatgattgatatccctttttatgggtatcttacagtttatccattctcagaacacttgacaccagagcagtttt

SEQ ID NO: 352268 - DNA, 655 bp, Homo sapiens
ttgtctaatttggaaattactaaaatggagattcaaatgatgaaggaagcagtgaatagaaaaaaagacatgtaaagaatgttgtaaatagaaaatgtactttttgcaatgaaggattataaaaagagtaattttctacaaaaaaaactagtataataaattcttgtcctggagtaaaatgactagttatttaagaaagaagtaaagaagtaatatgagacaagtgagaaagtcccagcatgtgatagatggtctctgtaagttgacacaaggttcataaaggggacattattaaagaaattttgtatgtgattaagttagctgtaatttaaaaaacatagactttctaaaaatggtctacatattgaaattaggttttcttaaggtattcatttgctaaattacagaaaattttgcctttcattcctaactagtttcttttaaaacttctcatatttgtgtctccaratttcaatcatggttgtgtcttgttgttttcagctctttctccctttaaaaaggcctaggataatggctctctcctttagcttttgcaccaacttctgtgagtttttctcctctgattctgatatttattgtggtctgatgctaaagcgttttgacttaaaattctttgagagcaaagttttttccc

SEQ ID NO: 352269 - DNA, 655 bp, Homo sapiens
ttgtctaatttggaaattactaaaatggagattcaaatgatgaaggaagcagtgaatagaaaaaaagacatgtaaagaatgttgtaaatagaaaatgtactttttgcaatgaaggattataaaaagagtaattttctacaaaaaaaactagtataataaattcttgtcctggagtaaaatgactagttatttaagaaagaagtaaagaagtaatatgagacaagtgagaaagtcccagcatgtgatagatggtctctgtaagttgacacaaggttcataaaggggacattattaaagaaattttgtatgtgattaagttagctgtaatttaaaaaacatagactttctaaaaatggtctacatattgaaattaggttttcttaaggtattcatttgctaaattacagaaaattttgcctttcattcctaactagtttcttttaaaacttctcatatttgtgtctccaaawttcaatcatggttgtgtcttgttgttttcagctctttctccctttaaaaaggcctaggataatggctctctcctttagcttttgcaccaacttctgtgagtttttctcctctgattctgatatttattgtggtctgatgctaaagcgttttgacttaaaattctttgagagcaaagttttttccc

SEQ ID NO: 352270 - DNA, 564 bp, Homo sapiens
ggtaatttgtcatttggaaatttcctgatactgtttctyactctatacaaaatggaaataaacataccctgggaagattcaaagacagagtaaatggacatttttattcagaataaatgcaaaatggagatgaatttgctctcttttcttatgaactgtaccatggttcataaaatttgtaccattaattaaataactcttaattaatttatttctcagtgagaaggtatcagaaactttttttaaaaattcattacaactttcaattctccagatctttgggatttcatgaaactgtaatcatacttctatgattttttgacttttccttgtgttctgataatttagcctaactaatatgagagcacactgtttctatgtaagcttcaggctccaagagaagattgtgctgtttacttcactgatcaaacttgagcaactagaataacacttggctgagattcaagactcaaataaatgtattgagtgaatgaataaatgattcctcaatgaatggaattgatttcatgagtggaactgatttcacatgcttttcataatggg

SEQ ID NO: 352271 - DNA, 609 bp, Homo sapiens
gcatgtatacgtgtgtgtgtttgcatgtgtgtggtaatttgtcatttggaaatttcctgatactgtttcttactctatacaaaatggaaataaacataccctgggaagattcaaagacagagtaaatggacatttttattcagaataaatgcaaaatggagatkaatttgctctcttttcttatgaactgtaccatggttcataaaatttgtaccattaattaaataactcttaattaatttatttctcagtgagaaggtatcagaaactttttttaaaaattcattacaactttcaattctccagatctttgggatttcatgaaactgtaatcatacttctatgattttttgacttttccttgtgttctgataatttagcctaactaatatgagagcacactgtttctatgtaagcttcaggctccaagagaagattgtgctgtttacttcactgatcaaacttgagcaactagaataacacttggctgagattcaagactcaaataaatgtattgagtgaatgaataaatgattcctcaatgaatggaattgatttcatgagtggaactgatttcacatgcttttcataatgggcagagtataatac

SEQ ID NO: 352272 - DNA, 535 bp, Homo sapiens
tgttaaaatattgtgacttcatcttacagcatcactaatagtccccgagtggttgagtaaaaaagcatatgattactaagacagatgtccatacgtgtctctktcttctagtatgagggaaacaaaatggtaagggaaaattgactcaaagacagtggtattgatgattctgtctgactgagctttcttcataatcgtttagaagctggaaagtatagcatgcctttttaagaagtacttcacattttttttttaagattagtcttaagtttcttgtttcatttatttctagttacctctcattaattttgtgatttcatttaacatttaatacactttcagcttagtgtggtaaatccaaaaatatatcactaagagttacaacatctgatattcataatacatactcctcaacgaagatactataatgtgccaaaagtattaaaaattataatcctattgtggaatacttaaaattaaaaagataaaaagtagtattttatcccatttctgtgtgtgaagttcactcacagga

SEQ ID NO: 352273 - DNA, 535 bp, Homo sapiens
tgttaaaatattgtgacttcatcttacagcatcactaatagtccccgagtggttgagtaaaaaagcatatgattactaagacagatgtccatacgtgtctctttcttctagtatgagggaaacaaaatggtaagggaaaattgactcaaagacagtggtattgatgattctgtctgactgagctttcttcataatcgtttagaagctggaaagtatagcatgcctttttaagaagtacttcacattttttttttaagattagtcttaagtttcttgtttcatttatttctagttacctctcattaattttgtgatttcatttaacatttaatacacttkcagcttagtgtggtaaatccaaaaatatatcactaagagttacaacatctgatattcataatacatactcctcaacgaagatactataatgtgccaaaagtattaaaaattataatcctattgtggaatacttaaaattaaaaagataaaaagtagtattttatcccatttctgtgtgtgaagttcactcacagga

SEQ ID NO: 352274 - DNA, 564 bp, Homo sapiens
ggtaatttgtcatttggaaatttcctgatactgtttcttactctatacaaaatggaaataaacataccctgggaagattcaaagacagagtaaatggacatttttattcagaataaatgcaaaatggagatgaatttgctctcttttcttatgaactgtaccatggttcataaaatttgtaccattaattaaataactcttaattaatttatttctcagtgagaaggtatcagaaactttttttaaaaattcattacaactttcaattctccagatctttgggatttcatgaaactgtaatcatacttctatgattttttgacttttccttgtgttctgataatttagcctaactaatatgagagcacactgtttctatgkaagcttcaggctccaagagaagattgtgctgtttacttcactgatcaaacttgagcaactagaataacacttggctgagattcaagactcaaataaatgtattgagtgaatgaataaatgattcctcaatgaatggaattgatttcatgagtggaactgatttcacatgcttttcataatggg

SEQ ID NO: 352275 - DNA, 564 bp, Homo sapiens
ggtaatttgtcatttggaaatttcctgatactgtttcttactctatacaaaatggaaataaacataccctgggaagattcaaagacagagtaaatggacatttttattcagaataaatgcaaaatggagatgaatttgctctcttttcttatgaactgtaccatggttcataaaatttgtaccattaattaaataactcttaattaatttatttctcagtgagaaggtatcagaaactttttttaaaaattcattacaactttcaattctccagatctttgggatttcatgaaactgtaatcatacttctatgattttttgacttttccttgtgttctgataatttagcctaactaatatgagagcacactgtttctatgtaagcttcaggctccaagagaagattgtgctgtttacttcactgatcaaacttgagcaactagaataacacttggctgagattcaagactcaaataaatgtattgagtgaatgaataaatgattcctcaatgaatggaaytgatttcatgagtggaactgatttcacatgcttttcataatggg

SEQ ID NO: 352276 - DNA, 562 bp, Homo sapiens
tctcattttaagtctcttatatcacaatttatgttttttatgttgtaaacaaatttgttgctattattatcttaatagttttgtattttccatactgtggtagttaattttaggtgtcaaacttgactggattaacagaggcttaggtggctggtgaagctttgtttctggatgtgtctgtgagggtgtttccrgaggagattaacatgtgagtccatgtactgagagaggaaggcctgcccttaatgcccttaatggggctggggtgtgtgtgtgtggcggggggggagggtggggatgctggcgaaaactaacagtaggcagaagggggattttttttctctctttctgttatctctgtcttcaggagtgagatgcctctcctcctctggccctcagacatcagactccagattcttcagcttttggactctgggacttgcaccaagggctcttgggcttttggccttggacttagggctgcaccatcagtttccctggttctgaggctttcaaactgaatcataataccagattctctgatcatccaactcgcacttgg

SEQ ID NO: 352277 - DNA, 562 bp, Homo sapiens
tctcattttaagtctcttatatcacaatttatgttttttatgttgtaaacaaatttgttgctattattatcttaatagttttgtattttccatactgtggtagttaattttaggtgtcaaacttgactggattaacagaggcttaggtggctggtgaagctttgtttctggatgtgtctgtgagggtgtttccagaggagattaacatgtgagtccatgtactgagagaggaaggcctgcccttaatgcccttaatggggctggggtgtgtgtgtgtggcggggggggagggtggggatgctggcgaaaactaacagtaggcagaagggggattttttttctctctttctgttatctctgtcttcaggagtgagatgcctctcctcctctggccctcagacatcagactccagattcttcagcttttggactctgggacttgcaccaagggctcttgggcttttggccttrgacttagggctgcaccatcagtttccctggttctgaggctttcaaactgaatcataataccagattctctgatcatccaactcgcacttgg

SEQ ID NO: 352278 - DNA, 553 bp, Homo sapiens
gtcaattctgaatgaatattagtggaaaaatactatgcaactattttttactgggaaggatacgataaatatgtatttcctatttggaagcatccagaattggaggagacacccactcaaaagttaagcaccaatccaaaattcgaatttaaagttattaatatcataaaattgaattgaattwaaagcaaaaatataaaaataaataaaataatattcatattgttctaagtatcagtatatcatccagataagctgtaaaatttaataccgttccaacaatacctttacaattgaagtggtgtcactgtctggggtaaatatccaggattcactgtctcccacaaagaagatttaggacacggacacacaccaggagttcaggagcagaggtttaataggcaaaggaaagagaaaagaaaatagagctctctctagtaagaaacagggccttccgaaaggagggaccagccagcatcagagttcactggattttataggcaggcttggggaagtggtgtctgatttacatagggcccacaggtgtgacatt

SEQ ID NO: 352279 - DNA, 580 bp, Homo sapiens
actgacattgtctaattttttattttagtattcattataaatgataattccaatacacttccctttccattccttttcaccagtcatcttgtcctccacctccctacactactcactcctaggatcacaacttgtgtcagtctgctaggactgacataacaaaacaccacagactgggtgacttgaacaaaagacatttattttctcacagttctggaggccagaattccaaggtcaaagcagatttgtaagttatgtgccaaatctcaaagcagatttgtaarttatgtgccaaatctgtgttggcagattggtttctcctggggcctttctctctttggctagcagatagccacttctcactgtgtcctcacacagtcttttctctttgcacccctggaatctctttgtgtgtccaaattccctctttttataatctgattggattatccccaccatgctgtcctcattttaacttcatcatcactttaaaggccctatccaaatacagtcacgtttgagattatggggggttagaacttcaacatgtgcatttaggagagacatgatcagcccataa

SEQ ID NO: 352280 - DNA, 603 bp, Homo sapiens
tttcttttctgtaaactgtagatgatgtagacaggaatggtacctatgtgacagggcaatttcaaaaataaaatataataaaatattagctattatttcaagtgcccttatttggccaatatttgctttccaggaataattgtccaagaattttggcagaaaaccagactccatgcaggaatggakagtgccttagttcctgctgctataataaaaataccttagactgagtaattaataacagaattttattattcacacttctggaggctggaaagtccaagatcactggcagattcagtgtctggtgagggctcattcctcataaatggcaccttctatgtgtcctcgcatggtgcaagggaggtaagagtactcccctcaaccccttttataagggcaccactctcattcatgagggaagagccatcataacttagtcacttccaaaaacatcccacctcttaatatcgccacagtgagaattaggtttccatgtgaattttggaggaacacattcaggccatagcagataacaaccaagaaatgaatcaatttttattacattttggaagttacaaactgatgcagattcagtttttc

SEQ ID NO: 352281 - DNA, 567 bp, Homo sapiens
aatctgttctagaaaacagtaatgccactgaagatcaaatagcttaaattgatatgcagggttcatgagaacatactgtttttacaggccagtgtcccacagactttcattaggactaatttcctgcattactgaggctgcattgctgagcagcttattgaaaacagagctatgtcccaaatsccagcagattacctgccccttcacccccatccctctttcaaatcctacacccaagattagcagaatgatttttccattattcattacttctactagttacaaggtaagtctcaattacaactcccccttctctcccaagtctccaaattcatacttaccatgatgcctgagaaacagattccttcaaaataccacacgtagttggtgagtttattgctggatgcataggaagtttgcccattcgggaaatacaataatatgttcacgattatactccaaagtgcaagcggaatcagcaaacaacttaggcagcctccacacttccgagaccccattttgccctgcttagaacctgcgggagatttcaagagtatacagtcacag

SEQ ID NO: 352282 - DNA, 567 bp, Homo sapiens
aatctgttctagaaaacagtaatgccactgaagatcaaatagcttaaattgatatgcagggttcatgagaacatactgtttttacaggccagtgtcccacagactttcattaggactaatttcctgcattactgaggctgcattgctgagcagcttattgaaaacagagctatgtcccaaatgccagcagattacctgccccttcacccccatccctctttcaaatcctacacccaagattagcagaatgatttttccattattcattacttcyactagttacaaggtaagtctcaattacaactcccccttctctcccaagtctccaaattcatacttaccatgatgcctgagaaacagattccttcaaaataccacacgtagttggtgagtttattgctggatgcataggaagtttgcccattcgggaaatacaataatatgttcacgattatactccaaagtgcaagcggaatcagcaaacaacttaggcagcctccacacttccgagaccccattttgccctgcttagaacctgcgggagatttcaagagtatacagtcacag

SEQ ID NO: 352283 - DNA, 441 bp, Homo sapiens
tcttgccactctggcagacaatgaagtcatttttgtagtcaagggcatcttacattgtgaggagcggacatagggaggcatgcaaattgtctctgcctcatcaacaacagcaatcaacacaakaaaaagaatcatcatggaggatggtctttggctatggatggaattggaaaaggttgagaaggagtggagtccgtaagtagagggtgggaccgaagacctagagatggacaggaggctgaggactctgtgtgtgtgtgtgtgtgtgtgtgtgtgtgcgcgtgtgtgtgtgtctgtgtgtgtcagcctcctgaagcaagcttagctttctaaatttcaccattgtagttgagcccatagggctgcctctggtagccccatttgctctagagccctggcttacagaatgtgctccagcaccacagactgttcttggccttc

SEQ ID NO: 352284 - DNA, 521 bp, Homo sapiens
tgatgtgtaagtgtgtttttcttcgtgtatatctttttccttcaacttttattttagactcaaggggtacatgtgcagatttgtgacaagggtagatcgcatgatgctgaggtttgggtgtgattgaacccatcacgctgatagtgagcatgctacccaatagggaatttttaacccctgccccctcctcctkggaggagtccctggtgtctattgtttccatctttatgtttatgtgtgtccagtgtttagctcccacttgtgagaacatgctatatttggtttcctgtttctgccgtagttcttttaggataatggcctccagctgcatttatgttgctacagaggacatgatctcatttttttatggctgtgtagtattctatggtgtatgtgtaccatatttctttatccaagccactgctgatgagtacctaggttgattccatgtctttgccgttgtgaacaatgatgcaatgaacacacagttgcctatgtctttttggcagaatgatttattt

SEQ ID NO: 352285 - DNA, 519 bp, Homo sapiens
gggggctactgaactgaattaactgggttttcaaggcactctggagaaaaggtcattttaggtgaaccatgagttaataaggctgcgtattgtagatgatttctattggagttaatgcaggtgatggatgactcgggacagacatcggggtggratctgacacttttaaagtacccagtgtgtgcaaggcaccataccagtgcttcacgggtgccgtcctgctcaatcgttccaacaaccctacgaagtgatgaaaccagtgcttgcagttagccagttctgcgtttcattcacagccccccctctctagttgtgtaactgaggagcattatttaacttctctcagccctgatttccacagctgaaaaggactcacctcctagaggagctcagaaggttgaaagaaattgtatgtgaaagaacacgccagctcctggctcgggctggtggtcctaaacagttgactatcactgagagctggggaggttagagggcttcaggaggccgtgggctcaccaa

SEQ ID NO: 352286 - DNA, 546 bp, Homo sapiens
tttggcacatatacaccatggaatactatgcagccattaaacggaatgagatcatgtcctttgcagggacatggataaagctytaagccatcatcctcagcaaactaacacaggaacagaaaaccaaacaccgcatgttttcactcataagtgggaggtgagcaatgagaacacatggacacagggaggggaacaaaacacaccagggcctgtcagggggtggggggcgaggggaaggagagcatcaggacacatagctaatgtatgcggggcttaaaacctagatgatgggttgatagcaaaccaccatggcacacctatacctatgtaacaaacctgcacattctgcacatgtatcctggaacttaaagtaaaataaaaaaaaaaaaaaactaagaatttctgcacaaaagtaaaactacaagctacaaacttggagaaaatatttgaaacacatatagctaacaaaagattagttttaaaaatatataaagcacttctaaaataagaaaaaactcaatagaaaaaataggcaaaagccacaaa

SEQ ID NO: 352287 - DNA, 546 bp, Homo sapiens
tttggcacatatacaccatggaatactatgcagccattaaacggaatgagatcatgtcctttgcagggacatggataaagctttaagccatcatcctcagcaaactaacacaggaacagaaaaccaaacaccgcatgttytcactcataagtgggaggtgagcaatgagaacacatggacacagggaggggaacaaaacacaccagggcctgtcagggggtggggggcgaggggaaggagagcatcaggacacatagctaatgtatgcggggcttaaaacctagatgatgggttgatagcaaaccaccatggcacacctatacctatgtaacaaacctgcacattctgcacatgtatcctggaacttaaagtaaaataaaaaaaaaaaaaaactaagaatttctgcacaaaagtaaaactacaagctacaaacttggagaaaatatttgaaacacatatagctaacaaaagattagttttaaaaatatataaagcacttctaaaataagaaaaaactcaatagaaaaaataggcaaaagccacaaa

SEQ ID NO: 352288 - DNA, 597 bp, Homo sapiens
tgatgttattggttactattgtgtcctatcggaattcaactaaagtttgtaatacatttggatgggttctcactgatttatatatagtgcgaggcatagataccccatcttccrcaagaatgaaagccatgtcttttaagagatgcaggctctattatacttggaaaaacattagccatcatttgaatattcatagaaagaccaagaacctggcactaatctccagacacttaaacaccatttaaatagttccttgatgcaacattcttactggttaagtattataaacaattgtgaatcgtattgtgcctaccatagaagtgatgtcacttcaccataaaaatcacaagattacattattacacacaaatcagacattctcaatgatttatgtagccaaatgccagacttctagaaaagagctgatgtggcactgtagacaggcatctagtatgatatggttaggagtctccttggtctgctaaagtctgcagaagatattgaagtaaaaatgaccacatctgtcaccattaagtaaaggacagaaggcagaactgggatgggggctcacggacaagggctaatggaaagaaaatg

SEQ ID NO: 352289 - DNA, 559 bp, Homo sapiens
tgcccctctgccgtccaggtgtcaacagatgggatatggatctgccctcccttaacaaataaatagaacttttacaggctgrgtaatcccacatgggataaaccagactgccagttaccccaggttttccagccaggatcaagcctctttagtcctggatcccagagcccatcagaattcttacggagtggtatttccagaccgctcgttatccaccgggtagccgtgaggctgcatgtccctcacactggagttgcagggagccaagtattcctggagttccctttggcaaatgtcctacctcagttcccacaatctatgttcatggttctgtgcagatgcaatcagttcctcccagtcagccccaggaaagagtgaaactgctgatgagacaacttaaggaaggggcactctctcttgcagggaaagacatccaccccaaactttttcattcttctcctagctgctttctgacctcagtgaaacgggcagggagaaaaactcttttcatctttctgctgattggcttccaatgccaggcctccagtgaagcaggtag

SEQ ID NO: 352290 - DNA, 559 bp, Homo sapiens
tgcccctctgccgtccaggtgtcaacagatgggatatggatctgccctcccttaacaaataaatagaacttttacaggctgagtaatcccacatgggataaaccagactgccagttaccccaggttttccagccaggatcaagcctctttagtcctggatcccagagcccatcagaattcttacggagtggtatttccagamcgctcgttatccaccgggtagccgtgaggctgcatgtccctcacactggagttgcagggagccaagtattcctggagttccctttggcaaatgtcctacctcagttcccacaatctatgttcatggttctgtgcagatgcaatcagttcctcccagtcagccccaggaaagagtgaaactgctgatgagacaacttaaggaaggggcactctctcttgcagggaaagacatccaccccaaactttttcattcttctcctagctgctttctgacctcagtgaaacgggcagggagaaaaactcttttcatctttctgctgattggcttccaatgccaggcctccagtgaagcaggtag

SEQ ID NO: 352291 - DNA, 559 bp, Homo sapiens
tgcccctctgccgtccaggtgtcaacagatgggatatggatctgccctcccttaacaaataaatagaacttttacaggctgagtaatcccacatgggataaaccagactgccagttaccccaggttttccagccaggatcaagcctctttagtcctggatcccagagcccatcagaattcttacggagtggtatttccagaccgctcgttatccaccgggtagccgtgaggctgcatgtccctcacactggagttgcagggagccaagtattcctggagttccctttggcaaatgtcctacctcagttcccacaatctatgttcatggttctgtgcagatgcaatcagttccycccagtcagccccaggaaagagtgaaactgctgatgagacaacttaaggaaggggcactctctcttgcagggaaagacatccaccccaaactttttcattcttctcctagctgctttctgacctcagtgaaacgggcagggagaaaaactcttttcatctttctgctgattggcttccaatgccaggcctccagtgaagcaggtag

SEQ ID NO: 352292 - DNA, 572 bp, Homo sapiens
acaattgcctgggaattctagataacatacagtaaaaactttaaaaacagagttgaattcagaagaaaacaacaaagaaggctttaggtagcacagataagcaaagaccctgacagctagagccataagcactgaagttgaagtgcagcttgtgggccagggcagggcttgtggggagggagtctgcagggatgatgcagtttcagatcaggaattaagctgaggtttctataaccatctaggaaaatgtgtcattgtgctcttcagctcagtattaagaaatgctaatggaggaacagatatttcatgcacaaagagagccccccttctcactcttcccgtaggtcttttgaacctgttctccccscagtgatgctgtgttgagggcagaggtgcgctcaacattgaatgagaccacattcaggctgcagtgattgtgccctaaagagttcaagacatgattggaggaagccctgttctatgtttttgctattaaattctgaatggtaagcttaacatgaccagaaaacaagttatcattcacatcttgcatacactggatgagcttgcat

SEQ ID NO: 352293 - DNA, 565 bp, Homo sapiens
ttgctaatattttttgaggaattttgcatctatattcatgttcctggcctgtagttttcttttcttataatgtctttgtctggttttgtattagtgtgatgctggcctcataaaataagtcataaataagtctgcttctgtcctctgaaagagattgtggaaaattgggataatttcttaaatgtttggtagaattgayaggttaacccatctggccttgtgctttcctttttgaaaggttattaattattgattcaattttttaaatagagaagacctatttagattgtctatttcttctcatgtttgttttggctaatggtgcctttcaaggaatcagtctgttttacctaggttatttagtccgtgggcatagttatttgtaatattcctgtattctactctctttcatttctactattagtaatttatgtcctctttttcctgagttaccttggttaagggcttatcaattttatgatctttgaaaaaacataaacttttggtttcattgattttctctattggtttcctgttttcagtttcattgatttctgctctaatt

SEQ ID NO: 352294 - DNA, 565 bp, Homo sapiens
ttgctaatattttttgaggaattttgcatctatattcatgttcctggcctgtagttttcttttcttataatgtctttgtctggttttgtattagtgtgatgctggcctcataaaataagtcataaataagtctgcttctgtcctctgaaagagattgtggaaaattgggataatttcttaaatgtttggtagaattgacrggttaacccatctggccttgtgctttcctttttgaaaggttattaattattgattcaattttttaaatagagaagacctatttagattgtctatttcttctcatgtttgttttggctaatggtgcctttcaaggaatcagtctgttttacctaggttatttagtccgtgggcatagttatttgtaatattcctgtattctactctctttcatttctactattagtaatttatgtcctctttttcctgagttaccttggttaagggcttatcaattttatgatctttgaaaaaacataaacttttggtttcattgattttctctattggtttcctgttttcagtttcattgatttctgctctaatt

SEQ ID NO: 352295 - DNA, 565 bp, Homo sapiens
ttgctaatattttttgaggaattttgcatctatattcatgttcctggcctgtagttttcttttcttataatgtctttgtctggttttgtattagtgtgatgctggcctcataaaataagtcataaataagtctgcttctgtcctctgaaagagattgtggaaaattgggataatttcttaaatgtttggtagaattgacaggttaacccatctggccttgtgctttcctttttgaaaggttattaattattgattcaattttttaaatagagargacctatttagattgtctatttcttctcatgtttgttttggctaatggtgcctttcaaggaatcagtctgttttacctaggttatttagtccgtgggcatagttatttgtaatattcctgtattctactctctttcatttctactattagtaatttatgtcctctttttcctgagttaccttggttaagggcttatcaattttatgatctttgaaaaaacataaacttttggtttcattgattttctctattggtttcctgttttcagtttcattgatttctgctctaatt

SEQ ID NO: 352296 - DNA, 561 bp, Homo sapiens
tctcttcttgagccaggtagttctgtatatttcaaaggcaacatcaaacaataaatggaaacatttgctttggtttatctttagcagaaattcacacaaatcaagttgtaaatttatttatgtattctaataacttgattactrtatgttcttttgtctaatcccttaataacttaggtttacaaagatttctcatacaccctatgttcaatatatattcatttgataaaagagatcactttgccttgcattggtaaagatcatgtcagtgatggtgaatatgatttagcaagcatctattgagcacttgttatgtgccaggcattgaggttacaaatacatacaaaaagacataaattcaagaaaggcagaggatttggggaaggtggcagtggtggccccatagtttaaatatatcaaaatcatcaatttaaacctaattagaaaatgttagaagtgaaattattggagaaagggagataaaaaagacattgaaaaagaagaatttgataacataaaatcatttcaaaaatacaggctaaactacaaggaacaagagca

SEQ ID NO: 352297 - DNA, 537 bp, Homo sapiens
aaacctaattagaaaatgttagaagtgaaattattggagaaagggagataaaaaagacattgaaaaagaagaatttgataacataaaatcatttcaaaaatacaggctaaactacaaggaacaagagcaaataaactcaacaacaattcataaatgagattaaaaggttttaagaggaaatgacaaatatagaagacaagcaaagaagagccaacatacagataatagaagtctctgaaaaagaaaaccaaaacaatgaaacagagcaaataataagatcataatttgcgaaagctttcctgaaattaaaatatttgaaactacatactggaagagcacattatgtacttatgaaaactgacccagaacagtcaccaytgaggctattggacttcaaattttaaaaaaagttttgaacaactaggtaacttatttacaagagtaagaggaacagattgtcattagactttttgaaagcagcactttatgcaagaaaaaaatggagtaacatatttaacatacttaaggaaagaaaat

SEQ ID NO: 352298 - DNA, 551 bp, Homo sapiens
tatatatatcatatatatttacagattaaatataatatgtacataatagataaattataattacataaacttaatatttaatatatttaattgattgttctataattgattgattatttgaatgacttttatttattcattcttccatttgatcagcctttgaccatcttatttttatagtaaccatagcccactggcagtttattttaatctatgatttatgcattctrccttttctaattttttattaatttttaaataattacttcttatatcagccacgtttttatcaggaaaatagaagccactctgtgtcttccaaatattaatagttttagacaagaaagtgaagcttctgcaactgttagggaagcaaaggtcaaggaggccattgttaacactctgcttggagcactgaagcacacgattcccaggagctcacctggaaaactgcaaaacttgtgagtcgagagatgctctagacatctatcccctctcgtagcacaaaaggcaattctccaaaagttcatctgaaagctgctttgaacctt

SEQ ID NO: 352299 - DNA, 510 bp, Homo sapiens
ctgtttaatttagattataggctcttagagggaagggaccacatttgtgtatttcgtctgatttggcgctgaatttctgcatttagcaggtaatctttggattaactctcaagagaaaagatggcctcgggcttaataaaagttgatcccagctcatatcatgttccaaaattacagttgacagatgatcaccacagacgttcctgctgtcatactctgtaaatgtaaggaggaccaaggtcacctgtggacgggtgggtggagctgcctgcccagggttgtagtccaggctcctctgttggagctgttcttcatggttttcctcagaagaaatagggcatccgcctgtattcatatgggtcttccttcccrgctttggctgtgctttggagattcttcagaaagggatgaacccaatcacctctcctgtctgagaagctgagggatgtactaacctgctggggatggatgagtgggtagatagatggagctagcaggagacctctgtca

SEQ ID NO: 352300 - DNA, 576 bp, Homo sapiens
gcaccatgctgagcacctcatagccccgagcagagagaggccagggttggggcaaagccctactggggcccactcccaagactgagaagacaaacagggaggcgtctctcccaagccaatttctttcatcacccaaagctatttagggacaccattgccacacacttcatgaagaaaccccaaactggttctagctctcagaggtgggaatagacctacttaagttctatgaacaaagaatagagaattaagccaagcaaagagataggcagtaggtttgatatctgcctttcctgtcgggaagaggagcaaggggccgctgcatctttagagacttgagctaacgacagacacagatcctggccccgaaaagcagttggactgtttgtgggcatcgtgttccatgcttcatctttcatcatctgattcagcagacattaactctgttggctcttagagtgcaaatgatgaagacagaacaccaaccttcaagcaatccacaatttagaagggaaggcagacaygcaaacagtttccatataatcggtaggtattaaggcagacttatgcatagag

SEQ ID NO: 352301 - DNA, 510 bp, Homo sapiens
cacaaaatactgagtaatatgcttatacctctcttttttgatttatcaactttcaacagtatttattgactcctgccacatgagggtgtgtgttatcctccactgcctctgtgtctttccatcttcataattttagactgtattccacttgattccttayaagaaaaatgaggaactcattaccccattttcccctccacccttcctacttccttcaccttctaacttctgcctttcctggattctcttttgtatttactgggtttgtaataattatattctactctgaaaccatagttaagtcttccctgctttgtttaaaatttgattctaaatattgaaaaccaatatacagtttcttccccaatgtcaatcctgtgaatatataaaaattatttactgaagaatgaagtaagaaataaataatcctaggcaatgcaaaagaaaatgaattctcttttcctaccctaatcagtttttccaaactatgtcctaatttaggttgcttct

SEQ ID NO: 352302 - DNA, 525 bp, Homo sapiens
tggggtgatcagggattctccagagggagttgctcccagacctcagaaaattgtcttatctttgagcaacaaagataacctaagctggwaccaagtactggtaagagatttgtcaaaggtcaggggcacctcctctcagagtcccttccgtcagccgccaatttgtaagccaaaaaatatctgagacaggtctcaatcaatttagaagtttattttgtcaaggttaaggacatgcccagaataaataaagacagagccacagaaatagtctgtggtctgtgcctttctccaaaggtgattttgaggacatcaatatttaaagggaaaaagtggactggaggggaaagaggaagggtatggtaatccctatattgcaagagaaaaggagcaggtagaggaatagtcaattatgtattcatcttgtgctcagtaaattggcacttttcataagataaagtgaacatagactaactgcctgtggagatatttaacctcttatctgcagctatctgctcagaaacaaaa

SEQ ID NO: 352303 - DNA, 525 bp, Homo sapiens
tggggtgatcagggattctccagagggagttgctcccagacctcagaaaattgtcttatctttgagcaacaaagataacctaagctggaaccaagtactggtaagagatttgtcaaaggtcaggggcacctcctctcagagtcccttccgtcagcygccaatttgtaagccaaaaaatatctgagacaggtctcaatcaatttagaagtttattttgtcaaggttaaggacatgcccagaataaataaagacagagccacagaaatagtctgtggtctgtgcctttctccaaaggtgattttgaggacatcaatatttaaagggaaaaagtggactggaggggaaagaggaagggtatggtaatccctatattgcaagagaaaaggagcaggtagaggaatagtcaattatgtattcatcttgtgctcagtaaattggcacttttcataagataaagtgaacatagactaactgcctgtggagatatttaacctcttatctgcagctatctgctcagaaacaaaa

SEQ ID NO: 352304 - DNA, 525 bp, Homo sapiens
tggggtgatcagggattctccagagggagttgctcccagacctcagaaaattgtcttatctttgagcaacaaagataacctaagctggaaccaagtactggtaagagatttgtcaaaggtcaggggcacctcctctcagagtcccttccgtcagccgccaatttgtaagccaaaaartatctgagacaggtctcaatcaatttagaagtttattttgtcaaggttaaggacatgcccagaataaataaagacagagccacagaaatagtctgtggtctgtgcctttctccaaaggtgattttgaggacatcaatatttaaagggaaaaagtggactggaggggaaagaggaagggtatggtaatccctatattgcaagagaaaaggagcaggtagaggaatagtcaattatgtattcatcttgtgctcagtaaattggcacttttcataagataaagtgaacatagactaactgcctgtggagatatttaacctcttatctgcagctatctgctcagaaacaaaa

SEQ ID NO: 352305 - DNA, 525 bp, Homo sapiens
tggggtgatcagggattctccagagggagttgctcccagacctcagaaaattgtcttatctttgagcaacaaagataacctaagctggaaccaagtactggtaagagatttgtcaaaggtcaggggcacctcctctcagagtcccttccgtcagccgccaatttgtaagccaaaaaatatctgagacaggtctcaatcaatttagaagtttattttgtcaaggttaaggacatgcccagaataaataaagacagagccacagaaatagtctgtggtctgtgcctttctccaaagrtgattttgaggacatcaatatttaaagggaaaaagtggactggaggggaaagaggaagggtatggtaatccctatattgcaagagaaaaggagcaggtagaggaatagtcaattatgtattcatcttgtgctcagtaaattggcacttttcataagataaagtgaacatagactaactgcctgtggagatatttaacctcttatctgcagctatctgctcagaaacaaaa

SEQ ID NO: 352306 - DNA, 485 bp, Homo sapiens
caaaattacatttaattgtctcacacactacattgcttcacacctctgtgctttgctctcaggattccctctgttgatactcatttacccaatgcttactttacttggataagtcttttaccaaagatcggcccaggtatcattttcttcaggaaatcttcccaaatatcaggttggacccagtgttcctcctctgtcttcccaacatgccaggacaaaatcccattttaacacttagttcataggtgctgaaaggatgggttcatgagtccatgtgttactaagcaatcaatgggctcggtgcccgatgcacacagaagccaatactatggcacaagcttttgagaaargaaaagttttattgctagtcaactggcaaggaggtgttatctgactggatcctgcaattaggtgttgccaggaggcatgatctgcctagaccctgccgtagagtgatgccagagcttgatctgattggagcctga

SEQ ID NO: 352307 - DNA, 485 bp, Homo sapiens
caaaattacatttaattgtctcacacactacattgcttcacacctctgtgctttgctctcaggattccctctgttgatactcatttacccaatgcttactttacttggataagtcttttaccaaagatcggcccaggtatcattttcttcaggaaatcttcccaaatatcaggttggacccagtgttcctcctctgtcttcccaacatgccaggacaaaatcccattttaacacttagttcataggtgctgaaaggatgggttcatgagtccatgtgttactaagcaatcaatgggctcggtgcccgatgcacacagaagccaatactatggcacaagcttttgagaaaggaaaagttttattgctagtcaacyggcaaggaggtgttatctgactggatcctgcaattaggtgttgccaggaggcatgatctgcctagaccctgccgtagagtgatgccagagcttgatctgattggagcctga

SEQ ID NO: 352308 - DNA, 575 bp, Homo sapiens
ctgctttgccagtccagctgagcgtccgaccgcctgcacaccaagagaggtttgtcactgcggtcggccctgagcagcttgcactccaggcatttatttagtatacaattaataatagaagctttgaggaaacacacttgtggatrattaacattgttaagagagtagttctacgaatgattaaagctcaggtaccacggtctaaagtaaataccattagggggcaatttccctggtcgacctccctcacagagggccatctggctcaaaggttagttaaaggaggtagggtaaacagacttaattggggaagcctctattgttactagtatttaccctatgacttaatgctctgaggtaacaggctgccttcagcctgttcaattattacaagctatgtaacctttcagccttccaaaagatttgtgactatttcctatgactttccctaatatttccctttaatatttctgccatcatcctgagtgaatcccaacaccccattaatatgtacaatgacaatgtgtcaataaataaatcatctacacattttctttgacgatgaaaaacagttt

SEQ ID NO: 352309 - DNA, 532 bp, Homo sapiens
catgttagccaatgctcacatcattttcatatactcttttgaaatcacctcttactggtcctgagaagaatgccatgattaacttttacaaatgaaggtttataagccccaaccaaaaaaaaaaaaaaaaggaacttcagatccaccattgaacaggagatttcttccagattacgtgcttattactgtggccagcttgcctttaaaagctctttcacaattagagatgaaaackccatccttctgcagaggcagccctagctgtagagggctggagacatggcccaggcaaaggatatcaaaggtatgtgtcaatcaaacctcccacaggccagtgctcttcatcatgaaatgcaaagggagatgttggcagatacaggttatgtgggatcctctgagctgagattcagagggcagttgcagctccttcttacctcagaagcactgcaaatggcatcacagacaagggagaatttcctattggtccctaggatggttcagggaatatgagaaaccaaaaagaaaaaagata

SEQ ID NO: 352310 - DNA, 532 bp, Homo sapiens
catgttagccaatgctcacatcattttcatatactcttttgaaatcacctcttactggtcctgagaagaatgccatgattaacttttacaaatgaaggtttataagccccaaccaaaaaaaaaaaaaaaaggaacttcagatccaccattgaacaggagatttcttccagattacgtgcttattactgtggccagcttgcctttaaaagctctttcacaattagagatgaaaacgccatccttctgcagaggcagccctagctgtagagggctggagacatggcccaggcaaaggrtatcaaaggtatgtgtcaatcaaacctcccacaggccagtgctcttcatcatgaaatgcaaagggagatgttggcagatacaggttatgtgggatcctctgagctgagattcagagggcagttgcagctccttcttacctcagaagcactgcaaatggcatcacagacaagggagaatttcctattggtccctaggatggttcagggaatatgagaaaccaaaaagaaaaaagata

SEQ ID NO: 352311 - DNA, 477 bp, Homo sapiens
gtctccacagccaaggatgtatcagggagaattgcattccccttgtttcaacttctttaaacatatctgcctttaacaaatgtgctgaacatgtgttgcatacagtataatgtttcagtatattccagtgatgaattgcccagcaccttatcataaaaaatgcccagcacttttatcactttatcataaaagtaaatagtactgtgmtttttaaaactcccagtagtttgggtacatagagatttaattatactggatcccttcactcacacagcattgcttatacatctccatgcataacttgggtccacacatctagccttggtttggtttttctttttgaaatatatggtatattactgtttcttcagtttcatgtatcttgctagctgaaagacaactaaacgaaactgaaggcattatcctccctccgattctcactccctgctgtgtccctggtggtgttaaggacacagt

SEQ ID NO: 352312 - DNA, 507 bp, Homo sapiens
ttctaataggaagaaggaagcaatctttatatgtgtgtctcttatagaggcccatctaaaaacaccttcatgagccaccctatgtgcagtgatttttccttcttcagaatttgcacaaacacctcaaagaattgttactgtgtggtgcactcagttgaattctatccaggcattcactaagccatactgtgtgttgggcactgtaccagcaatgggggttcagagattagcaaagtctgcttcctgtcccaaagaagcttccggcacaatcgggggagacagacaagcagatcattcctatgggtgtgcctagggtgctaggatggcacagaagagaggaatcccggtatagtctgggaacattgggstgggctcccaagttatcagacagatggggagatggacaggcaggcagatgaccactactgagttttgtgccaaacaccatgctgaatattatacacatcctctcactgaggcttctacaactccataaggccagtttta

SEQ ID NO: 352313 - DNA, 570 bp, Homo sapiens
ttgcagtgagccaagatcacaccactgcactccagcctggggaacaagagcgaaattccgtctcaaaaaaaaagtcccctcagcccccatctttacacaattctgggagacattgtgtatgctctgggtcaatccaatctctagtgttcatagtggggacttgcgtaatatgttgttagtaagggacaatttttctttctctgcctcaccctcttcataaatcagtcttgctcttggggactagctcccaaataaataacttcactcttgctccctgagatgacttcctgcttaaaccacacacacacacatacacatayacacacacatcttctctcaggctcttctttggtgggaaccaaactaagacaattggttttgggagggattctggaactggagcattcaccactgttggagtaagtggggtttgtgataagccctagcatgtgatagcatcacaattaccaagactcacttgtggtagtttgggatgaggtacaggtagacggagaaacactgtgtcatgtgttagctccagcaagttaatgttataagaaccatggtagt

SEQ ID NO: 352314 - DNA, 570 bp, Homo sapiens
ttgcagtgagccaagatcacaccactgcactccagcctggggaacaagagcgaaattccgtctcaaaaaaaaagtcccctcagcccccatctttacacaattctgggagacattgtgtatgctctgggtcaatccaatctctagtgttcatagtggggacttgcgtaatatgttgttagtaagggacaatttttctttctctgcctcaccctcttcataaatcagtcttgctcttggggactagctcccaaataaataacttcactcttgctccctgagatgacttcctgcttaaaccacacacacacacatacacatacacacacacatcttctctcaggctcttctttrgtgggaaccaaactaagacaattggttttgggagggattctggaactggagcattcaccactgttggagtaagtggggtttgtgataagccctagcatgtgatagcatcacaattaccaagactcacttgtggtagtttgggatgaggtacaggtagacggagaaacactgtgtcatgtgttagctccagcaagttaatgttataagaaccatggtagt

SEQ ID NO: 352315 - DNA, 544 bp, Homo sapiens
gtgtgtcataagtgtctcctatagatctcaagggatgtgttcttctaccaggtgatgtaacagtggcttcactggattggaggttaagcctaccacccagtcattttttggtactcatgtaagccaatatacaaagaatagggttgtcattctgcctagtgtgattgatattgattaccaggggaaaatttggttgttctacacaactggaaaagagaggcccatgtctaaaatcctggagaattatttggttgccacttagtatttccatgtgcrtcaataaagtttaagaaaaaatataacaacttgagaaagcaaggcttatgggatgcagatttcctagggatgaaagtttgcactgttaccactgtgtggagaatgtcacccagctgataatggccaaaagaaaggggaacgtagaacgggtagtggaagaaaaaaatataaatgtccactgtggccttgtgagccattgtagggacaggaagaacatggcattaggaggtaatctgacataggtggagagcggttggcacaatggtag

SEQ ID NO: 352316 - DNA, 544 bp, Homo sapiens
gtgtgtcataagtgtctcctatagatctcaagggatgtgttcttctaccaggtgatgtaacagtggcttcactggattggaggttaagcctaccacccagtcattttttggtactcatgtaagccaatatacaaagaatagggttgtcattctgcctagtgtgattgatattgattaccaggggaaaatttggttgttctacacaactggaaaagagaggcccatgtctaaaatcctggagaattatttggttgccacttagtatttccatgtgcgtcaataaagkttaagaaaaaatataacaacttgagaaagcaaggcttatgggatgcagatttcctagggatgaaagtttgcactgttaccactgtgtggagaatgtcacccagctgataatggccaaaagaaaggggaacgtagaacgggtagtggaagaaaaaaatataaatgtccactgtggccttgtgagccattgtagggacaggaagaacatggcattaggaggtaatctgacataggtggagagcggttggcacaatggtag

SEQ ID NO: 352317 - DNA, 544 bp, Homo sapiens
gtgtgtcataagtgtctcctatagatctcaagggatgtgttcttctaccaggtgatgtaacagtggcttcactggattggaggttaagcctaccacccagtcattttttggtactcatgtaagccaatatacaaagaatagggttgtcattctgcctagtgtgattgatattgattaccaggggaaaatttggttgttctacacaactggaaaagagaggcccatgtctaaaatcctggagaattatttggttgccacttagtatttccatgtgcgtcaataaagtttaagaaaaaatataacaacttgagaaagcaaggcttatgggatgcagatttcctagggatgaaagtttgcactgttaccactgtgtggagaatgtcacccagctgataatggccaaaagaaaggggaacgtagaacgggtagtggaagaaaaaaatataaatgtccactgtggccttgtgagcmattgtagggacaggaagaacatggcattaggaggtaatctgacataggtggagagcggttggcacaatggtag

SEQ ID NO: 352318 - DNA, 511 bp, Homo sapiens
ggtaattagttactgctgtaggagtctgagcaaatttattctagagaggtccagggtaattactgtgtctttaatgagttactctggaatctggattcctctgggatgcagggtccctgaggctcagggatgggtagaaggggagatgtgagaaggagttgtccagacacaggggacaactacagagactgttactttacgtgtcgtaatggataaaatggagcaggatgtcaggtcaggactgtggagttaccttgagatgctgggtgagttgggcagaagggtgaatgagctgattcttggtgtccttccagcctgagggtcttgatttcccaggtgtaggatgttctgcaggatattttttcmgtcataataactttcctcttttctatgtatttgcctcccacgactttccaacattccagaagtattttaactaatgttttccagttacagtcattggtaatgatagcacttacaaatatttcttattgtgcaatatatcctcaca

SEQ ID NO: 352319 - DNA, 591 bp, Homo sapiens
gtggttgaaaaattataaaatagataaactaattaacttctcccatcctgcctctcccaaatttattcattttcctatattcctcatctcagtggtggcatcattatccaccaagtcccctgtgaaaatcaccctagaaccttcccagtcctttgtctcccacgtctagtgggtcactaagtcctcccaattattccttgcaagtacttcacaaatccagccttcctctccagttttactaccttagttgatttcctctgtggacagttagaatagcctcctaaagggtctctctgcatccagacttgctctgacccttcctgycatctattttccatctgatacctctaggaatcatcctaatatgcaaatcttatcatgtctctcccctgctgaaaattctttaaaaatgtatccagaatagatttaatcaacttagtatggctaatgcccttcagaatctcactcttccctattcttcatcccttgggactcttccaatgggagctcaactgcaggcatgagaactcaaaagtgtccatctttttgaaaacttccagacttgactctgagcaactgggtagatactag

SEQ ID NO: 352320 - DNA, 556 bp, Homo sapiens
actcctgcctgggtgacagagtgagactttgtcttaaaaaaaaaaaattacatggagacaaacaaatgatctatttctactcttttccccaaattactatctaatgttagtgaagcccacacattaggtaacagccaggggtatgtggctggactcatcctccctttcaaatcacaaaaccctcagtttctgctagtccctgctgagcatagggtcaccaggggagaatgaacacagcttttcatatcttgtggtcctgcatttcccagccttccttccatttctgagccctaacccgsaaactattcttttatgctccatcctgcatgctgaagttgaccttttggtttatttttttgtcacactcgagcctgagtgtgacaaacagggagagaaagagagagagagaaaaaatgagagtaaggggagaaggtcttaattgtaatattaattatcttttacctttgttcactcatttatttattggtctttcatactgtttgctattttttgttattgttatatattcactgttggtgtttaaatttattttgag

SEQ ID NO: 352321 - DNA, 630 bp, Homo sapiens
gccctcttagtattatatttgctttatctcacaggttttattatattgtgtttgtctttccatcttttttcccacacatttttaatttttatcttaattttctttttgaaatgggttttaatctgtcacccaggctggagggcagtggaacaatcttggctcactgcaacctccaccctccaggatcaaaccatctttttatctcagcctcccgagtagctaggaccataggtgygcaccattacatctagctattttttaaaattttttatagagatacagttgtggcatgttgcccaggctagtctcaaagtcctgacctcaggtgattcacctgcctcagcctcccaaagtgctgggattacagagatgagccgccactcctggctggccattttaattacttcatttacagtttttgggaacaagccccccaaaatctgtccataaactggccctgaaattggccataaacaaaatctctgcagcactgtgacatgttcatgatggccataacacccacactggaaggttgtgtgtttagcagaatgagggcaaggagcacctggcccgcccagggcagaaaaccacttaaaggcattcttaagccacaaacaatagcatgagtga

SEQ ID NO: 352322 - DNA, 609 bp, Homo sapiens
ttcagtgtgtcagtgatgtggaagacagagacaagagccaagactagcaatttggtttggaagcagatatgggtcttcgtaaaacaagtgaaggagtttggatttttctttttgcagacagcagggaggcaagagatgttattaggcaggcaaacaatgacagcagcttttgtttttgaggatgatgactctggcagcaagctggaagattaacagcagtagagagaaactggtggcagaaaattaagaggtgcttatgactcaatgagggccttaggtcagaagtgattaaacagccaaagtcagtgactgaagcatggttttgaggagagcctggtgactgattggacatgggggtgagagagacatgcatcaggacagccatcagtaatgttcctggcctagtaggttgtgtgcatggcaatcaccttccagaaggaatggacattactttcatttttacaagtacttgcagggtgarggacttgtagtgtgatcaggatcacaaaagattactgcttcagaaaaattgtaagtgaaaatgtagagttagagttgtcagtttataggttaaaggagagggcacaaaagcaccagaatgcacagggc

SEQ ID NO: 352323 - DNA, 517 bp, Homo sapiens
caccctcacacatggacagagctcactggtgaggtcctgaatctcacatgaatccatttcacagttggaactctgactgtcatatgtgaacatctggccacagttgagatggtgactttttttttttttgagatggagtttccctcttgttgcccaggctggagtgcaatggtgtgatctcagctcactacaacctctgcctcctggcttcaagcgactctccttcctcagcctcccaagtagctgggattacaggcacctgccaccacgtccagatcattgtttatatttttagtagagatgagctttcaccatgttggtcagkctgttctcaaacttgtgacctcaggtgatccaactgcctcagcctcctaaattgctgggattacaggcatgacccatcatgcccagctgatggtgactcatttctaaacccagctcataggaaggtgaggactcttatctggacttagccaattagagggatgttgactctgggcttagaaccaatgaaaag

SEQ ID NO: 352324 - DNA, 587 bp, Homo sapiens
aaaattgcttgaacctggaaggtggaygttgcagtgagctgagatcgtgccactgctctccagtatgggtgacagagcaagactctggaaaatttggtagacaatggaaaaattagtagttgtttaatatgtattaagatttagctttacaagataaaaatgttttagcaatatgttccatgacaatgtcacgataaactgaatatttaaaaatattttgtggtaaattttgttatgttttattgacaagtaaaaataaacaataatacctaaaagatacatagttatgatagttttaaattatattcaaaaccaaatgtgtttctcccatgcaaaaatcacatatattcacaaattaataggatgttgaaattacaagaatttcatgacttctcatctacacaggattaaaaaactattcacaacaaaccttcacaacaaatatacaagttataaaaaaaaacaaggataacatttttccaggcaaatagagataattctattggaaaagacatatggctaattcatatatgattttgctccacaatgtcttaaattgtacaaagttaaatattggcatgcacaat

SEQ ID NO: 352325 - DNA, 611 bp, Homo sapiens
catttctaggtattagaatcaacaccctttgtaagttgagtttgagtacatcagttacaatctcaatggtggactgaatacatgtataagagtctcaatctttgctgtgaactgtgtccccagtgaagtcaaaacctcactggtatgttgaatcttggtctgagactcatcaacccacatatagactgaatccatgtgtgagagtcaatttttcaacttttggctacctccaggtgtgagaatcacaacttcaacagtgagctgtgttcatgtggaaagatgtcaatctttactgtttgctgggtgtgcgtataagtgtcacaatgtcacctgtgatggacctcattataaaactctctgtaccacctgaggtatttatacaatatgcatgatagtcacaattttctctgagactttttcctagtatggactcataattgtacctgtggaactaagcccatgtatgcgactcaacagctctccaagtagctgggtccagagagagagtgttcacctgcctatgacctgggtttagaaatgagtcaccatgtgaactgtgatggcatgatcacayatgacagtcagaatttttactatggactgcattcacc

SEQ ID NO: 352326 - DNA, 625 bp, Homo sapiens
tgtgagaatcacaacttcaacagtgagctgtgttcatgtggaaagatgtcaatctttactgtttgctgggtgtgcgtataagtgtcacaatgtcacctgtgatggacctcattataaaactctctgtaccacctgaggtatttatacaatatgcatgatagtcacaattttctctgagactttttcctagtatggactcataattgtacctgtggaactaagcccatgtatgcgactcaacagctctccaagtagctgggtccagagagagagtgttcacctgcctatgacctgggtttagaaatgagtcaccatgtgaactgtgatggcatgatcacatatgacagtcagaatttttactatggactgcattcacctgtgaaattcaggatctctccagtgggcatcacattctctgtaccatcaaaacactttatacaaaatgtgaaagawtagtaatcctctatgatgttattatctagagaagacccaggaatatacccatttctccaagtttagttacaagtgccagtatctctccttttggctgattcatggtattagtgtcaacatcacaactgtgagcttggctaaggtatatgtcgcaaccctaactgtagaaaga

SEQ ID NO: 352327 - DNA, 570 bp, Homo sapiens
gtcaattaaaaaaatgcagtagtagctatacttacatcagaaaaatagatttttagacaaaatttataaggaaagacaaagagggctgggtgcggtggctcacacctgtaatcccagcactttgggaggccaaagtgtgtgggtcacgaggtcaggagttcgagaccaacctggccaatatggtgaaatcccatctctactaaagctacaaaaattatttggtcgtggtggcatgcacctgtagtccgagctgcttgggaggctgaggcaggagacttgcttgaacctgggaggtggaggttgcagtgagctgagattatrccactgcacttcaagagcaagactccatctcaaaaaaaaaaaaaaaaaaaaagacagagaggttactatgtaatcataaaggggtaaatttaacaagagggtgtaacaattttaaatataaatacaaccaactcttgagcactgaaatatataaagcaaatattattagagcctgagagagatagactctaatacaataataggtggagactccaaaaacccactttcagcattgaatagatgttacag

SEQ ID NO: 352328 - DNA, 570 bp, Homo sapiens
gtcaattaaaaaaatgcagtagtagctatacttacatcagaaaaatagatttttagacaaaatttataaggaaagacaaagagggctgggtgcggtggctcacacctgtaatcccagcactttgggaggccaaagtgtgtgggtcacgaggtcaggagttcgagaccaacctggccaatatggtgaaatcccatctctactaaagctacaaaaattatttggtcgtggtggcatgcacctgtagtccgagctgcttgggaggctgaggcaggagacttgcttgaacctgggaggtggaggttgcagtgagctgagattataccactgcacttcaagagcaagactccatctcaaaaaaaaaaaaaaaaaaaaagacagagaggttactatgtaatcataaaggggtaaatttaacaagagggtrtaacaattttaaatataaatacaaccaactcttgagcactgaaatatataaagcaaatattattagagcctgagagagatagactctaatacaataataggtggagactccaaaaacccactttcagcattgaatagatgttacag

SEQ ID NO: 352329 - DNA, 596 bp, Homo sapiens
tgatatgagtctctctctctctctctctttttttttttttgcctggtccccacatgttttgggtattgtgacatatcgctgggcccaatacctaaaaatggaacgctcctggctggggcctgtccacagtggacctggtgacatatttctgcatttatcacctaagcaatgtggctctcttcttctgcctgcaccctgcctacagggaagattgtgacatgttgctggcctcagcaaacagatgataagtctctcctaattgagtcttgcccacagaaagcattttgacacatcgctgggcccattamcaaggtgatgtggttctgcagtctacatcctgcatccagctttcaggaggggattgtgattgtaacatattcctggctaagtacccaggtgatattattcctctgcctggtcccttctgtcagggaagattgtgacatattcctggaccagaacataggcgatgtgactctcctgtttgctccctacccacaggtagggacatatatcttggtccagctaacagttgcaatgatgactctaataccacacaccagccaacagaaaatatactatctgttttagctgag

SEQ ID NO: 352330 - DNA, 596 bp, Homo sapiens
tgatatgagtctctctctctctctctctttttttttttttgcctggtccccacatgttttgggtattgtgacatatcgctgggcccaatacctaaaaatggaacgctcctggctggggcctgtccacagtggacctggtgacatatttctgcatttatcacctaagcaatgtggctctcttcttctgcctgcaccctgcctacagggaagattgtgacatgttgctggcctcagcaaacagatgataagtctctcctaattgagtcttgcccacagaaagcattttgacacatcgctgggcccattaccaaggtgatgtggttctgcagtctacatcctgcatccagctttcaggaggggattgtgattgtaacatattcctggctaagtacccaggtgatattattcctctgcctggtcccttctgtcagggaagattgtgacatattcctggaccagaacataggcgatgygactctcctgtttgctccctacccacaggtagggacatatatcttggtccagctaacagttgcaatgatgactctaataccacacaccagccaacagaaaatatactatctgttttagctgag

SEQ ID NO: 352331 - DNA, 595 bp, Homo sapiens
tttgctccctacccacaggtagggacatatatcttggtccagctaacagttgcaatgatgactctaataccacacaccagccaacagaaaatatactrtctgttttagctgaggttagagacacgggtaaaatcccatgtctcctctttgtatgaaggttatagaaaattaccactttctcacacattgtataaagccctagtgtggaacaaaatgtcaccacggaacccagcattcaaatgagattgtgtttctcatattctcaccctaccatccattaggattttcacccttacacgtggacagagcccacaggtgaggtcctgaatcacacaggttgacacagtccacagctggaattgtttctctcatttgctacagttgggatggtgactcatttccaaacctagttcacttctgtttggactgagccaattgaagagaagttgactctgagacaagcggttagggtaaaaattataaccatgggtccataccagaagggaggtctcaaagcatattgaggctctcatgcataaagccctcaggtgctacaaagtgtttcctgacaaggcacagcacaggtgagattttg

SEQ ID NO: 352332 - DNA, 623 bp, Homo sapiens
catgaaggtcttaatgcagattgcaactcacatgcatatcatattgtattasttcattttcacactgctataaagaactgcccaagaccaggtaatttatgtagaaaagaggtttaattaactcacagttccacatggctggggaggcctcagaaaacttacatttatggcagaagaggaagcagggaccttcttcaacaggtggcagcagggagaaagtgaatgaagaaggaacttccaacatttataaaaccatcagatctcctgagaactcactcactatcacgaaaacagcatggaggaaactgccccatgatccagttaccttcctgctttgacacgtggagattacaattgtagatgagatttgggtgaggacatagagccaaaccatgtatctcataaattctttgggtggtacagagagtgtactaatagcctagctgaaaggtaagattgtgacagtagtaagcagacacagtcaagagtaaagattgttgtcctctcacatgagcatggcccactgttgaggatttgaatcttatatctagaggcagtcaaaagttgcaatgttgactctcattcatgaattcgttatgcatggattttgtgacccttaaacc

SEQ ID NO: 352333 - DNA, 578 bp, Homo sapiens
ttcatccttaccaccatccaaggaggtaagagagtgtccacattttacagctgaggaaatggagtcacagagagttcaaattggccaaggtcacttggccagtggcgggtgaggctggaatttgaactcggtcaatctagctgcaggacagcctctgtgatgacgaaggttgctattatttttcttgagcgtggatgtttctctgacttyccggaatcgatctacctccattacattacagtccatgggcaaggagggggttttcaatggcagtatctgctctctcattcccgtcttcctcccagtggctgtcagcttgcaggggatgttgctacgatacagatgccacggtctgaatgtttgtgccctcccaaaactcatgtgctggaacctaacccctaactcccaaaggcagcggggcctttgggagatgatgaagtcatgagggcaaagtgcacgtggatggggttagtgtccttataaaagaccccagggagctcatactctctcttcctgtccccatagccatcctgtgaggacacaggaagacagtggctgtctataagacaatgagatag

SEQ ID NO: 352334 - DNA, 609 bp, Homo sapiens
tctgctacttttataatatccacattacacttcctggtgaatccagcctttgctcccctgaagtgaactaatttcaggttggaggaatctttgcggttccttatatccaggatgaagcctatctttgaagtttatgcaaaagacatctttgaatagatcatcaatatgtctagtaacaaaacagcattttacccagtacgattctgtcttttctctgtccatgaaaagtgttcagtggatcagaactggaacacagttccttcaagtctaaaatgctgtgaagcccaatggacaaagactggtcactggccagtgatccagaaagggtgctggagaccttccatctggagggcagggcaggcgtgtgggctggactctgstgcacagggaggcatgggaagcagggtggtgagggatgggcttgcttagacccctaaatgactgtcaatctctcttcatccttttcctctgagatccctctggatgatctgatctattcaaacatctacacactgatgatttttgagaccgtagctctcctgaattccaaacctgaatgttctttctatgggaaatagccatgtgaatgtctcacaggcatcccaaata

SEQ ID NO: 352335 - DNA, 644 bp, Homo sapiens
ttgcgccagtgaagctggcggttgacttcaaataccagagcatcttacttggggaaggattggcctcattcatgtgattctaacccaaggtaacattagaaacatgctagggtttatcacatgccaagcatgctgtgggctgtgttgcgtgggagccctcatcacggccctgcagtaaagacgctttatctttgtctctgtctttgaagactctgagaagcaggtagatgaagcacagcaccaactggatgtagccacagtctccagaggtcagtcctgaaggcaggtgtgctaggaggcttctgagccagcccaagagtccaccccaggtgtatacaccttgtgtagcccctcttccccagtgtggggaggcctgtgaacaggctaggatgccactcccaagatcaggttatgtctacagtgagggtgaagggattttgaagatgtaaataaggtccctattcagttgactttcagttcaaccktagggagatggccctaggtgtgcctgacctacccagcaagccaggccttccctaaaggggagacaagaaatcaggtattcttctcccagccttctagaagcaaactgccatgagttctgcatgaattctgccaacaaacctgtgagcttagatgagaat

SEQ ID NO: 352336 - DNA, 644 bp, Homo sapiens
ttgcgccagtgaagctggcggttgacttcaaataccagagcatcttacttggggaaggattggcctcattcatgtgattctaacccaaggtaacattagaaacatgctagggtttatcacatgccaagcatgctgtgggctgtgttgcgtgggagccctcatcacggccctgcagtaaagacgctttatctttgtctctgtctttgaagactctgagaagcaggtagatgaagcacagcaccaactggatgtagccacagtctccagaggtcagtcctgaaggcaggtgtgctaggaggcttctgagccagcccaagagtccaccccaggtgtatacaccttgtgtagcccctcttccccagtgtggggaggcctgtgaacaggctaggatgccactcccaagatcaggttatgtctacagtgagggtgaagggattttgaagatgtaaataaggtccctattcagttgactttcagttcaaccgtagggagatggccctaggtgtgcctgacctacccagcaagccaggccttccctaaaggggagacaagaaatcaggtattcttctcccagccttctagaagcaaactgccatgagttctgcatgaattctgccaacaarcctgtgagcttagatgagaat

SEQ ID NO: 352337 - DNA, 582 bp, Homo sapiens
tgatgttttggtgttgattttctgtctagaatatctcttcagtgctaaaaataaggtgttaaaatctccagctgctattgtattgggaactgtctctctcttcagctctaataatatttgctttatgtattctgggtgctccagtgttggatgcatatatatttacaatttttatatctcctttatcattgtatagtgactttctttgtctcttcttacagtttttgtcttgaaatctattttgtctgatataagtaaagctactcctgctctttattggtttccattggcatgraatatctttttccatccctttattttcagactgtatgtttcttctaagccatagatcattgggtcttattttttttaatcccttcagacaccctatgtctcttgattggagagtttagtccatttatcttcaatgttattattgataagtaaagacttactcctgccattttgttatttgttttctgattgttttgtggtcttttcttccttctttctttcattcctgtctttcttctaggcaaggtgattttctctggtggtagatttcatttcttgctttttagt

SEQ ID NO: 352338 - DNA, 577 bp, Homo sapiens
tgtaaatatctgttaggtttatttggtctatagtggagattaagtctgatgttttggtgttgattttctgtctagaatatctcttcagtgctaaaaataaggtgttaaaatctccagctgctattgtattgggaactgtctctctcttcagctctaataatatttgctttatgtattctgggtgctccagtgttggatgcatatatatttacaatttttatatctcctttatcattgtatagtgactttctttgtctcttcttacagtttttgtcttgaaatctattttgtctgatataagtaaagctactcctgctctttattggtttccattggcatgaaatatctttttccatccctttattttcagactgtatgtttcttctaagccatagatcattgggtcttattttttttaatcccttcagacaccctaygtctcttgattggagagtttagtccatttatcttcaatgttattattgataagtaaagacttactcctgccattttgttatttgttttctgattgttttgtggtcttttcttccttctttctttcattcctgtctttctt

SEQ ID NO: 352339 - DNA, 577 bp, Homo sapiens
tgtaaatatctgttaggtttatttggtctatagtggagattaagtctgatgttttggtgttgattttctgtctagaatatctcttcagtgctaaaaataaggtgttaaaatctccagctgctattgtattgggaactgtctctctcttcagctctaataatatttgctttatgtattctgggtgctccagtgttggatgcatatatatttacaatttttatatctcctttatcattgtatagtgactttctttgtctcttcttacagtttttgtcttgaaatctattttgtctgatataagtaaagctactcctgctctttattggtttccattggcatgaaatatctttttccatccctttattttcagactgtatgtttcttctaagccatagatcattgggtcttattttttttaatcccttcagacaccctatgtctcttgattggagagtttagtycatttatcttcaatgttattattgataagtaaagacttactcctgccattttgttatttgttttctgattgttttgtggtcttttcttccttctttctttcattcctgtctttctt

SEQ ID NO: 352340 - DNA, 629 bp, Homo sapiens
ctataaggtttccactgaaaagtctgctgtcagacgtattagagctccattttatgttatttgtttcttttctgttgctacttttaggattcttcttttatcctgaatcttttgggggttcattattaaagkccttgaggtagtcttctttaggttaaatcggattggtgttctataaccttcttgtacttagatattgatctctttctctaggtttggaacattctttgttattatccctttgaataaactttctactcctatctctttctctacctcctctttaaggccagtaactcttagatttgcacttttgagcctgttttctagatcctgtagatgtgctccatttaaaaaattattttctgatttgtgtcctctgactctgtattttcaaataacctgtctttgagttcactaattatttcttctgcttgatcaattctgctattattgcatttttcagctccagaatttctgcttggttctttttaattatttcaatccctttgttaaatttatctgatagaattctgaattccttccctgtgttatctcgaatttctttgagtttcctcaaaatagctattttgaattctctgtgtaaaaggtcacacatctctgtttct

SEQ ID NO: 352341 - DNA, 609 bp, Homo sapiens
taggtatttattgtagtcttctcagtctgggcttgtttgtacctgcccttttttgtgaaggctttccagatattcaaaaggacttgggtgttgtgatctaagctgtatctgctttagggggcaccccaagcccagtaatgctgtggttcttgcagactcatagaggtaccaccttgatgatcttagacaagatctagaagaattttctgggttatcaggcagagattcttgttctcctctcttactttctcccaaacaaatggagtctctctatatctgttctgagccacctggaactgagggtggagtgacaaaaagcaaccctgtggccaacaccactaggactgtgctgggtcatacctaaagcattggggtctcacttaaggactcctgtaatcactccctggttatggcatatgtttgctgtatgccctggggctctayaatcagcaggtagcaaagccaggcaagcctgtgtcttctttggatggcaagctcccccaggctctgggtgggccttgatgtgctatctgggagccagagactacagtcaaaagccttagaactctacctggtattctattgtaccgcagctgagttggcactcaa

SEQ ID NO: 352342 - DNA, 615 bp, Homo sapiens
gctagaaaaggatgaaaagttaaaaataaatggattcagaaataaacacacaagacatcaagggtgtgtgtgtgcctgtgtaagcatgtgtgtgcatgtctgtctgcctgcacatatgtgtgcacacacatgtctgtgtcagtgtgcaygacagacaagggacaccagcttgtttctgtctacgtagtggccctctctgaccagatcgtgtccttcctgcccccatgtgctccagaggacatctgtgatgaaagcaccattccatgagggagccaggcactccggggggtggtgacgagggacacagctccccagacagtggagcaaaggggttggggctagaaagtgaagagtcctgaattgcaagttaaagagaaagcatccagcatggctcgtatctcacagatgtggaagagtagatgccatttttcttactacttgtctaattctttctgtatgacacctgcactctccattgtagagatgagaaaactgaggccaggagtccccaaggtcatgcaggtgaccttcccagggctgagaaatgagatctatgcttcacactcatcaagctcgtcccaaccccaccaagccatacgctcctgatgcataatt

SEQ ID NO: 352343 - DNA, 615 bp, Homo sapiens
gctagaaaaggatgaaaagttaaaaataaatggattcagaaataaacacacaagacatcaagggtgtgtgtgtgcctgtgtaagcatgtgtgtgcatgtctgtctgcctgcacatatgtgtgcacacacatgtctgtgtcagtgtgcacgacagacaagggrcaccagcttgtttctgtctacgtagtggccctctctgaccagatcgtgtccttcctgcccccatgtgctccagaggacatctgtgatgaaagcaccattccatgagggagccaggcactccggggggtggtgacgagggacacagctccccagacagtggagcaaaggggttggggctagaaagtgaagagtcctgaattgcaagttaaagagaaagcatccagcatggctcgtatctcacagatgtggaagagtagatgccatttttcttactacttgtctaattctttctgtatgacacctgcactctccattgtagagatgagaaaactgaggccaggagtccccaaggtcatgcaggtgaccttcccagggctgagaaatgagatctatgcttcacactcatcaagctcgtcccaaccccaccaagccatacgctcctgatgcataatt

SEQ ID NO: 352344 - DNA, 615 bp, Homo sapiens
gctagaaaaggatgaaaagttaaaaataaatggattcagaaataaacacacaagacatcaagggtgtgtgtgtgcctgtgtaagcatgtgtgtgcatgtctgtctgcctgcacatatgtgtgcacacacatgtctgtgtcagtgtgcacgacagacaagggacaccagcttgtttctgtctacgtagtggccctctctgaccagatcgtgtccttcctgcccccatgtgctccagaggacatctgtgatgaaagcaccattccatgagggagccaggcactccggggggtggtgacgagggacacagctccccagacagtggagcaaaggggttggggctagaaagtgaagagtcctgaattgcaagttaaagagaaagcatccagcatggctcgtatctcacagatktggaagagtagatgccatttttcttactacttgtctaattctttctgtatgacacctgcactctccattgtagagatgagaaaactgaggccaggagtccccaaggtcatgcaggtgaccttcccagggctgagaaatgagatctatgcttcacactcatcaagctcgtcccaaccccaccaagccatacgctcctgatgcataatt

SEQ ID NO: 352345 - DNA, 609 bp, Homo sapiens
ttgtctttcaaatttgtattatccagtggtccataaaatctcaagccaacatttttgttcttggtgaattgggcttagtagtaacccaggcatttgaagaagcaaatgaaaatcctctccacaagaacttaacttcaaaccaggcctcagaaaatccccatagataaaattccaataaatgtgagctcagactcaaaaacaaaaagtgcacaagaaagcaagacaccatgaagaaaaggcagcagaaatgatgcacatgsaatcaaatctgcacagactttaatcacagaaatatcagacccatgtttgcttcattttgtatgaatgggttggacccaattgtggtgttagaaatgattacaagtggttaagttctgggtatactttgcaggtagagttgacaagaattgcagacagattggatgtgagatatgaaagactgaagttgtggatgagtctgagtttggacctgaatagttgaaggaatagatttgcattgttccaatagctgtggtccatcactgccacttccaggaccctttgaccaatggcagtcccagggcaacaccttattttccaggaacagcccaggagtggtcactgtttcaa

SEQ ID NO: 352346 - DNA, 609 bp, Homo sapiens
ttgtctttcaaatttgtattatccagtggtccataaaatctcaagccaacatttttgttcttggtgaattgggcttagtagtaacccaggcatttgaagaagcaaatgaaaatcctctccacaagaacttaacttcaaaccaggcctcagaaaatccccatagataaaattccaataaatgtgagctcagactcaaaaacaaaaagtgcacaagaaagcaagacaccatgaagaaaaggcagcagaaatgatgcacatgcaatcaaatctgcacagactttaatcacagaaatatcagacccatgtttgcttcattttgtatgaatgggttggacccaattgtggtgttagaaatgattacaagtggttaagttctgggtatactttgcaggtagagttgacaagaattgcagacagattggatgtgagatatgaaagactgaagttgtggatgagtctgagtttggacctgaatagttgaaggaatagatttgyattgttccaatagctgtggtccatcactgccacttccaggaccctttgaccaatggcagtcccagggcaacaccttattttccaggaacagcccaggagtggtcactgtttcaa

SEQ ID NO: 352347 - DNA, 492 bp, Homo sapiens
aacttctgtattttatagtacagactgttctttaattttggaaggcaacattttgacgaaccttttagtaatgtcaatcctaaggcacctaccacaccccactccttttattggtgttttttgtttgtttgtttttgcttttttttttttggttaggatttttttttaattataagaattctcagcctttaatgtgttcatttataccacaagagtatacagattaccgctgaacaacacaggtttgaactgtgcaagtctacttayatgtggactttcttcttctacctctgccacctctgaaacagcaaaacaaacctctcctctttctcctcctcagcctactcaatgtgaagacaaggaggaagaagacctttataatgatccacttctacctaatggatagtaaatatattttctcttccttacaattttctcgattacattttcttttctctaacttactttattgtaagaatccgatattattac

SEQ ID NO: 352348 - DNA, 492 bp, Homo sapiens
aacttctgtattttatagtacagactgttctttaattttggaaggcaacattttgacgaaccttttagtaatgtcaatcctaaggcacctaccacaccccactccttttattggtgttttttgtttgtttgtttttgcttttttttttttggttaggatttttttttaattataagaattctcagcctttaatgtgttcatttataccacaagagtatacagattaccgctgaacaacacaggtttgaactgtgcaagtctacttacatgtggactttcttcttctacctctgccayctctgaaacagcaaaacaaacctctcctctttctcctcctcagcctactcaatgtgaagacaaggaggaagaagacctttataatgatccacttctacctaatggatagtaaatatattttctcttccttacaattttctcgattacattttcttttctctaacttactttattgtaagaatccgatattattac

SEQ ID NO: 352349 - DNA, 588 bp, Homo sapiens
tttgctgattctggcttttcagctccagaggaatggctgctctttttctatcacctgcagcgctaacataccactaatttttatcattcttatgtattgaaaacaaagcccaaacctctcaaacaaagcagcagggttacacatcacctttccaccaagcaaatccagtttcccagcagatacagaaacttgcctcagtttcctgatctataaaatgaaggtagtaataagttctacttcaaagaattataaataggattgcatcaattaatatttgtaatgtgcttggggcagcatctggcacacagtagtgcaatataaggaatgttaagttaaataaattaatagataattgcattatattccactcctattgtgaaaatacttgatgtggaaaaactatgccaaaagcaaagaaaaggaaagggcagaagatgagtctatcacagcaagcaagatataaaaacaaagggccaggttgaggttttctccagctataaagtgtgcyggactaaatatgcatattcctgaataagcatgtgtatgtgcatatataccttcatctacatgcataaagatatgacaact

SEQ ID NO: 352350 - DNA, 585 bp, Homo sapiens
tgatctatcgtcttagcaaatttaagtatataacacagaattgttaactgtatcaccacacttccattaaactccctttctgactctcattttayagttgacaagaccaagaccagagatacacagtgttctcctctgattcacagtcagctgctcatcccgctatggctaacactaagttcacaaattattgacaacacagcaagattgtaaagagcattgctgcatcatggacttgaattcagaagactcaggcttacgcccactcctgtgtgagtgaccgtgggcaagcccttcccctttcccttggccttcattcctgttcttgtaactaagagatagctatggtaactatagccattgctactgtgcacggttgctgaagttgggacaaaatgaaatgtgaggttgctctgtaactctcaagccccatgtaaacagattggattgtttgttgtggacttcacagcgaactttcacaagtgagctctaacagttcctaagaaagagatactcaagtggatgtcatgagatgagtggtggaaacagggagagagaggacgacagataaaataagtccacagg

SEQ ID NO: 352351 - DNA, 617 bp, Homo sapiens
ccctttctgactctcattttacagttgacaagaccaagaccagagatacacagtgttctcctctgattcacagtcagctgctcatcccgctatggctaacactaagttcacaaattattgacaacacagcaagattgtaaagagcattgctgcatcatggacttgaattcagaagactcaggcttacgcccactcctgtgtgagtgaccgtgggcaagcccttcccctttcccttggccttcattcctgttcttgtaactaagagatagctatggtaactatagccattgctactgtgcacggttgctgaagttgggacaaaatgaaatgtgaggttgctctgtaactctcaagccccatgtaaacagattggattgtttrttgtggacttcacagcgaactttcacaagtgagctctaacagttcctaagaaagagatactcaagtggatgtcatgagatgagtggtggaaacagggagagagaggacgacagataaaataagtccacagggttggtctaagaaagttttctaagggaacaacagagaatttactcatttgatcaactttccctactttctctgcccccaaccattgttaacaccttcaagaaagg

SEQ ID NO: 352352 - DNA, 530 bp, Homo sapiens
cctgaactctgtcccccgaccttccatgctcctcacctttctgggtctctcctcagtgtgggggtgagagtaccttctctatcgggcacagcctagggtgttgggggtgaagggggagaagttcttgattcagccaaatgcagggaggggaggcagaaggagcccacaggccactccctatcctctgagtgtttggaaataaactgtgcaatcccatcaaaaaaaaaggagaaaaaaatgtaaaaaacattcttagctgtaagctacttatagggggataaagacaggactgttaatggacacaaacatacagttagagagaagaaataagttctgtccaggcgcggtggctcacacctctaactccagcactttgggagaccaaagygggaagatcatttgagtccaggagttcgagaccagcctggacaacatagcaagatcttatctctacagaaaattttaaaaaaagaaaaaaactagccgcacaggtctgcagtcctagctactcgggaggctaaggtgggaga

SEQ ID NO: 352353 - DNA, 530 bp, Homo sapiens
cctgaactctgtcccccgaccttccatgctcctcacctttctgggtctctcctcagtgtgggggtgagagtaccttctctatcgggcacagcctagggtgttgggggtgaagggggagaagttcttgattcagccaaatgcagggaggggaggcagaaggagcccacaggccactccctatcctctgagtgtttggaaataaactgtgcaatcccatcaaaaaaaaaggagaaaaaaatgtaaaaaacattcttagctgtaagctacttatagggggataaagacaggactgttaatggacacaaacatacagttagagagaagaaataagttctgtccaggcgcggtggctcacacctctaactccagcactttgggagaccaaagcgggaagatcatttgagtccaggagttcgagaccagcctggacaacatagcaagatcttatctctacagaaaatttwaaaaaaagaaaaaaactagccgcacaggtctgcagtcctagctactcgggaggctaaggtgggaga

SEQ ID NO: 352354 - DNA, 556 bp, Homo sapiens
gtattcattttcccttcatttcagaaggatatttttgttggatatagatttttgtttgacaatcattttctttcagcacttgaaaaatgttatgccatttcctcatggccttcttggtatctggtgagaaatacaccatcattcaaatcgtttttcttctctacataaagtgtcatttttctcttgtgggttattttctttgttttagttttcagaagtttttttctaatgtgtttggtgtggattgctttgtgtttatccttttgagtttcttcaggttcttgaatctgcatgttgctgtcttttgctaaatttgaacatttttagccactattycttcaagttttttttcagccctgtcctctttctcctctcctttcaggactctgatgatatgaatgtcagattttttttggtgtatgttacaaatcgacatgtccttaagcctctgtccatttttttcagtctatttttctctctgttgttagtactgagtattttttttttgttctatcttaaggttcactgattcttttctctgtcccctctattatgc

SEQ ID NO: 352355 - DNA, 580 bp, Homo sapiens
atctgggtgtctgtgtgaggcctggtctctcccttctgctatagcacaacgcatctgaatgtgatggtgagtggatggaaggttctgcaggctcagaaaaagactgttaagtgggccatgtacttaacagcattgtttttgtctggggtggaggcggcaggatatcccgagagggactgttgtgtgtatcatggtgtgtgaggtgtagcgatctgggtgtctgtgtgaggcctgggtggaggcctgtgcacgtcttctgtgtgtggtctttccagcctcacactcacggaaagctctggtttggatgtcactctcagcattagaggcctttgggctgcttccagcggagctggttggtgttgaaggattatgggtgatggctgtgggaatggcaccgcctgcctkgccttggaggtggctggtttcctctgtatccctgggggtgggcagtggtgtcacaagctgtgtgggaaaggagggctactcggggtggagcacaggacagcttgggtgttgcctgggaggcgtcagggaggaaggcagacgtgggagtcttggggaataaggagaaaagggtttg

SEQ ID NO: 352356 - DNA, 541 bp, Homo sapiens
agtggataggaggggtggagaagaaggggaaacagaagataggtcctggccaggcacagtggctcatgcctgaaatcctagcacattggaaggctgaggcaggagcatcactggagcctaggagttgcagtgaactatgattgcaccaccacactccagcctaggtgacagagcaagactctgtctcttaaaaaaaaaaaaaaaaaaaaaaaaagatagggtwtaggtgtaacagctgggaggaaaagagtgagtttgactttgagcaaattgagtcaggtgggaagttggaaacatacccagcctgtgcagaaaggagttatcacagcgggcctgacactgctgttcatagaaacacctgcctgcaaggttggcccttggctggcatctgggaacttggctctcagagcatccctagttaacagttaactgataaggtggttccccatggctagactgtctgtgcagacaacacaatttatgccaaacacctactttccatctgagagtctaggattttgctaggcagagggtgcccatg

SEQ ID NO: 352357 - DNA, 541 bp, Homo sapiens
agtggataggaggggtggagaagaaggggaaacagaagataggtcctggccaggcacagtggctcatgcctgaaatcctagcacattggaaggctgaggcaggagcatcactggagcctaggagttgcagtgaactatgattgcaccaccacactccagcctaggtgacagagcaagactctgtctcttaaaaaaaaaaaaaaaaaaaaaaaaagatagggtttaggtgtaacagctgggaggaaragagtgagtttgactttgagcaaattgagtcaggtgggaagttggaaacatacccagcctgtgcagaaaggagttatcacagcgggcctgacactgctgttcatagaaacacctgcctgcaaggttggcccttggctggcatctgggaacttggctctcagagcatccctagttaacagttaactgataaggtggttccccatggctagactgtctgtgcagacaacacaatttatgccaaacacctactttccatctgagagtctaggattttgctaggcagagggtgcccatg

SEQ ID NO: 352358 - DNA, 604 bp, Homo sapiens
aggactcgggtgcagccgcggcccacgcaggctctgaggtgcgagccgccagcaggtgccgtcagggtgggcacgcaccgtggacacacagacaggggcccggcccacgcatgagaccaagagtgcagagcccaggatgggccagcaccatcactactcatgtagtggccacagtgtcactgaccaagtgtcagtgtgggctaccagggacccacaaagaaaactgtcttgcaagacccggggaaagggacaagaatctacaggtgcctttcagaaataatccatgccaccgggaagcaagtgccaaaaagaagccaatctcttgggtggggacaataacctaagaagctgtcacttgtctccgtggtgaagctataaagaagctcttggtcaccaaaaaggaatagtgaggaggaaacctgtcagtttcccacctggtgctgcagacracacctagccatgacaggtattcctgtctgcttctagagacatctagaatgagccagtgtctgcgtggcttggtgacacttcccttaagtaattcttcctatatctgtagttcctgagctgccttccagatttaattttccaggtaggttttatt

SEQ ID NO: 352359 - DNA, 419 bp, Homo sapiens
gaataattccagtgaagacttgacggctgcaaaggtttattcaatccctctgggcttatgaaaataaatctctaaggcatattattaacacttcaacccaaatggacttttcttacccactgttctcccttggaaactacacagaacaggtatagtatgtgtgagagtgttgtgtatgtgtgtatataaattaagtaatggaataagtaatgcaatcaagaytttaaaatttgaaacttgaatctcttggtgaattattctaaacctatccacctcccagcatgtcttacacttataaagttactatttgccttttacttgcaagaggataaaatttggaatcttagacttcattaggctgaaaggaagcatctagatagactgataggatggtgatgtggttgggatattatcccctt

SEQ ID NO: 352360 - DNA, 590 bp, Homo sapiens
aagttctggtttggaagagaacgtgccacccagcaaacacttactgagtctttgttgagtatcacacgtagaggatcattactgactcatacaataccctcaatgaccctatgaggtagagctattgtcatactgctttaaaaaggtaaaaactgaatcacaaagggattaagcaacatgtttaaggttatacaacttacaagatgggagaaaagatttagacaggactccaaagcactgcagtaaaccaccttgagacagctgtaacataaagtcagaaaaagctcctgtcttttattatattattaaaatttgtacaaagttttcaccagcaaatggcttgaattccgcctattagtagtagaactgtctcaaaattggaaaaatttaagtaattatactgtatatttgatgaagaggataattacttatttataacygtttacagctaatcttataaaaattcttaattgtatcaaatgtgctattttagtctatatcaaaaatcaaatattaatttattccaagtatttaaatttatcattcaattcacacacacatgcacagacacagacacacacacacacaca

SEQ ID NO: 352361 - DNA, 617 bp, Homo sapiens
aaggctgcacatctaaagctattaaatatttcactttgcaaagtttacctagcatttatttgaaattatgtgctattgtgcgcrtttaaaattaatcataaatagcactttttttaaaaaaggtatccttctatgcataaataataacaacatgatgaatttctagatcgttcttggtataaatgttattgtcttctctgtatgattactatatcaaataacatgaaatttatttgccaatcttctaaccactcataccagaaaaagaatattgtaatgattgagtggattggtttactcatacaaataattatacattttataagaactacaaaacatctccattaaccactgcagtctttctgatcaaacagtgacagataggagctgagagtttaagggcatttgtttactatgtttgcttggattttccgaactgccttagttcctgattccacactgctattgtgtggatcaaataatcccttgtcacaaaaataccctggggaatgactcccctggcgtccaggttatgagtgtggtcagtcattccacatgccttagggatgagctatctgtgccatgacgagcgatttccttttcgagttttgtaatcc

SEQ ID NO: 352362 - DNA, 617 bp, Homo sapiens
aaggctgcacatctaaagctattaaatatttcactttgcaaagtttacctagcatttatttgaaattatgtgctattgtgcgcatttaaaattaatcataaatagcactttttttaaaaaaggtatccytctatgcataaataataacaacatgatgaatttctagatcgttcttggtataaatgttattgtcttctctgtatgattactatatcaaataacatgaaatttatttgccaatcttctaaccactcataccagaaaaagaatattgtaatgattgagtggattggtttactcatacaaataattatacattttataagaactacaaaacatctccattaaccactgcagtctttctgatcaaacagtgacagataggagctgagagtttaagggcatttgtttactatgtttgcttggattttccgaactgccttagttcctgattccacactgctattgtgtggatcaaataatcccttgtcacaaaaataccctggggaatgactcccctggcgtccaggttatgagtgtggtcagtcattccacatgccttagggatgagctatctgtgccatgacgagcgatttccttttcgagttttgtaatcc

SEQ ID NO: 352363 - DNA, 565 bp, Homo sapiens
tggttttttttcatggtgttattgatatataggtcttgtgtgatttatgctttaaggagattctatttttgtgtatttttaaggatttgtttcatgacttagagctccttttagcagttcttgtagtgctggcttggtagtggcaaattctgtcagcatttgtttgtctggaaaagactgtatctttccttcattaatgaagattagttttgctggatacaaaattcttgactgataattgttttgtttaaggaggctaaagatagcacccaatcccttctagtttgtagggtttctgctgagagatctgctgttaatctgaaaggttttctgttaggcctctaagcccaagctaggccatcatatccccagtgacytacacatatacatctagatggcctgaagcaactgaagatccacaaaagaagtgaaaatagccttaactgatgacattccaccattgtgatttatttctgccccaacctaactgatcagtgtactttgtaatctcccccacccttaagaaagttctttgtaattctccccacccttgagaatgtacttt

SEQ ID NO: 352364 - DNA, 590 bp, Homo sapiens
gatggcaggaaaattaaaacagacatagcaatccaatataatacttggaacatgtttgaatcttgattccaataagctccttgtaaaaggatatttttttgagacaatgaaagaattttgaatatgaattgagtatcggttgtgacaaggaattattggtaatttggttggacgtaacaatagcattatatttatataaaaaaatatatttttagtgaagcataggtcagaatatgaagactacgttaaatttcatgatatcttggatttgccataaaatacttagggaaaagatataatttcctgatgagttcttcctgcctgctgcacaaataaaatcaattcacagagaccacatcatkgcagtaaagaaggagtttaattgacgggaggccggccatgccttgtgggagatggaattattactcaaatcaatctcaccaaaggctcagaggttaggggtttttcaaagatagcttggtgggtagggagccaggaattcgttgggtaggagatgaaatcatacggagttgaagctgttcaattgtgctgatttggttcctgggtggggccacaggactactggtgag

SEQ ID NO: 352365 - DNA, 607 bp, Homo sapiens
cattgtaagactcatcacaaggctttaattctagtaaggtgctcaacaaataattttctttctcttgcatcccgctaaagaaaatataactcaacctctggaatgctcctattttacaattttatttgtttttgtttgtttgttttattttgtttgagacagggtctagctttgttgtccaggctgtagtgtagtggcacgatcttggctcactgcaacctccgcctcccaggttcaagtgattctcgtgccttagcctcctgagtagctgggattacaggtgtgcaccaccacacctggctaatttttgtatttttagtagagatagagtttcaccatgttgtctaggctgtcttgaactcctgggctcaagcaatccacctgcctcagcctcccaaaatgctgggattacaggcatgagccatcgcacccggccctactctacaattttaaaaatttatcttacccycataaaacttctcattaacaacaacaacaaaatccttgaatacaaatatctttagataatataaatatccctggaggaacaccaggtttctccaggtttttgattttagggactcttttggtaattcaataggaggtg

SEQ ID NO: 352366 - DNA, 603 bp, Homo sapiens
acataacacatgcatacaaatcattctccaatccctattcggttctgtataatctcaaaaatcttcaatacatttcagtcttttatcagacattcttaaacagaagccattccttctccttggtatgagagaggatatttcttcagacaattcactttctgtttgtcagaaattccctttctcccttcttccctttcttcctgcattccttcttcttacctgcctgccttcctccaacaatatttaatatatgcctacttgccgtcaagcactgggctaggtattgaacatacagttatgaacaaaacagtccttgttactgctttaatgaaatyttcatttgattaggtgctgattaccccaaacagaattttatctactttacatttctattttgtaagttaataattactgaatgcttactaaattctaggtagcatgctgagcatgttacttttattttttgtaagcatttttcattttattaaataaattttatcataaggattgtgtttactgaattgttcatttcttgcatctatactattcttaaccattcccacctgttgaaccttgagatgattcacaatcatttataaaggc

SEQ ID NO: 352367 - DNA, 565 bp, Homo sapiens
ataattttcaacaaatatagtggcttttggtggtataaaatacttataagaatttgtgttactaataaaaagcatgaaagccacttttcccaaggtgtaatataataatggtggtaaattttctcaagtcaaaaatacatgattttattagtaataattttctctcttttggcccttaaattcccaaagcttcttgtagctaagttaaaagcacaaacagtagaattttagcatgagctgctgttttctctggaaccatttctatcctatttgctttcctttgtttttaactatgaatgtaagcttcccttttcataacaaaaattactcaaatacttgtactgatttacatttactargaagccagtgcactttttttaagttgtgcccttaaaacaacactcagaccaatgaaatacacaaataagtgtgtcaagactgttgcaaagtctatatacctatcaaaaatcttttgcagacacctttatgaatcatagattacagatgcatcggttctctagagttgcttaagtcaaagtttaaattttatggaaccatgtggtag

SEQ ID NO: 352368 - DNA, 559 bp, Homo sapiens
tgaatagcagtaataattacccaaactctgccaaaccttcacttctctttttttctgtcctttttaaatgtgatcattttttaattgaatgtaataactatttttgatggcctacagtatgtctcacttaatgcattgaaaaatacaaatatagagtcttcagggcagtggggacaactgaaaacagcaattatataatgatatgtttagtgtattcaattcttgccttaacaattagttcacgtcttgcacgtcttcaattcagcacatatttatgagtatctastacatgacgaacagttggcatattctttaaagtgtactttagtgaccagggccctctgtgatttttatcccctttcttgccttctctaaccagttctactcacatcctacactgctgaggttagtagctttcattttatggcaatatcattttatggtgatttcattttatgtaaagttgcaacctctcaaaaaaatgaagcctgtaaaccttagataagcataagttttttttgctttttaaaaaacttattatttgattcaaagttccatt

SEQ ID NO: 352369 - DNA, 590 bp, Homo sapiens
aagcaacaacttcctccactcaggctcggggtcctaaccaatctcacctgcttggtgttatcaattgttccctctcctacaccttccaattctccctctttactggatctttgctattagcattgagatatcctagtgttcccattttcaacaaaagaagaagaagatgaagaggaagacaaagtcagaaaatagaagaaaatagaaaaacaacaaaaaagccttctggatctttacatgcctctccagatacaaatatcttccccatctctccctctgctcacatcctacctacttctgagcccgctgcatcttcataaccacccatgtgactccaccacagctcttgtgaaggcttcctatgactttcaagtcattatgtccaatggatacctttaaatcttcaccttacttggcttctcagaagcagtaaatagagttgatgactccacccttcctgaaatcctttctgttcctttggcttctgcaacaccmcatctagtttacctcctaccattctccatgttggagaatggtgtcttgcgctgtatgacattcaaatactgaacttcctctcagctcaaacctag

SEQ ID NO: 352370 - DNA, 590 bp, Homo sapiens
aagcaacaacttcctccactcaggctcggggtcctaaccaatctcacctgcttggtgttatcaattgttccctctcctacaccttccaattctccctctttactggatctttgctattagcattgagatatcctagtgttcccattttcaacaaaagaagaagaagatgaagaggaagacaaagtcagaaaatagaagaaaatagaaaaacaacaaaaaagccttctggatctttacatgcctctccagatacaaatatcttccccatctctccctctgctcacatcctacctacttctgagcccgctgcatcttcataaccacccatgtgactccaccacagctcttgtgaaggcttcctatgactttcaagtcattatgtccaatggatacctttaaatcttcaccttacttggcttctcagaagcagtaaatagagttgatgactccacccttcctgaaatcctttctgttcctttggcttctgcaacaccacatctagtttacctcctaccattctccatgttggagaatggtgtyttgcgctgtatgacattcaaatactgaacttcctctcagctcaaacctag

SEQ ID NO: 352371 - DNA, 570 bp, Homo sapiens
  misc_feature (1)...(570): n = A,T,C or G
tcccatggcttgcatttgcctctttatgcctttgagttcctgatttttcccactccagaattttctcctgagctttagaacaggagawacatgttctaaacagcctacatgactactctaaccagataccacacaagccctctcattaatcatgtccaacactgaattcacaatcatctccccagtcagcactgcttccagagttccttatcttgggaaaagggtctgctttccattcagcagcattgcatcttttacatatgcaaaagacctctggtcattcctgaagcatcttaccttcatcccaatatccacttgatcatcagatcttgtttattctattcactaaacatttttgagtcatcttcttctctgtacctccacgctcagcactccaatccaggctacaatgatctcctacatgcaccattactgtagtctcatacagccttcttttactactctctccacctgcaatttgttctcctcacaacagagtgaaaattntataaacttatctattcattgcactcatttgcaaaaacttttctgaaactgtccattgcttat

SEQ ID NO: 352372 - DNA, 356 bp, Homo sapiens
gtatctctcacagttgttataagaattaagtgagacaatgagtgccaactatctggcataatcgtttgtgctgaaataaatgatagttatttgtgaatttcagatcattttagaaattatttagtcagccctctcctgcgcacacctaattttatkcagtaagatcttagccctaagcggcttatgtttcagccagaagaggggaaagcaagattcctggagcagagacatttgagggatgaaacattaaaatggctgagaattttcagtaagtgagataagcacgttagaggtgagtttgaagaggtctgttcctcaagttcaacccaccagctctccttttttcctcctcatgg

SEQ ID NO: 352373 - DNA, 526 bp, Homo sapiens
gttttttttaaaaatgttttacttgaaaatactaatgtcttgttgaatggaagaataaatcactgctttttggggttttgttactttgctttctttgagacagggtcttgctatgtcgcccaggctggagtgcagtggtgtgatcctagcatactgcaacccctgcctgtcgagctcaagtgatcctcccatctcagcctcctgagtagctgggactataggcatgtgccaccacacrtggctaatttttaaatttttttatagatatgaggtctcactatattgcccaggctggtcttgaactcctgggctcaagcaatcctcctgccttggcctcccaaagtgctgggattataggtgtgagccattgctcccaggctgaatcactatattttgaatgaataaatgaacaaacaaatggttacagggttgtttataacaattaaccactgaaacaaattatatttatttttcaaggggaaaatcaggtatagattaaagctaaaaaattgtactcatgtattaa

SEQ ID NO: 352374 - DNA, 577 bp, Homo sapiens
ttcaaaatacataacacaattgacaaaattaaagagagaatataaatctatgatcttaatatctctycctaatcaattaataggataaatacctaatgcatgtggggcttactacctagatgacaggttgataggttcagcaaaccaccatggcacatgtttacctatgtaacaaacctgcacgttctgcacacgtatcttggaacttaaagcaagatttttaaaaaatagtaaaaactaggccaaaaattctcggtaagcacacagatgattggaacaaggtcaattatcttgacctaactgatattttagaacattaaacctaataagtgaagaatacacatttttcaattacacatgatatacgcaccaagatagaccatatacatgcccataaaacaagtctcaataaaatgaaaagcattaaaaccacagattatattccctgacaatgaaattagaagtaacaataagatatgtaggaaaatcccaaatatttggaaattaaaatgctttcatactgtacccaaaccaaagaggagataagaaaaattagaaaatactttaaactgagtaa

SEQ ID NO: 352375 - DNA, 596 bp, Homo sapiens
caccaatgctccaaaacctaataaagacttaagtttttattgtgcacatatcatcttctccagaaggaaagtttttttttttaatcattccttgagcctatgcttagctcctagtccagtgatacacagtagtgccctcctaaccaccgttttccttttttgtgctttcagttacctgtgatcaacagtggtctgcaaatattaaatggaaaggaasagaaataaacaatccctatgttttaaattgctcactgttctgagtagtgtgatgaaagctttgctgtccagctccatctccatcctgtcagggatgtgcatcagccctttgtccagcgtatcgaggatatagatgctacccacctgttagtcactagccatctcggttatcagattgactgccaaggtattgcagtgcttgtgctcaagttaccattattttatttaataatggctccaaagcataagagtagtgatgttgacatattattataattgttctcttctattattagttattgttgttaatctcttactatgcctaatttataacttaaacttgattatacatatgtatgtataggaataaacatagtata

SEQ ID NO: 352376 - DNA, 596 bp, Homo sapiens
caccaatgctccaaaacctaataaagacttaagtttttattgtgcacatatcatcttctccagaaggaaagtttttttttttaatcattccttgagcctatgcttagctcctagtccagtgatacacagtagtgccctcctaaccaccgttttccttttttgtgctttcagttacctgtgatcaacagtggtctgcaaatattaaatggaaaggaagagaaataaacaatccctatgttttaaattgctcactgttctgagtagtgtgatgaaagctttgctgtccagctccatctccatcctgtcagggatgtgcatcagccctttgtccagcgtatcgaggatatagatgctacccacctgttagtcactagccatctcggttatcagattgactgccaaggtattgcagtgcttgtgctcaagttaccattattttatttaataatggctccaaagcataagagtagtgatgttgrcatattattataattgttctcttctattattagttattgttgttaatctcttactatgcctaatttataacttaaacttgattatacatatgtatgtataggaataaacatagtata

SEQ ID NO: 352377 - DNA, 550 bp, Homo sapiens
ccatagcccagttagaatggctattattaaaagacaagaaataacaaatactagtgaggatatgaagaaaaggaaacatttattcatagttggtgggaatgtaaattagtataaacattgtgaacgatgaagtttcctcaaaaaaaaaaaaaaaaaaaggaactagtatataatccagcaatcccactttggagtataaatccaaaagaaaagaaaataaattagtatgtaaaagaggtatctgcatgccagtgtttattgaaggattatttgcaatagccaagatatcgaatcaacccatgtccatcaaaagatgacttgataaagaaaatgtggtacatatgcacaatggaatactatttggccataaaaaatgaaattctgtctttcctagcaacatgagactaraagacatcacgttaaaagaaataagccacacacaagaagacaaatagtacattctatctcatatgtgtaagctaaaaaagttggtgttatagaaatagagagtagaatagtggttgctagaggttgggaagtatacaggaac

SEQ ID NO: 352378 - DNA, 578 bp, Homo sapiens
gttttacatggaagttttggaataaactatttgaggtaccattgaattcaggcaatatctaaatataaatattattattccaaaaagtttttaaatgagaaaacaggttctatattgatttatattttgtgagttagattcaggcctgtttcaacaagtgttaactgcttaatatgttgtgtatgtatttcaagtatatattaatttttaattttagactggatatttaaaacttgagtataaactttgttcttcatttaaacaaacagacaaagatttaatttagccctggactattcttacataaacatacaaagtagaacattaacttatcctttacattttcttccaacttttaaaaaatgatatttatagaaaagaaattaaagaggtccttcttatcctgttttgcatattcagtctgtattacaatatttttaaacattcacttaatccaactgacattgttttggggcctataaacatttgctgatcattggattatcaaygagctttgttaaaatgacaatcaaaaattctggatgtcatcagaaagactattttatcattatagcatt

SEQ ID NO: 352379 - DNA, 553 bp, Homo sapiens
ttgttaaaatgacaatcaaaaattctggatgtcatcagaaagactattttatcattatagcatttcttccctttcataaaccattgcctaagtattctaaatggtttcctatatcaagttttgtgattacatttttctaggctttcaatatcattagaaatatgcatgtttaaatacatataaattatttgagcttctgtcattgtagttttgaatatatcttattactgatttcagtagcataaaaggctgctaaacaaaactattattatcttttattcargtttatcattcttatacaatacaatgctattcaagcatttcttctgcatcatatacatttatgaatttatacaaccatttcttaattatgtacaagtggataatgaattctacatctccataatgtttaatgtttgaggaaccaaataaatgctaaaataaatccttttattttaaactataagttttgacctgttgataccactaaaaattgtattcatttgcttaactcatctgtttcattcaaaatagtttctgcctagcagaaata

SEQ ID NO: 352380 - DNA, 575 bp, Homo sapiens
tccaataactacttaggggcctaaaggaacataagtttattattttcataattttctgtattggktgtgtagttcttgtgtgttggctaatctgtggctgaattatctaggatggccttgcccaaatgtttgacaatttgcaggctgtttggtcacatgattgggaagcccagatatgttctctcatctttcattgggtttacctgacccttatacattattcatgagtactagaactaactagtgtgctcactttctgcccactacaatattagataagaagcactgtaccattttatggcgatatcagaggatcataatatgataccagtatttgcacaaatataatttagatagtcatgtatcactttatacctgttaacactctcaagaaaaagatatgacaaaccaagaaaaaaaatcacaaaaaagctagacaaatggtggaaaattacacctaaaactgagccacaggacagctactactgcacattccaagacctagagataattatgattaacacttttatgacttaagaagacgtttttgcggtagaacaattatcagttacaga

SEQ ID NO: 352381 - DNA, 681 bp, Homo sapiens
gcccagatatgttctctcatctttcattggktttacctgacccttatacattattcatgagtactagaactaactagtgtgctcactttctgcccactacaatattagataagaagcactgtaccattttatggcgatatcagaggatcataatatgataccagtatttgcacaaatataatttagatagtcatgtatcactttatacctgttaacactctcaagaaaaagatatgacaaaccaagaaaaaaaatcacaaaaaagctagacaaatggtggaaaattacacctaaaactgagccacaggacagctactactgcacattccaagacctagagataattatgattaacacttttatgacttaagaagacgtttttgcggtagaacaattatcagttacagaatgccttatgaaaggctttcctttgttcttctgaatcaaataaaagcactattaacatctcagaaataacatttcgaagtttatatctgacgcctaaattatgtaatttaaggaaattgagttaaatgcacacagtgctttgaaaggtggaggtcaattaattgtgccttaaaaatattggctaaagttcagcaacccagagagaataacttcttctctgaaaaagaaaataatatttgagagcctcaggtatacatttatagtagaaactaa

SEQ ID NO: 352382 - DNA, 575 bp, Homo sapiens
tccaataactacttaggggcctaaaggaacataagtttattattttcataattttctgtattgggtgtgtagttcttgtgtgttggctaatctgtggctgaattatctaggatggccttgcccaaatgtttgacaatttgcaggctgtttggtcacatgattgggaagcccagatatgttctctcatctttcattgggtttacctgacccttatacattattcatgagtactagaactaactagtgtgctcactttctgcccactacaatattagataagaagcactgtaccattttatggygatatcagaggatcataatatgataccagtatttgcacaaatataatttagatagtcatgtatcactttatacctgttaacactctcaagaaaaagatatgacaaaccaagaaaaaaaatcacaaaaaagctagacaaatggtggaaaattacacctaaaactgagccacaggacagctactactgcacattccaagacctagagataattatgattaacacttttatgacttaagaagacgtttttgcggtagaacaattatcagttacaga

SEQ ID NO: 352383 - DNA, 415 bp, Homo sapiens
aaatcactttgaatcagtgaaacattgactagtatatgaatatgtgaatatgtgaatgtttctgtttgtgaacaaacatattttaatcatgtatagtatatctaatttgaatcawactacaacagagttacaaataaccactttgcagaaggaagaggatgatgacattttgaattccattttaatgatgtcacctggattctttatttcatgtctgttttacagctgttacatacaatgcatagtataaaacactaaagggcaaagactccagcagcattagtgattattgctataggtcagtttgcccatttaccattctaagaaaactcaactatatcattttaagtaattacttctatggataatgcctaaatgtatgtgtttatacagatgataaatctgccatataaat

SEQ ID NO: 352384 - DNA, 634 bp, Homo sapiens
tttgcaatatatgccccattggctggctgtatggaacaagaatagttaccatgtggcatcaagaggtcacactgctaaaagcaaatgacttactagaaccctacaaaatgcttctgctcttgctactggctgtacttttgtggccacaagaaaaagatcctgatccactgggttccagggaaaaatgcccatgtgccgctgtggtacaagcacagggctaattcaaacctgattcaaacctagttacttaacacatataaagcatccaccagcttgggagaaatccctaacgatgacaatagtgatttaaggatctctaaaggaaggaacttacaaaaataggcaagacaaacaggatatgcttctggagtagagaccatagccaaagaagaagaggagaaagagcttccttttggatatagaggaaaaatacaaatacctaaaatatagtgcacaattttactcatttggaaatccaaaatttactaaaacwtttttttttacaaaaaaaggataaaagtgtgctgattagccattgtgcttccacaatgtaaattctgaattaactttaacatcttctgaaatgcatcaattggcaaactttaatggctttaatagaagggctcacttaagt

SEQ ID NO: 352385 - DNA, 527 bp, Homo sapiens
tgggcagtgatcttagcatcagattcactgctyaatgatcagttttatctgtatgtttttatagactctttggctattgtctggtccagccagtgtcagcaacaactatgtcctatgcaatattgcccactttggaatgaagaattctgagaagctcttggctcaaggtcacatatgtctaactcataataaagccagtataaaaggcctcatcaatatactcctcatccccttctgagttctagatactatcggtagtgaccaggcaactcatttcagttttcaaaatacataatgttgggcttttaaccaaggcattcaacgaaacttttatcctcatttttaacactgagttatagatctcataaagcacaataatgacttacttaagcaagttcaaattcaattgaataaagcctggaatatttcagccatctgacattggaattaattgcaataatgagtctaattccatttgtgatatttgatgactgagagctttttagccccaccactctcctttaacc

SEQ ID NO: 352386 - DNA, 373 bp, Homo sapiens
gaaagattaatgaaagagaaagttgttctttgggaaacataagcaaaacagaaaaacctgtagcctgattaaagataaaagaaagatgactcaaagaaataaaatcagatatgaaaaaggagacattatcacagatatcacagaaattcaaaaggtcattaaggattagagactattatgaacaaatatatgccaataaattagaaaacctgaaagaaattgataaacccctagacacatataacctactaaaatcaagccacgaagaaatagaaaacctgaacagmccagtaataagtaacaggatggaagcagtaataaaaagtctcccaacaaataatagcccaatatctgatagcttcactgctgaatt

SEQ ID NO: 352387 - DNA, 612 bp, Homo sapiens
gataaacccctagacacatataacctactaaaatcaagccacgaagaaatagaaaacctgaacagcccagtaataagtaacaggatggaagcagtaataaaaagtctcccaacaaataatagcccaatatctgatagcttcactgctgaattctaccaaatatttaaaaatatttgtgtgttagatccattcggtccaaagtgtccaattgtattttattttgttggttttctctgtaagtgatctaactactgttcagtctggtaytgactttttttactataattgtattactgtcccaaacttccatatctatttatatttgctttatatctttaggtgctctgatattagatgcatgtagatttataattgttatttcttcttgattaattgacccttttactattatttaatgacattctttgtctctttttacagtttttggcttaaagtttattttgtttgaaataaatatagcgggcaaggcgcagtggctcacccctgtaatcccagaactttgggaggctaaggggggcggatcacgaggtcaggagattgagaccatcctggctaacccagtgaaaccccgtctctactaaaaatacaaaa

SEQ ID NO: 352388 - DNA, 542 bp, Homo sapiens
ctccagctgtggctgaaaggggccaaggtagagctcaggccatggcttcagagggtgcaagcctcaagccttgccagcttccacgtggtgttgagcctgcaagtgcatggaagtcaagcattgaggtttgggagcctctgcatagatttcagaggatgaatggaaatgcctggatgtccaggcagaagtttgctgcaggggggtgctctcatgaagaacttctgctagggcagtgcagaagggaaatgtggggtcggagccccacacagagtccctactggggctctgcctagtggagttgtgaggagagggccccaaactacagaatgttagatccactgacagcttgcactgtttacctggaaaagctgcagaccctcaatgccagcccatgaaagcagctgagagggaggtagcaccctgcagaggcacaggggcagagctgcccaagaccataggaaaccacctcttgcatcagcatgacatggatgtragatgtggagtcaaagtagatcattttgaagctttaagatttgactgcc

SEQ ID NO: 352389 - DNA, 364 bp, Homo sapiens
tattttaacattgaatggttttcatcctatttggggtgactttgataagatgctatcaatctcgcatatgtatatgagatttcttaaaaattgaattagaaacatataattgtggtgtgttgatttgggaaggtgaaaacacatagaaatttagtatgtttcagaaatgaggtaacaagtgggtggagacaataaggtgggagccaagggaacagaaacaaagggagttytggattaaggtgaagataaaggcaggagagagaacagcaggggataagcaaatatattattggatatatcaatcctaaaacaaattaatagatagagtgaaatggacaggctgagtagaagcaggtagatgtat

SEQ ID NO: 352390 - DNA, 563 bp, Homo sapiens
acatttttcttccagacaaattatgggaaaaattttagcaaatacttttattaatttttaaaaacagttttagttttttatgacaaatattttggaactgaaaaattcayattaattatttttaacaagtgctaatttgcatcaaactcttacaatatgttttccctctgatcccaagttttctattttatgaatctatccttagataataatcacacagtagacaaatatgtatgtgtagaaagttaattgaaagactgtttatagtaataaaccataaatgagaacaacttatagccaataaaacactatgtttaatatttgcataatatatttttagaaaattctacttggatatacatcagattttaacaacatctcttagatatgagaaataagcacacttttttcccttcttttgttatcctggatttgctatatttttctacaatgagtattacttgtataaatttcaaaatggcaaaaatcagttgaaaagaagaattacatttttcctttgaattttgaagaacattttgaatatttgttaattaccctaaaaa

SEQ ID NO: 352391 - DNA, 615 bp, Homo sapiens
ttaaatatataaaatttttatttgtaaaatatacttcagcaaaactggaaaactataagaataactacattctttcttttaacccattttacagtgaaattatagtacctttcctcatacagtatatagcatgaattctttaccctctttgtttctagtgaagasttttaatgattttcccagtttatgttaaaggtggtctattaccttaaatcactattctcagatactggttggcatttaatatatattaaatttttttcttgaaataattttagacaaaaaagcttgcaaatacagtatggagaatttatgtgtacatttcacaacctcccctaatataagcatctcatataatgataataaaattatcaaaaccccaaaagtgagattagtgcaatattattaactaaactacagtccttattcaaattccaccagtttttccactaaagcttttcttcatgttcctaaatccaatccaagatccatattacatttagttttaatgtctccttagtctcctccaatctgtgatatattttgtctctccttgcctttcatgacattggcacttttgaggaatactggttagtccctcattttttactagtt

SEQ ID NO: 352392 - DNA, 638 bp, Homo sapiens
ccctgatggtaatgttttgtatgaaactatagtactatatagtatcacaatcaagatgtgaacattgatagcattcaccaatcttattcaaatttttccagttttgattgtgtgtgtgtgtgtgtgtgtgtgtatgtgtgtgtggatgtgtattamatcctatgccatcgtatcacctatgtaagctcttgtctccaccaccacagtcaagatattgagtactcccatcaccacaaatattcctcctattgccatttaatcgcctctccctcaactcctcgccactagaaatgtgcctccatttctaaaatgttattatttcaaacattttattatataagcagaaacatatatcatgtaagcgtttagaagtggatttcttttgattcagcataatttcctgaagattcatccaagttgcttgtgtatcaataggttgttcctttatattgctggttagtaaaccagagtgtgtatgtagtacagtttgtctaaccattcacctgttgaagaatatctgagctgatactagttgtttaatattacaaataaagctacttataatacttacatacagatttttgtgtgtgtgaacatagcttcttatttctttgggataaatgcccagggacgcaagt

SEQ ID NO: 352393 - DNA, 638 bp, Homo sapiens
ccctgatggtaatgttttgtatgaaactatagtactatatagtatcacaatcaagatgtgaacattgatagcattcaccaatcttattcaaatttttccagttttgattgtgtgtgtgtgtgtgtgtgtgtgtatgtgtgtgtggatgtgtattaaatyctatgccatcgtatcacctatgtaagctcttgtctccaccaccacagtcaagatattgagtactcccatcaccacaaatattcctcctattgccatttaatcgcctctccctcaactcctcgccactagaaatgtgcctccatttctaaaatgttattatttcaaacattttattatataagcagaaacatatatcatgtaagcgtttagaagtggatttcttttgattcagcataatttcctgaagattcatccaagttgcttgtgtatcaataggttgttcctttatattgctggttagtaaaccagagtgtgtatgtagtacagtttgtctaaccattcacctgttgaagaatatctgagctgatactagttgtttaatattacaaataaagctacttataatacttacatacagatttttgtgtgtgtgaacatagcttcttatttctttgggataaatgcccagggacgcaagt

SEQ ID NO: 352394 - DNA, 497 bp, Homo sapiens
tgaaattaagtgacttcttagtgaaaggtattgcagtatttgcagcacgtatatttcaggttagcaagatgataaatatataccctgtgctttaaacagcacagtattaaaatattcaagtacaacaagaatgaatagaaaaataaagaggaaaaagatcccacaataaatgagcagatttgtgctattttatttcttttgcaagctgtgaaaatccctgctgagaatgccataatttcttacagattgtcatttcctttggatattattacatgcagtaagttaactggagctaatatagttccaggagatgtagtgaagacttagaagtacaaagccttttatcaatgtaaaaaacatcctgattagtagtarctggttatcctctgaagctgtttccatgaacaaccctgcctacacagagcctgataggcaggactgccagtaaaaactgtccaaagaactattgccaagatgtctgcttcttcctggaaatg

SEQ ID NO: 352395 - DNA, 521 bp, Homo sapiens
ctcagatagaccttagatcaaatcccatcagtcataaggaaatcactcaattctgaagcttagtttcttccactacaatatgggagtaacaatgtctaagaggtttgtgtgaaaattaaagaccatrcataaatcagttatattcaattatgaaaagctatcattgccacaccaagacattgcttttttttttaattcctttcttcgtgttgcatatatgtgtctatttctttgcccaccaatgtttgttttgcttaatattttaggattaaaaaaaactcctgctcagtcttattaaaataagttagtatttccgaccaaattgacagtctgaattgaggccaaaatagaaagcaggggcactttgttgtcctttaagtgaaaaatatttttacattcttggttttcatgttcagctcactcattgattaccctgccgttggctcctggtttgctgcttcagtttctccataaaaatttacctttggatactgaatataaagcatttgtttaggccacca

SEQ ID NO: 352396 - DNA, 521 bp, Homo sapiens
ctcagatagaccttagatcaaatcccatcagtcataaggaaatcactcaattctgaagcttagtttcttccactacaatatgggagtaacaatgtctaagaggtttgtgtgaaaattaaagaccatacataaatcagttatattcaattatgaaaagctatcattgccacaccaagacattgcttttttttttaattcctttcttcgtgttgcatatatgtgtctatttctttgcccaccaatgtttgttttgcttaatattttaggattaaaaaaaactcctgctcagtcttattaraataagttagtatttccgaccaaattgacagtctgaattgaggccaaaatagaaagcaggggcactttgttgtcctttaagtgaaaaatatttttacattcttggttttcatgttcagctcactcattgattaccctgccgttggctcctggtttgctgcttcagtttctccataaaaatttacctttggatactgaatataaagcatttgtttaggccacca

SEQ ID NO: 352397 - DNA, 584 bp, Homo sapiens
atttctcagcaagtgttcaaagaaattctcagaaagaagccaagggcagatataaatccctaataataaataataaggtacaggctgtacaaaaatgatattagaacagttttattgctttagatggatcttaaaattcctcaggaatagaagaataaaagatgatttataatccttacaattatggcatttgaataactgaatcctgtttttaaatcattgggtgtgatagttcccaagtttcacatgtgtyctttgaattcatttttcaaaaaagaattataatcttctgaacttattatagttgtgctaatatcttcactggtctcatcctggaatcctgaaagaagcttttctttttccagacattattcacaaacctgttaattgcgcaccaggatttttgtttattttggatgctgcagctacactctggctacttaagactacgcacagggtgagttttagaggtctttaagatatttgcctgaaaatttcttgagacttctttctgtattagtcttttttatgcaatactgggaattctgaatcagtctggagctattaggttctctatgtgagct

SEQ ID NO: 352398 - DNA, 584 bp, Homo sapiens
atttctcagcaagtgttcaaagaaattctcagaaagaagccaagggcagatataaatccctaataataaataataaggtacaggctgtacaaaaatgatattagaacagttttattgctttagatggatcttaaaattcctcaggaatagaagaataaaagatgatttataatccttacaattatggcatttgaataactgaatcctgtttttaaatcattgggtgtgatagttcccaagtttcacatgtgtcctttgaattcatttttcaaaaaagaattataatcttctgaacttattatagttstgctaatatcttcactggtctcatcctggaatcctgaaagaagcttttctttttccagacattattcacaaacctgttaattgcgcaccaggatttttgtttattttggatgctgcagctacactctggctacttaagactacgcacagggtgagttttagaggtctttaagatatttgcctgaaaatttcttgagacttctttctgtattagtcttttttatgcaatactgggaattctgaatcagtctggagctattaggttctctatgtgagct

SEQ ID NO: 352399 - DNA, 562 bp, Homo sapiens
ttaaaattcctcaggaatagaagaataaaagatgatttataatccttacaattatggcatttgaataactgaatcctgtttttaaatcattgggtgtgatagttcccaagtttcacatgtgtcctttgaattcatttttcaaaaaagaattataatcttctgaacttattatagttgtgctaatatcttcactggtctcatcctggaatcctgaaagaagcttttctttttccagacattattcacaaacctgttaattgcgcaccaggatttttgtttattttggatgctgcagctacactctggctacttaagactacgcacagggtgagttttagaggtctttaagatatttgcctgaaaatttcttgagacttctttctgtattagtcttttttatgcaatactgggaattctgaatcagtctggagctattaggttctctatgtgagctttatattaagaaatcaaaaatgmcaagttttcatgttacctaaggattatgaataacaagaagtacatgttatgcaccttccttgtattaaaaaaaatagaactatta

SEQ ID NO: 352400 - DNA, 595 bp, Homo sapiens
gaaattttatttgatttgtttttgtttgctttaaactcaatttcaatagctacatgtggccagtggctaccatattaacagcatagctagaaaatttagaaagctctcataacaatgattggctaaaattttcttcccagcatttgatggaccacttacagatttgtttgcttgattacctgtgaagagcatgctttccaacttataggagacttttgtgatgatacattaaacaaaaccatagccacaaatacgtgttctcttcctttttcctatttccctgtaaagattttagtctaaatttcctataatcttgctgscttttgtatttctcattttaaaaattaataaaaatttaaaaaaggatccagtatgatcctttgtattaatctgtaccaatgtctaaaagaaattgggtcctcacccatcccagtgagtgatgccatagggatacatggtagaattcagcagtaaaatcatcctttccttggcttttctttgatgggagactttttgttactgatcaatctcattactcattaggactgttcgggttttctattcctgtttcaaaattggtaggtcatttgtgtca

SEQ ID NO: 352401 - DNA, 389 bp, Homo sapiens
attacaatgtttcaatggagtacaaaagaatgttgtagaattctagtgccttgagtaatgaaaaagttacacagaagggcaaggagtatgtaacacacactcctgatatgatgcatattatttaaatatgatacaaaatctgttatgtattctttcagctaaaataaatawatatatatatatatatagtgtttctagcaaaaaaagagataatgttagaaatgataatacaagaaaatgtatataggtcacatacatttatgaatttattgtagagtgtaaaatatttttattttgataaactttcatgaattaaaatatttattgcatattagtatttgtcaggtgctgggagagaaatcagggataatggggcttctatagggtct

SEQ ID NO: 352402 - DNA, 586 bp, Homo sapiens
tccatcacatttgaatcctaaattcctaaagaattagttcwttgttcaaattctaaaatattcgtgtgatatatccattatcctcctcattccaggtactacggttgtgtaacaaattatcatcagatttagtggcttaaaacaacaaccatattatgttcacaaattcagaggatcaaaaattgagaaagaatacagtggggacagcttgattttgctccacaatatctggatcatcagatgtcaagactcaagggctggtgatgactcagatggttgtgggctagaagcatctgaaggcacatgccctcatatattttgtgcccactcatggaggactcaaaatcggggctgcttagtgggccacctacttgcggcatttctgttaggcctggcttctgcataatatagtgacctcagggtagttggagccctaactgtaaatgtttgaataagttaagctggaaactgcatcatcatctcttctgatgaagcctcagaagtaatgcagcagaatatctgctgcttctattgcttacaagaaagttacaagaccaccaaagcctcaccaaaattattgttatgt

SEQ ID NO: 352403 - DNA, 621 bp, Homo sapiens
acctatagttcttaactaatacttaaaatattccctcttgccttctagaaaatcatgtgtccctgatttttcactcacccattgtttattatttctctttctcagtaatagactcaacatttttttgctttcacttcgtatagagatcccaatcctagatggtccattcttcttcatctgtctactttcatggtgaccacccaaacactaatggtctcaatgtatacctatataaattgttactcaagtctatctttctaacttagaaatatatgttaaagtccgatttcctatttaacacatctgcttgtaaattctatragtcattagctatatgctcattaactctattttttcctctagtcctgcatctttattccatgtactgaatatttaggctatattctaacactaatatatctgttttgtaagcaaaatagatctgttttgggagatcgattatgggaggttgtgtttcacaaacaatattttgataccacaccaaaaacatgatccataaaaaatgataaatgccatttaatcaatatttaaaatttggctcctggagacattattaagagaattaaaagataagccacagtttgggagaaaataactgca

SEQ ID NO: 352404 - DNA, 437 bp, Homo sapiens
caaaatagatctgttttgggagatcgattatgggaggttgtgtttcacaaacaatattttgataccacaccaaaaacatgatccataaaaaatgataaatgccatttaatcaatatttaaaatttggctcctggagacattattaagagaattaaaagataagccacagtttgggagaaaataactgcatatctcacatatgataaagggcattttttcctcaaaatatgtgaagaactcttaaaattcacaatgagaaaattattattttaaaaaaataagaaaacatctgtaaagtcagttcaccaacagaagaaaaacagatggtaaatatgaatatgaaaagatgttcaacatcrttagtcactatgggaatgcaaattaaaaacacaataagatactactatacgtctattagaatggctaaaataaaaaaa

SEQ ID NO: 352405 - DNA, 595 bp, Homo sapiens
agcttcaagttcaggcgactattttcctctgatatttcttggtttagggcacatatctatagtacttckagtcttagaatccgataccatttttcttctccataaattcagtatctatagattttgttattggttttaaagtcttagtccaatttatgatgaggattttagtctagctctgccctttgccaaacctaggacattggaaaactttacccctttcaacattaatgttctcaattgtaaaaatagggttatttaccctttttgtaggaacttgtgtggattgtataagataaaataattaaagcacctaacattgtaccttattgattttaataattcaattaataagtaatccactttctcaacctacttctttgttgctacttatattttctgtcaaatcctccatgtgtattcactttcaattgaaaggactctcacttttataaaaattttaaaccagtcagtccacttcttgccattcatgtcatagatgaacaatatattgcacgtcatatgtctaatgcgctctttcgtttttcaaacctgtgttgtcatggctattccttcactattggacaacaaggtc

SEQ ID NO: 352406 - DNA, 567 bp, Homo sapiens
ttcttttcctccctgcaatattttctgtttgtctttgtacattaaatttcctcatatatctagaactgtgtgtttttttatttctcctttttggcaattcataaccctttcaatatcaagatattttatcattttattttttaaaatttcaatacatttatgtctattgttttttcaaatattttttcttcttcatctttatctttcagttcttctgraattcctgttacccacatgtaacatttccacctttattcttcatctcctttgtattttcttgttcttgggatgttgctgctatagtttggatatggtttgtttggctgctccaaatctcttgttggaatttaatctccagtgtagcagtgttgggatggggcccagtgacaggtgtttgggtttgggggcaaatccctcatgaatcacttggtgccattctcacagtaatgagtgaatgtccaccttattacagtccatgagaggtggttgttaaaaaaagctggtatctcccctcctctcttctgtttcctttctcatcatgtgatctctgcacacactggctccctg

SEQ ID NO: 352407 - DNA, 567 bp, Homo sapiens
ttcttttcctccctgcaatattttctgtttgtctttgtacattaaatttcctcatatatctagaactgtgtgtttttttatttctcctttttggcaattcataaccctttcaatatcaagatattttatcattttattttttaaaatttcaatacatttatgtctattgttttttcaaatattttttcttcttcatctttatctttcagttcttctgaaattcctgttacccacatgtaacatttccacctttattcttcatctcctttgtattttcttgttcttgggatgttgctgctatagtttggatatggtttgtttggctgctccaaatctcttgttggaatttaatctccagtgtagcagtgttgggatggggcccagtgacaggtgtttgggtttgggggcaaatccctcatgaatcacttggtgccattctcacagtaatgagtgaatgtccaccytattacagtccatgagaggtggttgttaaaaaaagctggtatctcccctcctctcttctgtttcctttctcatcatgtgatctctgcacacactggctccctg

SEQ ID NO: 352408 - DNA, 567 bp, Homo sapiens
ttcttttcctccctgcaatattttctgtttgtctttgtacattaaatttcctcatatatctagaactgtgtgtttttttatttctcctttttggcaattcataaccctttcaatatcaagatattttatcattttattttttaaaatttcaatacatttatgtctattgttttttcaaatattttttcttcttcatctttatctttcagttcttctgaaattcctgttacccacatgtaacatttccacctttattcttcatctcctttgtattttcttgttcttgggatgttgctgctatagtttggatatggtttgtttggctgctccaaatctcttgttggaatttaatctccagtgtagcagtgttgggatggggcccagtgacaggtgtttgggtttgggggcaaatccctcatgaatcacttggtgccattctcacagtaatgagtgaatgtccaccttattacagtccatgagaggtggttgttaaaaaaagctggtatctcccctcctctctyctgtttcctttctcatcatgtgatctctgcacacactggctccctg

SEQ ID NO: 352409 - DNA, 578 bp, Homo sapiens
gctcttcaacgattctttttgctgccaatggtcttttaatgtgttatttttgcttactttagtcaggtataattttattgcttatatcaataattatgtttcatgatttttttatatgagaaaacttccccaggtccaatgctaaactatataatctgttcatattgmgtaacctatacagaataaaacataaatacttgcattattataacatttaaggtcttaatattacattataattaaccactttatgctttatcttgaatattttttattttattttggtttctgaagataaatatcatgctccgtaaatgtgatctcatagcaagtacacagcttaagcctctaggtgcacatattctaatacagaaataagcttgaaaaacaaaaaaatggaaatggtgctgtgcaagctatgtatataatggttaactttaggtttttccagttttgtcttcacaatttttgcttttattttttatggttaaatatattttagaagaatcctaagaagaaaacctgaggcagagcaactcttcagtaatattttaatggagctgagtcatctaacctat

SEQ ID NO: 352410 - DNA, 578 bp, Homo sapiens
gctcttcaacgattctttttgctgccaatggtcttttaatgtgttatttttgcttactttagtcaggtataattttattgcttatatcaataattatgtttcatgatttttttatatgagaaaacttccccaggtccaatgctaaactatataatctgttcatattgagtaacctatacagaataaaacataaatacttgcattattataacatttaaggtcttaatattacattataattaaccactttatgctttatcttgaatattttttattttattttggtttctgaagataaatatyatgctccgtaaatgtgatctcatagcaagtacacagcttaagcctctaggtgcacatattctaatacagaaataagcttgaaaaacaaaaaaatggaaatggtgctgtgcaagctatgtatataatggttaactttaggtttttccagttttgtcttcacaatttttgcttttattttttatggttaaatatattttagaagaatcctaagaagaaaacctgaggcagagcaactcttcagtaatattttaatggagctgagtcatctaacctat

SEQ ID NO: 352411 - DNA, 563 bp, Homo sapiens
gtatgtcacaaatgcctggtcaaacccaggaaaggctgtaggcttctctttggcagtttgttgcagggctaagatgaggagaggtgctgaaaacaggggggttagttgaagtttaatagagaaacagctgtatcttttggtacactacacaagtgaaaaataccatactgtctagtgtttatagccccaggataaaaaaatggtagatgtcttcactgaagaactgagcaaacctgtggggagttttctttgttattattgcagcatttgaggaaacagcaataaacagcacaaytaaactcactgtaaatggaagaaaacttcccctctcacatgtcacgttaacaataggcaagcttgatagtaaatagacatgtattacatgttcagcagaggagactcaaaacagcaactaagtaaaaatgaaagacaagaaaatgaacaaaaactcattcacggaaaaatgaaagataattcagggaacagaaaataatttaaaaacaaaactttgtttttaaacaaaaaccttatcagaactttatcaaaagatattaccattggct

SEQ ID NO: 352412 - DNA, 625 bp, Homo sapiens
ttggcatgtctacattgtgctacctgaggatgtgtgtgagtgagtccttcaagggaagaatgtactctccagggttggttaccacctttcagcctgaacttatgggatagactctggccaactgtgactcacacctgaaataagtgaattggaattacttaattaattaatacaaattattgcaaaacaaaaattcatgaagtgtaccataatcattcaaatgcacaatgataaacagtggggtaaaaaagtgcactgccagataagttattgtttgattttaaactgtgtggtggtaggacatgctttctgcaattttcactttgcaagtatttattccttgatttaatccaccatcagtatgatcccagtcactcactgatgagccaaaaaatgggcaaataattatgttttcattaaaatttttgaaatatgtatagctcacatgtatttcaatgtttaatattaaaagtgctttggtctttatttagatgtttgatgatggtgacatcaccasatatatgccatagaaacttcacttgtttaactcaattaacctatagcaaaattggttttgttaaaattggtttgttacacttgaagtaatgattttcaagaacctact

SEQ ID NO: 352413 - DNA, 632 bp, Homo sapiens
tataatttattgaatggtagcataataaagcaaaaaaatttcattgatgagaatagaagctgaagatgtttaaatagcaatttaatatatatgaacatatttaataatttcctgagctttttakattgaacattttaacaatacaattagaacactgatactgcaacttattcagattaaattttaatgtgccttaatattcatgtgtatataatggatttgctttatgctactggaagccaggtttaaaagaattacatcaaataatgcctatgtgtgcacattaaatgccctataaatgtctaagaaaaccttgtatttatattttattttactaaggattgaagtagatattttgtatggacgggcactatttattatgttctactcagcatttctattatggcaatcatctgaagttataaatttgccttaatctctgtgacactgccaactgaattcctgcatgaaaaatatagaaacagaaatttgaccatagattaataatttttgatggaattttactcagagacaagcacattaagagggctaaaaataggatttgagaaaaaagggaagattatagccaagactatgacaataaagtacatttggaaaatagacagatgatc

SEQ ID NO: 352414 - DNA, 632 bp, Homo sapiens
tataatttattgaatggtagcataataaagcaaaaaaatttcattgatgagaatagaagctgaagatgtttaaatagcaatttaatatatatgaacatatttaataatttcctgagctttttatattgaacattttaacaatacaattagaacactgatactgcarcttattcagattaaattttaatgtgccttaatattcatgtgtatataatggatttgctttatgctactggaagccaggtttaaaagaattacatcaaataatgcctatgtgtgcacattaaatgccctataaatgtctaagaaaaccttgtatttatattttattttactaaggattgaagtagatattttgtatggacgggcactatttattatgttctactcagcatttctattatggcaatcatctgaagttataaatttgccttaatctctgtgacactgccaactgaattcctgcatgaaaaatatagaaacagaaatttgaccatagattaataatttttgatggaattttactcagagacaagcacattaagagggctaaaaataggatttgagaaaaaagggaagattatagccaagactatgacaataaagtacatttggaaaatagacagatgatc

SEQ ID NO: 352415 - DNA, 587 bp, Homo sapiens
agaattttgtatctctcttctgatttatctcactttagaaaaaatygtaacccgacctattagtggattagatactgcctgtgttttcaagacagctagataaaaattaaagaacaatgcaatttaacaaccaaaatattttcaacaacataatttttctaggaatgattaacatgacaactagctgggacgactttatgtgttgctagaattagtgcatatcactcagacaaaacataatagtctgcatatgcattatgctagagcataaatatgacaaaatgtgtgcctttccagaatgctgaagaaagttattggtctttccatcatttttaatatttaatgtttagtgattcatactgaattttttatgaaatattattatatgtgttaaaaattaagagtggtgctgttaggaaacttcatgaggtatttaacatataagctaatattttccataaatatttccatgcattcactttcacatctttacttatctcaaatgaaagcctatggaaaagacctcatttaggcattctgaaaaagatacttactgagataaagaaaaacaatgactaacaaatagc

SEQ ID NO: 352416 - DNA, 587 bp, Homo sapiens
agaattttgtatctctcttctgatttatctcactttagaaaaaattgtaacccgacctattagtggattagatactgcctgtgttttcaagacagctagataaaaattaaagaacaatgcaatttaacaaccaaaatattttcaacaacataatttttctaggaatgattaacatgacaactagctgggacgactttatgtgttgctagaattaktgcatatcactcagacaaaacataatagtctgcatatgcattatgctagagcataaatatgacaaaatgtgtgcctttccagaatgctgaagaaagttattggtctttccatcatttttaatatttaatgtttagtgattcatactgaattttttatgaaatattattatatgtgttaaaaattaagagtggtgctgttaggaaacttcatgaggtatttaacatataagctaatattttccataaatatttccatgcattcactttcacatctttacttatctcaaatgaaagcctatggaaaagacctcatttaggcattctgaaaaagatacttactgagataaagaaaaacaatgactaacaaatagc

SEQ ID NO: 352417 - DNA, 587 bp, Homo sapiens
agaattttgtatctctcttctgatttatctcactttagaaaaaattgtaacccgacctattagtggattagatactgcctgtgttttcaagacagctagataaaaattaaagaacaatgcaatttaacaaccaaaatattttcaacaacataatttttctaggaatgattaacatgacaactagctgggacgactttatgtgttgctagaattagtgcatatcactcagacaaaacataatagtctgcatatgcattatgctagagcataaatatgacaaaatgtgtgcctttccagaatgctgaagaaagttattggtctttccatcatttttaatatttartgtttagtgattcatactgaattttttatgaaatattattatatgtgttaaaaattaagagtggtgctgttaggaaacttcatgaggtatttaacatataagctaatattttccataaatatttccatgcattcactttcacatctttacttatctcaaatgaaagcctatggaaaagacctcatttaggcattctgaaaaagatacttactgagataaagaaaaacaatgactaacaaatagc

SEQ ID NO: 352418 - DNA, 480 bp, Homo sapiens
aatgtaaagctttgacttatttcactaactttgcccttcatctgttaaaggcaatataaaaattataatagtaaaggctaggttttttgagggcttacttaaataggaatagttctaaatgcttatttgtttttattaggaayttaaaatgcttgttcatttaagatacctatcagtttatgttaattgtttgcatactgaggccataaacatttaaggatactgaaatatctaacataaaatgaaatgcaaaaaatgaatgatacttgtttgtttgtttgtttgtttgtttattgagagataggttctctctctgttgcccaggatggagtgcagtggcatgatcattgttcaatgcagccttgaattactatgctcaagtgatcctcccacctcagccttctgagtagctgggactacaagcaagcaccaccatgcccagctttcattattattattattatcatcatcatcatgtac

SEQ ID NO: 352419 - DNA, 678 bp, Homo sapiens
cttatttgtttttattaggaacttaaaatgcttgttcatttaagatacctatcagtttatgttaattgtttgcatactgaggccataaacatttaaggatactgaaatatctaacataaaatgaaatgcaaaaaatgaatgatacttgtttgtttgtttgtttgtttgtttattgagagataggttctctctctgttgcccaggatggagtgcagtggcatgatcattgttcaatgcagccttgaattactatgctcaagtgatcctcccacctcagccttctgagtagctgggactacaagcaagcaccaccatgcccagctttyattattattattattatcatcatcatcatgtacatacacagtgtcttgctatgttgccaagttggtcaagactattaaaagactatgaccatttgaagaaataattctccacattgttctctaaaactgccaaacttattctacatgatttataatacagtgttaccaaatattgaatgtataatacttgagatgaaaaaataggcaaactaaaacaaataaatttaacagatgcaaagctaaacacgaatatgtccaagtttatccctatgatttccatcaaatatatgaataagctatcttatggctaataagaaattaaccattgagatgctaaaaattatcagcaatg

SEQ ID NO: 352420 - DNA, 678 bp, Homo sapiens
cttatttgtttttattaggaacttaaaatgcttgttcatttaagatacctatcagtttatgttaattgtttgcatactgaggccataaacatttaaggatactgaaatatctaacataaaatgaaatgcaaaaaatgaatgatacttgtttgtttgtttgtttgtttgtttattgagagataggttctctctctgttgcccaggatggagtgcagtggcatgatcattgttcaatgcagccttgaattactatgctcaagtgatcctcccacctcagccttctgagtagctgggactacaagcaagcaccaccatgcccagctttcattattattattattatyatcatcatcatgtacatacacagtgtcttgctatgttgccaagttggtcaagactattaaaagactatgaccatttgaagaaataattctccacattgttctctaaaactgccaaacttattctacatgatttataatacagtgttaccaaatattgaatgtataatacttgagatgaaaaaataggcaaactaaaacaaataaatttaacagatgcaaagctaaacacgaatatgtccaagtttatccctatgatttccatcaaatatatgaataagctatcttatggctaataagaaattaaccattgagatgctaaaaattatcagcaatg

SEQ ID NO: 352421 - DNA, 469 bp, Homo sapiens
ccaaaattattttttcttgtgaatagtctgtaaatatttgaaagtgctattagtgctactgcaacttattaaaaaaccagtttacctagttacaagttacatagtttcaagatcatttgaatctcatctccatttaaaataaaatttktcagtcatgttcatttggctatttaacatttattgattgattagttttatattctcagagtgggtaggaatgaacacagagacaaagctcatgcttcagtagaattgtattctagaagagggagacaaaaatacacaattaaatagatataatgacaattaaataaatataatatgcatttacataattgctacgtcaagaaattaacaaattaggcaatatagagttataggatggtgatgctactctagtacatgtggttccaggaaccctctctaatatgatggcatataggcagatttaaatgaaatgaggatattg

SEQ ID NO: 352422 - DNA, 444 bp, Homo sapiens
aatcttagcaaatattaatcaagaagaccaacatgatacacaaattttataaaccagttacttaaccacttatgaagtattagcatcattacgttgaacttggtctatgaccataaactaagtactgaakgaaatcacaaggggttttcaggaatggggtgtgtgttgcagggataggagggtagaattaatagaaaagggacataaactaattttcacaggtgatggaaatgtaaatcagaagagaggtttactataccatacacacatttgtctaaaatcatttaacttacacttaagatctatacatttcaacctaagttttaccttattaaagccaatcaatcaatagacaaacactgtgaaataatgttctactttttgctccttccttacaccacccttcaactctggtcagggttcttggcgttttctgtttctgta

SEQ ID NO: 352423 - DNA, 469 bp, Homo sapiens
ccacgccggctaatttttgtattagcagagatggggtttcaccatgttggtcaggctgctctcgaactcctgaccttgtgatccctccgcctgcctcatcctcccaaagtgctgggattacaggcatgagccaccacgcgtgccctaattctgttttatagtcattttctcttaattattcagtctatttacatttattgtgattgttggcatagtttcttttataactttcatcgtattttgtgctatttgttccatctgtttttatttcttcatgtcttttttgtytcgtttttgctaattccttttatattcatggttattctgctcttgaaatgtatgctatgtgaatatatttgtgagttgacaatactttattagcaattaaatatactatttctcttttttttagaacttgctcaaatgttacataacctcaatatccttagtatctaaattaaactgactt

SEQ ID NO: 352424 - DNA, 570 bp, Homo sapiens
cgggcttggtggcttatgcctgcaatcccagccactctggaggctgatgcaggacaacgaccgaaacccgggaggcggaagtcgcggcaagcagagacccagccactgcattccagcctgggcaacaagagcgaaactccgtctcaaaacaasacaaaacaaaaagaccaggtttcaccatgttgcccaggcctgtctggaactccaaggcacaagcgatccaccctacttggccgtccaaagtcctgggatcacaagagtgagccaccacgccaggcagatcaaagcgttgagctgaataaagagttatcttttagcattttgtggagcccgggtagatctgtgcagggggaagcatattacagaagcgagaaacagagagttatttaattgaagcacgcattatgttttttttttttttacgtttttaggaaaaatatgttttgtgacttgcatttgtttgtttagtgaccttgcagttgcacagttagggaattagggttttgataatgcctgggaagggagcgataaggctcactagccataggaaaacaggtagtttttttaaag

SEQ ID NO: 352425 - DNA, 570 bp, Homo sapiens
cgggcttggtggcttatgcctgcaatcccagccactctggaggctgatgcaggacaacgaccgaaacccgggaggcggaagtcgcggcaagcagagacccagccactgcattccagcctgggcaacaagagcgaaactccgtctcaaaacaagacaaaacaaaaagaccaggtttcaccatgttgcccaggcctgtctggaactccaaggcacaagcgatccamcctacttggccgtccaaagtcctgggatcacaagagtgagccaccacgccaggcagatcaaagcgttgagctgaataaagagttatcttttagcattttgtggagcccgggtagatctgtgcagggggaagcatattacagaagcgagaaacagagagttatttaattgaagcacgcattatgttttttttttttttacgtttttaggaaaaatatgttttgtgacttgcatttgtttgtttagtgaccttgcagttgcacagttagggaattagggttttgataatgcctgggaagggagcgataaggctcactagccataggaaaacaggtagtttttttaaag

SEQ ID NO: 352426 - DNA, 570 bp, Homo sapiens
cgggcttggtggcttatgcctgcaatcccagccactctggaggctgatgcaggacaacgaccgaaacccgggaggcggaagtcgcggcaagcagagacccagccactgcattccagcctgggcaacaagagcgaaactccgtctcaaaacaagacaaaacaaaaagaccaggtttcaccatgttgcccaggcctgtctggaactccaaggcacaagcgatccaccctacttggccgtccaaagtcctgggatcacaagartgagccaccacgccaggcagatcaaagcgttgagctgaataaagagttatcttttagcattttgtggagcccgggtagatctgtgcagggggaagcatattacagaagcgagaaacagagagttatttaattgaagcacgcattatgttttttttttttttacgtttttaggaaaaatatgttttgtgacttgcatttgtttgtttagtgaccttgcagttgcacagttagggaattagggttttgataatgcctgggaagggagcgataaggctcactagccataggaaaacaggtagtttttttaaag

SEQ ID NO: 352427 - DNA, 570 bp, Homo sapiens
cgggcttggtggcttatgcctgcaatcccagccactctggaggctgatgcaggacaacgaccgaaacccgggaggcggaagtcgcggcaagcagagacccagccactgcattccagcctgggcaacaagagcgaaactccgtctcaaaacaagacaaaacaaaaagaccaggtttcaccatgttgcccaggcctgtctggaactccaaggcacaagcgatccaccctacttggccgtccaaagtcctgggatcacaagagtgagccaccacgccaggcagatcaaagcgttgagctgaataaagagttatcttttagcattttgtggagcccgggtagatctgtgcagggggaagcatattacagaagcgagaaacagagagttatttaattgaagcrcgcattatgttttttttttttttacgtttttaggaaaaatatgttttgtgacttgcatttgtttgtttagtgaccttgcagttgcacagttagggaattagggttttgataatgcctgggaagggagcgataaggctcactagccataggaaaacaggtagtttttttaaag

SEQ ID NO: 352428 - DNA, 543 bp, Homo sapiens
atatcattgtggctcatcagcttatatgttgttggggccagaatctatacttacactttattcaaatttgattttacagaagagttgaggtttttatttttcttttaattaagagggctgtgaaattattatctataattctaaatctcatttaattcctcccaataggtttcaagatggattggaaccaaagttcacttctttaacraaagtgctttatgactttaataaaacagtagagaatggtagaatccatggcagccctttacaaaaacttgtgatagaaagttttgatgatgagcagactttgcaacaactggaattgcaaaatgaagcaattttacagtgcttccagaatgcggttagtgaaagaaagatgaagatatcagtcttctcccagagagtgaagaacaggagcatgaagaggctggttcagaaacagaggctgatggccaggaggacctagaagatttagaggaggaggaggacgtgtcagatatgggtggtgacaatcctgaaatgggtgagagagctaaaaactca

SEQ ID NO: 352429 - DNA, 543 bp, Homo sapiens
atatcattgtggctcatcagcttatatgttgttggggccagaatctatacttacactttattcaaatttgattttacagaagagttgaggtttttatttttcttttaattaagagggctgtgaaattattatctataattctaaatctcatttaattcctcccaataggtttcaagatggattggaaccaaagttcacttctttaacaaaagtgctttatgactttaataaaacagtagagaatggtagaatccatggcagcyctttacaaaaacttgtgatagaaagttttgatgatgagcagactttgcaacaactggaattgcaaaatgaagcaattttacagtgcttccagaatgcggttagtgaaagaaagatgaagatatcagtcttctcccagagagtgaagaacaggagcatgaagaggctggttcagaaacagaggctgatggccaggaggacctagaagatttagaggaggaggaggacgtgtcagatatgggtggtgacaatcctgaaatgggtgagagagctaaaaactca

SEQ ID NO: 352430 - DNA, 534 bp, Homo sapiens
tttggacttgaaatcctgtgattaattgtgtcagcggtgccctttgctgccttccctgttagaatgtgcacctcagtcttcacacggtacctgtggaaccaggcagctgcaggcagagcacaggtatccagagaatgttggactggaactacgatcctgagttctgatgccatgcctgaggcgtgtggamtcaccagaaagtgtgttcacgtagatagaggaattataagtcaacctgtgtaaacatgttaggtggagctctttcatatgaatgatgctgaatttcaccttctaaattgagtgttcagttgagcatctttttttttttttagtatttattttgagttgtgcacttgagtttctctttcatgtttgcgtgtgcattttctagaatggcttcagtcatccatcttctctggaggcctgcagaccagccagatccactacagctacaacgaggagaaagacgaggaccactgcagctccccagggggcacacctgccagcaaatctcgactctgctcccacagacgg

SEQ ID NO: 352431 - DNA, 534 bp, Homo sapiens
tttggacttgaaatcctgtgattaattgtgtcagcggtgccctttgctgccttccctgttagaatgtgcacctcagtcttcacacggtacctgtggaaccaggcagctgcaggcagagcacaggtatccagagaatgttggactggaactacgatcctgagttctgatgccatgcctgaggcgtgtggactcaccagaaagtgtgttcacgtagatagaggaattataagtcaacctgtgtaaacatgttaggtggagctctttcatatgaatgatgctgaatttcaccttctaaattgagtgttcagttgagcatctttttttttttttagtatttattttgagttgtgcacttgagtttctctttcatgtttgcgtgtgcattttcyagaatggcttcagtcatccatcttctctggaggcctgcagaccagccagatccactacagctacaacgaggagaaagacgaggaccactgcagctccccagggggcacacctgccagcaaatctcgactctgctcccacagacgg

SEQ ID NO: 352432 - DNA, 567 bp, Homo sapiens
tttactcacaaacctgcttattgaacagtattgattactgactttctgatgggcattttgaacaataagcttatgaaagactaaagtgtgttagaagccatcctaatttgattgttcctgaacaaaccctacaccataacagcctgtctgaatgcgaggggtgctctggatcaggaagtcacagcagtcacactgctgcgattcctttaacccaggcatgcaggaactcagcytgggcccaggagacaggctgcctcggaatgagggagagagactccacatttgccatctcatatccgtgggttctgagcccacactgtcacttttagagtttcttgtgggtttatagatttatcgtgtggtgtttcaagctggttttcttttttttttggaaattaagtaacttgaaaagattaagtgattaatattcctgttgctgtgtcagggatccccgagccttctctcaggcttgatgattcactaaaaggactcagaagagctgttatagtcacagctgtgtttttactgcaaaaaggatacagattaaaattagcagagggaagggtg

SEQ ID NO: 352433 - DNA, 608 bp, Homo sapiens
ggagtttggtacattataaacatgacattttaaatcaatgaggaaaagaaatcatttgcagctcaccccaccwtgcacagcaggaataggaagtcattggcagaataaaaagatggtaagaacagaacagaattgtagaacagtacatttcttgcttccccacttttcaaagtattttttgctttttcacaaatgtaagtgtaattttattttctaaatgtatactaattcttttcttctctttcttagatgaatgacaaaaattacatctttagaaaaagagttgttagaaaaaagccttggctgcatgtgggggaagtgacagcacagaagagaccagagaagagcctcctggaggagagcctgcactttgaccatgctgtccggatgggtgcagtgctcttttctgcaaagtgttcacttctctgctttttctgtggtcccatttcatagaaagatttggggtgatgtttctttccctcaacttttattttgaaaacttgcaaacacagaaaagttgataaaatcatacagtgaacatctgtatgctattcaactggattcactagttaatgttttgtcacacttgttttctgtcttctgcgtat

SEQ ID NO: 352434 - DNA, 608 bp, Homo sapiens
ggagtttggtacattataaacatgacattttaaatcaatgaggaaaagaaatcatttgcagctcaccccaccttrcacagcaggaataggaagtcattggcagaataaaaagatggtaagaacagaacagaattgtagaacagtacatttcttgcttccccacttttcaaagtattttttgctttttcacaaatgtaagtgtaattttattttctaaatgtatactaattcttttcttctctttcttagatgaatgacaaaaattacatctttagaaaaagagttgttagaaaaaagccttggctgcatgtgggggaagtgacagcacagaagagaccagagaagagcctcctggaggagagcctgcactttgaccatgctgtccggatgggtgcagtgctcttttctgcaaagtgttcacttctctgctttttctgtggtcccatttcatagaaagatttggggtgatgtttctttccctcaacttttattttgaaaacttgcaaacacagaaaagttgataaaatcatacagtgaacatctgtatgctattcaactggattcactagttaatgttttgtcacacttgttttctgtcttctgcgtat

SEQ ID NO: 352435 - DNA, 440 bp, Homo sapiens
tcagcttccttgcagcaatctgtttagaaggcttgcatcctgtcactgtccactgattaaattttgaactctaacttgaaaccctggtcatctcattgccttctttcttatacccattaagtcaaaaggagctctcattttatttcaacagaaaagagaatggaaaagcggggaagagtccytagtaccttggataaagtatgagcacttactaccatatgtattctagttctgtagttttcaaacttcagggagcatctcaaggcttattaaagcacagatagctgtccttccccactttctgattcaggaggtgtggggctggcccaggaatttgcatgtctaacaagttcccacgtgtttctgatgctgagggtctaaggactacaatgcatgaatccgtggtttagtggatatccacctaatgaatacatgttgta

SEQ ID NO: 352436 - DNA, 639 bp, Homo sapiens
gggtgggcctgttctggggcagtggtgccattctgggggcatgtctcttgctgtgccatctctgcctccacctagcaagagctctgttttcctctttctataggaacagaaggcaagccaccaacatcaggaagccctaaggagggagctagaggtgagtggagggtgtgaagttccctcctgccctctggagaatgtttctttgcttctctttcagcatttgcttgtcttttctcccaaaggcccaggttcawaccatacgaatccttacatgtcagaaaactgagcttcagatggcactctactacagccagcatgctgtcaagcagttggaaggtgggaatctggcaccccatcatccttcaacctggcactttgacaggcctttagggggagtcctttgggccacatctgaatgtctctcattccaggagaggccagggatctgatcagccgcctgcatgattcatggaagtttgcaggagagttagagcaggctctctctgctgtcgctacacagaagaagaaggcggatagggtgagtccaaacacggccccgtcccttgggagcccagcttcgcagatggaggagtgagcctaaaggtcccttctgtaggatggagtgtcctgcccagaagg

SEQ ID NO: 352437 - DNA, 639 bp, Homo sapiens
gggtgggcctgttctggggcagtggtgccattctgggggcatgtctcttgctgtgccatctctgcctccacctagcaagagctctgttttcctctttctataggaacagaaggcaagccaccaacatcaggaagccctaaggagggagctagaggtgagtggagggtgtgaagttccctcctgccctctggagaatgtttctttgcttctctttcagcatttgcttgtcttttctcccaaaggcccaggttcataccatacgaatccttacatgtcagaaaactgagcttcagatggcactytactacagccagcatgctgtcaagcagttggaaggtgggaatctggcaccccatcatccttcaacctggcactttgacaggcctttagggggagtcctttgggccacatctgaatgtctctcattccaggagaggccagggatctgatcagccgcctgcatgattcatggaagtttgcaggagagttagagcaggctctctctgctgtcgctacacagaagaagaaggcggatagggtgagtccaaacacggccccgtcccttgggagcccagcttcgcagatggaggagtgagcctaaaggtcccttctgtaggatggagtgtcctgcccagaagg

SEQ ID NO: 352438 - DNA, 639 bp, Homo sapiens
gggtgggcctgttctggggcagtggtgccattctgggggcatgtctcttgctgtgccatctctgcctccacctagcaagagctctgttttcctctttctataggaacagaaggcaagccaccaacatcaggaagccctaaggagggagctagaggtgagtggagggtgtgaagttccctcctgccctctggagaatgtttctttgcttctctttcagcatttgcttgtcttttctcccaaaggcccaggttcataccatacgaatccttacatgtcagaaaactgagcttcagatggcactctactacagccagcatgctgtcargcagttggaaggtgggaatctggcaccccatcatccttcaacctggcactttgacaggcctttagggggagtcctttgggccacatctgaatgtctctcattccaggagaggccagggatctgatcagccgcctgcatgattcatggaagtttgcaggagagttagagcaggctctctctgctgtcgctacacagaagaagaaggcggatagggtgagtccaaacacggccccgtcccttgggagcccagcttcgcagatggaggagtgagcctaaaggtcccttctgtaggatggagtgtcctgcccagaagg

SEQ ID NO: 352439 - DNA, 480 bp, Homo sapiens
actaccacttcatactcagtttcttagcctcttagccctctactgttgaccaatcaccaaatgtgggaaagcactacagactgtcaggatcacctcctaggcctggtcactcaagtcctgactgaggtctccaattaccttccaacaattgtttttgattgggggcggggcacatttttatccagtttttctaactgctcttgtggggaggcgaatctgtaacaagctcctctgcctttaytgaaagttgaaaaccttcatctgtcctttttttgttgttgttgagatggagtcttgcgctgttgcccaggctctagtgcaatggcacgatctctgctcactgtaacctctgcctcctgggttcaagcaattctcctgcctcagcttcccgcgtagcgtgtgccaccatgcctggctaatttttttttatacctttaatagaggcaggatgtcaccatgttttccaggctggtctcgagc

SEQ ID NO: 352440 - DNA, 556 bp, Homo sapiens
gccccagcttctggagtttactggtctctttagcgttcctcggcttgtagaggtgtcacccctatctctgccrtcatcttcacatggcattctccctgtgtgtgagtcgcctccaaatctccccttttcatgaggacatcattcaacctcatcaaactgattacatccgcagcgaccctatttccaaacaaggtcacctgccgaggtacggtaggggttagggcttcaacatacgaattttgcaattctgaattcaacccgtaacactggcttcaaacaacaaatttgttctctcagagttctggagaccagaagtcccaaatccaggtgcgggcagggccatgcttcttccacaggctctaggggaaggtccttccttactttgtccagcttctgggagctccaggcttccttggtgttgggacgcattgtgccagtctctgcctgcgtcttcacatggcccctgcccctgtgttctgcatgtccttttctgtctctgaaaggactctttcattgagtttctttgactctaatccaacatgatgtcacctaaatt

SEQ ID NO: 352441 - DNA, 556 bp, Homo sapiens
gccccagcttctggagtttactggtctctttagcgttcctcggcttgtagaggtgtcacccctatctctgccatcatcttcacatggcattctccctgtgtgtgagtcgcctccaaatctccccttttcatgaggacatcattcaacctcatcaaactgattacatcygcagcgaccctatttccaaacaaggtcacctgccgaggtacggtaggggttagggcttcaacatacgaattttgcaattctgaattcaacccgtaacactggcttcaaacaacaaatttgttctctcagagttctggagaccagaagtcccaaatccaggtgcgggcagggccatgcttcttccacaggctctaggggaaggtccttccttactttgtccagcttctgggagctccaggcttccttggtgttgggacgcattgtgccagtctctgcctgcgtcttcacatggcccctgcccctgtgttctgcatgtccttttctgtctctgaaaggactctttcattgagtttctttgactctaatccaacatgatgtcacctaaatt

SEQ ID NO: 352442 - DNA, 535 bp, Homo sapiens
gaagtcatacctgatttaacatgcttaatgcattttctttaatagtaaagtggtgttcgcagttgaaaatagaatcttacacatattttgtttttaaattcagatgatggagcagtggtatcacctgaccttggggacatgtctcctgaagggccgcagccccccatgatcctcttgcagcagctgctggcctyggccacccagccgtctcctgtgaaggccatatttgataaacaggaacttgaggtacagccatgcagccttgacagtttttaatccacagcactaaattgtgaacactttttttctagatgtatattttcttaaggatctattctgaatgttaaatgatagtacgcaaataattctaatgattcattggggtttaaccatgtttgtgcatagtctgcagaacattataatactaaagactgagagggttgaagtttaaccttattttgggtttgtgtaaattgtgaaaaaatattaactagatgcagcatgggttaaacgctcacatcttcatgaagggatc

SEQ ID NO: 352443 - DNA, 535 bp, Homo sapiens
gaagtcatacctgatttaacatgcttaatgcattttctttaatagtaaagtggtgttcgcagttgaaaatagaatcttacacatattttgtttttaaattcagatgatggagcagtggtatcacctgaccttggggacatgtctcctgaagggccgcagccccccatgatcctcttgcagcagctgctggcctcggccacccagccgtctcctgtgaaggccatatttgataaacaggaacttgaggtacagccatgcagccttgacagtttttaatccacagcactaaattgtgaacactttttttctagatgtatattttcttaaggatctattctgaatgttaaatgatagtrcgcaaataattctaatgattcattggggtttaaccatgtttgtgcatagtctgcagaacattataatactaaagactgagagggttgaagtttaaccttattttgggtttgtgtaaattgtgaaaaaatattaactagatgcagcatgggttaaacgctcacatcttcatgaagggatc

SEQ ID NO: 352444 - DNA, 551 bp, Homo sapiens
caggtgatcttgcgaattttggcactttggaaaggttgatctgacactccytttctaaataacttgaatggattcttagtatttttttggtaacaattttttaaaaactaattaaaaaatttaaatattgtggtaaaatatacataccatgtaacttaccgttttaaccagttttatgtgtacagttcattggcattaaatatattgacattgttgcccagccatcacgcttgactaattagagacagaatctcactgtgttgcccaggccggtcttatactcctggcttcacaggatcttcctgcctcagactcctgagttgctgagatttcggatgtgagccatcgcacctggcactatgtgtaactttttgaggaagcagtaaactgttttccacagtggctacattgttttacattcttgcagcagtatactaaggttccaatttctccacaccctcaccaacactttttgttttctgatgatagccatcctaatttgtgtgagtaggtacagcatctcattgttttgatttgtatttccctgttga

SEQ ID NO: 352445 - DNA, 551 bp, Homo sapiens
caggtgatcttgcgaattttggcactttggaaaggttgatctgacactccctttctaaataacttgaatggattcttagtatttttttggtaacaattttttaaaaactaattaaaaaatttaaatattgtggtaaaatatacataccatgtaacttaccgttttaaccagttttatgtgtacagttcattggcattaaatatattgacattgttgcccagccatcacgcttgactaattagagacagaatctcactgtgttgcccaggccggtcttatactcctggcttcacrggatcttcctgcctcagactcctgagttgctgagatttcggatgtgagccatcgcacctggcactatgtgtaactttttgaggaagcagtaaactgttttccacagtggctacattgttttacattcttgcagcagtatactaaggttccaatttctccacaccctcaccaacactttttgttttctgatgatagccatcctaatttgtgtgagtaggtacagcatctcattgttttgatttgtatttccctgttga

SEQ ID NO: 352446 - DNA, 551 bp, Homo sapiens
caggtgatcttgcgaattttggcactttggaaaggttgatctgacactccctttctaaataacttgaatggattcttagtatttttttggtaacaattttttaaaaactaattaaaaaatttaaatattgtggtaaaatatacataccatgtaacttaccgttttaaccagttttatgtgtacagttcattggcattaaatatattgacattgttgcccagccatcacgcttgactaattagagacagaatctcactgtgttgcccaggccggtcttatactcctggcttcacaggatcttcctgcctcagactcctgagttgctgagatttcrgatgtgagccatcgcacctggcactatgtgtaactttttgaggaagcagtaaactgttttccacagtggctacattgttttacattcttgcagcagtatactaaggttccaatttctccacaccctcaccaacactttttgttttctgatgatagccatcctaatttgtgtgagtaggtacagcatctcattgttttgatttgtatttccctgttga

SEQ ID NO: 352447 - DNA, 639 bp, Homo sapiens
caccatgcatggtagctcacgcctgtaatcccagcactttgggacgctgaggtgagagaattgcttgaggccatcagtttgaagctgcagtgatctatgattgtgcctctacactccagcctgggtgacagggtgagaccctgtctcttaaaaaaaaattcgtatttggggttagtagtagtacctacctcataggttattatgggatcagtacagtaggccagacaaagtgcgtatgctattattttgcatgtagtaagtaccagcatatactacctgttatccagaaatttgctgaaatgtgccttgtattttctctctttcgattttgatcagtcttyctagaagtcatcagtttgagttttttcaaagaaccagttgttggttttattgattttgtttgttttctttttcattgatttctgctttactctttattatttccttttttctgctggctttgggttccatttgttcttctgtctcttctagtttcttaaggtaaaggcttagatcattgacttcagattttttgtcttttctaacaagtgttcaagactataatataaatttccctctaagcattgtttagccacatttcacaaatttggaaatgtttattcattttcatcttcattc

SEQ ID NO: 352448 - DNA, 639 bp, Homo sapiens
caccatgcatggtagctcacgcctgtaatcccagcactttgggacgctgaggtgagagaattgcttgaggccatcagtttgaagctgcagtgatctatgattgtgcctctacactccagcctgggtgacagggtgagaccctgtctcttaaaaaaaaattcgtatttggggttagtagtagtacctacctcataggttattatgggatcagtacagtaggccagacaaagtgcgtatgctattattttgcatgtagtaagtaccagcatatactacctgttatccagaaatttgctgaaatgtgccttgtattttctctctttcgattttgatcagtcttcctagaagtcatcagtttgagttttttcaaagaaccagttgttggttttattgattttgtttgttttctttttcattgatttctgctttactctttattatttccttttttctgctggctttgggttccatttgttcttctgtctcttctagtttcttaaggtaaaggcttagatcattgacttcagattttttgtcttttctaacaagtgttcaaractataatataaatttccctctaagcattgtttagccacatttcacaaatttggaaatgtttattcattttcatcttcattc

SEQ ID NO: 352449 - DNA, 570 bp, Homo sapiens
gatagtgtgcaccagaggaaaaatgtgttacaggtctaagtagcatgaaaaaagtgattgctaagttttgttttatgttccaccagcattggttgttaaacacaaggaatgaatggtggtgttttaccgtaaggaataagacatggtttccctctttggggagcttccctgcagacaggaattgcagatggaagccttgtgctcacaggttttacccttatcttgttgaggatggctctcccagctggagtgggaagcgcttcactgcttgagacttttgtattggaaacagaattgacacctgggtaatgaataatacatgggataggaagatgtttcttagccataggatttaaccgatctgttttccacagctgtttttgttygaaatgcccttaaaagttttagtaactttagaaaggaagagtttttggagtgtgaaaacttataatgcttgtgtgttatagagagcacttattgacttctttatcatagacattatttggatacgtcaggcctaggaccctacatccagcaacctctaatgcagggctcattttatgccaggca

SEQ ID NO: 352450 - DNA, 580 bp, Homo sapiens
acaggcgcgccaccacctctggctaattttttgtatttttggtagaaatgcggttttgccatgttgttcaggctggtcttgtactcctgagctcaaacaattcaccygccgtggcctcccaagtgctgggattacaggtgtgagccaccatgcccagctttctggccaattttacaatttttttgtagagacagggtcttgctatgttgcttagattggttttgaactcctgggcacaagtgattctcttgcctcagtcttccaaggtgctgggattagagatgtgagtcactctatctggccagggctcactttttaggaaggagtttacctctcccccaccagctgatatttttaccaaaagtcatatgttttggttccaagtatgtttatggcagttatcctgttagtgatgtgaacagaaaaaataacagtgctgagggaaagctgttccttctacaaaaactgaaggatgctggcttggtttctgtcgctacagaacaagttaccaaacacaaatttggcagcttgtaacaacaagcatttacactctcacagtttctgtgggtcaggagtctgg

SEQ ID NO: 352451 - DNA, 580 bp, Homo sapiens
acaggcgcgccaccacctctggctaattttttgtatttttggtagaaatgcggttttgccatgttgttcaggctggtcttgtactcctgagctcaaacaattcacccgccgtggcctcccaagtgctgggattacaggtgtgagccaccatgcccagctttctggccaattttacaatttttttgtagagacagggtcttgctatgttgcttagattggttttgaactcctgggcacaagtgattctcttgcctcagtcttccaaggtgctgggattagagatgtgagtcactctrtctggccagggctcactttttaggaaggagtttacctctcccccaccagctgatatttttaccaaaagtcatatgttttggttccaagtatgtttatggcagttatcctgttagtgatgtgaacagaaaaaataacagtgctgagggaaagctgttccttctacaaaaactgaaggatgctggcttggtttctgtcgctacagaacaagttaccaaacacaaatttggcagcttgtaacaacaagcatttacactctcacagtttctgtgggtcaggagtctgg

SEQ ID NO: 352452 - DNA, 580 bp, Homo sapiens
acaggcgcgccaccacctctggctaattttttgtatttttggtagaaatgcggttttgccatgttgttcaggctggtcttgtactcctgagctcaaacaattcacccgccgtggcctcccaagtgctgggattacaggtgtgagccaccatgcccagctttctggccaattttacaatttttttgtagagacagggtcttgctatgttgcttagattggttttgaactcctgggcacaagtgattctcttgcctcagtcttccaaggtgctgggattagagatgtgagtcactctayctggccagggctcactttttaggaaggagtttacctctcccccaccagctgatatttttaccaaaagtcatatgttttggttccaagtatgtttatggcagttatcctgttagtgatgtgaacagaaaaaataacagtgctgagggaaagctgttccttctacaaaaactgaaggatgctggcttggtttctgtcgctacagaacaagttaccaaacacaaatttggcagcttgtaacaacaagcatttacactctcacagtttctgtgggtcaggagtctgg

SEQ ID NO: 352453 - DNA, 580 bp, Homo sapiens
acaggcgcgccaccacctctggctaattttttgtatttttggtagaaatgcggttttgccatgttgttcaggctggtcttgtactcctgagctcaaacaattcacccgccgtggcctcccaagtgctgggattacaggtgtgagccaccatgcccagctttctggccaattttacaatttttttgtagagacagggtcttgctatgttgcttagattggttttgaactcctgggcacaagtgattctcttgcctcagtcttccaaggtgctgggattagagatgtgagtcactctatctggccagggctcactttttaggaaggagtttacctctcccccaccagctgatatttttaccaaaagtcatatgttttggttccaagtatgtttatggcagttatcctgttagtgatgtgaacagaaaaaataacagtgctgagrgaaagctgttccttctacaaaaactgaaggatgctggcttggtttctgtcgctacagaacaagttaccaaacacaaatttggcagcttgtaacaacaagcatttacactctcacagtttctgtgggtcaggagtctgg

SEQ ID NO: 352454 - DNA, 543 bp, Homo sapiens
aagcagactatattatccaacattccaataagataaaataatcacaatgacttctcttttttggaaaaatgtttctcttattctcctacgttattgtgaagactttttttcttaaacaagaaacatgtstaatatttgtaaaaacacaaagcttttgggccgggtgcagtggcttatgcgtataattccagcactttaggagcctgaggctggtggatcatgaggtcaggagattgagaccatcctgactaaaaaggtgaaaccacatctctactaaaaatacaaaaaattagccaggcgtggtggtgggtgcctgtagtcccagctacttgggaagctgaggcaggagaatggcgtgaacccaggaggtggagcttgcagtgagctcagatcgtgccactgcactcgagcctgggctacagagcgagactccttctcaaaataaataaataaataaataaataaaacttctatttctttcactttctaatataattttaatatctcctcctgggatttcactaagacacattttggacctca

SEQ ID NO: 352455 - DNA, 543 bp, Homo sapiens
aagcagactatattatccaacattccaataagataaaataatcacaatgacttctcttttttggaaaaatgtttctcttattctcctacgttattgtgaagactttttttcttaaacaagaaacatgtgtaatatttgtaaaaacacaaagcttttgggccgggtgcagtggcttatgcgtataattccagcactttaggagcctgaggctggtggatcatgaggtcaggagattgagaccatcctgactaaaaaggtgaaaccacatctctactaaaaatacaaaaaattagccaggcgtggtggtgggtgcctgtagtcccagctacttgggaagctgaggcaggagaatggcgtgaacccaggaggyggagcttgcagtgagctcagatcgtgccactgcactcgagcctgggctacagagcgagactccttctcaaaataaataaataaataaataaataaaacttctatttctttcactttctaatataattttaatatctcctcctgggatttcactaagacacattttggacctca

SEQ ID NO: 352456 - DNA, 578 bp, Homo sapiens
gatggatggatggatggatagatagatagacagagataaagatagagacaaagatggagacagagatggacatagagacagatttgcagaagataagttctaggtgaactagtgtcaacattaaagtggtatgcctacatctaactattctggagagaaaaacatacctcaaagaaattgacttaaatatatacagagaaaaagtttaagctgaaagctactgcctttttatatgagacactttaggaaattacttggggggcaagagagaaaatgggtggacatagctcagaggttacacagtagcagatatgtaggatgaacaagcctagaaatataatgtacaacgcragaaatataggtaataaaattgtactgtattgggattcacgctaaatgagattttaagctcctcttgccaccaaacaaaaagaaaacgggtaactatctgagttgaaggatacgttaatttgcttcactgtagtaatttttttaaccatctatatgcatcccacaaaatcatgttgtataccttaaatacacagaatacaatttatttaacataaaaaactactcca

SEQ ID NO: 352457 - DNA, 578 bp, Homo sapiens
gatggatggatggatggatagatagatagacagagataaagatagagacaaagatggagacagagatggacatagagacagatttgcagaagataagttctaggtgaactagtgtcaacattaaagtggtatgcctacatctaactattctggagagaaaaacatacctcaaagaaattgacttaaatatatacagagaaaaagtttaagctgaaagctactgcctttttatatgagacactttaggaaattacttggggggcaagagagaaaatgggtggacatagctcagaggttacacagtagcagatatgtaggatgaacaagcctagaaatataatgtacaacgcgagaaatataggtaataaaattgtrctgtattgggattcacgctaaatgagattttaagctcctcttgccaccaaacaaaaagaaaacgggtaactatctgagttgaaggatacgttaatttgcttcactgtagtaatttttttaaccatctatatgcatcccacaaaatcatgttgtataccttaaatacacagaatacaatttatttaacataaaaaactactcca

SEQ ID NO: 352458 - DNA, 561 bp, Homo sapiens
gaaagctactgcctttttatatgagacactttaggaaattacttggggggcaagagagaaaatgggtggacatagctcagaggttacacagtagcagatatgtaggatgaacaagcctagaaatataatgtacaacgcgagaaatataggtaataaaattgtactgtattgggattcacgctaaatgagattttaagctcctcttgccaccaaacaaaaagaaaacgggtaactatctgagttgaaggatacgttaatttgcttcactgtagtaatttttttaaccatctatatgcatcccayaaaatcatgttgtataccttaaatacacagaatacaatttatttaacataaaaaactactccaatattttctgcatttttaatatgctcacccaaagaaagcattaatttgcatctttgatgttaaacagatagcctaatcaagtcactatcaagatcaagactaaaagttacagcttttttcttttgatgcctttcagatatatctatttatatataaaaatatatatacacacacacatacatacacacacacata

SEQ ID NO: 352459 - DNA, 561 bp, Homo sapiens
atgtgcatacttaaccttctttttatttatttatttatttatttttaatattttgagacaacatcttgctatgttgcctaggctggtcttsaactcctgggttcaaaccatcctccagtcttgacttcccaaagtactgggactacaggtgtgagccaccagccccgccagccctgttacactattcttggtccctcaagtgactgtatgaattttaggatcagcctctcgagttccacaaaaaaattctattgggatttgtgtaggaatttcttgaatttatagattaatttgttgagaagtagtatgtttatagcattgagtcctacgattcataatatatatggcatatatttcagtttagtcagttcttcctttaagtccctgggtaatttttatatttgtcttagtcccttcatagtgccataacaaaacacctgagactgggtaatttacacagagcagaagtttattttctcagttctggaggttgggaagaacaagatcaagactccagcagacacagtgtctagtgagggcctggtctctgcttccaagatg

SEQ ID NO: 352460 - DNA, 561 bp, Homo sapiens
atgtgcatacttaaccttctttttatttatttatttatttatttttaatattttgagacaacatcttgctatgttgcctaggctggtcttgaactcctgggttcaaaccatcctccagtcttgacttcccaaagtactgggactacaggtgtgagccaccagccccgccagccctgttacactattcttggyccctcaagtgactgtatgaattttaggatcagcctctcgagttccacaaaaaaattctattgggatttgtgtaggaatttcttgaatttatagattaatttgttgagaagtagtatgtttatagcattgagtcctacgattcataatatatatggcatatatttcagtttagtcagttcttcctttaagtccctgggtaatttttatatttgtcttagtcccttcatagtgccataacaaaacacctgagactgggtaatttacacagagcagaagtttattttctcagttctggaggttgggaagaacaagatcaagactccagcagacacagtgtctagtgagggcctggtctctgcttccaagatg

SEQ ID NO: 352461 - DNA, 572 bp, Homo sapiens
ttgttattgtgaatagaatctctttttttttttttttttttttgccacggagtctggctcctttgcccaggctggagtgcagtggcrcgatctcggctcactgcaagctctgcccctccaggtttaagcagcctgttgcccaggctggaatgcagtagcatagtcatagttcaatacagcctcaaactcctgggcccaaatgattctctaagctaatatttttaattttttagagatggagtttcattcaaggatcactaaaggccagtgatcctcccgcctcagcttctgaaattgctgggattacaggtgtgattgagccatggagcctggccagacatgggctattgattctcgctgttactcttttccctttccttctaatccttgtattgggaagcaaacagtatggaaattttatttcttcattttattgatacgtagatctctgcttagaagacaattttagttttaaattataaatgtttcgttcattattcatagaaaactagatttgccatgggatatttataagtgttgcacgaatgaagggttttctagtcaaataagtt

SEQ ID NO: 352462 - DNA, 572 bp, Homo sapiens
ttgttattgtgaatagaatctctttttttttttttttttttttgccacggagtctggctcctttgcccaggctggagtgcagtggcgcgatctcggctcactgcaagctcygcccctccaggtttaagcagcctgttgcccaggctggaatgcagtagcatagtcatagttcaatacagcctcaaactcctgggcccaaatgattctctaagctaatatttttaattttttagagatggagtttcattcaaggatcactaaaggccagtgatcctcccgcctcagcttctgaaattgctgggattacaggtgtgattgagccatggagcctggccagacatgggctattgattctcgctgttactcttttccctttccttctaatccttgtattgggaagcaaacagtatggaaattttatttcttcattttattgatacgtagatctctgcttagaagacaattttagttttaaattataaatgtttcgttcattattcatagaaaactagatttgccatgggatatttataagtgttgcacgaatgaagggttttctagtcaaataagtt

SEQ ID NO: 352463 - DNA, 520 bp, Homo sapiens
caaggatatatgttttcaaggaaaacattattgaaaagagagatcagaatagatgcattcagtgtctcatttgcaaaatttaaagaaatgcaagagacctatggagaactgtctcctgatactcactagacactgagacctacctatacctcctaggtaatagggttataaaatcttacgtagtgacatatttgcctttccttgcatactttggcyaagattatattcttaaaatacattttgtttatattggataattcagcactttggtagttaaatttgactaacatttattacaagcttgcctggagcaacatgtcatgttcagtactattgtaaatagaaagttgaataacatggttcatattctctagatactcagtctagtggaagatacaggcatctaaaacctaatgtaaagacatgctatataacggaagtagagaaaattatgggataatagaagagaacaatactgatcttaaagaaggcagaatttgagatggaaaaagaatggata

SEQ ID NO: 352464 - DNA, 520 bp, Homo sapiens
caaggatatatgttttcaaggaaaacattattgaaaagagagatcagaatagatgcattcagtgtctcatttgcaaaatttaaagaaatgcaagagacctatggagaactgtctcctgatactcactagacactgagacctacctatacctcctaggtaatagggttataaaatcttacgtagtgacatatttgcctttccttgcatactttggctaagattatattcttaaaatacattttgtttatattggataattcagcactttggtagttaaatttgactaacatttattacaagcttgcctggagcaacatgtcatgttcagtactattgtaaatagaaagttgaataacatggttcatattctctagatactcagtctagtggaagatacaggcatctaaaacctaatgtaaagacatgctatataayggaagtagagaaaattatgggataatagaagagaacaatactgatcttaaagaaggcagaatttgagatggaaaaagaatggata

SEQ ID NO: 352465 - DNA, 551 bp, Homo sapiens
gcattttaaaggtaaaatttagaggaataaagaattgtaaccgtaaccattgtgctcctttgcaacctccattaatagatgcagtaagctctcataaacctgagccatttggcaaagattcctgtggttcattactattttttagtccttttctctaaaacttgaaaaaacargttgactcccagaaacaattttcagttattggcaagtctaattctgtatattcaaaatcctgtttatgactcttcaaagtgattaaaagaacactcttaagcagttctcatgaactttcagagaagcaataatatgggaaacaaaagtcacagacatttcttccagaacacatcgttctgtggttaacttggttaagatcttccgcccatagaaatcagatgccagcaatttctgagaatttcatcccactcaatagtgcataatgactgcgggataaatcaatgtcttagaaatctgaaaaactctgaaaaagaacatctaatgtgacctgcggggtcataagaggaaagatatatagtaatattctggtagtgttt

SEQ ID NO: 352466 - DNA, 562 bp, Homo sapiens
cattccactaggtaagccacctagaacagcagaggcacgtgctgaggatgtgatcaacttggaatgaatactgcaggaagaatggtgattactrgttaaccttgaaactagctgaagccacggagactattgtttgtcctattgccatttttattatttttttttcaggaaataggaccaatcagaatcccagaaaacctgtctggagtaaacttatatgaagcaagtgaatccaaaagggacaatggtgaactgcagtggatgccgtagctcattacccagagtccaccttctgggacagcagtacctagctgctgggattgttgcctgctgatggctcgcagttgaatcactcccctgcaattgccttcaaaagggaactgccgtgaccatggttatgctccgtttctagtggggaatttcatatccaattagtggtctatgtgtaggcgcaaaggtccagtcacctctactaattcaggatatctctgaagcactatctcagcttcagagctctccatgggagtgactgagacctcataacacaggataagtgctccct

SEQ ID NO: 352467 - DNA, 557 bp, Homo sapiens
aacaaaatgcttatcggtatacctataaaacataacaaagacagtgtgagtttggtacaggaataaactacaaatggaacaggataaagttcagaaacagactatggtatatatgttcaactgattgggaaagaatgctttatcttttcattaaatgatgctgggtttaatagatagctataaaaataaggaccttgactcctatctcacaccatatacaagagtcaattctagattgattactgggctaaatatgtaamgcaaaacaaagggattttagagcaaaatataggtgtacatttttttgtgaccttggaataggcaaagaaatattgaatagaacataaaaagcattaagcataaaagaaagaattgaaaacctggattatattaagaatttctgtttgccaaagacaccataagtggattaaggggaaagatgtggactggaagaaaatattcacaccccatatatacgacaaaagacttctgtcaagaatatataaagagaagggcttcaagggggcagaccacaggcatctggtggatgcctcctc

SEQ ID NO: 352468 - DNA, 536 bp, Homo sapiens
gacacagccaaagcagcgttaagagagaagtttatagcactacacatccacatcaaaaagttagaaagatattacgttaacaacttaatatcataattagaggaactacagaaacaaaagcaaaccaatcccacagctagcagaagacaagaaataaccaaaattagagctgaactgaaggaaactgagacatgaaaaaccatacaaaagatcaatgaatccaggaaatggttctttgaaataattaataagataaactactagctagactaataaagaaagaagagrgaaatctaaataaatacaatcataaatgacaaaggggacattaccactgaccctacagaaatacaaagaacccttagagactattaggaacacctctatgcacacaagctcaaacacctagaagaaactgataaatgtttggatacatacaacatcccaagaatgaaccaagaagagattaaatccctgaacaaatcaataatgagttctataattcaatcagtaacaagcctaccaaccagaaaaag

SEQ ID NO: 352469 - DNA, 579 bp, Homo sapiens
tactgcccaaagcaacatacagattcaatgctattcctatcaaactaccaatggtcttcttcatggagctagaaaaaactattttaaaattcacatggaaccaaaaaagagcctgaatagcaaaggcaatcctaagtaaaaaaaaaaccaaagcaggaggcattacattacccagatgcaaactatcctacagggctacagtaaccaaaacatcatggtgctggtacaaaaaacagrcacatagacaattggaacagagtagagagcccagaaataatgctgcacacctacaaccatctgatcttcaacaaagttgacaaaaacaagcaatacggtgctgggataactggctagcaatatgcaaaagactgaaattggacctcttccttataccgtatacaaaaatcaactcaacatggattaaagacttaaatgtgaaacctgaaactataaaaaactctgaaagataacctaggaaatacaattatggatgtaggactgacaaaggtttcatgatgaagacaccaaaagcaattccaatgaaaccaaaaattgacaaatggaacctaatttaactaa

SEQ ID NO: 352470 - DNA, 512 bp, Homo sapiens
ctgacaaaggtctaatatccagaatctataaagaacttaatttatatgaaaaaaacaactccattaaaaagtgggcaaaacataaacagacacttccaaaagaagacacacatgtggccaacaaacatgaaaaaatgcttaacatcactaatcattaaagaaatgcaaatcaaaaccacaatgaaataccatctcacgttagtaagaatggctattattacaaagttaaaatataagagattatagmgagattgtggagaaaagggaatgcttatacattgctggtaggattgcaaattagttcagccactgtgaaaagcagtttggagatttctcaaagaacttaaaacagaatggactaccagttgacctagcaatcccattatttggtatgtgtccaaaggaatataaattgttctaccataaagacacatgcgtgcatatgtttattccaacattcttcacaaaagcaaagacacggaatcaacctaaatgtccatcagtggtagatg

SEQ ID NO: 352471 - DNA, 512 bp, Homo sapiens
ctgacaaaggtctaatatccagaatctataaagaacttaatttatatgaaaaaaacaactccattaaaaagtgggcaaaacataaacagacacttccaaaagaagacacacatgtggccaacaaacatgaaaaaatgcttaacatcactaatcattaaagaaatgcaaatcaaaaccacaatgaaataccatctcacgttagtaagaatggctattattacaaagttaaaatataagagattatagcgagattgtggagaaaagggaatgcttatacattgctggtaggattgcaaattagttcagccactgtgaaaagcagtttggagatttctcaaagaacttaaaacagaatggactaccagttgacctagcaatcccattatttggtatgtgtccaaaggaatataaattgttctaccataaagacacatgcrtgcatatgtttattccaacattcttcacaaaagcaaagacacggaatcaacctaaatgtccatcagtggtagatg

SEQ ID NO: 352472 - DNA, 587 bp, Homo sapiens
ttgacctagcaatcccattatttggtatgtgtccaaaggaatataaattgttctaccataaagacacatgcgtgcatatgtttattccaacattcttcacaaaagcaaagacacggaatcaacctaaatgtccatcagtggtagatgggataaagcaaatgtggtacataaacaccatgcagccataaaaaagaatgagatcctgttctctgcagcaacatggatggagctagaggccattatcccaagcaaactaacccagcaasagaaaactaaaaaccacatgttctcacttataagtgggagctaaactttgagcacatatatggacacaaagaagagaacaacagacactggggcctacttgagggtggaggatggtaggaaggagaggatcaaaaaatacctatcaggtgctatgcttattacctgggcaacaaaatattctgtataccaaacccctgtaacatgcaatttacctatataacaaaccttcacatgtactcctgaacctaaaataaaaatttcaaaaaagtatacatgttttccaaaatacacatgctagaatgttcacagcatattattca

SEQ ID NO: 352473 - DNA, 662 bp, Homo sapiens
ttttgaaagtcaggatagtaatttcctctgatggtatactgactggaaaggagaatgatgagggtgactggtaattgtctgttttttttgttctgggggctgattatacaggtttgtacactttatgccaatataatgagtaatatacttaagtccacttttctctaagtgtattatatgtcaataaaaacagaaaatgacagtttttgatcttttgaagaaaaacaggtatatttcagwgacactttgactaattattagatgatatcaattatcttttgcctatctttagttttattggcatactttagaacacttcttgctcttaccttactggcagattatataaatattactccacgttcatactactataaagaacttcctgagactgggtaatttataaaggaaagaggtttaattgactcacagttcagcatggctgaggaggcctcaggaaacttacaatcctggtggaaggcaaagggaaagcaagataccttcacaaggtggcaggaaggagaagtgccgagcaaagcgggaagagccccttaaaaaataatcagatctcatgtgatctcattcactataatgagaacagaatgggggaaactgtccctatgattcaattacctccacctggtctctcccttgacatatgg

SEQ ID NO: 352474 - DNA, 662 bp, Homo sapiens
ttttgaaagtcaggatagtaatttcctctgatggtatactgactggaaaggagaatgatgagggtgactggtaattgtctgttttttttgttctgggggctgattatacaggtttgtacactttatgccaatataatgagtaatatacttaagtccacttttctctaagtgtattatatgtcaataaaaacagaaaatgacagtttttgatcttttgaagaaaaacaggtatatttcagagacactttgactaattattagatgatatcaattatcttttgcctatctttagttttattggcatactttagaacacttcttgctcttaccttactggcagattatataaatattactccacgttcatactactataaagaacttcctgagactgggtaatttataaaggaaagaggtttaattgactcacagttcagcatggctgaggaggcctcaggaaacttacaatcctggtggaaggcaaagggaaagcaagataccttcmcaaggtggcaggaaggagaagtgccgagcaaagcgggaagagccccttaaaaaataatcagatctcatgtgatctcattcactataatgagaacagaatgggggaaactgtccctatgattcaattacctccacctggtctctcccttgacatatgg

SEQ ID NO: 352475 - DNA, 595 bp, Homo sapiens
ataatatttactgagcacctgcttccatcaaacaccttgtaggtgcttggatacatcagcgagctcaacaaattaagatccctgacctgttggagtttgtgtagtagcaccagggcattcacatttaattccttcacacagaaatcattttatattgcttgtaaaaattaccttttttttttttttaaacaaatcyagcacttcataactggttttacggattaattaaatggacaaatgacataaatgcagaagggcattatttgcattatttgaagagtcttaagatcataaaacctagtagcaacttagtcacagctttgtgcaggataggtgtacaagctatcctactacagagccaagtgaaaaatgaagaaaatgtttccaaatataggtgcattttaaggtctcaacagttgaactcattatttcaacaggcaaggaaatattcagtgatggatttttggcaaagatgggagtgtaatagtcaagaaaggaggagagaggttctgtgtcagcatttcctcagtctcgtccttccgctttcagtggcttgtggatattagtccactatatttatgcttaaatggcttcc

SEQ ID NO: 352476 - DNA, 592 bp, Homo sapiens
gattcattgcttttcttccaaagtaactatttaaaccaggcaaaataataaaagcaagggctagtaaataaaagagcaagaagaatgggtccaggaactttgcttttgtttctgaaagtcgtccatttgtttcctcaaattcaatttacagcaagttgtcgttattctattcacttttagagatsaggtctcactgtgttccccaggctgcctcaaagtcctgggctcaggggttcctccagcctcagcctctcgaatagctgggaccacaggtgtgtgccacggtactcagcattttccactttcatcaaaacgttttgacaaatatgctctttgttatgcattacaattaattcaataattatacctggaaaaattagattactaagaaacataaccccacaaaacaaagatttaacaatatatcttttcctatacattaataaggtcactcttttaaactaataattttttattttgtgcctcatgatatccatgtaatattttagcattgaaaaattcaaaaatttactaagaaaaaaacaattcctcatgtaaaactcttaaaatatccttggtggagcttttacca

SEQ ID NO: 352477 - DNA, 489 bp, Homo sapiens
tatgatctcacagttttggaggctataagtccaaaataaaggtgtcagcagtgttgcactccctctgaaggttctaaagaagcatttttctttgacatctaatttctgatgactcctgcagtcactccaatctctgccttggtggtcacatagctctcttccttctgtatgtctccctgtctctgttttcaaatatccttctcctttctctgataaagatcccagtctttgggtgacatcctaatccagataacctcatcttgagttgataacatctgcaaagaccctatttgcasacctacattcagaagtaccataagttaggacttcaacatgtctttcatggacacaattcaacccaccatactattaaatagggagggatttgactcagttgtaacagaaacattatctattcacagaaatctggcagtagagtcagtggcagatgtcgacatcttttttttttttttatttcagtagtttttt

SEQ ID NO: 352478 - DNA, 406 bp, Homo sapiens
ggattcatcgatttttgtttttttgaagggttttttcatgtctctgtctccttcagttccactttgagcttggttatttcttgtcttctgctagctctggggtttgtttctcttgtttctctagttctttttgttgtaatgttaggatgtcgatatgagatctttctagctttttgatgtgaacatttagtgctacaaattccctttttaacactgttttagctccatcccasaggttctggttcattttctctttgttctcattagtttcaaagaacttcttggtttcagccttaatttcattaatttacccaggagtcattcagaagtaggttgttcagtttccatgtacttttgtggtttttagtcagtttcttaatcttcagttctaatttgattgtgctgt

SEQ ID NO: 352479 - DNA, 506 bp, Homo sapiens
attcatcgatttttgtttttttgaagggttttttcatgtctctgtctccttcagttccactttgagcttggttatttcttgtcttctgctagctctggggtttgtttctcttgtttctctagttctttttgttgtaatgttaggatgtcgatatgagatctttctagctttttgatgtgaacatttagtgctacaaattccctttttaacactgttttagctccatcccagaggttctggttcattttctctttgttctcattagtttcaaagaacttcttggtttcagccttaatttcattaatttacccaggagtcattcagaagtaggttgttcagtttccatgtacttttgtggtttttagtcagtttcttaatcttcagttctaatttgatygtgctgtgatctgagagactgttatgatttcagttcttttgcatttgctgagaagtgttttacttacaattatatcattttagagtaagtgtcaagtggcactgagaaa

SEQ ID NO: 352480 - DNA, 571 bp, Homo sapiens
tatgtatgtatataatttattgggtgtacctggaagtttaaatctatcattcattagcaagtcaaaatgattactggattctgagctcaaaagtccccttttctgttctgtacctcacctataggttgccaaaccaagttcatagttcactaatgtcagggagagttgaggaaaatcaataagaaaacaaagatcttaacctagaatcagaacgaaggattttgactcttcactagaacaaacaagcttttatcatcacttggcttggacatacccaagaaattgcaaagatagagatgaaccatgctcctgaatcaaataacttttggcttaatatttttttaaaataatgaaaacaaaatttgtctctttctaattgaacctcaccctttatgtgatgttttgtgatgaaggcaataaatcacagaatccaaataggaatcaaatatgtatttcttcrgggttgtgcctttcatggacagctcatgggtcagcagtttaaactgcatgtcatctctcttgttggtaactgttgctattctttgctgattgactgtaattgattggccag

SEQ ID NO: 352481 - DNA, 442 bp, Homo sapiens
tgaaaacataaatgaatttaatagcaagaaattaaatttttcaaaatttaatttttggtaaaattattttgattcataaaagttgaacaagattaataataatgacagtaacaaaaacagtagacactacttccaggagtttaccacctaatcaaggagagaaaaaattctcaagaaatggttgcataatactttccaaccaatataatctatgtgcaaattcccactctgccttttctttctttyttttttttttttttactggtaatagagtttattcaaatataggcgctggggcttgcccatggtgctcttgatatataaggccggacattctgccagtatttcttgagcaatgacaacaagaagctgacagccaggtgaatgttatccacaagctcatcgtctgtcatcttcacgtgaccaacagctacagccagat

SEQ ID NO: 352482 - DNA, 592 bp, Homo sapiens
cattcagcattacttgtatatattgtctgagtccactacagcaagccaactaaatgatgagaactaccctctggagattaattatgtttcctttcttattctgcattgaagtctcttgataatgtactcccagaacttcaatttccaggttacatgcaatattaaaagtagtggattcatagttttgaattgctattctttctcattttcattcctcttttcagaaaacacaaagaatgactagctaattcaaacaaccgtataatttgcagatggagattctgtagtgcaaccatggaaaacttttgctctcctcattgttatgcttcttctgttaggatcatcaaaagcaggtaaacttatcaaagaaaatgacagataattaatctctcaggacatagagaagggagaacgatttaaatagtgtctcttctcatttctagtcatataggctttcattttttaaacccaacacttttagacttaaaataataggaacttttcagagaaaaaaaggyattttgttagtatatttttgtttcagtttacaatcagtgttgagactttaaatgtcttttataaatttcataag

SEQ ID NO: 352483 - DNA, 570 bp, Homo sapiens
ctcactataaatgcatgaaccaaatataaagtggtcacaatacyttacattatcctctaattagcatcatttttatcctcttcatagtgaaagtcctgcctccactttttcacctcacagtctctcctttcttcatcatactcgttagttttctccttctaccactccacggagactactcttgataagataaacaacagtctctatattgcaaaatccagtggatgctactctgttacttaacctttcaagaacatttaagacaactgtttgcttgattattttcctactcactggtcactttatctcaatctcttttgcctcctgcttcttagctcaacctctaaattttggagtgatttgggactccgtgccaggtaactttttcccctatctacacattttaagtatttcacccagtaccatgagtttaaatatcatctgattaacatggtggtccatatctatatctctaaactaaacctcgtcttgagactcacttatctaactgcctctttagatgtctatttggatgcctagtagcatcagaaagttaacattatcacaaca

SEQ ID NO: 352484 - DNA, 603 bp, Homo sapiens
agcagaagtgatccatatcacttctgggtcagaacatttaacaccaatgcaagaatttccagagctccctttctttctgtcatgtgactatttgggtaatccaccagtctgtcctagaatgaggacaataatgaagtgggaaaagaactaccaatcaacccacaatagacacataccatgagcaagaagtgtttatttgttgttttaaatcactgagatcttgagcttttgtattatacagcataatctaagctgccatgattagaacaagaactatttttgcatcttagttagatgactaaatttaataacccagtataagtatactataaatatttcagtgcaaactttaaacatgagtcttttacaggactcaatccttatctrtacagcagatgagcatctgctaacctctcaaaattagattgaccattgtgagatcaaaatatgtatctgagactgaaacttgtggacaagttaaattactaatgaacagtaattctgtattttaatgtcactctacatacatagtaaatcaaatcaaatgaaagcttagagaagatagagaactgaattgccatattaggaaatgtttcatacgtg

SEQ ID NO: 352485 - DNA, 593 bp, Homo sapiens
ccttgatcttgagctttccagcttccacaactgtgagccaatacatttctgttcattcttagttacccaatcttagatattctgttatagtggcacaaaacagactaagacaagatctaactatgacttatcatataagtatttcattcagtataaatacaaattgtaaaacatattagttccaattctcaaattcctagtatgatcagataaaagtcatggaaacattaaataaattgagcagtttttctcaaggcaaaaggtatctgtgatgacttaacattgagtgtttagcagcataaatatattgagattgaatcaggcaaagatcactccaamtgttgaactattgggtaagtggaggggggcatttaaggaaggcattgctactggtgatgtttatctcaaccacatacccaactgcactatatgtgttagcattaactttttaaaccattcagcatggttgcaaaatttcagcagaagtaggacacttgtttgctagaatttcatttatttttcaaattattgaaggctgtcatctgtataaatttacagagaatctaggacacttgaaaacttgagtgaagttt

SEQ ID NO: 352486 - DNA, 551 bp, Homo sapiens
ggcattagagacctgcaaacccaggagaagggggatgacaggatagagatgcaatagtaaggctaacttcatggatgaaggacacagagtagaaggaaaacttgaaaaccaagaacgtggctttaaataagacaaattgccacatgaatgagtgtacacacccaacataaatcaaaaggaatttctccaaaggattctgaggacaaacttagccctgtataaatgcatcctgtctacttaatcacaaaaagcattctgattgcctccaaacataaggcaacaaaattgcactgagccataccagctgtttgtcgaaggggctctgccacagtctcccaactcccaacttttcttgtctgtcccaagaaagcctgccgctaatgagatggatcaaaagttagggctagattctattttcargaagaaatcaactcagagcctgatctagaaagtaactagaagaaaagaagatcccacatttcccaaaatagatattatgaacagtttaatgcccttatggatttaaggacatagaactttgttttggatgc

SEQ ID NO: 352487 - DNA, 455 bp, Homo sapiens
tgtttagggaaaacctcttggaagctaggagaatgagaaagaagcattccccaacacatagtccctagaacaagtaatctctcaaaacaccaaaaaaacacattgcctgacagcaccttttgagtggctttctttaaacaccacaagagtgacttactaccactacccctgttaacctagacctttcagaaatctctggaatctaacagcaacattcaccagaactgaattcctagtccatcttcctcaggagatgacaacctcctgaccagctgctgggctcaggagcccctttagagtgctgttgttttctaaagaggggggtgatctcaaatgtgactatctcaccctactcctatgtatatatctatgtatgtttgtgtgtctagcatgacctgtgactaggtaggtaaatgtttttrgtttcggggttcagtatcaggagacccacttat

SEQ ID NO: 352488 - DNA, 581 bp, Homo sapiens
tacgaggctgggctcatgcctataatcccagcactttgggaggctgaggtgggaggatygctcaagaccagtctgggcaacatagggggacgccatctctacaaaaaataaaaataaaaaaattagccaggcgtggtggcatgcacctgtggtcctagctactaataatagggaggctgaggcaggaggatcatttgtacctaggagtttgaagctgcagtgagctagggttgtgtcactgcactccagtgtgagcaacagagcaagacgctgcctctaaaaaaaaaatggctatcattacttacttctatactttcttttattttattttgagatggagtctcgctctgtcacccaggctggagtgcagtggtgcaatctcagctcactgcaacctctgcctcccttgttcaagcgattctcctgcctcccgagtagctgggattacaggtgcataccacaatgcctggctaatttttgtacttttagtagagatgggtttcaccatgttggccaggctggtcttgaactcctgacctcaagtgatctgcccgtgtcagcctcccaaaatgctgggatta

SEQ ID NO: 352489 - DNA, 524 bp, Homo sapiens
cacacttgaaacatagattgtttgcttaggagagaaaatattaggaggaacgaatgatgtgctgctttctcaaatgggtgttggggtttactgtgaacaatatatagcttctagcataatattcactttaataaatattttgattttttggaaccactcacaacaaaatgaaaaacaagtgaacaaccatcctaggtgtcctagaagaagatgttaaaatggaaactttagggaaatgcatttaaggccatgccaaccccttagaaatgatctatttyatgtagtgaacatgaaggaggaaaactctataatttctttcagcgtctcagagttactttgtcttttcaaataccttttaacatctctatcacagtcttttcccgtaaataggccagtgagcccccagatcctctgagttgatactggcctcaccctttctctggataaggtctctttgtgtggcagctgtttcacagtgaccaaagcacctccaggttttctgttgttctttatagccccagggt

SEQ ID NO: 352490 - DNA, 545 bp, Homo sapiens
tgttcaagaagtcatgctgacagcatggggaggatattgaatgggaggtgccgggctcattgattttgatcataatgactttgccaccaaggtggaatcccatttcagttgagacagtattgcatcatggaattaatggttaaaagtgtagtctctgaagcagaataggtaaatttgagtcctggctgcagcgcttatgatgtgatcttgtgatgaccacttaccccatgaagcagtttctcacctacaaaatggtagctaaacattgaatctgaatcacagagttgctgaagttctagatgtaatactttatatgaagcacttaggatagtccctgctataaaggaagtgcttattgaattttagctcttattaatcaggcagcacttaacatgtatgggggtgagtgaygattatgtgggagaaatagggtaatgtctttcacttatggtatttatttaaattttggtccccgagcaaaatttcagagaagaaaatccactttgtaaattcacttgtaaaaggtataggtcgggccaggtaca

SEQ ID NO: 352491 - DNA, 630 bp, Homo sapiens
tttggtaagttctttttaaaaaatacttttatttatttttcaagttgtaaaaccatattgaatattttttatttgtgaaactaaaaatgaaatatttgtccaatcttatattggtaactgaagtgatagctttggaagcaattgttgccttccttatctgagataatcaggaaggaaccttgttgagaccggtttgctcatcctttagaatgttgattcctaagtttagagctgttaggtacaattagtccatccaactgatgtttattgagttcttgtgtgctasttctaggcagtggtgaataagatagttgtggttcctgccctcagattttctaagaattgatgagggcatgcgttgaataaagatttaaatataatgagtcttgttagggggggaagattgtgctaaggaggtgtatgaagatattttacttgatctagaacaggggaggtttctctgagaaagtgacttttgaatgaagtagtagtttaaatggcaaaaaggtgagtggcctagaagggtaagtgggagagcattttacacaaaaagcagcatgaattaaaagtctttaggcaggaaaaggcatggcatatgagtaactttaagtctagtatgattggaacaaa

SEQ ID NO: 352492 - DNA, 575 bp, Homo sapiens
aatcagtactacgatgcagtgtagtgacatacatgagttctaagcctaaagaaaatttcagcgcgctcgcgcgcgcacacacacacatacacacacacacacaaagtcggcttttctttttaaaccatcccacaattcaacacctctcggtggtattctctraattatcatatctggctgggattatccaattttattagctaacagttctcattactttaaaaacagaaacaggatatgttctgtttcatcaagtgctacaaacatttcgctgctgtaagactggagggaaaaaatctttggaaataaaaggccatctgatccactcgggctaattactaaatgcatgccaacaatacacaattcgaattgcatttctggacacaatttaagatcacgatagggcaggtcaaatgtgtaaggaactactacttctatcaaaatgaagaagcagatatacggtatctaagatctcacgcaaaattcatctaagacttcgaaatcttctgaaaagaaaatgtgtaatcaacgttgttaatacaacagtaattcatcccattcaagtacgactagaa

SEQ ID NO: 352493 - DNA, 601 bp, Homo sapiens
tttaaacccaaatcatcatttgagaatacggtagctaccagttttctcatacgtgaaacatacttaggtaactttcaaaatgtttcaggtgtcagttactagtataaccctggggagtaaacggtagctatattacayctgttgcaaagtagagtttcttttttaagccaagagttctctaacacccaaggtttagtgccctaaaatgtcaccccagtccttttaattttatatccatgccttccaagccctacctaacatctggttcccagttttccccgttgagtattttctccaggcctgattcctcaacagttttccctaaaacctgtagctcatgctggcactatttttgccgaagtagattaagaatacaagtaatagatcatactctgggggaggcagtaagttaacaatttcgtctccgtctgcgttaaccagacgcagatactagccagggtggccactattctcctaacaaattctacaacggccaagcaatttttcggtaagttggaaaacggaaaccacagcgtggaaactctgcacggagtcttaaagataagaagttaagactttaatttactcttgcagagggaac

SEQ ID NO: 352494 - DNA, 586 bp, Homo sapiens
tacagaaaatgccatttcctggggcgccacattagaactattggttgacaatttttcaggggatatgtaccaagaatttgcatgtttaacaggctctctaagggattactaatgtttgagagccattatcttaatcagtgttctcaatctttctttttcctctaccagtacctaacccaaacacaatgaagtctaaaaactaaaaacttttggaatttgacatacctaagacaatctcttgattccactgccaaaacctacttacaactagggaggctacttttatagttaagttttttaaaaattgaggaaaatattattttttttgcatgtgagttaccttcctaataaatgattacttcaattcatagctttgtttctggtaaacttcatcttttcaatatcttcagatatattttttaggattttattttcagttttgttctctttcccataatgtggcatacacgtctgtgcacaaacataataaacatatcttcttcatttaatataaaatctsaaaacattttaaaatggattgataatgttagcctccaaattattagttttattcctacatctctgc

SEQ ID NO: 352495 - DNA, 579 bp, Homo sapiens
atgatggacgctgtgagaaaagatgagatcaccaagtgcagattttagaaagaaaagaaacaagggcaaaaatcttagaaacttttatatttagtaagtggaataagaaaaagtaatgatgatggctgggtgcggtggttcatgcctgtaatcccagcactttgggaggaagaggcgggtggaatgcttgagcccaggaatttgttaaaaaccaggctgggcaacayagtgagaccttgtttcaaaaaaaagaaaaaaaaagaaaagaaaaagtactagtgaagaagggacagaagaaataatcaaacaggtaggagaatgaaaatatccaggagagaataattccacatagccaagagagggcagaattaagaaaagagaaaacaagggtagtgtcaagtgccatagagagatcatggaagatcagaagtgaaaagaaggacaaaggattttataattagttggtatttaagagaaaactttggggagagtgatgacaataagactcagtttaaacatgagaaatgaaagaagcaagcatgggttacttttgataagtttgcagtaaaaagaaaatga

SEQ ID NO: 352496 - DNA, 620 bp, Homo sapiens
agattcaaagtgctgaagggaaaaaaactgcaaactgagaatactatacctagcaaaactttccttcaaacatgaaggagagaaaaagtcttttctagacaaacaaaagctgaggaaatgcatcattactagacccatattataagaaatgttaaagggagctcttaaatctgaaaggaaagaatgctaacatgcaaaagacaaacgaacaaacaaacttgaagtttaaatgtaagtacataaattcagaatactctaatactataaatgtgatgtgtaatctactcatatctctaacataaagactataagacacatttattagctgggcgtggtggtgggcgcctgtagtcccagctactcaggaggctgaggcaggagaatggtgcgaacccaggaggcrgagcttgcagtgagccaagatcgcgccactgcactgcagcctgggcaagagagtgagactcaatctcaaaaaaaaaagaaaaaaaaaaagacacgtttatgaaaatagtaactacagacacctttaaagaaatagacaatataagaaggtgtaaattgagacaagaaaaaatcaaaatgtcaggggaatgaagttaaagtacggagtgtttcagttt

SEQ ID NO: 352497 - DNA, 620 bp, Homo sapiens
agattcaaagtgctgaagggaaaaaaactgcaaactgagaatactatacctagcaaaactttccttcaaacatgaaggagagaaaaagtcttttctagacaaacaaaagctgaggaaatgcatcattactagacccatattataagaaatgttaaagggagctcttaaatctgaaaggaaagaatgctaacatgcaaaagacaaacgaacaaacaaacttgaagtttaaatgtaagtacataaattcagaatactctaatactataaatgtgatgtgtaatctactcatatctctaacataaagactataagacacatttattagctgggcgtggtggtgggcgcctgtagtcccagctactcaggaggctgaggcaggagaatggtgcgaacccaggaggcagagcttgcagtgagccaagatcgcgccactgcactgcagcctgggcaagagagtgagrctcaatctcaaaaaaaaaagaaaaaaaaaaagacacgtttatgaaaatagtaactacagacacctttaaagaaatagacaatataagaaggtgtaaattgagacaagaaaaaatcaaaatgtcaggggaatgaagttaaagtacggagtgtttcagttt

SEQ ID NO: 352498 - DNA, 509 bp, Homo sapiens
cctataatgtttttcttttggccttaatattaggtttggaatcatacttgaaaagattaaaacagtaattaatgatgatgcaagatacatgaaaggatgcctaaacatgaggactcagaagtgctatgcagtgaggtctaacataaatgaatttcttgacatagcaagaagaacatacacagagattgtagatgacatagcaggtaatttmtttatttgataatgttttttgtagggataaaacagccttttcaggacatgctgtccttttttgctgctgatgactagccatacatattttaaatttatttttcgttaccaaaacataaggttagcatgtagtgccatttaaggaaacagcatatgtggcagccttcatactaaactccttttgaaaaccttccattgccaagtgcaatagctcatgcctataatcccagcactttgggaggccaaggagggctgatagcttgagtccaggagtttgaggctagccttggcaacatagc

SEQ ID NO: 352499 - DNA, 594 bp, Homo sapiens
aacaggaaaaattaactaaaaacattaatagagatatttagtatttctaacatgtataaatgaaagaagagctcattaaatccccaagtcattaatttaaaaattgtgataactctttgggaatagaccaaaacattatctcttcccatctaagaaaaaaaagagtctgataaacaaatcaattatagtaccaaagtgtgaactagactataggaaaaaatactttagaacaccaattatgtttgcagacacagtctgatgattataagcaagcattggcagttcattagggcaagtkctgcaggacctgtactagaaaacattttacaaaaatcttctttaggagttgctacttatgcatatcaataaaaatgtattatagtagaaaatttctttaggccctttaaccaatgcatagattaaccatcattctccagtccttcctaacagatgctgacagatgcccttgccacagggaatgcctccagctaataagctctccttggcatgcccatgaacttctgccctcccagttgagatgtatgcttaccaagtcattgtgtttattcccaagcctgctaatgccagttatgc

SEQ ID NO: 352500 - DNA, 615 bp, Homo sapiens
caacaacatgactggtagtattcaggatataaagtggyagagggtaagggactaggatgataacaggtgagccatttgagtccctaagaagtgagagatttaatctaaaacttctattgatcataaaaatacatgctcagaattggttgggtacttttatttatttatatcctgcttcctttcagaatttgagtgggtagagggattaatacagtgtgtatgggaggtttagtcagcgtacaatccagaaaacctgccttagactatatctacatacctgggctttcatgttgaaaatgtatgctgatgtgtagggaagtacagtatatatagatggagcatttactatttcactattaactgaaaaataatccagccaacctagttacaagtggtgacccttgttctttgttaaaggaaaaaataatcacatataggtgagaattaactttctctttgtgccatatagatgggtcttgatggacttcaacaagactacatcagaaaagctgaatacccttttagctctgagcaaaagtggatggctgttaagtgtgtacaccgaacacagcaggtatccatctgtttaaagaatacttatttcctgtttagctt

SEQ ID NO: 352501 - DNA, 552 bp, Homo sapiens
ccacaatccaacacagaaattatcagaattaacatttctgtgtatttccttacaatctttttgctacatgtatttcttaatagtagaggccaaacagcttacacaatttgcttactgctgttttcatgagacattattgtagcagacacttgtcatttgtggctgcccactttagacagcttccttacactgtggcagatccctgggctgtgagtcttgcctcccmtggagagataaaaacagacaaaccaaccctatgactcccagcctctcttgagcttgggtgctgatgtgtgacctaggttctgtcagtcagctgcatccacccgacactttgatgtgagtgtgagctgcatcaagaaacaaggtggcacggcgtctccattttgcaaatatatgtgtcatcagaaacagcatggccctgagctcaagggcactaggtcacttcactggtgatgttctgccctctagcctgctcccccagccctcccaccactgctatgaactatctgtgttctgtaacaaatccttttctgcttaaactggcaaagg

SEQ ID NO: 352502 - DNA, 552 bp, Homo sapiens
ccacaatccaacacagaaattatcagaattaacatttctgtgtatttccttacaatctttttgctacatgtatttcttaatagtagaggccaaacagcttacacaatttgcttactgctgttttcatgagacattattgtagcagacacttgtcatttgtggctgcccactttagacagcttccttacactgtggcagatccctgggctgtgagtcttgcctcccatggagagataaaaacagacaaaccaaccctatgactcccagcctctcttgagcttgggtgctgatgtgtgacctaggttctgtcagtcagctgcatccacccracactttgatgtgagtgtgagctgcatcaagaaacaaggtggcacggcgtctccattttgcaaatatatgtgtcatcagaaacagcatggccctgagctcaagggcactaggtcacttcactggtgatgttctgccctctagcctgctcccccagccctcccaccactgctatgaactatctgtgttctgtaacaaatccttttctgcttaaactggcaaagg

SEQ ID NO: 352503 - DNA, 557 bp, Homo sapiens
atctcacggaagctaggaatattgccaattatagcaccgcagatttggaggtttgggaaaagacatcatacagaagagggaggcagtgtttctcaggacttactctcctaacaaggtggtgaagtctacattttgaggttgttccaagtaccacaaccctgmaggtataattttgtgtgtttgagggccagtctttttaaaagttcaactgagcaaaattcattgatttaaaattgttaaacaatggaaaagtagtaatatgccttaaaaacaaaaataaatattgataacataagactctaggcaacaaatcactcattcactccattacgctttgagaagttctgagcttacagcaaagatcctacttatgcaggcgaggaaattaaggagcataacaatgttaataaggatataaaaaaatttaccacagataatttggttagcttctgttacaattattatatgctccaaatttaaaattagtgttaggttaatattcaaaatgcaatattctaatgaataattcattccaggtttgtattttttttttatta

SEQ ID NO: 352504 - DNA, 557 bp, Homo sapiens
atctcacggaagctaggaatattgccaattatagcaccgcagatttggaggtttgggaaaagacatcatacagaagagggaggcagtgtttctcaggacttactctcctaacaaggtggtgaagtctacattttgaggttgttccaagtaccacaaccctgaaggtataattttgtgtgtttgagggccagtctttttaaaagttcaactgagcaaaattcattgatttaaaattgttaaacaatggaaaagtagtaatatgccttaaaaacaaaaataaatattgataacataagactctaggcaacaaatcactcattcactccattacgctttgagaagttctgagcttacagcaaagatcctacttatgcaggcgaggaaattaaggagcataacaatgttaataaggrtataaaaaaatttaccacagataatttggttagcttctgttacaattattatatgctccaaatttaaaattagtgttaggttaatattcaaaatgcaatattctaatgaataattcattccaggtttgtattttttttttatta

SEQ ID NO: 352505 - DNA, 553 bp, Homo sapiens
tagccacattctcatttttaatcactatttaatactgtgtttcattatttgactcatgcatgcattcaacaaatattcaggtgcctgttctggactctggggacataatcatgaataaaaatatcccttctctcaagggtttatattctastgggagagcaacacacaagtaaatatcaattataaactcaatcgtggacaaatcctatgaagaaaaagagagcaaggtgatgggttgttgtacagcaaggcagggtagagaaggggccagggtttcagaccaggtgggcagggaaggtcatctctgagcagagacttgagttaagtggaagtgagctatctggagataggcagagttccaggaaagaaaacagaaaatggaaaagtccttaagagaaataagcttcttttttttagatatttcatttatttcacacacttttaaagattttgtaaagtttctcctctatcttcctctagcatttcaagagtaagattcatttttattttattttattttattttattttatttattttttgagatggagtct

SEQ ID NO: 352506 - DNA, 530 bp, Homo sapiens
ttatattctagtgggagagcaacacacaagtaaatatcaattataaactcaatcgtggacaaatcctatgaagaaaaagagagcaaggtgakgggttgttgtacagcaaggcagggtagagaaggggccagggtttcagaccaggtgggcagggaaggtcatctctgagcagagacttgagttaagtggaagtgagctatctggagataggcagagttccaggaaagaaaacagaaaatggaaaagtccttaagagaaataagcttcttttttttagatatttcatttatttcacacacttttaaagattttgtaaagtttctcctctatcttcctctagcatttcaagagtaagattcatttttattttattttattttattttattttatttattttttgagatggagtcttgctctgctctgtcacccaggctggagtgtggtggcaccatctcggctcactgcaacctccacctcccggggttcaagcgattctcccatctcagcctcccaagtagctggaattac

SEQ ID NO: 352507 - DNA, 530 bp, Homo sapiens
ttatattctagtgggagagcaacacacaagtaaatatcaattataaactcaatcgtggacaaatcctatgaagaaaaagagagcaaggtgatgggttgttgtacagcaaggcagggtagagaaggggccagggtttcagaccaggtgggcagggaaggtcatctctgagcagagacttgagttaagtggaagtgagctatctggagataggcagagttccaggaaagaaaacagaaaatggaaaagtccttaagagaaataagcttcttttttttagatatttcatttatttcacacacttttaaagattttgtaaagtttctcctctatcttcctctagcatttcaagagtaagattcatttttattttattttattttattttattttatttwttttttgagatggagtcttgctctgctctgtcacccaggctggagtgtggtggcaccatctcggctcactgcaacctccacctcccggggttcaagcgattctcccatctcagcctcccaagtagctggaattac

SEQ ID NO: 352508 - DNA, 631 bp, Homo sapiens
ctgttagtgtccctttggtgaagagttaagctctaattctgggggacaaatgcacctcatcttaaaggatcttccttttccttcagagcatgcactccttgtcccttttttatatagtttataatttgaccatctgtttgtctgcatgtctctgtctcaagaacacttaacactaatcctttgtgaattttgagtagactaaccacaaagacaaatacactgttgagctctctgggctggtgaggctgggctggaccctctccttgtttactcacgctcatcaatagatgctagtgcagggctgctgctgctggcgtggattgggaaagacagaaataagagaaagcaagaccatgttctatcaaaagaccattgacttaaatgtaattctaccttcaaaaacagtgcacttccaacagcttactayattacttcaaataattcttttttgaaagtttaatgtaaaatatttaaattattatagcataaaatttcaagcttatgatgtgacctattgttataattattattttcccaaatcacaaaatgtgggggattataattacttaaagaatttttattgcttttgctgttcaatagaataatttcacatcttggagaaatgtcatac

SEQ ID NO: 352509 - DNA, 532 bp, Homo sapiens
ctaaaacaatttctcttctgaaatcagggaaagaacatctcttctcaaaggcagccaccgtggtggataaattccatgctctggaatcctcagtgtccctgctgctcctggatttccttctccctcatggttcttggttttgagggttcttctttctccattctccgatctttcatgttgtaaatgttggagtaccctaggcttcacccttgcccttctccatattttctgcataagtgatctcaagtagcctgtggttttaaggaccatttctatgtcataaggaatttatatgttcatgattccmagatttattttgccaggttcaaaccctccaatgagtttcaggattatttttttctatagcacagttaacaggaccagcagcatagcaagtgtttttgttgttgtagagaacacgccctgaacaaaactcctgatttcttcaaatattttctcctattggtagtgtccatcccgataaatgacactatcatcatccagtttcttaagcccataagctaaaactgtt

SEQ ID NO: 352510 - DNA, 603 bp, Homo sapiens
caattataggtcaatcactctcataaatataaatttaaaaatattaacacaatcttgataaaccaacacaacaatatataagaaatgtattttgtttattatcaaggttgatatatctaaaacatctattactgtaatttgccatattaataggttaaaagtttacgtactatataatatatgcacacattatgtatatattaagaaatatatacatatgtcaacataacataaccataycaatacatacaatatagccatatcaataggtggggataaaagctcgataaagttaaatgtcagtacatgatacagaggggaacttcttttatagataaagagtacttaccaaaatccaaagcaaacattatatataaaacaaggacaagacaacaaatactaagtatatctactattttttccatgtcatcctgaagaacctacctaaaacagcaacaaatttttattgcaagctgatctaatttttttccacaagcaaatcccaaataattcacgaagggattattgcaataaaaaaagagagttttgaaagtttgctgaaaataagaaacatctttaaaaataatgtatttttatatacca

SEQ ID NO: 352511 - DNA, 603 bp, Homo sapiens
caattataggtcaatcactctcataaatataaatttaaaaatattaacacaatcttgataaaccaacacaacaatatataagaaatgtattttgtttattatcaaggttgatatatctaaaacatctattactgtaatttgccatattaataggttaaaagtttacgtactatataatatatgcacacattatgtatatattaagaaatatatacatatgtcaacataacataaccataccaatacatacaatatagccatatcaataggtggggataaaagctcgataaagttaaatgtcagtacatgatacagaggggaacttcttttatagataaagagtacttaccaaaatccaaagcaaacattatatataaaacaagracaagacaacaaatactaagtatatctactattttttccatgtcatcctgaagaacctacctaaaacagcaacaaatttttattgcaagctgatctaatttttttccacaagcaaatcccaaataattcacgaagggattattgcaataaaaaaagagagttttgaaagtttgctgaaaataagaaacatctttaaaaataatgtatttttatatacca

SEQ ID NO: 352512 - DNA, 603 bp, Homo sapiens
caattataggtcaatcactctcataaatataaatttaaaaatattaacacaatcttgataaaccaacacaacaatatataagaaatgtattttgtttattatcaaggttgatatatctaaaacatctattactgtaatttgccatattaataggttaaaagtttacgtactatataatatatgcacacattatgtatatattaagaaatatatacatatgtcaacataacataaccataccaatacatacaatatagccatatcaataggtggggataaaagctcgataaagttaaatgtcagtacatgatacagaggggaacttcttttatagataaagagtacttaccaaaatccaaagcaaacattatatataaaacaaggacaagacaacaaatactaagtatatctactattttttccatgtcatcctgaagaacctacctaaaacagcaacaaatttttattgcaagctgatctaatttttttccacaagcaaatcccaaataattcaygaagggattattgcaataaaaaaagagagttttgaaagtttgctgaaaataagaaacatctttaaaaataatgtatttttatatacca

SEQ ID NO: 352513 - DNA, 603 bp, Homo sapiens
caattataggtcaatcactctcataaatataaatttaaaaatattaacacaatcttgataaaccaacacaacaatatataagaaatgtattttgtttattatcaaggttgatatatctaaaacatctattactgtaatttgccatattaataggttaaaagtttacgtactatataatatatgcacacattatgtatatattaagaaatatatacatatgtcaacataacataaccataccaatacatacaatatagccatatcaataggtggggataaaagctcgataaagttaaatgtcagtacatgatacagaggggaacttcttttatagataaagagtacttaccaaaatccaaagcaaacattatatataaaacaaggacaagacaacaaatactaagtatatctactattttttccatgtcatcctgaagaacctacctaaaacagcaacaaatttttattgcaagctgatctaatttttttccacaagcaaatcccaaataattcacgaagggattattgcaatwaaaaaagagagttttgaaagtttgctgaaaataagaaacatctttaaaaataatgtatttttatatacca

SEQ ID NO: 352514 - DNA, 590 bp, Homo sapiens
cattacaaaagctataaatgcatataataggaatagtagaaaaagaataaagaaacaaaaggaatatttgaattaataatgactgagaatttttaaaaataaatgacatacaataaaccacagatccaggaggcacagagaaaaccatgcagggtgaaaaaccagaaagtcttcatctaggcatatcatagtcaaactgcatgaaacaaaggacaaagagaaagtcttgaaggaagtcacatggggagaatggggcagttcctccatagaagaacaggaataagagttatatatgacttcccatctgaaaccacacaagtcagaagaaagtgaagtgaaatactaaaaattgttgaatgagaaaagaaaaaaacacaaaaaacccaagacgccaatttagaattctgtactctgttattatccttcaaaagtgaagaagaaataaaaactttctcagaaaagtaaaaattcagggaaagtgttgtcagtagacatgcttatctctcaccrcatctctccaacattgtactcgaagtctcagtgcatgcaataagacaaacagagggcatgaaagttatgctaattagaaa

SEQ ID NO: 352515 - DNA, 585 bp, Homo sapiens
gtagtctcctggtttcagctttgacatttaaagagactgaaaggtgacaccacatcctcataacatcaatcaataagtgaacaaacaaacaaacaaatgtgaataagaagataatcaacaacgcttcttgggcccgttggggaaatgatgttgtagagcaaatcatccttccacaatctggggagagggatgaatsaagagaatcatagctgagattgctgacctggagctgctagagttgaatgataatgaaggattactggagccgaacatggaatagtgtggtggagaacaaaactggagtccaaagtctgagggaggtcctcacactgtgggttcaaccaccaggcattccatcagattttcacagtaaagctctaagaaagacatctactggctcttgccaggggaatagtaatcactgtgaaatgtgcccagagttttttctataacaaaggactactcttcaggggaaaggactttacaagaagtcctttatctcatctgcaggaactccagccctactccttcccaattagccttaaggtctggcctagaggtaaatggaatacaccactgcaggac

SEQ ID NO: 352516 - DNA, 398 bp, Homo sapiens
attctttcctgaattttttaaaaatcattttatttatttaaaatttttgtctctattactcaattgcccagggttctctatgagttctgctttcatagccatggcctgagaaccagggcagatgctacaatactctttttctcctactggwtcttatactctttttccccttctcactggctagcatgctcggggtccatgttttattcattttttaaattatagggcccaagaggaattccccacagagcagtgcagtggctgtggcagatcatggccagactgcttcatcaggtaagacccagatctatccctcctcactgggtcgtgcctccctgagggaattttatcacctccagccaggggtttgcaaacgggctggaacagagcccctggag

SEQ ID NO: 352517 - DNA, 398 bp, Homo sapiens
attctttcctgaattttttaaaaatcattttatttatttaaaatttttgtctctattactcaattgcccagggttctctatgagttctgctttcatagccatggcctgagaaccagggcagatgctacaatactctttttctcctactggttcttatactctttttccccttctcactggctagcatgctcggggtccatgttttattcattttttaaattatagggcccaagaggaattccccacagagcagtgcagtggctgtggcagatcatggccagactgcttcatcaggtaagacccagatctatccctcctcactgggtcgtgcctccctgagggaattttatcamctccagccaggggtttgcaaacgggctggaacagagcccctggag

SEQ ID NO: 352518 - DNA, 596 bp, Homo sapiens
agaaatcagtccaatcctcagttgctacttgccaaaatttaaaactggatggcataggatgataaaaagcaaagcagaaaaatytaaagaacactggaatttatagcagtcttgtggtactggggaaacaaatatcagagtttgggaggtccagcagtggggttaaggactggaagcaccccatgatttcagttggaaaattgaggaaaccgcccaatagcaggagaggaggcacaggtgaaaaaaaaaaaaaaagacaaaaaacaaacaaaaaaaaccttttaccagaattgcagcacaaccttaaattagttctatctagcctaatctttctaccaggcagaggacaagtaaaacatctttggggaaagatgagagctttttcaatttgtaaacaatgtctatcactgtacaaattgtacacaagggacatgacattgtgaaaattgtggtttagcatgagcaaaagtcaggatctggcttgagatactgtagctatgtggagaattagccaagcaaaggaagagagtgtcctgagggaggtaggaataattttattgtaaaatgtttctaaatagttaagcagctgttaaatg

SEQ ID NO: 352519 - DNA, 596 bp, Homo sapiens
agaaatcagtccaatcctcagttgctacttgccaaaatttaaaactggatggcataggatgataaaaagcaaagcagaaaaatttaaagaacactggaatttatagcagtcttgtggtactggggaaacaaatatcagagtttgggaggtccagcagtggggttaaggactggaagcaccccatgatytcagttggaaaattgaggaaaccgcccaatagcaggagaggaggcacaggtgaaaaaaaaaaaaaaagacaaaaaacaaacaaaaaaaaccttttaccagaattgcagcacaaccttaaattagttctatctagcctaatctttctaccaggcagaggacaagtaaaacatctttggggaaagatgagagctttttcaatttgtaaacaatgtctatcactgtacaaattgtacacaagggacatgacattgtgaaaattgtggtttagcatgagcaaaagtcaggatctggcttgagatactgtagctatgtggagaattagccaagcaaaggaagagagtgtcctgagggaggtaggaataattttattgtaaaatgtttctaaatagttaagcagctgttaaatg

SEQ ID NO: 352520 - DNA, 596 bp, Homo sapiens
agaaatcagtccaatcctcagttgctacttgccaaaatttaaaactggatggcataggatgataaaaagcaaagcagaaaaatttaaagaacactggaatttatagcagtcttgtggtactggggaaacaaatatcagagtttgggaggtccagcagtggggttaaggactggaagcaccccatgatttcagttggaaaattgaggaaaccgcmcaatagcaggagaggaggcacaggtgaaaaaaaaaaaaaaagacaaaaaacaaacaaaaaaaaccttttaccagaattgcagcacaaccttaaattagttctatctagcctaatctttctaccaggcagaggacaagtaaaacatctttggggaaagatgagagctttttcaatttgtaaacaatgtctatcactgtacaaattgtacacaagggacatgacattgtgaaaattgtggtttagcatgagcaaaagtcaggatctggcttgagatactgtagctatgtggagaattagccaagcaaaggaagagagtgtcctgagggaggtaggaataattttattgtaaaatgtttctaaatagttaagcagctgttaaatg

SEQ ID NO: 352521 - DNA, 592 bp, Homo sapiens
tatcttacaacaatttgtgaactgaccatcataaacgaatcatagtagtatctcttctggtaagttgtttctatatgtgatctcttaatgctgggtttgggggtggggatggggttaagtatttagtttactttaaactgtcaaagtgtttttcttaaatgccataaaattgtatgactataagccaaataagaatattctcttttttcacttttaagggcactgtatagaccatttttgaaactatcccacagaatggtataatttcagtttaaaagctcttacacacatacacacacacaaatataaatatatatatatacacattcaagggaaagcaaacagtgtatgtagtatttctaagtgacatgctacaygttataagaatctatttttgaaatcttatacagattatgcagaagtcagaataacaaatacaacacctcaatttttttatagagtctagcgttagtttactataagatttgcttacatcatacttgcaaagatcattcacataatttatttagcattgaaaatctttatatgaagtactaatgtcatctgaagtttagagattaaacaaccaagg

SEQ ID NO: 352522 - DNA, 596 bp, Homo sapiens
aacccaaacccattctggtagattctaagtagttgctgccaatgtataatttaacattttattatattttctgattgctttatgtatttaattcatttttttatttttattttttgtagaaatggaggtcttgctatgttgcccagagtagtctcaaactccaagcctcaagtaatcctcccacctcttctcccaaagtgttgggatcacaggcatgagccactgtgcctagattaattcattccaatgaacaataagctatttgaaaggaagacttctctttcctgttcttagcaaatattcactgatatgatgtatacttttgttttgtgaaataaaaattataggaggccactaaactcctatactaggccccaacaggrcagactaaaaataaaaatggagtcattcaccttaaggtctacatcgctaaacctaaactaagctatgttatcttctaagaaatcaggagagagaggacacctaatttcccaaacaggacagtttaaatcttcaaacagcatgataatgaagttccctctgctttaatcctcacacaaaaacagtagcctgaagtaacctgatgttaaccaacc

SEQ ID NO: 352523 - DNA, 541 bp, Homo sapiens
gagcatctataagagagacctgttgacctggaagctttgtaaatcattgggacacaaatagcacagctttgygttagagatgtctctaccatagtggggcaggagtggggtgggaacaggcacacatttctaagtaccctgatcacagagctgagggatcctgtgaacacttgagtacctggggatgatacttacttgaacaatggggtgtcagttgtcaagtttagttcttggagaaaaacagaagaatagtatcatggcttgttagagactgtggcaccccataggagtattcatatttctgaggcacctcttggaggtctccacaaataattgatagggaattttatagggtgccaaaggttttgaaccttctgttagagtccagagccagtgaaatgtgttatattttttgctgtgattccattctttcatgaagcccaggaatactgagtttaaacaacaatctcacttttgggtaagatgagctgaaaattttcgtctgacctgaagacttgtgagcttacaacaatgatatggg

SEQ ID NO: 352524 - DNA, 586 bp, Homo sapiens
aaatcaaacagaattacattaggaaaggagtgactgagaaagtactccctggaacagaaatttttattggggggaggaaaagaaaaaggagctttagtccaaaaaggaccgactccaagaataccaattggttccagccttccagagcccagaggaacttgagcacttcttgccttgatattcagatgcgcagtcaaaagaagcacacaaggcagagaaaatmaaaaataaataagtgttcttcaaacccagatttcttttttttttttccagctgagtgagcctaagatttaaggatttatgaaggggaagcacacactggtccaactctggaaacactttataatgctaatactgccgctggctctcagaacttgctgctgatatgggtatgtgtggctgggtatcctacgaagcttgcagcaaatgctgggtaaaatactaaattgaagttcttcagtggaatgggaagtagaagaagtcccttacggattatgcaaagttcttttctgataaggaaatatccactaacaatacatcatattctcctaactacttccctatttgccagtagttcaatttgcat

SEQ ID NO: 352525 - DNA, 282 bp, Homo sapiens
tgaccaaggtcacacgataaattaaaaaacagagtcatgattacaaacctacatctccaaagacccagtctggcaccttttccaacagaacacactgcttcccagaggagctgcaagctcaaggccaggcggaaaacataaatgaacaaatragccggtgagagaacacctttcccctgccagtgctcacgtagctttggctgaactttgtccactgaaaagcaggtccagatcttctttcaacttagtttttgtttgtttgtttgttttttgaaagagaag

SEQ ID NO: 352526 - DNA, 420 bp, Homo sapiens
cctacatctccaaagacccagtctggcaccttttccaacagaacacactgcttcccagaggagctgcaagctcaaggccaggcggaaaacataaatgaacaaatgagccrgtgagagaacacctttcccctgccagtgctcacgtagctttggctgaactttgtccactgaaaagcaggtccagatcttctttcaacttagtttttgtttgtttgtttgttttttgaaagagaaggtgagaatctggatttttatatgccatcttataattttttaaaaagctgcctccgactttaattttaagtcttcgtgagagccaacaattatgcatctgtgaaccagaatcaccactgaccaccagttttccacctctgcctcaaaacaaagcaatgatggagagcttgattatggctgcagaga

SEQ ID NO: 352527 - DNA, 617 bp, Homo sapiens
ttccaaaattgaacagtataatgactggcatctaaaattcaatagacaggwacaatggcagattaggtgcagccaaaaagagaattagcaaacatcaagatagatcagaagaatataacaggattgaaacatataaagagaaaatgatagaaaatatggaaaagaatgtgggttacagtgaaacaccttaacatcattgtaaatgaaatttcataaagtgaaaaaagaaggacacataaatgatgtctgaagaattaattgccaaaagctctccaaacctgacaaaagacatcaagacacaaatttgagaagtccaatgtacccaaatgatgttaaattaaaaaaaagaatcgcaactaaccagaatattgcaaaattgctgaaaaccaaagacagtaactctgtacctggaagtggggcaaaggcagacagattactgtcaaaagatcaacaataaagcagacagctgacccttcacaagaaacaactaaattacatctttaaagtgctgacagagaataactgtgatgtagactacatatccaacaaaaacttttttccatagagaatgtaaaataaagacattttgatgcaaagaaaaagaaaaaaaattgtca

SEQ ID NO: 352528 - DNA, 617 bp, Homo sapiens
ttccaaaattgaacagtataatgactggcatctaaaattcaatagacaggaacaatggcagattagrtgcagccaaaaagagaattagcaaacatcaagatagatcagaagaatataacaggattgaaacatataaagagaaaatgatagaaaatatggaaaagaatgtgggttacagtgaaacaccttaacatcattgtaaatgaaatttcataaagtgaaaaaagaaggacacataaatgatgtctgaagaattaattgccaaaagctctccaaacctgacaaaagacatcaagacacaaatttgagaagtccaatgtacccaaatgatgttaaattaaaaaaaagaatcgcaactaaccagaatattgcaaaattgctgaaaaccaaagacagtaactctgtacctggaagtggggcaaaggcagacagattactgtcaaaagatcaacaataaagcagacagctgacccttcacaagaaacaactaaattacatctttaaagtgctgacagagaataactgtgatgtagactacatatccaacaaaaacttttttccatagagaatgtaaaataaagacattttgatgcaaagaaaaagaaaaaaaattgtca

SEQ ID NO: 352529 - DNA, 617 bp, Homo sapiens
ttccaaaattgaacagtataatgactggcatctaaaattcaatagacaggaacaatggcagattaggtgcagccaaaaagagaattagcaaacatcaagatagatcagaagaatataacaggattgaaacatataaagagaaaatgatagaaaatatggaaaagaatgtgggttacagtgaaacaccttaacatcattgtaaatgaaatttcataaagtgaaaaaagaaggacacataaatgatgtctgaagaattaattgccaaaagctctccaaacctgacaaaagacatcaagacacaaatttgagaagtccaatgtacccaaatgatgttaaattaaaaaaaagaatcgcaactaaccagaatattgcaaaattgctgaaaaccaaagacagtaactctgtacctggaagtggggcaaaggcagacagattacygtcaaaagatcaacaataaagcagacagctgacccttcacaagaaacaactaaattacatctttaaagtgctgacagagaataactgtgatgtagactacatatccaacaaaaacttttttccatagagaatgtaaaataaagacattttgatgcaaagaaaaagaaaaaaaattgtca

SEQ ID NO: 352530 - DNA, 563 bp, Homo sapiens
taatttttaaacattccaaaaagaatagatgcatacttgttataccctgtgtggttaaaagactctctcatttcactctgtctaaatcattcccagccttttctgggatgccagccatgatggatgcatccaaattgatcactcaggccatgaaatctgtcactcttaaactatgaaaatgacataatttgctacttagtgacagtgttgacctgtttttttttttattgtctatatatgtgtatttccctaataaggttayagtccttgagggagcttttatgcatctatgtgacctctcatggaacatgacactgggaatttagaaatgactgaatatatatttaaaagcactaagttagccaaagaagtatttagtgttccaatcctatgtgcctgcccagcattctgtgtctagcactttgttagttagtaaaggactaaagaactatttctaagatgtagaccgtatttacattatattatatatattaattatatatatattatattatattatttaactcatatcttgctttttagataaaggtttacaattaaaa

SEQ ID NO: 352531 - DNA, 426 bp, Homo sapiens
gaagatattgatctggtgaccaaagggttatacattttggatagatgcgaaagaagttgttctaagcaatagaaatagtgcctaactagctagtaaatactagataagaatgagagatagtgagtaggctgtatagtctaatagactattayttaatcattactttcagtacatcatggattatgctcaaggctttatttaattatctgatttaaactttacactataatttcaatttaaaagtataaaaccataggctcagcaggattaagcaatctgtcctaggtcacaaaggcagaaaatggaagaaacaagatttacatcagctatttgactccaaagctccttctgtcactatgttctaacatcatgttatatggtttcccaacagtgggaagtgacagctgaaagtttagttgatgctaa

SEQ ID NO: 352532 - DNA, 577 bp, Homo sapiens
aattttcatcacagtggcattatccatttatgcaggtggttatttgatttacaactgcttgccccactagaatatgcccccctggaaataggatctgtgagtgtaggagtcatgtctgcttttggttatcattgtattccctgagcctacyacattgcctgggacagagcagacaacaactcagcgtatgttgaatgaatgagtggatgaatagacccatatcttggaccagaatgatagctgtggagatgaagggaaaggtatgatgcaagacctgacaaaggaacctagtagctatttgggattggggaggggagaagaagaggcagggagtgccaaggcagttgtcagtgatgactctgtggtttctcaagcctggctactagaacaatcagagactgcaatagtactctgtccactcactatgtgttaggctgttcttgcactgctgtaaagaaatacctgagactggataatttatttaagaggtttaattggctcacagttctgcaggcagtacaggaagcatagcaccagcatctgcttctggggaggcctctggaagcttataatcatg

SEQ ID NO: 352533 - DNA, 608 bp, Homo sapiens
aaggagggggcaatcacttccaccaggaagacagtggagggtagtgtgaggataaatgtaaaacctgaaaatttaaacttgaacttgaaaggagactgtgtatgtgggaattttggatcaaaaggggattccaatagaagaaacagctgagttaaagcaaagcgatagaacactgataacractatgaatggtgaatagagcattttggctgattgctgtgtacctaaatggagatgagggtggaaagatgcattggggggtaagactttgagaaccaagttcatttgagaaccaagttcatttgagaacaactacgaatggtgaatagagcattttggctgattgctgtgtacctaaatggaggtgagggtggaaagatgcattgggggataactatgagaaccaagttaagggaagtgtcatgagcagagctatgctccaaaaagatttagcaggccatctatacccattatgtctggggtgcatatgagggagttacaggatgtgagacttggagtgggggtggagggagggcagttcatgacaagcctgacccaacacactgttgtgtccaattagcacgacctattttggctttgaatgggga

SEQ ID NO: 352534 - DNA, 590 bp, Homo sapiens
gcaattgtcacctttcccaaaaaagtaaaatagcaatttctatagctgttttttcttttaatggctttattgagatgtgtcacataccatatcattcacccatttaaagtgttcagttcagtattttttagtatattcacagatatatacattcatcgccataatctaattttaaaacatttctctcttgcaaaagtagcccagtacccattagctgtcattccccagcaccctcccaccatcaggttctaagcaaccatgaatctaccttctatttctgtagatttgcctattctgaccattttctatatatgaaatcatactatttgtggtcctttgtgactggcctctttcacttagcataatgttttcaaggttcattcatgtcttagcatgtatcagtgcttcatccctttatggtatatccataaaatgaaatattatrggactatagtatttcattttatggatataccatattttgtttatccatttattagttgatagacatttgagttgtttttactttttgactactatgactaatgctgctatggaaattcttttacaagttgtcatgtggccatatg

SEQ ID NO: 352535 - DNA, 573 bp, Homo sapiens
ggaaaagtgccatcattctcattttacaactggggaagcagaggcccagaaaagtgatctaactttcccaagttcacaaatgtgttatyagagctgcaaccagagctaaggttgaggctttatgaaccttaggttactattcggttaataggctcagtgcagccttaccttactaattattaaaaatagacaacattaggatttaaaccagatggtcttttcctgttgttcacactcttacccactgtcagcaatggcccatcagataatccacactgattcatgaaaaggcaaatattttctgtttctgttctaagctaggcttgccaaaaccgagagcaatattctctatccccgagatgcattgcttcaagcacctatctactttctctgcaaagttatccctttggcaatggttcttcaattctgattatatctgggagagaaataataaacctatttagatgctaattggctttaacatctcagtgagtcaacaggctcatgtatgtcctacaagaagtctctcaaacctggatcatacagctatcaaacagtgttgctcagccacca

SEQ ID NO: 352536 - DNA, 583 bp, Homo sapiens
aacaaataagcatcagcaggagatgctcacaaaaggactgggcaaaatagggccacgttgagtgacaacccaaataaaggagtcctaagaggtctgaagctggtggctaatgagcacatctcctcatttgtgatttcttggccaggacatgtattgttgagggtgccaggaaagtctgtcttattttatacaggaagaagcctttctggcctttgtcctggtactggcttttatattttatgttgggctaggggcctgcctggaggacatttacaaggtgaggagaaatctcaagctgattttaacctaacacaattttcttatctttctagtgatatatatcagttttctcacttgggaaatgggaataaaaatacaactcacctactagaattgttgggatgattaagtcggatgattctcagaaagcacttcccacagtttccaatatgtagtcagcatctgatacatgttggctgcaatcattattagtaacagtattatcatcatcattttsatatgtggaaagataccaaaaggagtgtccaggggtgagggatctagttccaattctgctaccagc

SEQ ID NO: 352537 - DNA, 602 bp, Homo sapiens
tcttggtcacaagtatattctcagtaactaacatagggtctggcccagagtggttgtctcaaaaataattggtggatgaattaatcagttgatcaatgaaccagttggccaaccatgggagttgaggcagagaggacaggctaggagtgctctggggggccatgaagttcaggttgagacttagtttttagtctctggatgatggatatatgtgtttcattaggaggcagtttgaaaaagacacacatgtcatagactcagatctcaatccagggcatccaggatatgaagagttaatccaagccagaccctgctgtagtttcctttctacccacttagcattcatagaagtcttccttcttgtctctycagcagggcctaagctgactttgcaagagatctcgctaagcctttctgcagatgcttgcccgatctggctggccctgctggaggatatatgctgttaaggcaaggcaggcagaggcagctctggctcgtctccacgtgcactggctggctttccagaggggacaatgcaccccacagaccacagctgtcatttggccatctctaccttcaaccttaccaagcacctggcctca

SEQ ID NO: 352538 - DNA, 574 bp, Homo sapiens
ttgacaccaggccagccaaggattgtgcatctcactcccagagaaaatggaaagcaatctaaaactcatatcttagaaaataaaatgctcaaatttctattttgaagattgttctatcaatagagttcagaatggattttaaagatataatgtaaatacagatagaactgtaaggaaacttcagctrttggcagataagagaaggtggtggcttggaaaggatgcttaaaaggaggcttgatagaagagggcagcttcaaaacatgttttgaaaacaagtttcagttgaacatgtgattatggttaataaatcacaacctcatcatatggaggttagggaaaggaaagctccaaggataattccaattacctaaaccaccaaaggtacagtagtgccactgctgataaagtaagctcattctaggtagctgtggaagaggaaattaaatttgaggcatgagaaatctaaaggatccatgtgcacccatctcttaggatagatccttctgtactttgtgtttgtatcgaagattgttcagttgcctctgcttgactgttaaagctgtgagagcag

SEQ ID NO: 352539 - DNA, 574 bp, Homo sapiens
ttgacaccaggccagccaaggattgtgcatctcactcccagagaaaatggaaagcaatctaaaactcatatcttagaaaataaaatgctcaaatttctattttgaagattgttctatcaatagagttcagaatggattttaaagatataatgtaaatacagatagaactgtaaggaaacttcagctgttggcagataagagaaggtggtggcttggaaaggatgcttaaaaggaggcttgatagaagagggcagcttcaaaacatgttttgaaaacaagtttcagttgaacatgtgattatggttaataaatcacaacctcatcatatggaggttagggaaaggaaagctccaaggataattccaattacctaaaccaccaaaggtacagtagtgccactgctgataaagtaagctcattctaggtagctgtggaagaggaaattaaatttgaggcatgagaaatctaaaggatcyatgtgcacccatctcttaggatagatccttctgtactttgtgtttgtatcgaagattgttcagttgcctctgcttgactgttaaagctgtgagagcag

SEQ ID NO: 352540 - DNA, 561 bp, Homo sapiens
gccagtgggatggagcgaaggatgccctatcatcttatggagttgattaggcagaaaaatagccaattggaaagcccgttcatcattggtggatttccattcactgatttcgcttaggttcccaaatacctgaaaatactcaaatctaatggacatttttcactctgacttttttgagctctctgcayatcttactcaattctttcttttttcctacaacagcatttctatttgctttataatttaatatgtgtatggctttaagttataattgatgtataataaactgcacatatttaaagtgtataatttgatgagttttgatatctgtatatgtctgtaaaaccatcaccacaatcaagccaatgaatatatccatcacttctaaaagttctctacggttctttgaaatctatctgtctcccaccccccaactccttccaggttccctagcaatcactgatctccttactgtcattatagattaatttgcattttaaaggattttatatggacaggatcatatagtatgtgctttcctcagaaatcagtcctgcaata

SEQ ID NO: 352541 - DNA, 561 bp, Homo sapiens
gccagtgggatggagcgaaggatgccctatcatcttatggagttgattaggcagaaaaatagccaattggaaagcccgttcatcattggtggatttccattcactgatttcgcttaggttcccaaatacctgaaaatactcaaatctaatggacatttttcactctgacttttttgagctctctgcatatcttactcaattctttcttttttcctacaacagcatttctatttgctttatamtttaatatgtgtatggctttaagttataattgatgtataataaactgcacatatttaaagtgtataatttgatgagttttgatatctgtatatgtctgtaaaaccatcaccacaatcaagccaatgaatatatccatcacttctaaaagttctctacggttctttgaaatctatctgtctcccaccccccaactccttccaggttccctagcaatcactgatctccttactgtcattatagattaatttgcattttaaaggattttatatggacaggatcatatagtatgtgctttcctcagaaatcagtcctgcaata

SEQ ID NO: 352542 - DNA, 561 bp, Homo sapiens
gccagtgggatggagcgaaggatgccctatcatcttatggagttgattaggcagaaaaatagccaattggaaagcccgttcatcattggtggatttccattcactgatttcgcttaggttcccaaatacctgaaaatactcaaatctaatggacatttttcactctgacttttttgagctctctgcatatcttactcaattctttcttttttcctacaacagcatttctatttgctttataatttaatatgtgtatggctttaagttataattgatgtataataaactgcacatatttaaagtgtataatttgatgagttttgatatctgtatatgtctgtaaaaccatcaccacaatcaagccaatgaatatatccatcacttctaaaagttctctayggttctttgaaatctatctgtctcccaccccccaactccttccaggttccctagcaatcactgatctccttactgtcattatagattaatttgcattttaaaggattttatatggacaggatcatatagtatgtgctttcctcagaaatcagtcctgcaata

SEQ ID NO: 352543 - DNA, 502 bp, Homo sapiens
aggctgtggcaggagaattgcttgaacccaggaggtaaaagttataatgaaccaagattgtgccactgcactccagcctgggcaacagagactccacctcaaaaayaaaacaaaacaaaacaaaacaaaacaaaacaaaaaaaggcctgtgcctctctagaaggttaccgtgtagaatacactttttcaaatatgcccttttctctgaagacagtgatatgaatcccacaggggccagacatttatctgactccttgattaagaatggctggtggattagggttggggagttaaaatccaacttcatagatggccaagaaaatgcctgacttcttcagggtcacacagctggtaatgatgaccctgaggctcataccaagaccttttagtctcagtcaagcacttactccacaacgtgatactgtctttctgtgagcaactaccaatacattattatctgtaaatttaccagttacattttcaggcaagacatctgtatcca

SEQ ID NO: 352544 - DNA, 615 bp, Homo sapiens
tgagtccctgttgggaagacagatattaaatcacaacaaggagtgagtgtgaggtctgaagaaattcagaggtctatgagaatgcttaaacagtgtaaggcaacagcacctactcttgagtaccytgaagagctgaaatgactcaaataacaaagtactacatgacgggagaaagatcagtacagtaatgctcacaggaacaagatactcatcagtttggggatgatctttggggaatgattttgctggaggaaaaaacatactttcagctattttagaattcaattctatattattacctaatatatgtaaaagggctgtaaaggctgtaaaagagtgacaccccctacaccctgcaataaagctctggatagaaataaaaagccaagatacatgaagtcaaaatatggactccaatcattaagtttccctagagagggttttcaagtatggactggaagtatgggttttcaagtggaccctaccacttactcactacctgaccccaggtgcacagtccttaaatgtgagaggtttcagtctctgtgactggaagtggaaataataatggtatttccttatgaggttgttttaggaagcttaaatgagataata

SEQ ID NO: 352545 - DNA, 615 bp, Homo sapiens
tgagtccctgttgggaagacagatattaaatcacaacaaggagtgagtgtgaggtctgaagaaattcagaggtctatgagaatgcttaaacagtgtaaggcaacagcacctactcttgagtaccttgaagagctgaaatgactcaaataacaaagtactacatgacgggagaaagatcagtacagtaatgctcacaggaacaagatactcatcagtttggggatgatctttggggaatgattttgctggaggaaaaaacatactttcagctattttagaattcaattctatattattacctaatatatgtaaaagggctgtaaaggctgtaaaagagtgacaccccctacaccctgcaataaagctctggatagaaataaaaagccaagatacatgaagtcaaaatatggactccaatcattaagtttccctaragagggttttcaagtatggactggaagtatgggttttcaagtggaccctaccacttactcactacctgaccccaggtgcacagtccttaaatgtgagaggtttcagtctctgtgactggaagtggaaataataatggtatttccttatgaggttgttttaggaagcttaaatgagataata

SEQ ID NO: 352546 - DNA, 430 bp, Homo sapiens
caaatgcatccagtttacattcacacaactttattcacaatgtatcatccatgataacattcctgctgaggagactttgcagagttcctttggattcagtttcaaagatcagaaaaatatttaaagacatttctgggactgatacaggttgttaatgtttgatattttcatgtaagttgttttaaaacacaaccaaacattctgcaatctatcaccataacattgcataatagaaaaggtatttgaacaaaaaaagagtataagcttagaatatgagtcctttaaaatatacattttgctttactatattggcctcattttgctgatatgctgcagttataaatatacttcttcaaataataatgcagtgattcctaagygttaattcatagactgggattgtgtagaagttttcccaatcccaagtttc

SEQ ID NO: 352547 - DNA, 537 bp, Homo sapiens
ccaaacagccaaagcaattttaagcaaaaacaaagctgcaggcatcacatgatctgatttcaaaatatattgcaaagctatactaatcaaaacagcatggtactagcataaaagcagatatgtagaccaatggaataggatagacagctgagaaataaacctacaagtctatgatcaactgattttctacaaaggtgccaagagcacacaaggggaaaaggatagtctcttcaataaatggtgccggaaaagctggctattcacatgcagaagaattgaattggaccgttttctcatcccttacacaagaatcaactcaaaatgaattaaatacttaaatrtaagtcctgaaattgtaaaacgactggagaaaaacataggggaaaaaccatgtgacattggtctggataatgatttcttgcatataaccccaaaagcatagacaacaaaagacaatcttgtaaaaaacgcatcacaacatgatgggttatgggcaataatggttgcagaaaggcacagttttactcccttgagagt

SEQ ID NO: 352548 - DNA, 610 bp, Homo sapiens
gggggacatctatatatagatagaatatatatatagagagagtaaatgtatttatttacaataaatacataaaatagacaataaatacatttacatctatatatagatagtgtatatatatatatgcttaatagacaaaaatatatatatatatctattttgcctctcaagcattcaatctccattcttttggtaatagcatcctgattycctttgagggaattattcctcccccatgtccgtatggttttggtgggctggcttaaatccacaatcttttggttcttctcactaccccaagctctaaaaatgatgatttcactaggcccatgtcaagcaaaagactacaatatcctggccactgtgtcatattcagaaatgagcatgtgtcctaagttttatccaatgacatcaggcccaggacttttgtggaactgatgagaaaagagaagtttcctttccactggacttgtagctgggcaggtgaaggctgccagtgctgggatctgatatatgacatatctatgcctgagagtaaagccagtttagagaaaagctaagcataaaaatctagagggcatgtctcagtcctgatgacatcaatcaagcc

SEQ ID NO: 352549 - DNA, 592 bp, Homo sapiens
cactgctatggtacttttctctgtccatatattcatagttttttttttttttttttttttttttttttttttgagacaaattctcgctctgttgccaggctggagtgcagtggcgtgatcttggctcaatgcaacctctgcctcctgagttcaagcaattctcctgcctcagcctcctgagtagctgggactacaggtgcrtgccaccacgcccagctaagtttttgtatttttagtagagatggggtttcactgtattagccaggatggtgtcaatctcctgacctcatgatctgcccacctcggccttccaaagtgctgggattacaagtgtgagccactgcccctggccatattcatagatctttaaaaggagaatgctcattgagttttggagccccccaaactggctttaaatactagcttaggtttttatttgttgcataatataaagaagacacaatctctctcagtctcagtaccatcatcaatgaaatggggataatcacctttcaagatagttataaaacttaagacaacatctgcaaagtatttggcacatagtaggtcttcaaaataattcttgtttatc

SEQ ID NO: 352550 - DNA, 535 bp, Homo sapiens
gcaaaaattatgaaaaaaaaacaaataaaatttggtcattttctagatctaagacttattgggcagttaatttaaggcaactactaattcagatttcaaaaaacacagcacagaaaattagtctgaataagatgcttttcttgcttttccatgtatcagtaatgagtacattcttcctaaaactgctttgctcccactgacattttttactcaattaaaattgggacagatgtaaagttttcccaaaccaatggaccacagtgaacacagccctaaagtattcctagccttacatgaaatttaagagaggctcctccagccaggccaccatttccacctaactygcccagtaccccctttgggatctgggagctaaagaaaagaaacacaaagtctaagcacaaaataagattattgcttctcagataatccccataacaatgtttcccactagactgtaagctacctgagagcaagggcattttatcatctctgtatttccaatatctatttcagtttatagctttgaagaaac

SEQ ID NO: 352551 - DNA, 565 bp, Homo sapiens
attttcttagtcccacataaagggaatgaaggcagttttggaatgcagacctgagtccactttgcaagccacccttctatctcccctgggcatcataacagtagaaaaaaratcttcttggaatttctagatcactttgagagatgcttccattctacaagtgggttgcctgacaattagtttcctggaaaatttttgaaaagggaggggaaatcgttttctttcccagaaaataccacagtccattctttggccatttttgcccactttttggatgttgttgccttgagctctttagaattttactttctgatctcagacccacaataaacccaatttcaccctgaactttctcaagtctagaggacctttcttccagactccaatctgattttgttgctgtttctgggtgggtactgagtttttcagagtttaaatttatggctatctttctttttcctgattaaaacccagtggtgactgttaacctcggaagaccctgcttctgctcttggaggtggcagagaagtctcaaggatccacaagtaataatgtattgtgcaga

SEQ ID NO: 352552 - DNA, 611 bp, Homo sapiens
ccagaaagatagtttcatagaactaaaattcagcaattaaacttcagctatttttttaagggtagtgagtaacacagtagataagattttcaacctcagcattaccaaaatgaagaattgctattttatttattcaatggaccagtcctgtgcaaatcatagctacagtttgaaacactgtaagtttttctccttaggtactttattagacctctgccttacaagaccctgaaaattccctttcatttcttgggtaatcccactagttgattagggtaccataagaatcagtgtatctgtcacagtatccaggaacatggaccttcaggtctcaaaaccaccatttgcttcctgagtaaccttgggcaagttatataatctgttgtagcctcagttttctcatctctaaaaggaagataatgtctagtactctgcaaagctcctgtgargattaaatgagctaacacataaaaagcaattagtgcattacatgggctgtagtcagtgcttaatacatggtaatgaatgtgactataaatgactataaagtatttatcatagttctgatgcacagtaagttctcaataaatgaaatctgctataattatagt

SEQ ID NO: 352553 - DNA, 565 bp, Homo sapiens
attttcttagtcccacataaagggaatgaaggcagttttggaatgcagacctgagtccactttgcaagccacccttctatctcccctgggcatcataacagtagaaaaaagatcttcttggaatttctagatcactttgagagatgcttccattctacaagtgggttgcctgacaattagtttcctggaaaatttttgaaaagggaggggaaatcgttttctttcccagaaaataccacagtccattctttggccatttttgcccactttttggatgttgttgccttgagctctttagaattttactttctgatctcagacccacaataaacccaatttcaccctgaactttctcaagtctagaggacctttcttccagactccaatctgattttgttgctgtttctgggtgggtactgagtttttcagagtttaaatttatggctwtctttctttttcctgattaaaacccagtggtgactgttaacctcggaagaccctgcttctgctcttggaggtggcagagaagtctcaaggatccacaagtaataatgtattgtgcaga

SEQ ID NO: 352554 - DNA, 514 bp, Homo sapiens
tagtgacttagggaaaaaaggggtagggtaagagtagtgcctctgagcttgatctgactgacaggccacggagtgccagtggaatcctggagacaagagtccaaccacttctcatgcccagtatcaatttaggggccaagtccatttcctctacaagactgtttcctcatctattaaatgacaagattagatgtggtgatggctacagacccttctggttctgacactctgtaactccatttgacagcaggggctggggtaagggagagaaaggacagatgtcaggtctggggaggcccattctctcctctacctcctattacctgtgatagtggtattggcaagttccttcccttcttggactagtttctccatctgcaaaatatgggtgtttcaccaaggtttcttctggctttarcattttaggtttctagtgtaaagcaattcaagggggtggggggaccatcaaatttatgatctaagaacagattgctgacagctaaccaactggcaa

SEQ ID NO: 352555 - DNA, 289 bp, Homo sapiens
tctatagcctagatcaggggtgtctcaaagcctagacattgagacaggctagatcaggggtgtccaatcttttggcttctctgggctgcattgaaagaagaagcattgtcttggaccacacatcacatacactaacactaacaatagctgatgagctaaaaaaaaaatcacacaaaaagtctcawaatgttttaagaaactttacaaatttgtattgggcctcattcaaagccgtgttgggctgcatgcggcctgaggcccacgggttaagcttggcctaggtggttat

SEQ ID NO: 352556 - DNA, 555 bp, Homo sapiens
ctctatttacataagactgagtgtaggtgcckcatctaggcctctgcaaacaccctgaacttgaacagtaataggctaatttcttctaatttcccttcattgaagtgtgagttccttgaggaaagagatttttttcttgttcactgttacattttcagggcccagcaaagagcttggtggagtaactacctgaaaaaaggttagccattaatacatacaaatcacttaaaatagtggtagtgatatgatattcaataaaaattatctattttcatatttgttatcatgttccataaattcaaatctcagagaagaaagcctgctatggagctaactttcacataggcgtggtttaactttacattgctatttctttcaagctgccaggcatggcaaaggtatccatactttctgaatcttgagagaactgcattccttgagatacatttgtattccttctcaaccagcaaacctaacatcaggactttaacctaagaggcctatttgattatgttttgggtcacacccaccatgtttgctaacattgacattcac

SEQ ID NO: 352557 - DNA, 555 bp, Homo sapiens
ctctatttacataagactgagtgtaggtgccgcatctaggcctctgcaaacaccctgaacttgaacagtaataggctaatttcttctaatttcccttcattgaagtgtgagttccttgaggaaagagatttttttcttgttcactgttacattttcagggcccagcaaagagcttggtggagtaactacctgaaaaaaggttagccattaatacatacaaatcacttaaaatagtggtagtgatatgatattcaataaaaattatctattttcatatttgttatcatgttccataaattcaaatctcagagaagaaagcctgctatggagctaactttcacataggcgtggtttaactttacattgctatttctttcaagctgccaggcatggcaaaggtatccatactttctgaatcttgagagaactgcattccttgagayacatttgtattccttctcaaccagcaaacctaacatcaggactttaacctaagaggcctatttgattatgttttgggtcacacccaccatgtttgctaacattgacattcac

SEQ ID NO: 352558 - DNA, 616 bp, Homo sapiens
tattcattattcatagtgcaaagaaaccacattatacttcctgacctacagaggggtaatgcttttcactctaatcttgcattttgtatttgcatctaattcacacttaatcagaatttataggtcacttctctgtatacatttcatggtgtgtcacacattaaaaaacaagcttcttgttttagctcattataaaagcctagaatgtcaggaatggaaagaactgtagagacttgttctaacttccttatatttatctacagggaagcrgtaagtgctctggggtggagtttggggaaatattgtcctcaaggtcacacagtaaggctgagtcagaggcagcaacaacacttgagcatccatttcctgactctttaagtttagtgttcttgccatgttttccctgacctgcctcagattttaagaggccagaaaggccaaacggttgtagtagtattttcccactcttaatttcttcatcttctctctctctctctcttttttttaaaataattttgttggacagtgggataaagtgggataaagataccttgtcccttttccattttaaataaatggctagtcctcattgcttgctgcctttataagccttcca

SEQ ID NO: 352559 - DNA, 577 bp, Homo sapiens
agaaagtagtactaaataaatttctcttgtaagcagctaaagaattttaaacattttgaagaaaaatatcctaatagtttctatacatgcttctgcttttataaaaagagcatratatacagaacttctccttggccaacatagtagtgtcacaggtaataaatacttgcagacctaggcactgtattttatacttctttctattctctttaatttcctggaatgaatcctggctcatagcaggcatagaataactggttcctagttaataatcatgagcatttgtgcatattataactcccttagggattcttgaggtggtagggtgctctgtttgttttcatttctttgtttcggtccccagactgctccatacgtggtgagcctgaagtctccattgggccttccctccttgtcagctgtcactcctctttctgtcagcaggcattgcccactcctccagtctacacccacctgctgtttttctttcctgacatccatttttaacaagttcaatagccagacctgttaaatcactcaacacacatttatatagctttgcagtcaacatgcattt

SEQ ID NO: 352560 - DNA, 577 bp, Homo sapiens
agaaagtagtactaaataaatttctcttgtaagcagctaaagaattttaaacattttgaagaaaaatatcctaatagtttctatacatgcttctgcttttataaaaagagcataatatacagaacttctccttggccaacatagtagtgtcacaggtaataaatacttgcagacctaggcactgtattttatacttctttctattctctttaatttcctggaatgaatcctggctcatagcaggcatagaataactggttcctagttaataatcatgagcatttgtgcatattataactcccttagggattcttgaggtggtagggtgctctgtttgttttcatttctttrtttcggtccccagactgctccatacgtggtgagcctgaagtctccattgggccttccctccttgtcagctgtcactcctctttctgtcagcaggcattgcccactcctccagtctacacccacctgctgtttttctttcctgacatccatttttaacaagttcaatagccagacctgttaaatcactcaacacacatttatatagctttgcagtcaacatgcattt

SEQ ID NO: 352561 - DNA, 577 bp, Homo sapiens
ctacacccacctgctgtttttctttcctgacatccatttttaacaagttcaatagccagacctgttaaatcactcaacacacatttatatagctttgcagtcaacatgcatttgcctgcagggtgcaagaatgatgcaatttttttcatctggcttagaaaactttattctgtatttagacagtagaagttttccaaaatcttatggtgatttaaagtctgaaagctggttaaattgggatatatgtagaataaaatgcaaattatcctcacaggttgtacattcttaactagaaagtttgaatccctagattagaccattcaagccttatcctagtcccacaaagatttctagcccatccatttccaccttcgtcaaattaacaacattaagccaaacgtcaaaccaaacaggttacctctgggaagaaaaccagcatacaagaaaccaaataattttatgctatttcccagttgttactacatccaccccacacataaatccaggatcttttaatgatcataatagaaagtgggcrttctaagttgaagaaatagtgagccaaatcagagaagcc

SEQ ID NO: 352562 - DNA, 527 bp, Homo sapiens
ataataatttccacttcacttcatgatctatatcacagcgtccctctcatagttcttatcagcaataaatgaatttgttaatcttctctttctttctgctgcattctggtggtacctgagaggctctctgtttgcatagaaagagaaatggcttatcaatcaaacaatttaggttttcagttttgctactaattgattaaggtatatttttcacttattctctcaatgaatattaatgaagtgcttaacaggagtagcatggcctggttgtgggttcaggttttggagtcaatgcctgggttacaaacaaactctgccactttccagccatataatcttgggtgagtgacttgaccagtttccttatttgcaaaacggggataataatcacacctactttacgggataattgttgtaagtattaaatgagtaaatacawataaaaatcataggacactgtgcctggaactagcaagtttttaacagatgttagatactgtcactttatgattgctaactattgtcac

SEQ ID NO: 352563 - DNA, 600 bp, Homo sapiens
caggtaaaatgtgatattctaaatcaatcatatcaaggcaaatggtaaaattacatcatccacattttttgcaacgatttcatcttggacttaagaatacattgtttaaatatctgaggagtgatcgttttgaaatttagggaatctattttcttcctccaataagatttggctttataaactctggggtgaagggcaggggagtctgattgaatatcagagaatgtcttaaaaacaaaacatcatgaacaacaaaaccaaaaaccacataatcttccaaaaccacattaagtatatcatcttataggaaaagaattayatgtatgattttctaatttctcacacaggcctcattagcatgtacatgttatcaaaaacaataaattaatagcagtaaaatttttatctcaaataacctatattgattgagttacacatattgtgcagcatctatctcacgtttcctataaaggagagggaagaacagaactgtaagaaataccagcaagctacatatcagaaaacgaattccatactgtactttttattaatgcaagtacaaattaaggaaacattattagccacacacaactcatgctt

SEQ ID NO: 352564 - DNA, 575 bp, Homo sapiens
atgtccactaaaattctttctgtatcacaattttatgcacttagaaaaacaaatgaagctaccygttttattaattaaataataaatatgagttgtctaccattacattttctaattatagtgtttttcatgtcaaaataagtttgagaaatagaatattgtataaaaatatcaaatatctctcatttatatcatcgttttaaattgatttcagttaaaattccattggcaattttagtagcacttgacaataaaattctcaaagtgatttaaataatagaccagcctatgaaagcaaaaggtaatttgagaataatgaagaaagaattgtcctaccacatacttgaatatattgtgaagcttcacctaaacagtttcctttgtgaacatatgaacaaatggaaatactttggaagaaacaaaatgtttagctcatagacagactttgatattcataagaatatactgtaggataatgtgttaacaaaatacatgtaaaacaataaactgttctaaaattatgcttagattacatgtgatattaaaaaagagaacccataatttatgtgtgtgtg

SEQ ID NO: 352565 - DNA, 575 bp, Homo sapiens
atgtccactaaaattctttctgtatcacaattttatgcacttagaaaaacaaatgaagctacccgttttattaattaaataataaatatgagttgtctaccattacattttctaattatagtgtttttcatgtcaaaataagtttgagaaatagaatattgtataaaaatatcaaatatctctcatytatatcatcgttttaaattgatttcagttaaaattccattggcaattttagtagcacttgacaataaaattctcaaagtgatttaaataatagaccagcctatgaaagcaaaaggtaatttgagaataatgaagaaagaattgtcctaccacatacttgaatatattgtgaagcttcacctaaacagtttcctttgtgaacatatgaacaaatggaaatactttggaagaaacaaaatgtttagctcatagacagactttgatattcataagaatatactgtaggataatgtgttaacaaaatacatgtaaaacaataaactgttctaaaattatgcttagattacatgtgatattaaaaaagagaacccataatttatgtgtgtgtg

SEQ ID NO: 352566 - DNA, 626 bp, Homo sapiens
ttcttgacttatctctatttctcaatcctggaaaaaccccacactagattttgagttatggagtagtgattatttccataaggatgctgtaattaacaagaccctcttacaatgcttctggagcaagctagagtataaatatattttaaattaaaaccaatccatagacatatggagccacctcatcatctctttttccataggttgtacattttgtatatgtaagtttgtgtgacttaatttctagggtttaaaaaaaattaatttcttgcacatttccatggctgcgtccataatccaaagcaagaccctctaataacaaatggggtatctttgcaattttcatgttgttttaaagtgttaaattttatttggcttaaagctgcccccacacatagcaaactgsaacttaatttagtatgtaaaggaactgcaatctaaattaagagtatactcttttaataagtagcagaatttcagccaatgataatagccaagttttagccaatggcaggctgccaactgaccataccatgttcaaataaagccaatgatgagctgtaaccaatcaagctgtttctgcatatttcttcctttttttctgtctgcaaacactgcctgttcac

SEQ ID NO: 352567 - DNA, 613 bp, Homo sapiens
tagcagcatcttaatgttgtatagaagtgtaacaacttataactgcaggataaaatatgtttttcagattaaggtgatcaataacctctaattccaaacacattattgctaaattacgatgcatgtgaaatctggatacaagttaactactgattaattcattgtgactcgcttggcttagggatacagtttaaacatggaaagataagagaagaaaataattttgttcatttggactaaaactgtagttttggtttcttcagaacaactcaagaatttatattattactggagaattagttttgcttcattttctcatagattagtratacataaagggaatttgattttgcaaacattattgtttaaaacatcaataaatatatccataaaataatcactctattagtctgttagatagatcagtcatccattaattcaattaagaattattgagtcttttatgttctaagaagtgttctaaaaacaggggctctatttggtgggaaaaacaaaatgaaacaaaataaaactctgtctttatgtagctcacattctactggaaatatacaagataaatatacccatgaatatataataaaatgccagctag

SEQ ID NO: 352568 - DNA, 585 bp, Homo sapiens
taatgtttaattcaaaattaatgttttgaatatytaattatatagattagctttgtaaatgatgttatgtcagtattattattatcataattatcactattattctgattcattcatttaaagggatgataactgtttacaagcatggaaaaatatttatggtataatcctaggtagaaaaaaggagaatgcaagttatattgattcattattttgacaaatatttattatgtctaccatgtggctagtcacacatttttttaaaaaaagtggtaggcaaaatgtatgaaatccctaactttatggagcttttacacttgtggtggatgcatatgtaaaaaaagtgaccacactgagttaatccattacaagagaactgagtggtactgaggaaagagacaggacctctggagtggatataacaggagaatctaaatgagcctaggatgaaaaaaacttcgtgggaaaggtgcctggagaatgaataggagttattcagatgaagaagtatggaaagtgttccaagtagaagaaaagtcatgggcaaaggcccctgtaaaagttataacttcaggaattttgagg

SEQ ID NO: 352569 - DNA, 585 bp, Homo sapiens
taatgtttaattcaaaattaatgttttgaatatctaattatatagattagctttgtaaatgatgttatgtcagtattattattatcataattatcactattattctgattcattcatttaaagggatgataactgtttacaagcatggaaaaatatttatggtataatcctaggtagaaaaaaggagaatgcaarttatattgattcattattttgacaaatatttattatgtctaccatgtggctagtcacacatttttttaaaaaaagtggtaggcaaaatgtatgaaatccctaactttatggagcttttacacttgtggtggatgcatatgtaaaaaaagtgaccacactgagttaatccattacaagagaactgagtggtactgaggaaagagacaggacctctggagtggatataacaggagaatctaaatgagcctaggatgaaaaaaacttcgtgggaaaggtgcctggagaatgaataggagttattcagatgaagaagtatggaaagtgttccaagtagaagaaaagtcatgggcaaaggcccctgtaaaagttataacttcaggaattttgagg

SEQ ID NO: 352570 - DNA, 474 bp, Homo sapiens
ctggtaaaacttatatcttcatcttcttaaacttccaacatttcccctctctactctctgtcttatctgatacttttgttctttgttttactgagaaaataggataaattagataaggactttcagattactgccctcaccgcaacccaaatgatgaaatctactaacctacattcatagtcagctatatattttgtcatgaagtagaggaatcatgttcctaaaaccagttctcctactttatgatctgatttcatctgcttatacacactcccagacacctcttttacagttggactcctcctttcttttcagcgttgtcaaaagtttttaaattctctcctctctactataatgtccatatcagaatatagtattatataatgtttctcgaaaaagaacttctttggaccctgcwacccactcctactagtgctctctttctgtgctcctctttatagtaacaaatgcaca

SEQ ID NO: 352571 - DNA, 589 bp, Homo sapiens
catagagattccttttcttattgcctttttttgtcagccttgtcaaagaatggttgtaggtgtgtggctttctttctgagtttttaaaattctgatctgttggtctatgtgtctgtgtttggtagcagtaccaatctgttaggattgctgtggctttatagtacagtttgaagtcaagtactgtgatagctgaagttttgttctttttcttaggattgctttggctatttgggctcttttttggtgacatgtgaattttggaatcaytttttctaattccgtgaataattatgttggtagtttgaaagaaagagcattgtatctgtcaattgctttgggcagcatggccatttttacaataatgattcttccaatccatgagcatggaatgttttcccatttatttgtcttgactctgccatctgttgtattcaagaaactcatctcacatgtaatgacacccacaggctaaaagttagagtagattaagatatacatgcatatagaaaacacacaaaaaagcaggagttggtaatgttatattagatgaatcagacttcaaaccagtaaaaattaagaaggacaatga

SEQ ID NO: 352572 - DNA, 619 bp, Homo sapiens
attagaatagtgacatgaatacatttatattttataaaaaatcccttttgattattgatggactgaagctagataatcttaaaacagatatatcagtgaagtgtatgttaaaattcattgaggaaagagatgatgtgacctaaacagaggtgatagcatggggaagaagaagagtagatgaatctgagcaagtggagtcaaaagaatattcattatgctgccgaatctatagacccggagttcatgggaaaaagctgccctgggagccatacaaatataaataaacctatgaagatgtatgaactaacccagcaatggaataagagaggttttgtttgttttataagtaaaagaaaaaaataaaaggctaagcacaggtcttttaaaaatatcaacatttaagaagagacagaatgaagcaagasagcccaagtaaggagacaaaacactaaaagagacgtaataagaatttaaacatttatttcaggaagatggaaggaggcagtggtgtcagatgaagtaccagttcatgtgtgggaaaaaaacaaaaacaaaaactgagaaatgttgattggttttagcaaaaaggaggtcattggtgaccttgggaatagcagtt

SEQ ID NO: 352573 - DNA, 523 bp, Homo sapiens
catgtgaataagaagacaaaagggaagctcagcaaacctgcttaaatctatagtgttagcaggccagcttggcagccatgaataatctatatattgtattactggagtgagcacaatgggctaagaaggcaaaccaaaatccagacacatctaaggagataattcaaagtgtataggcatgcacacattctgcacattttttttcatgctctatacgaggcttttacactaaatttttaaaacacaggatgtgattcctgacattctatcaaccattttattaggtsatatgtatcacaaatcataaagatcaaatctctactatagccctaccaccctgaatgcacccaatctagtctaatatttctctattttaattccacacagctggagccctccattattataagtttgaagttttgcaaatcttccctttttgtttatttagtaatatataacgtaaaattcagtccttttaaagtgtacaatttactgaatcttaatgaacttatacaataatgta

SEQ ID NO: 352574 - DNA, 485 bp, Homo sapiens
acacacatactcattgattcaataccagagtggctgagggcaactctttatttggcattccttgttgatgcattaataaacaaataggcaatgtgtaggtgggacacttgtattcggctcccttctcaatctgttcatgttttatttcattcaaccacagcataaccctccgagttaggttcattttccccatatttatctgaaaaattactgaaggtgagagagaataaatagtctaaggacagagagtgaatgaccaagttagggtttaaaccaaaacacactggcatcagatcttgcrttctcaagtactctgttacactgtttttccttccaaatctgaccacatttgaagtagttggtaatatattttatgtcaatgtatttgagaaaaaaaatttcttgaactcttttgtgaatgttatcttagccaatcaccaaagtaagaatagataacaagctaatatttatttgttaaataagtg

SEQ ID NO: 352575 - DNA, 592 bp, Homo sapiens
attagctacagatcaatgaagccttaaaggtaaatgtaagtgatgattgtgtatgaggtatttttaaatattgaaactctttcataagtgcttctagataactttactgatttctaattggaagccattgacctagaactcaagaaatcattgaggaccaaggtctggagtgtttctgactctggactaaagctgagcttatgagtgaatatcagatgataccaatcacaggatataaaaactgtcaacaatgaaaaacaaggcaagggcttacatctcatatcacagtttttttatagtgaaataatgtgttatgcacacttttgtttacttcatttctagacattattgtctgaaacaaaaatttgctgaacattgcacctgcaagccagtgactgccccaaggtgaatccacttattttaaatggctttatttataattaaagtagtgattaacaccacaacttgattatggaatatccgttgaaaaaaactactatatgtatcttaagcrtatttatctgtgtgtaaaaagaccacgattcaaaaagcatgttctgaaattgataggtcatggtgatcaattggccag

SEQ ID NO: 352576 - DNA, 642 bp, Homo sapiens
gacctgcccacataatctaaatggaagaaagccataattgcttaatttttttttttttttggtggaagcatgctgaatagaacacatgtaagaaaatggactaactttaaaaatattgrtacacaaatgtcagaaactgaaataactaaaaacacgaagttcacaaagtaccattgtagggagtttcaaattaatttaggtcaaagtaaataatttcctgattcttatggaagtctgaattaaaattctggaaatatagagtcaagaaagaaaatgtacttaatatgccatatttattataaattaggtaaagtacacatttatcaatctgcattaaaggcttctagtagttgaagggtttaagaaccagttttataggaaatttcaaacattagaaatatttaagttatatatactaatagctataatatttaaaaatctgttagcattatgaatatctaatttctggttacaataaaaatattgcttttataggattaaaatacatgtagatactaaactaatgttgaaaattatatatgttttacaactgattataagaaaaattatttgttactcttcaaactccatattcaaatatttcactttaataaagcaatttttcaagggggaattttaaat

SEQ ID NO: 352577 - DNA, 642 bp, Homo sapiens
gacctgcccacataatctaaatggaagaaagccataattgcttaatttttttttttttttggtggaagcatgctgaatagaacacatgtaagaaaatggactaactttaaaaatattgatacacaaatgtcagaaactgaaataactaaaaacacgaagttcacaaagtaccattgtagggagtttcaaattaatttaggtcaaagtaartaatttcctgattcttatggaagtctgaattaaaattctggaaatatagagtcaagaaagaaaatgtacttaatatgccatatttattataaattaggtaaagtacacatttatcaatctgcattaaaggcttctagtagttgaagggtttaagaaccagttttataggaaatttcaaacattagaaatatttaagttatatatactaatagctataatatttaaaaatctgttagcattatgaatatctaatttctggttacaataaaaatattgcttttataggattaaaatacatgtagatactaaactaatgttgaaaattatatatgttttacaactgattataagaaaaattatttgttactcttcaaactccatattcaaatatttcactttaataaagcaatttttcaagggggaattttaaat

SEQ ID NO: 352578 - DNA, 642 bp, Homo sapiens
gacctgcccacataatctaaatggaagaaagccataattgcttaatttttttttttttttggtggaagcatgctgaatagaacacatgtaagaaaatggactaactttaaaaatattgatacacaaatgtcagaaactgaaataactaaaaacacgaagttcacaaagtaccattgtagggagtttcaaattaatttaggtcaaagtaaataattycctgattcttatggaagtctgaattaaaattctggaaatatagagtcaagaaagaaaatgtacttaatatgccatatttattataaattaggtaaagtacacatttatcaatctgcattaaaggcttctagtagttgaagggtttaagaaccagttttataggaaatttcaaacattagaaatatttaagttatatatactaatagctataatatttaaaaatctgttagcattatgaatatctaatttctggttacaataaaaatattgcttttataggattaaaatacatgtagatactaaactaatgttgaaaattatatatgttttacaactgattataagaaaaattatttgttactcttcaaactccatattcaaatatttcactttaataaagcaatttttcaagggggaattttaaat

SEQ ID NO: 352579 - DNA, 642 bp, Homo sapiens
gacctgcccacataatctaaatggaagaaagccataattgcttaatttttttttttttttggtggaagcatgctgaatagaacacatgtaagaaaatggactaactttaaaaatattgatacacaaatgtcagaaactgaaataactaaaaacacgaagttcacaaagtaccattgtagggagtttcaaattaatttaggtcaaagtaaataatttcctgattcttatggaagtctgaattaaaattctggaaatatagagtcaagaaagaaaatgtacttaatatgccatawttattataaattaggtaaagtacacatttatcaatctgcattaaaggcttctagtagttgaagggtttaagaaccagttttataggaaatttcaaacattagaaatatttaagttatatatactaatagctataatatttaaaaatctgttagcattatgaatatctaatttctggttacaataaaaatattgcttttataggattaaaatacatgtagatactaaactaatgttgaaaattatatatgttttacaactgattataagaaaaattatttgttactcttcaaactccatattcaaatatttcactttaataaagcaatttttcaagggggaattttaaat

SEQ ID NO: 352580 - DNA, 561 bp, Homo sapiens
atatgttttacaactgattataagaaaaattatttgttactcttcaaactccatattcaaatatttcactttaataaagcaatttttcaagggggaattttaaatgtgacaaaatcactgaaaaaataaataatttaaaactaactataattttcaagaatcaaacttagaaaaaggtataatttttcaatgcatatatgaatatgaatattggttaaatttaaaatagtttaatcatacttcatttctactayctcaagatttcataatgttacatttctgtttcattaaaaagtttcatgagttataaaactgctgagttttctaactttctgctctgagcattaatatttttgctccagtaaatatctagaatccaaatttttacatttttatttttatatacatgtagaatagagttactgtactgataatatgtacaaggatcaacatttttctctgtgccattatgcaatttttttcaattattttatattgtatgtgattcttaacatataacttactttacaaatgtaacaactatttttaaaaagtctgtgc

SEQ ID NO: 352581 - DNA, 606 bp, Homo sapiens
cagaatattgatgctttcttactaagatttgaactaaggcaagaatgtgagttctcattgctttatttaacattatattagaggtcttgccagtgctatccagcaaaatcgtgactgaaaagaaactaagcctctctttactcatacatgaaatgattggattcgtgaaaaatcctgagaaatatattttataaatgtaataacttttttttcaaattcactggatacatggtcaatatataaaagaacaattgtatgtaacagcaacaaacaagtgaaaattttaattgaagcacaataccatttgcygtggcataaaaacaataaaatcatagcaatgaatttagtggacaacatgcaatatatctgcactaaacattaaaaccatttctgggagaaatggtaaagaaggtctatggcaagacaaatagttttcatggattggaagattatatattgttagaatgtttgttatccaattattctatagattcaaagaaaccccaataaaaaatcccaacaaccaatttgttacaaatggactaaccaattattctggaaattcaaaggacctagaatagtcaaaacaacactaaaagcaaccat

SEQ ID NO: 352582 - DNA, 606 bp, Homo sapiens
cagaatattgatgctttcttactaagatttgaactaaggcaagaatgtgagttctcattgctttatttaacattatattagaggtcttgccagtgctatccagcaaaatcgtgactgaaaagaaactaagcctctctttactcatacatgaaatgattggattcgtgaaaaatcctgagaaatatattttataaatgtaataacttttttttcaaattcactggatacatggtcaatatataaaagaacaattgtatgtaacagcaacaaacaagtgaaaattttaattgaagcacaataccatttgctgtggcataaaaacaataaaatcatagcaatgaatttagtggacaacatgcaatatatctgcactaaacattaaaaccatttctgggagaaatggtaaagaaggtctatggcaagacaaatagttttcatggattggaagattayatattgttagaatgtttgttatccaattattctatagattcaaagaaaccccaataaaaaatcccaacaaccaatttgttacaaatggactaaccaattattctggaaattcaaaggacctagaatagtcaaaacaacactaaaagcaaccat

SEQ ID NO: 352583 - DNA, 606 bp, Homo sapiens
cagaatattgatgctttcttactaagatttgaactaaggcaagaatgtgagttctcattgctttatttaacattatattagaggtcttgccagtgctatccagcaaaatcgtgactgaaaagaaactaagcctctctttactcatacatgaaatgattggattcgtgaaaaatcctgagaaatatattttataaatgtaataacttttttttcaaattcactggatacatggtcaatatataaaagaacaattgtatgtaacagcaacaaacaagtgaaaattttaattgaagcacaataccatttgctgtggcataaaaacaataaaatcatagcaatgaatttagtggacaacatgcaatatatctgcactaaacattaaaaccatttctgggagaaatggtaaagaaggtctatggcaagacaaatagttttcatggattggaagattatatattgttagaatgtttgttatccaattattctatagattcaaagaaaccccaataaaaaatcccaacaaccartttgttacaaatggactaaccaattattctggaaattcaaaggacctagaatagtcaaaacaacactaaaagcaaccat

SEQ ID NO: 352584 - DNA, 497 bp, Homo sapiens
gaagctataaaaatactagaaggaaacctaggaaaaactcatttggatattggtctaggcaaataatttatgactaagacctcaaaagtacacgcaacaaaaatagacaaactgaacttaaacyaaaaagcttctgcacagcaaaagaaacaatcaacagagagagctgacaacctgttgaacgggagaaaatatttgcagactatgcatttggcaggggactaatatccaggatgtagaaagaactcaaataacccaccaacaacaaccccccaccccaaaacaagtaatccaattaaaaagtgggcaaaatacattaatagacacttctcaaaagaagacatacaaatgaccaataggtatatgaaaaaatgctcaacatcactaagcatctgaaaaatgcaaattaaaagcacaatgagatataatatgcctgtcaaaatggctattagaaagacaaaaaataccagattttagtgagaatttagagaaaaggg

SEQ ID NO: 352585 - DNA, 578 bp, Homo sapiens
gattcattcatccaaaaaacatttatgaagtttcagaagtatgatgtgactggggttgcaaatcacaaaggttgctggaattcatgagccaaagggaaatttctataatgtaattatgacttggtaatgtgtatttgaagccacaccgtaaagtaaaatgaacatcagcctataaggaaaatgtctggattttaaacccygctgcaatatcaatagctattgaacatcattagtttatctgaacctcagtttcttgatctattaaatggaaattataaactcctgttatgcttgttttaatgagccattagaatggtcaattcacttactatttgtgaaggggttgtgtacaccaaagtgctatgcaaattttcagtgatatcttagctatttatctgcatgttgtatccccatgtaagatagtaaacatctttctatttatttatttatttttttgagatggaatttcactcttgttgcccaggctggagtgcaatggtacaatctcagctcaccgcaacctctgcctcctgggttcaagcgattctcctgcctcagcctcccaagtagctgggatt

SEQ ID NO: 352586 - DNA, 505 bp, Homo sapiens
atcaggttgtatttcttaataatattattttagtatagtagaaaacagttacgtgtcttattatcaatgttcacatcacatacacactatcttatttttgaccttaacccagatacatgtgcagactgatgtccaagtatcatcagacttttttccaaaggacattctgaaaataaattactgaaaggtcttgaagtttagtatctctacttttccaaaagaaacaccactaaaaaatcacaaaaaaattttataaattctactaattattactttctaatgatttctccccactgtaagagaatatatgtatatatattttcttctgtccttatgtataaaatatactttggagtaataaaactgatattcatatatgaactattatatcctgtatttatctgaatgttcctgagtgtataratgtaattatttaaaactaaaatataaattctgtcctaataaataaatacaaaatttgaagttgacttaatgtatgtgataa

SEQ ID NO: 352587 - DNA, 397 bp, Homo sapiens
taattaattaggtaaatcagtcttagcatawttagagggcagtattttcagtttgtgatcccccaggagctcaacattactttcactctccttttaaaggcagaaattatagtcagaaatgtgcatttcaatttgtagctgacagtttagggttaagatatgattccaggtaacagaagccaatgagagtacacccagttgatgtttgtgacatcatcttccagtcagagtacatagaacagctgaggtagcgttcagtttcagcacagtgccattatgatggatgtttacatctcttcattgagagccaattatctcgcttttgtgtgaggcccaaggatcactcatgcttccaggctgcacagagcactgttggatctagctgaacgaattgttt

SEQ ID NO: 352588 - DNA, 397 bp, Homo sapiens
taattaattaggtaaatcagtcttagcataattagagggcagtattttcagtttgtgatcmcccaggagctcaacattactttcactctccttttaaaggcagaaattatagtcagaaatgtgcatttcaatttgtagctgacagtttagggttaagatatgattccaggtaacagaagccaatgagagtacacccagttgatgtttgtgacatcatcttccagtcagagtacatagaacagctgaggtagcgttcagtttcagcacagtgccattatgatggatgtttacatctcttcattgagagccaattatctcgcttttgtgtgaggcccaaggatcactcatgcttccaggctgcacagagcactgttggatctagctgaacgaattgttt

SEQ ID NO: 352589 - DNA, 641 bp, Homo sapiens
cacagagtgctcaggggacacccacaaggagtgatttattctatgtgtaaaaatctggaaaatctttaaaaataagctgtcacttagctgagttttggaaaattagagactttttcasgtacaggtgggcaaaggatatttcagatagagggacctcattaagaacaaagtcaaaatgagaagagaaagcacagtgtgttcagttaaggtcaagttgcttatcataagcaaaggcaggagtgagggagagctaaaaatttgcaccaaggtatcagaacagattctaattgtaaataaccagtaaggacaactgtcataactgcataactttaatccttggctggatgtttaaattaggttattcaaattttaaatactctagaagggctgtgatgagatggatcactgtggttttgagaaaatgaggaatgcttcctaaaagaggtaagaagcaggattatttggcaccatttaaagcagtctgacacatcaaaggaacaggaatggtcaacacattctacttcattaatttccgctaactttactaggtatatcaatctattaagttattttaaataatggataatgttggatggggtgattaattactcaagaatagaaaggtgggtcacacatgacat

SEQ ID NO: 352590 - DNA, 641 bp, Homo sapiens
cacagagtgctcaggggacacccacaaggagtgatttattctatgtgtaaaaatctggaaaatctttaaaaataagctgtcacttagctgagttttggaaaattagagactttttcaggtacaggtgggcaaaggatatttcagatagagggacctcattaagaacaaagtcaaaatgagaagagaaagcacagtgtgttcagttaaggtcaagttgcttatcataagcaaaggcaggagtgagggagagctaaaaatttgcaccaaggtatcagaacagattctaattgtaaataaccagtaaggacaactgtcataactgcataactttaatccttggctggatgtttaaattaggttattcaaattttaaatactctagaagggctgtgatgagatggatcactgtggttttgagaaaatgaggaatgcttcctaaaagaggtaagaagcaggattatttggcacyatttaaagcagtctgacacatcaaaggaacaggaatggtcaacacattctacttcattaatttccgctaactttactaggtatatcaatctattaagttattttaaataatggataatgttggatggggtgattaattactcaagaatagaaaggtgggtcacacatgacat

SEQ ID NO: 352591 - DNA, 452 bp, Homo sapiens
acattctacttcattaatttccgctaactttactaggtatatcaatctattaagttattttaaataatggataatgttggatggggtgattaattactcaagaatagaaaggtgggtcacacrtgacataattgagaggaataccagagtttgggaaagagtttctgaagtcagtatttattcactatttatgaacttgagcaaacatgaactagggataggaagtgtatgatgctgaatgacaaaatgctttactattgggctggggtcagtgggaaaatccagggaaaggaactccccttcttatagaataactcagttcattgcacttattttttaaattatctgaacaacattatataaaagttatatattaaataattattttaaaagaaaacaataagcattgtgtcattcttttcttggtgtaaaattttctcaagtggcatgtg

SEQ ID NO: 352592 - DNA, 352 bp, Homo sapiens
tgcctaccctgtgagctcaaaaagaaactgtaccctcatgtactcattttgagtttggagacctggagaaatggctgcagtgtttgccactaattagacaatttggaaagagtacatgttgggttagaaacccctattttcaacccattattgaagaagaggaaagtcaagagtcacattgcagattttatcacttggggccaccttaatgttaatctgcttaaaaaagcaaaatatctaaaaggtgtcttgttcctgggctctgttagtagctagagtcagttcccttaacttgcatcgctgaaagttctgaagagccrttagagcccatagggagctgggaggtgtgtgt

SEQ ID NO: 352593 - DNA, 603 bp, Homo sapiens
ctagtgtttaccaaatccagcttcgtggcgagtgagctgaaggggaatgtcttacacacctttgcattgcaggatcctgcaaatggagattttttgtaacgcgttctctggagttagactgaatgggtgcagctctataatcaatgtctgcctgttaactgcataaaagggaacttgttctacttgaggttgaggccctaggcagaatttaaatctcactccaaagcccttaaatattttcctagaacctcagccatgtgaaggtccccagcaaagggaggcaacygggcagtgtgattgtatagtgaaaagatggaggttgccagtagagtgtggataacttctgagacactgggaggccaccaaaggtaaatacagtggtattttctcaatttccccccctcccctagtctcagatgatttgagagctggattggcaaagcaggctcaggcaaggctcaggaagagtggcttattgggccaagtcagacaggtagtgagtatgaagctaaaggcttgtcagcattgtcagaccaggccttttgacacatggttaaccacctgaagtgaaggttggaagaagttacattgcattttaggagg

SEQ ID NO: 352594 - DNA, 558 bp, Homo sapiens
tattgataagaaaacgtaggattatttaggaaagtcacactgctagtgaataatagagctaggaaacaacttataagtaggttatctatatccrgaacttttattcacactgttttattaagtagatagattgccattttgttcatttgtatgtgtgtgtttgtgtgtatgtgtggtgtgtgtgtgttttctatatccttattatgtttatattaaactgtatatccacattcttgcttctctctctctcccccacctttcctcactaaatatatgtaattagagatggaatacacatatatatatataaatattaacatatatttatatatcatatattaaaggctgagctaacgggacatacgatacatttttcttgttcaagataaagcctttaccaggtatacaaatttggctaatgttttttgaaatcatctttaggacctgtttaccaagataatcacattagataactctgctttttagtctcatggctgcagaatattttgctcatattaaattatttctgttacctctagaatcaacttttgtgttttt

SEQ ID NO: 352595 - DNA, 656 bp, Homo sapiens
gatttcataagattgtactcagccaagaaggaaaagaagctgtaatggtacgggacctggactacagcaaaagaaaagactcttttgttttctgaagcaawtataaaaatattacctcagacactgcatgtcaggtcatctgtatttactaaattctcacatggtttcatccactctttttgtctaggcatcaggaacagtggaaaacacataatcacagtacaacaaaattaacacctttacaacatgataatctaatctacagattttattaatttctccatttgtctcaataacgtcctttactgaacaggaaaattcagaattatgcattgcagtcagttatcctattttaatttctttcagtctcacatacttcctgaatctttctggttttttgtttgtttgttttttgttttctatctttggcactgacatttttgaagagttcatagcagctttatacaatatctctcaatatgaatttgggtaattttatgtcataataattttctaattatggtaactgaaaaaaatgctgaataagtgatgctgtacatcatattggaaggcacatgtcttgatttgtttcattactggtgataatttctcaagaagtaattcagtaatttaacatgataactttgtagttggga

SEQ ID NO: 352596 - DNA, 574 bp, Homo sapiens
ttgttttggattacttttttttcctcgaatcttttttttatgatcaatttgtcattgagtttttctaattctgatttacgttgttcttttatatcctctatcactttttacatttagttacttgaaaagtagagggttttatttttcctgctgttgggatgctattctgttccttattctcttttctttataataatgtcataacaataygactaaaatccttgtaaagttctattaccctagtttatctgtagaggggattcttccacctaaatcccatataatatatttgtggttgtctcagtacctgcaatcatctgtttgcaatgctgatttccctgtcttctcagcctctttgtcttttttaatatctcggacttagttcatttcttttgctacttttccaatttatatactatacatatgttgtaggttcatatttcttcagaactgtatgtccatgaagcatacattcatctaccagcccttataaaaccaaactgtgagctttctttcaagttcgagtatattataatatattatctccagctggcatgtttgcatacaatcttgg

SEQ ID NO: 352597 - DNA, 525 bp, Homo sapiens
gtcttcatttcttcataagcagggttgttgagagaactaaagtatatgagataatttaccaaaatrtaaggtatataattttaattcaaagtcagcaaatgaagttaaatatattatttcataattatgcatacttgccaaatataagtttaatatttcaagttggctgtcttttactttatcgtgttaatatgaatattggtcatcattttcatgagttattctttttacatgtttgagttattttgctttatttaattttttatgtacgttatataatgtgctgcagtgatacttatagaaggataggaaggtaaggattatttagattttcacgtattgttacaccatatatgttaagaaatgtctaaccatagttatttaatagactttttttttgagaccttctcactgtctcccaggctagagtgtggtgacacgatcccatctcactgcaacctctgactcctggtttcaaatgattctcatgcctcagcctcccgagtagctgagattacaagcctg

SEQ ID NO: 352598 - DNA, 631 bp, Homo sapiens
ccccttttgcctgcccccaatgcccaccaccattccatgttgagatcagctataacatttgttaattaaaaaaatataatgttatggaaattactttgacatatacgatggtttgctactttcattattctccactattcattgtgtagagtgtatatattcataattggtaaatttaaatgtgcatacatttaaaatttttatgtaactatacttattttctatctctagggtccagttctagttaatgtaaggaacaatactgtcacttccagacaaacatggtcaaataaaattttggatttttttccacctgtttctttactgataaatattcataactggggctagcacagtaattgaatgttattagagaaaagggaggaaaaagatagactatatacttstagatacttgtggcatacataattgcaagattgtcttcataatttatgcatcaaatctaaactactgcataaaaattaagccgttcacattgataaagcgataactaacaacaggcaagtgtatttttcctattttttttctattcacttctcaactgtaatgtaaaaatagatttcatattctttttcattctttactaaggagacactatttttttcagaga

SEQ ID NO: 352599 - DNA, 539 bp, Homo sapiens
tatgaacgactgtcaatgactgaattcaaagattcaagaaacagcgtttcaaatacacctgtgatctgcagccatgtcaaaaggcaggttttcttcctttagcaagaagataaaccagaattaaggacgctctaggaacaktagagacctgcagtcagacaaattagcaagcagcaagaacgattaacagcttaaactctatgaatggctaggaattttgcatttaaatgtcagagcgacgactattaattagtctcacctatgaaagaaatggcctcagggaaaaactgggacaggttttggctccagtgatccgagatggggatttgcttgtatttaaactctcctgcgttctcaaagagattcggcaaattgggggtgacgttcaagatgtacttgatgccgaattcctccaacacgtccaagttggtggagtctttggcacagcccaagtagaggaagggcaagatctccactgggaaggaaggctggctgttggacagcggactaccatccgagtctgttgcactattggggtc

SEQ ID NO: 352600 - DNA, 566 bp, Homo sapiens
ggggctttgggaagatcacatctcacctgttgcaacaggaacctcagtggctacagacatgggtctcacctgatgggactctgtacctcataccttaatggctgctctcctcccacctcttccaggcagtttagtgggatgtggaatctggcttacccaacggctcccttaaatcagagttaaattttgaatcaagggactagaggtcaagaagataaattcctctttctccccccattgctcctcccactgccctccccacctgatggactgtttcaaggtgacatgcaggacccagcaacaggctttgttctttgtgaagttatgtccagctccttaacacaccgtctagtatttgcattccttcctttcctgcctcacctttttctcattcccttttatagccctgaaattgcaccacccaacatagacttagcaagtaatctttgcctyaggttttatgttctagagaatttggcaaagacgatgagttaaaaaaaaaatctcgttatatcttcaatttggcctacaaatttggccttgaatctattttcttctaaataaga

SEQ ID NO: 352601 - DNA, 590 bp, Homo sapiens
gagagaggaggagggaggaggaggcaggaggaggcagcaggaggcaggaagaggcccagctcttcactcttcacttctcagggaggtcatgaaggtgcccaaggaaagtcatattttatttctgacaaaaatttggttgagggccaggaaagtaaytcattttatttttggtgggatcttttaggaagggacaaatacaaaatgttctcattcatctgctttaaaatttaaagcagggactatttaagcaaaatgttgagtaaaaccaataatcaatgaaaaacacatatagcggttcctcatctgttaaactttggacagggatgacatgcccccaaaacaaatttaaatgtcccataacctttttctttttacacttaaaaacattatgtattttactgacttttcaaccagattatatggcttacaatctaatcttcttttggcgaatcagcattgtacttatacatcaattacagtaaatatcttcagattcctttgctttttctaattttctttctgtcatctctgctaggctttctcttattgctaccataagtgttgtcctctagaagcagattacattcctt

SEQ ID NO: 352602 - DNA, 542 bp, Homo sapiens
gagtcccaagagattacatttatacctaaatctcagagtaaattgagatttgtcaracaaataaataccatacagcctttaaaatgttggctaaaaaaagaattgtgcaaacaaattacccacaatatgaatgcacttatataaattctaaaaacacacaaatactatatatatttactggaacacataaataaagcaaaagtatttatacatgggaaggagacaaagcaactttaggatagtcgtgatctctgggaaagagggaggggaatagaattaaggagagacatcaaagggcctacaactttttttgtaatctttatctccttattaagaacagaaaaggccaggtgcagtggctcacacctgtaatcccagcactttgggaggctaaggcaggtagatcacttgaggccaggagttcgagaccagcctggcaaacatggcaaaaccccacctcttctaaaaaatacaaaaattaaccaggaatggtggcatgcacctgtaatcccaggtactcgggaggctgaggcagaagaatc

SEQ ID NO: 352603 - DNA, 542 bp, Homo sapiens
gagtcccaagagattacatttatacctaaatctcagagtaaattgagatttgtcagacaaataaataccatacagcctttaaaatgttggctaaaaaaagaattgtgcaaacaaattacccacaatatgaatgcacttatataaattctaaaaacacacaaatactatatatatttactggaacacataaataaagcaaaagtatttatacatgggaaggagacaaagcaactttaggatagtcgtgatctctgggaaagagggaggggaatagaattaaggagagacatcaaagggcctacaactttttytgtaatctttatctccttattaagaacagaaaaggccaggtgcagtggctcacacctgtaatcccagcactttgggaggctaaggcaggtagatcacttgaggccaggagttcgagaccagcctggcaaacatggcaaaaccccacctcttctaaaaaatacaaaaattaaccaggaatggtggcatgcacctgtaatcccaggtactcgggaggctgaggcagaagaatc

SEQ ID NO: 352604 - DNA, 630 bp, Homo sapiens
gtcattttataatgataaaaacatcagttcagcatgaggatatagcaattctaaacatatatgccccaaacaccagagcatgcagagtcataaagcaaatattactatgtctgaaaagagagatagacttcaatataataatagttggagacttcaacaccccactctcagcaatagttacatcatctaggcagaaaatgaacaaggaaacaytggatttaagctacactttagaccaagtgcatctaacagacatttgcacaacatttcatttaacagctacagaatacacattcttctcatcattacatggaacattcttgcagataaaccatatgttagctcaaaacaagtctcaaaaaatttttaaaaatgaaaatcatatcaagtatcttttcagatcacaatagaatgaaactaataatcaataacaagaggaacattggaaattgtataaatacataaaggttaatcagcatgctcctgagtgaaggaagaaattaaggaggaaatcaaaaaatttttttaaaacaaatgaaaatggaaacacgacataccaaaacctgtgggatacaacaaaaacagtgctaagaggggagcatagcactaaatgcctacatttaaaaagtg

SEQ ID NO: 352605 - DNA, 512 bp, Homo sapiens
tttagagaaagtaaggcccgagagcaagagtctctgcatggtaatccacagaattcttctggatcwaatttaagatcaccaacgcataatctctatgagcctgcaagaaccacagtgttactgggtttggtgtgcccctaatgcagataaggcttagatcacaattcacaggtccctttgaatacctggaaagcattcttagcaagtataggtataaacaagcccagacaacaaagactacaatgaatacctaatttttcaatgcccggacaccaaagaaagataagcatcaaggctattcaagaaaacatggccttacccaatgaactaaatagggcatgaggacccaatcctggagaagcatagatatatgtgacttttcagacaaaaaattcaaaatagctgttttgagaaagctcaaataaatttaagataacacagagaaataattcagaattctatcagataaatttaacaaaaagattgaaagaactttaaagaatgaaaggaaa

SEQ ID NO: 352606 - DNA, 512 bp, Homo sapiens
tttagagaaagtaaggcccgagagcaagagtctctgcatggtaatccacagaattcttctggatctaatttaagatcaccaacgcataatctctatgagcctgcaagaaccacagtgttactgggtttggtgtgcccctaatgcagataaggcttagatcacaattcacaggtccctttgaatacctggaaagcattcttagcaagtataggtataaacaagcccagacaacaaagactacaatgaatacctaatttttcaatgcccrgacaccaaagaaagataagcatcaaggctattcaagaaaacatggccttacccaatgaactaaatagggcatgaggacccaatcctggagaagcatagatatatgtgacttttcagacaaaaaattcaaaatagctgttttgagaaagctcaaataaatttaagataacacagagaaataattcagaattctatcagataaatttaacaaaaagattgaaagaactttaaagaatgaaaggaaa

SEQ ID NO: 352607 - DNA, 536 bp, Homo sapiens
tcaattaaacaattaaattttcttagtcaatgatgctgttaagttcttctatgtccttgctgaattactgtatagyagttgtatcaattgttgagaaaggggtcttggtatcttcaactataattgtggatttatctatttctcttttcagattgattagtttcttcttaatgtgttttgaagctctgttgcttggtgcatatatacataggcttgttatgtcttcttgatggattgacccttttatcattatgtccctgtttgtcactgctaattttattttctctaaagttgactttatctgaactaatatagctcttcttgctttgtctaaattaatatttacatggtgtatttttcccattcttttactttcaatctatctatatcattatacttgaagtgaattccttatatatagcatatgagctgggtgatagtttttgttcagctggtttttgtccattctattctgccaaccattgtattttaattgctatatgtaggccaaataattacatttaatgtaattatta

SEQ ID NO: 352608 - DNA, 462 bp, Homo sapiens
tattttttcaacggattataatctattagtgtctttatttatttattttgagatggagtcttgttgttgtccaggttggayggcagtggtgtgatctcggcttactgcaacctttgcctcccgggttcaagcggtttccatgcctcagcttcccacgcttactggcacgtgacatgacacccagctaattttgtatttttagtagagatgggatttcactatgttagccaggctggtctcaaactcctgatctcaggtgatctgcccacctcggcttcccaaagtgctgggattacaggcgtgagccaccacatcaggcctattttgatgcttaaggtgactcctgtgtcttcttgacatgccctgcaactgtttttagtattttcttaatttatggcacaatgagatgctctaggtttatcttataccttctctgtaccaacctcagaactggccatttct

SEQ ID NO: 352609 - DNA, 580 bp, Homo sapiens
cctgtcagtcttgccaacttttaaatttttgcaatctaataggttagatgtagtatctttgtcttctttcagtttgcatttcttgtattattaataaaactggtcatctatttatgtttaatatagatatgtratctgttaatgttcacttttttctaaaggatttttggtgtttttctttacagttctttatatatcagataaattagtacttcgtgacatatgttgcaaatagttattctcaatctgttgtttgccctttgactttgcttgtggtggggttctgaggggtttttgtttgtttgtttgtttgtttgtttttgcaatgcaaaaggttttgatttttatgtggtgaaatttatcaatttttagaaattgtatctgaattctaagtcatatttaggtagcattccctccactcaggctatagagaaaatcatcccgattttcctttagcattgttaggtcaatattttaacatttagatttctgattcatttggagtttattcttatgtatggtattgttaaaagaaaaaccttagccaaattaaatttaacagagtttaattgagcaaaga

SEQ ID NO: 352610 - DNA, 580 bp, Homo sapiens
cctgtcagtcttgccaacttttaaatttttgcaatctaataggttagatgtagtatctttgtcttctttcagtttgcatttcttgtattattaataaaactggtcatctatttatgtttaatatagatatgtgatctgttaatgttcacttttttctaaaggatttttggtgtttttctttacagttctttatatatcagataaattagtacttcgtgacatatgttgcaaatagttattctcaatctgttgtttgccctttgactttgcttgtggtggggttctgaggggtttttktttgtttgtttgtttgtttgtttttgcaatgcaaaaggttttgatttttatgtggtgaaatttatcaatttttagaaattgtatctgaattctaagtcatatttaggtagcattccctccactcaggctatagagaaaatcatcccgattttcctttagcattgttaggtcaatattttaacatttagatttctgattcatttggagtttattcttatgtatggtattgttaaaagaaaaaccttagccaaattaaatttaacagagtttaattgagcaaaga

SEQ ID NO: 352611 - DNA, 460 bp, Homo sapiens
ccaggctttcttcagggaatagaagggctctaacctctatacccatgcctacaaagtgggagtgattttggtttgatactcataagctatagacttcccctgactttctcacttggtgagagagaattggaatggcaacaagagtaataacatgccccccgatgggaagatgcacagctcccagtagcaatgttaatgcagacaccactcctattttccaaaagacagaaaaaaaaaaaaaaaggaaccagagtttggaattggacagaccagggtccaaggattctgtcacttactaattctgtgatcttggacaagccacttatcttctttgagctactgtttctttatctgtaatataagtattacatgacmccatagcacatagagctgctgtgagaattattaataatggtgaaattaataactgccatttgctgagcacagactatatgccaga

SEQ ID NO: 352612 - DNA, 496 bp, Homo sapiens
acaggcaagacaaaaacatttgccaaaatacaaaattccaaacattttcttgccccaggtaatatgagtgactgaagcttaaattcttgcttctgatgggtgaaaaaaaaaaaagaatgactaagaactactatttgatagcacaacagagtgactatagtcaattataactgaattgcacatttaaaaattactaaaagagtataattgaattgtttgtaacacaaaggacaaatgcttggggggatggataccccattctccatgatgtgattatctcacattgcatgcctgtatcaaaacatctcatgtacctcataaacatatacacctactatgtatccwcaattttttttaaatccctgcttctttgaaccctcccaaatcacccagtgcttgtctctgaatcctatactaagctctttctaacaccctttgaataagaaagcccctcagttccccatgctgtgctaagagaaatcaacgcagcctgttg

SEQ ID NO: 352613 - DNA, 566 bp, Homo sapiens
caggtacattcatttacaaataaaagaactgaggtgctaacattttctggatttgcatttcttaaaggcagagtggggaggtagcaaaagctgtcctggggaccagcccagttctttttgatccagtgctgttacaagcattcaatctatcttttactctctagttttctttttgctttactctagtttgttttcaataatcttgggaattacacattttttttctttttgagactgagtcttgctctgtcactcaggctggagtgcagtggtgcgatcttgggtcactataacctccacctcccgggttcaagcgattctgccacctcagcctcccaagtagmtgggattataggcacgcgccaccatgctcagcgaatttttgtatttctagtagagatggggtttcaccatgttgaccaggctagtctcaaactcctgacctcaggtgatctgcccgccttggcctcccaaagtgctgggttacaggtgtgagccaccacacctggctgggaattacacatattttaaaagtgaattttaattttatttactttaaaaatgtt

SEQ ID NO: 352614 - DNA, 527 bp, Homo sapiens
gacaattggtttagaagcttggtgctatctgggccaagggctttgatttttctgggctgctttctcatagtcacaagaygcctgcagtagctctagccatcacagctttgttcaaaggagaaaatgaggaggagactgggcacagtggctcatggttgtaattctagcactttggcaggctgaggtgggcagattacctgagctcaggagtttgagagcatcctgggcaacatagtgaaacctcgtctctactaaaaataaaaataaaaataaaaaattttaaaattagcagggcacggtggagcatgcctggagtcccagctactggggaggctgaagcaagataattgcttgaacccgggaggaagaggttgcagtgagctgagatcatgccattgcactgcatgcagcctgggcagcagagcaagactgtctcaaaataaataaataaataaataaaataaataaaaataaaaataaaatttttttaaaatgaggaggaaagtagaggagaagatgctgtattt

SEQ ID NO: 352615 - DNA, 527 bp, Homo sapiens
gacaattggtttagaagcttggtgctatctgggccaagggctttgatttttctgggctgctttctcatagtcacaagacgcctgcagtagctctagccatcacagctttgttcaaaggagaaaatgaggaggagactgggcacagtggctcatggttgtaattctagcactttggcaggctgaggtgggcagattacctgagctcaggagtttgagagcatcctgggcaacatagtgaaacctcgtctctactaaaaataaaaataaaaataaaaaattttaaaattagcagggcacggtggagcatgcctggagtcccagctactggggaggctgaagcaagataattgcttgaacccgggaggaagaggttgcagtgagctgagatcatgccattgcactgcrtgcagcctgggcagcagagcaagactgtctcaaaataaataaataaataaataaaataaataaaaataaaaataaaatttttttaaaatgaggaggaaagtagaggagaagatgctgtattt

SEQ ID NO: 352616 - DNA, 527 bp, Homo sapiens
gacaattggtttagaagcttggtgctatctgggccaagggctttgatttttctgggctgctttctcatagtcacaagacgcctgcagtagctctagccatcacagctttgttcaaaggagaaaatgaggaggagactgggcacagtggctcatggttgtaattctagcactttggcaggctgaggtgggcagattacctgagctcaggagtttgagagcatcctgggcaacatagtgaaacctcgtctctactaaaaataaaaataaaaataaaaaattttaaaattagcagggcacggtggagcatgcctggagtcccagctactggggaggctgaagcaagataattgcttgaacccgggaggaagaggttgcagtgagctgagatcatgccattgcactgcatgcagcctgggcagcagagcaagactgtctcaaaataaataaataaataaataaaataaataaaaataaaaataaaatttttttaaaatgagraggaaagtagaggagaagatgctgtattt

SEQ ID NO: 352617 - DNA, 570 bp, Homo sapiens
gaacgacctcttttctctttcacagagtttcctggaagtgccctgcacatccctaaggcatacttgctccatctatcctgtcccagtcgtcaatacacaatgatgagtagagtcacttgcaacctgctcacacagcagcttttatcagctgaagccatttttcccagtcttgtctggcaatgctggacattagggatcatctacttgggtccaaatggttatcaagggctacctggagaaacacatcctagaaaagcttccctaaccccagaggactggccgacctatgaatagcagctctaacagacgccagacggatgcaaactgcctggagactcacctttagccgctctgaaatgacaccgaccttcaaaggttgaaatcgggcactttccatacraagggcagagatcgccgacagttttgctttcttattatctgcttaatttatacttttattgattcttgccctcagacaaacaagaaggtttaaacatgcatgattggaaaactcaaagaatgctagttttgtttgtttgccttttagccatacaaaagaaaaaaaaaaat

SEQ ID NO: 352618 - DNA, 410 bp, Homo sapiens
tattagggtggcacaaaataattgcgaattttgccattactcttaattacttttaatggcagaaactgcaattgcttttgcaccatcctaatacatttacacatacatacacactgatatatatatacacacacatatctatttgtatatctacacaactatgtattcgcatatatatcrcaaatacctacatgcatatatatgtgcatgtaggtatttgcaaatacaatttttaaattttaaatttttgtagtatgtagtaggtgtacatatttatggggtacatgagacaggcaatacataataatcacagcatggagaaatcccctcaaacgtttatcctttgtattattacaaacaatccaattatactctttcagttatttaaaaatgtacaattaagttgttat

SEQ ID NO: 352619 - DNA, 528 bp, Homo sapiens
agaatcattaagagttaacacagggcatagtgcagtggtaaccagttgagaagatcagagctggaatagaggaacatttggctgatggccagaacaggtaaagtaaataaataaagtaggttaagtcagtgaaacaagagacagaggtaggttgttgataaactggatacaatgtaccttgtctacaaaggacaatgaccactcagttccaatctattactgccakgtaggaatgtggggccagtatcttctacatttttaagaaatctcaaaatctaaatttttaggtgaaattagctagcaatgaagtctaattaaaaaatatataactgggcagattaaaaccaggcaagtcaaacaatattttttatcattacagaccattggccactatttctcaaatttgcaggagctagtaagacttatttatgaaacttgtaggagccttaagaatacttgatgatctcgggaaatatctttgcaaggcactttgttcctgtcattgtagatgtgggtaatagctagtga

SEQ ID NO: 352620 - DNA, 620 bp, Homo sapiens
aaggaccaaatgtggaaatgccttgaaaacctggaggagctttacaatgaagtgcaggtcaagacctgagggttagggcccagcacctccactgcccaggtgtgtgaccttgccaaatcactagcccaccctgtaaacagaagagctcaaccagctatgtttttaatccctgccagctatcaaattttatgatattagaaaatgagggattattatcatcacttctttttcaccttggttacacagggagttaaaataaactggcctttttgcrtattacttttattttgtggaataaagagtttactgttagcaaacttcaggaaactaaccagagggtagagctaaaaggaaagtggcaataaatttattgagaaatcacattttgcaagtcagtggctaagcaaaaagaaaaaaagaaaaaaagattatgcttccagccatgggggcttgcaggtaatgcatcttaacactctttagaatatcagaaatcatcaactacagccaatgtctactattactgtaattctagtaatctagcacaaaggaaacaaaagctgaagggcataggggaagaatctcagagaaatggtgaatttgttctacacgttttgccaata

SEQ ID NO: 352621 - DNA, 602 bp, Homo sapiens
gtaggtattttaaagcttatgttactctaaaataaaactctatggccttttacaagtattttatataagtaatctatgatcatggtagagaaattagaaaaaaacaaagaagatagaaaaaaaaaaaaaactcacacataatcctatctgccagaaataaattttggtgcttattctgacaaatgtgtttacatttatttattcatttgacatatttattgagccctgtgccaggcatgatcccaggccttgagagtacaacatgaataaaacagaacaacaacaaaaaaaatctatgccctcgatgagcccaattatgtacaaaaaagacattttaaaaaccaaaagttataccatattttgcatatctgtagtttgtaattggcttttcctatgtccyaggttttggaagtatccccctaattttgtcaggctgttgtggttttcccagtaatcttgactgaactgagagatgagttctgactgctacataattaacagtccagcctgacttctctttccatagtttgttgctatgtgatcagaagaaaatcttctctcaaaaaaatcgagagtactgtctctgaatttctttagaccac

SEQ ID NO: 352622 - DNA, 546 bp, Homo sapiens
ctctcctggtcatcagcttaccagggtgggtgctcagcccagaatgtccccacccccttcattgggcagctctttcccctccttcaagggcagcccccagctcaccaccctgcgtcggctctcctgatctgcaggcctgagtgatcatcttargatagtgactgcctgctgcagtgggactgtgagctccataaggatgggcccctgccatggctccaccgatagaacctggcacaaggagacgcccagaagatagccaatgaatgagtgaatgagtcttacttatgaagcagttaccaaagctgaccaatcattccggtttgcctgagactgagggttttcctgggatgcaggactttcagttctaaaatcaggaacattctaggcaaattgtgtggcaagtgttgggttcagcttttagagccaccatttggtctcatcctcatgttttacgccaggttccctagaaggagagcctcaagaaatgctctcagcagggagtgagggatgcaggcaggcagggaaaacaccacacaaggctgtgtc

SEQ ID NO: 352623 - DNA, 546 bp, Homo sapiens
ctctcctggtcatcagcttaccagggtgggtgctcagcccagaatgtccccacccccttcattgggcagctctttcccctccttcaagggcagcccccagctcaccaccctgcgtcggctctcctgatctgcaggcctgagtgatcatcttaggatagtgactgcctgctgcagtgggactgtgagctccataaggatgggcccctgccatggctccaccgatagaacctggcacaaggagacgcccagaagatagccaatgaatgagtgaatgagtcttacttatgaagcagttaccaaagctgaccaatcattccggtttgcctgagactgagggttttcctgggatgcaggactttcagttctaaaatcaggaacattctargcaaattgtgtggcaagtgttgggttcagcttttagagccaccatttggtctcatcctcatgttttacgccaggttccctagaaggagagcctcaagaaatgctctcagcagggagtgagggatgcaggcaggcagggaaaacaccacacaaggctgtgtc

SEQ ID NO: 352624 - DNA, 572 bp, Homo sapiens
gctgtcccctggcttaacttcttcaggggcattccagggctgctgggatttggccccaagagctcagcctgtccagcaagcctgcgggacctggggagggcaaggtgggcaccctcagctcctgctgctgctgctgtggtctccccagcatcagacgctgctgggcatcacagaacctgggggctctgcctcaagccaagcagggggtggtttccatgagtcagagccatgggtgatacrggggagagggctcacggaagccaaacccctggaaaggggaaggagatagctcgaggtcacgcggcaaatctgagctgacatacactgcctctgaaggtgcctctctccatgcttggtcccttttagagacctgaaagcagatgcagttgggcctgtcactgcagtgatatgtggagttgggtcttgggtgggcctttgcttttgttgttattttacttctgtaagtcagtggagtgcggagatgagagctcatgctcttgagttaggcttcctgggttcagattctggcttggctgtttgttggctgtgtttaacctctccaagcctcagca

SEQ ID NO: 352625 - DNA, 572 bp, Homo sapiens
gctgtcccctggcttaacttcttcaggggcattccagggctgctgggatttggccccaagagctcagcctgtccagcaagcctgcgggacctggggagggcaaggtgggcaccctcagctcctgctgctgctgctgtggtctccccagcatcagacgctgctgggcatcacagaacctgggggctctgcctcaagccaagcagggggtggtttccatgagtcagagccatgggtgatacaggggagagggctcacggaagccaaacccctggaaaggggaaggagatagctcgaggtcacgcggcaaatctgagctgacatacactgcctctgaaggtgcctctctccatgcttggtcccttttagagacctgaaagcagatgcagttgggcctgtcactgcagtgatatgtggagttgggtcttgggtgggcctttgcttttgttgttattttacttctgwaagtcagtggagtgcggagatgagagctcatgctcttgagttaggcttcctgggttcagattctggcttggctgtttgttggctgtgtttaacctctccaagcctcagca

SEQ ID NO: 352626 - DNA, 586 bp, Homo sapiens
tgatgtattgtttgggtcagtgtccctttccaatgcatactaatatattatggttattatatatgaatatatttaatgacatggaaacagttgttgattttctaagtttctttccctttttggggggggagtggttcgagttgtaatggacccagatggaacttgtaacatgggccatacatgatagaaccaaattcagatatcactaaataaaatcttgtacactgagctgtaaaaacaaaacaaaacaaargaaatgtgcttttactgttgatcaaggggtacaaagtttcaaacaggcatgaggaatgggttttgagactactgcacagcagggtgactgcagtcaataataagtattacatatttcaaaataagagtaacctttcttctttctttcttttcttttgggtaagggtaacttttctttctttcttttattatttttttttggggggaggtctcgctctgtcacccaggctggagtgcagtgtgatgtgatctctgctaagtgcaacctctgctttctaggttcaagtgattcttgagcctccgcctcccgagtagctgggattacaggtgcaag

SEQ ID NO: 352627 - DNA, 586 bp, Homo sapiens
tgatgtattgtttgggtcagtgtccctttccaatgcatactaatatattatggttattatatatgaatatatttaatgacatggaaacagttgttgattttctaagtttctttccctttttggggggggagtggttcgagttgtaatggacccagatggaacttgtaacatgggccatacatgatagaaccaaattcagatatcactaaataaaatcttgtacactgagctgtaaaaacaaaacaaaacaaaggaaatgtgcttttactgttgatcaaggggtacaaagtttcaaacaggcatgaggaatgggttttgagactaytgcacagcagggtgactgcagtcaataataagtattacatatttcaaaataagagtaacctttcttctttctttcttttcttttgggtaagggtaacttttctttctttcttttattatttttttttggggggaggtctcgctctgtcacccaggctggagtgcagtgtgatgtgatctctgctaagtgcaacctctgctttctaggttcaagtgattcttgagcctccgcctcccgagtagctgggattacaggtgcaag

SEQ ID NO: 352628 - DNA, 551 bp, Homo sapiens
tttgcacaactccaggaagtaacactcacagaactaacacagcagctctgatcgtcagcacctgtcaccatctaacacagcatacatattctttgcttrtttacctctctgagggcagggatttttgtttggttcactgctatatctccaagtgcccagaacaatactgggtgcatagtaggtgccaaataaatatttataaatgaacaatctgttaatctaattttggcatcttctaaagctctggtctaagagttgtccctgactttcatatcttcctgtctaatgggaaaatcagacatgaatgcaaacaattacaatgcaacaggatcagaaaagaaaccaatgcttggggaggtgatatgtattggttagaagctagtgcttgatcttacacaaatctggatgctagctccaaatcagcccatagctgtgtgaccttgggcaagtgatataacatctctgtatcataatattctcaaatgacagatgactataacaacaaatgtctacatttacaggcttgtgatgaggagtcagtgaggggatgc

SEQ ID NO: 352629 - DNA, 382 bp, Homo sapiens
agtcgtccgcccctcacgccctctcttcctctcagccttccgcccggtgaggaagcccggggtggctgctccgccgtcggggccgcgccgccgagccccrgccgccccgggccgcccccgcacgccgcccccatgcatcccttctacacccgggccgccaccatgataggcgagatcgccgccgccgtgtccttcatctccaagtttctccgcaccaaggggctcacgagcgagcgacagctgcagaccttcagccagagcctgcaggagctgctggcaggtgagcagggcgagggcgtcggagggacgcgggccccacatccctgggtcagagtccggccgtcggggctgcgggaacctcggcagcgccccggggccggtc

SEQ ID NO: 352630 - DNA, 560 bp, Homo sapiens
acccttaaaaagacactgtctcaactgtggtgttagcaccagccagctctctgtacatttgctagcttgtagttttctaagactgagtaaacttcttatttttagaaagtggaggtctggtttgtaactttccttgtacttaattgggtaaaagtcttttccacaaaccaccatctattttgtgaactttgttagtcatcttttatttggtaaattatgaactggtgtaaatttgtacagttcatgtatattgattgtggcaaagttgtacagatttctatattttggatgagaaatttttcttctctctataataaatcgtttcttatcttggcattttaatcaatctcttgtcatgattatagaggtttagctaaaagtattttttcttagaagacaggttctataaactgaatmtctgttgcacactggtcatgctggaaaaacatttgatgaggaatgaagatgctctgtatatacatgtttaggttttacaggaaacacaggagtagcatgttttaaaaatttctaaagtcaaaacatggacacattcacaggct

SEQ ID NO: 352631 - DNA, 526 bp, Homo sapiens
cacttacatgccatcagatgatattaaactataaactttgagaactcctttctcatttttctctaaagttatttatctagctaaagggaaccactatttccattgttaaagaaagaaaataaatgagatttcctctaataaaaaagtccattcttattctaaatcctagccaaggagccccacgaataatgccaaaagacagcttkccgtttcatctttcacctgcatgctaagttttcatagatttaactgtaaccattaactgtttcctatcaccagctttttatcagaaaaatccatagttagaaacattggaaaatcatttcaaggagtggttctatgggcaagcaagaagtaagtttttctattttgaaatagctaaaatgtctttgtagaaaattacacagaaataatcatatatcatacagcacactaagagatgtagttatgtgccaagacgtggaattatgaaatcagagcttgaagagaataaaaacggccaagacaactgcggtaaacagcaaca

SEQ ID NO: 352632 - DNA, 526 bp, Homo sapiens
cacttacatgccatcagatgatattaaactataaactttgagaactcctttctcatttttctctaaagttatttatctagctaaagggaaccactatttccattgttaaagaaagaaaataaatgagatttcctctaataaaaaagtccattcttattctaaatcctagccaaggagccccacgaataatgccaaaagacagcttgccgtttcatctttcacctgcatgctaagttttcatagatttaactgtaaccattaactgtttcctatcaccagctttttatcagaaaaatccatagttagaaacattggaaaatcatttcaaggagtggttctatgggcaagcaagaagtaagtttttctattttgaaatagctaaaatgtctttgtagaaaattacacagaaataatcatatatcatacagcacacyaagagatgtagttatgtgccaagacgtggaattatgaaatcagagcttgaagagaataaaaacggccaagacaactgcggtaaacagcaaca

SEQ ID NO: 352633 - DNA, 595 bp, Homo sapiens
tgaatgcctgaactctgtttcatgtcctacttctgtcttcctctgcaatttgtttaaatgactttgccaggaggactttccagaggtggggttttgttcttgaactcatgtgagaacacattcgtgccctacattctgaggggaggtgatctcggcggggatttttttgctcatggaagaaaartatatgagcgcatttttttctactgggcacagctggtagttccctactgactggtgtttgttttgaagtcacgtggcaaagggggtttctgccaatgtttactcattacacattcaaatatgacaccctgacgcccattcacagtagaacttcaatgttgctatccaattctcttgccagaaacggaaagtttattcccagagtgaaagttgctctcttcgcaaatgcagagggtttagtgctcaacagtgatagttgagaattgttggtttttaaatattaaatttattgaattatttaatttttacatgatttaagtggactgcttggctcattatacctaaaataattcttagtcagtaccgcatttattaaagaataactttatgctacaaggaagggaggctgaca

SEQ ID NO: 352634 - DNA, 600 bp, Homo sapiens
taatcaatcaaattagcaacttttgccacrcattcattaggatgtgtagacatgactccagggcaggccagtcttcaactaggagcagtgggtagggaatggaaggtgacaattagaaggatatgccaaggctgagccaatgtaaggagcattgaggcatcatataggaaagcccaatataagatgaaaaggattcctgggatgttcgtctgcatggattttaaagactgggttgttaaaagaacagagagtggcaaagcccactttgcttcattcaagttaatcaacatatctcatttccatctggccataatgctcaccatttttatggtaatcatcatggtcagcaatcagagatgtgtgttaaaaccccattccttccaaacagagatgtgaaacagaggaaatctaagtcagatatttcaatgcaacatgtatgtaggtggtagtgtagtctcccttttacacctaagagagcacatcacatgcccattgactcattccgttatttaattaaccatcatttatggttgagcagaaccagtactaatcaggcatggtgccacatagtggggaacaaatgaacatctattttgccct

SEQ ID NO: 352635 - DNA, 595 bp, Homo sapiens
tgaatgcctgaactctgtttcatgtcctacttctgtcttcctctgcaatttgtttaaatgactttgccaggaggactttccagaggtggggttttgttcttgaactcatgtgagaacacattcgtgccctacattctgaggggaggtgatctcggcggggatttttttgctcatggaagaaaaatatatgagcgcatttttttctactgggcacagctggtagttccctactgactggtgtttgttttgaagtcacgtggcaaagggggtttctgccaatgtttactcattacacattcaaatatgacaccctgacgcccattcacagtagaacttcaatgttgctatccaattctcttgccagaaacggaaagtttattcccagagtgaaagttgctctcttcgcaaatgcagagggtttagtgctcaacagtgatagttgagaattgttgrtttttaaatattaaatttattgaattatttaatttttacatgatttaagtggactgcttggctcattatacctaaaataattcttagtcagtaccgcatttattaaagaataactttatgctacaaggaagggaggctgaca

SEQ ID NO: 352636 - DNA, 389 bp, Homo sapiens
acaacacaatcaaaaagcaatcccatcaaaaagttgacaaaggacaagaattatacaaacacccaacaaacatttgaaaaaaatgctcaacatcactaattatcagggaaatgcaaattrcaaccacaatgatataccaccttacttctgcaagaatggccataataaaaaagtcaaaaaataatagatgttggtgtggatgtggtaaaaagggaacacttttacactgctggtgggaatgtaaactagtacaaccactatggaaaacagtatggagatcctttaaaacctaaaagtagaactaccattcaatccaacaatcccactgctgggtacctacccaaaggaaaaagaagtcattataagcttatagcagtacaatttgcagt

SEQ ID NO: 352637 - DNA, 528 bp, Homo sapiens
aagaacatcccctcggttagcaaagccagccccgcgggggcacagcgtctcgtattccttggtgccaggtttggggcactcctcacactcggtgccccaagccgccccgacagcacagcagcaggcatccatgcggaactttccaggaacggggtggatgcattcatcttcatcccacttcaagtaacactgctccatgcgaatatctacaccgagaacgaaatcacagggtgagaatgagttgaaacatccattgaacagtcacatgtcaagcgtctgctcagcaccaggcatcatgcaggacccttgcggtgtactggtgggcaagatgcagtccctgacctcctggaatggactccataatgacagtcatttaaggagaacaaaggtgagatcctcttcagtcttaattctcacaagaaaccctcaggaagaaaaggtcctctcatgagatgactgcttcatgtctattactccttttttgtattgttcactttagaaaargtaagataattttaatgataattc

SEQ ID NO: 352638 - DNA, 570 bp, Homo sapiens
aaattttcctttcatatctggtatcacgtttttaatttctttaagttggacttcacctttctatgatgcctccttatattagcttaataattgaccttctgaattctttttctggtaattcagagatttttatcttagtttggatccactgctggtgagctggtatgatctttcaggggggttaaagaacagtgtttaagaattgtttttctggttccttcttatttgagtagactatgtcagaggtaagatctgggatttaaggtattctgttcagattcttttgtcccacggggtgctccattgaagtggtgttcttctccttcccccaggagtggggtttcctgagagccaaactgtagtgattgtttttgtcttttggatctagccacctagcagagtttccaggctctaggstggtactgggaagtgtctgcagagtgctgtaatccatcttcaggtcttgcagtggtagataccagcacccaatctggtggaggtagcaggggagtgaggtgaactctgtgagggtctttggttgtgtttttgtttagtgtgctcattttgtgt

SEQ ID NO: 352639 - DNA, 587 bp, Homo sapiens
cagggctaatatctgatgtattttctttcaggcacttaaaaaatgtgtgtatgtgtgtgtgtagatttatctctagttcaaaaagtaaatcatacttatggtaaacaatttgaagaaatagagaagtatgaggaagatgtaaaaatcacctgtaaccctctagagataaccattcctaacgttttagactgactccacatcaaatttgttcttccttttgaatggtagagtacccagtgaaatattatgcactttaaaatttttattttatgtggattaaagggaataacgaatggttagtatatttttggtggcataatgaaaagtttttcaaatgaacaaataataaatgactgttaactgattttgaagcagtgataaggaatccagtcaaagctgatatagcaaatactaattggctaaaacaaatcatatgtcatgttttccttgtagagcagtggctctcagttaagtgtgcataatattaccaagacrcttgttaaaatgccgattcataagtttcccggtatgcagcccaggaatctgaattttgacaaactcctcaggtgattctgatgtgagtgatg

SEQ ID NO: 352640 - DNA, 552 bp, Homo sapiens
ggtgttgtgggtagcacatatggttccttgaggttatgagaaggaaatacagtacggtttggcctgcaatgctaatggtctcacaagcagtcaaggtattttgctacagtggttgtgcttcawcttctgttgcctggtgtgtctggtgatatgaaatgttgtcacaaatgagctgctttggcttcgatctacgttataaaggatctaatgacattcatgttttttaaattattgattacactgcccattcagctctgtgtggctttctttaaaatcatcaggtgtgtatcagctggatgactggcagaaaaccaaaggaaacatctcttgtatctattggatttttaaaaagcacctctaaaaaaaatagctcaaatttataaatctaaagaaaaacaagtgagtttccctttttgtttacatagtttgttcatttctccatatattactgcattaaaaataaataaacatctatatttttttaattagcaactatagcaaaatacccaaagtgttacagactgctaacaggaaaaaaaaaaaaagctcaca

SEQ ID NO: 352641 - DNA, 552 bp, Homo sapiens
ggtgttgtgggtagcacatatggttccttgaggttatgagaaggaaatacagtacggtttggcctgcaatgctaatggtctcacaagcagtcaaggtattttgctacagtggttgtgcttcaacttctgttgcctggtgtgtctggtgatatgaaatgttgtcacaaatgagctgctttggcttcgatctacgttataaaggatctaatgacattcatgtyttttaaattattgattacactgcccattcagctctgtgtggctttctttaaaatcatcaggtgtgtatcagctggatgactggcagaaaaccaaaggaaacatctcttgtatctattggatttttaaaaagcacctctaaaaaaaatagctcaaatttataaatctaaagaaaaacaagtgagtttccctttttgtttacatagtttgttcatttctccatatattactgcattaaaaataaataaacatctatatttttttaattagcaactatagcaaaatacccaaagtgttacagactgctaacaggaaaaaaaaaaaaagctcaca

SEQ ID NO: 352642 - DNA, 570 bp, Homo sapiens
aaattttcctttcatatctggtatcacgtttttaatttctttaagttggacttcacctttctatgatgcctccttatattagcttaataattgaccttctgaattctttttctggtaattcagagatttttatcttagtttggatccactgctggtgagctggtatgatctttcaggggkgttaaagaacagtgtttaagaattgtttttctggttccttcttatttgagtagactatgtcagaggtaagatctgggatttaaggtattctgttcagattcttttgtcccacggggtgctccattgaagtggtgttcttctccttcccccaggagtggggtttcctgagagccaaactgtagtgattgtttttgtcttttggatctagccacctagcagagtttccaggctctaggctggtactgggaagtgtctgcagagtgctgtaatccatcttcaggtcttgcagtggtagataccagcacccaatctggtggaggtagcaggggagtgaggtgaactctgtgagggtctttggttgtgtttttgtttagtgtgctcattttgtgt

SEQ ID NO: 352643 - DNA, 531 bp, Homo sapiens
aattctacttccaagtatatttttgtataggtaacattttaaagtaaagatgcaaccgtatggagaaaagagtagcctaactaacttttatttttaatttttgtaggctccaagaggacttggaaaattcatgatcctaataaaacaagttcttccctagaaacaactgtcagccactttccagtagaagagagagagacacagcagtgttgctcccyggcaggtatgtgtattatcctggggccttcttccctgcccagattcagacacaacaccataaagaggacattcgattacagatcaagagaaatcttatttccaataatagatggtgctattccttcctattgatatttattacatatttttcatgaagataagaatctaactttttaaaaaaagtaatagtttattctctttaaaattacatgatcatttgtcatttaaaaaatcaatataaatattttacagaatttaaaaaaaactattcatttaggtgtatatttttatttcttctacttatttgagatt

SEQ ID NO: 352644 - DNA, 249 bp, Homo sapiens
tgggtggagacacagagccaaaccatgtcaatctccatgagttcaattgttttagtttttacctcccacaaataagtgagaatatatgaagtttgtctttcttttcctgtcttatttcacttaacataataacctccagttccatccatcttgctgcaaatgacagcatctcattcttttttatgactgaatactaccccrttgtgtatatataccatattttctttatccatttgtctgttgatgacc

SEQ ID NO: 352645 - DNA, 528 bp, Homo sapiens
cctgtgcatatggaatattactcargaacttcttgcccagaccaatgtccttggagtttccccaatgttttcttatagtagtttcatagtttgagatcttagatttaagtctgtggtccattttgatttgatttttgtataaagtgagagaattaagtttcgttcttctgcatagatattcagttttccccgcaccatttattgaagagactgtcttttccccagtgtatgttattggcagctttgtcaagaataagttcactgtaggtatgtagatttatttctggattctctgttccattagtctatgtgtctgtttttgtgctagtaccatgctgtttttgttactatagctctgtagtataatttgaagtcaggtaatgggattcctccagatttgttctttttgctcaggatagcttttgttattctgtgtcttttttgactcaagatcaattttaatactggtttttctatttttgtgaagattgtcattggtatttttatagtgattgtattgagactgta

SEQ ID NO: 352646 - DNA, 635 bp, Homo sapiens
atctggccacatttatgtagtttgggcttccccctaaagggagcaggcattctatttgtcagtcattctagaaagaagtcacccacatgttcaactcaaattcagggtttctattactgagggagaaggagaaatggatattgaggaacaacatattctctaccataagtgggaagtgaattaaaaagawttcacccatatgttagttcggtgaaatgaaggcctaatgatggctgcccccaacaaatttcagtgagctgaaaagaaagtacatgaagcaattaataaaacaaggcaggggagtagaagagagaacggaggatggaattgaacatagcataaaaaaaataggcatacaatacactcagggagaagacatactccaagaaacagaacaaaattcaggaacacaaatctttcctgcccttaaattctccacatttaagaaaacattaaatctgtgttttaaagatcacaatcagatgatagatggtagaatttaattttttttaagtgagattgcagaattaaggggaaaaaatatcaaaagtaaaaacaacatgattaaggaccaagcaataagctaaatgcataaaggaacataatcaacatgacagaaatccaagtcagtgatt

SEQ ID NO: 352647 - DNA, 489 bp, Homo sapiens
gtgggagaatcgcttgaggccaggagttcaaaaccatcctagtcaacatagtaagagcccatctctacaaaaaaagaaaagataaaaaagaaattaaaaagaaatagagaataacagatttcatcatataaccaggactctggattaccaagtgtcaraaacccagtcaaataagcttaattgaaatcgcccaggcacagctggactagaggctcaaaaaatgttattaagggtcttaggccctccatctctcctctgtgcccattctctttgtttgttgcctcctttcctcctacaataagcaacttcttccaaatagctagggagaatagttacattgtccttagagcttgcaatccctgtggactagagaatctctcagagtccacatatcaaatcccagcaaagactctgatgtgccctgcttggatcacgtgcccatatgtgaacgcgggacaggaaggggagtattctgattgcccagggctg

SEQ ID NO: 352648 - DNA, 511 bp, Homo sapiens
tctgttctgtgggttgcatttatagactttattaccttcatgccgaattttcacgccttataatatctagcagagatacaatcagatattcctgctgaccaataaatctaaacaataatgtatattgacaattctgaagacatttctaattttattttaactgataattttaaatgcagcttatttgtcataagatttacttaaatcaagtgaacctgaaaaatcatttgggcttaaagtttctatttttctgataaagtatttaattgaagccacyaacaagggctggaaagcagtcccaaattacagctgtccaatgagtactctcccagtactggataaaaagggagaggccaccgcccacaaccttctgaacccagagcaggtggaggctggggctttggcgccacctctgcggaatcccaagcccccttcgcacagccaagaaaacgttgctccatcgcttaagccttagagcaggacacaagcgtttgtgctgatcaacgaggca

SEQ ID NO: 352649 - DNA, 520 bp, Homo sapiens
gcagcttggggtttggctcgtggatgctggggacaaggcctgagccccagatgtggctgggcctgacccaggcagctccaccccttccttcccaggaaacaccttttgctcgagcagtaggaactaggcgtgtgtacattctgctgcctgatcctggctcctggctgagggtttgtgggctcagatggactagacacccggccacaaccctcctgggcatagccttctggctcycccagcccaggcggaggcagtgaacgactctcctcacccagagtgttttcccgaaggcgcttctgcctgagggcaccaggctgggccaggtactgcagggcgctgaccagcactggcctgggggccccaagagccccagatggcatccctctcacacactccccctgtctcaccaacagctataaatagactcggctctctgctggcacggcctctcccgaggaagcttttaattctctgcgtcctctgcagggggtggctcccacaggcctgggagggaacagac

SEQ ID NO: 352650 - DNA, 520 bp, Homo sapiens
gcagcttggggtttggctcgtggatgctggggacaaggcctgagccccagatgtggctgggcctgacccaggcagctccaccccttccttcccaggaaacaccttttgctcgagcagtaggaactaggcgtgtgtacattctgctgcctgatcctggctcctggctgagggtttgtgggctcagatggactagacacccggccacaaccctcctgggcatagccttctggctctcccagcccaggcggaggcaktgaacgactctcctcacccagagtgttttcccgaaggcgcttctgcctgagggcaccaggctgggccaggtactgcagggcgctgaccagcactggcctgggggccccaagagccccagatggcatccctctcacacactccccctgtctcaccaacagctataaatagactcggctctctgctggcacggcctctcccgaggaagcttttaattctctgcgtcctctgcagggggtggctcccacaggcctgggagggaacagac

SEQ ID NO: 352651 - DNA, 520 bp, Homo sapiens
gcagcttggggtttggctcgtggatgctggggacaaggcctgagccccagatgtggctgggcctgacccaggcagctccaccccttccttcccaggaaacaccttttgctcgagcagtaggaactaggcgtgtgtacattctgctgcctgatcctggctcctggctgagggtttgtgggctcagatggactagacacccggccacaaccctcctgggcatagccttctggctctcccagcccaggcggaggcagtgarcgactctcctcacccagagtgttttcccgaaggcgcttctgcctgagggcaccaggctgggccaggtactgcagggcgctgaccagcactggcctgggggccccaagagccccagatggcatccctctcacacactccccctgtctcaccaacagctataaatagactcggctctctgctggcacggcctctcccgaggaagcttttaattctctgcgtcctctgcagggggtggctcccacaggcctgggagggaacagac

SEQ ID NO: 352652 - DNA, 647 bp, Homo sapiens
atgcgtgtgtttgtgcattcctatgtgtgaatgtgcacctgtatgtgtgagtatgcatgccggtgtatgtatgttggtatgtgttcagctgtgtatgttcagctgtgtgtgtgtctatttgtgtgtctctgtgtttgtatgagtgtgtctgcgtgtgcctgtgtctctgtgtgtgcatgtgtgtttgcacctgtatgtccacgtgcctgtgtctgtgtgtttgcatgtgtgtgcatgtgtctgtgtgcctgcatgtgcctgtgtgtgcatgggcctgtgtgtctttgtgtgcatgtgtgtgtgtttgcacctgtgtgtgtgcacgtgcctgtgtgtgtttgggctgtgattgcatctggttattctgggggtggaattgctgtggaacatggaattaaagtgcaggttccgggtcttgctgccagggagcgactggcccccctatcacacacctgtgacccagagaacggcaggtgagccttgcggcytcactgttgccacaggtcaggtgctgatgaggacgggaagccaaatggggctgttcagccctaggcagagctgcttggagcacattcttaatacgccagccatcgctacctcagttccacagccgatgttagggaagaaagatgcggggacacggcaac

SEQ ID NO: 352653 - DNA, 647 bp, Homo sapiens
atgcgtgtgtttgtgcattcctatgtgtgaatgtgcacctgtatgtgtgagtatgcatgccggtgtatgtatgttggtatgtgttcagctgtgtatgttcagctgtgtgtgtgtctatttgtgtgtctctgtgtttgtatgagtgtgtctgcgtgtgcctgtgtctctgtgtgtgcatgtgtgtttgcacctgtatgtccacgtgcctgtgtctgtgtgtttgcatgtgtgtgcatgtgtctgtgtgcctgcatgtgcctgtgtgtgcatgggcctgtgtgtctttgtgtgcatgtgtgtgtgtttgcacctgtgtgtgtgcacgtgcctgtgtgtgtttgggctgtgattgcatctggttattctgggggtggaattgctgtggaacatggaattaaagtgcaggttccgggtcttgctgccagggagcgactggcccccctatcacacacctgtgacccagagaacggcaggtgagccttgcggcttcactgttgccacwggtcaggtgctgatgaggacgggaagccaaatggggctgttcagccctaggcagagctgcttggagcacattcttaatacgccagccatcgctacctcagttccacagccgatgttagggaagaaagatgcggggacacggcaac

SEQ ID NO: 352654 - DNA, 549 bp, Homo sapiens
tacttgtcattctcattacatttgaaaaaggcaaaactataggtagttaccaggacttggaggtgagagaagagaaatccctttaactttgtggacgaaggttgtggaaagtgactagatgcctctgcaaaattcattatactttacacattaaaatggtaattttactatgtaaatgctctccatgaaagctgacttgttaacaagagtgatgtattctgaggcattaaatttgtagccaatgtatttttttgggtctttttttttaaatgttagacttccatttgacaacatttttctaatgcatcattctaacaaagttctttccaatgaacttttagtaacaacataaactttatcaatgtattgcttctattgaaatactaaatattataaattattgaaaatattccgcatttatgcttgtcactgggttgttgacaccaagatgatctgaagcaatagttaagaagtaccttatacataatttctgatgattaacatttttwtattttcatttcctttacccagaactaaggtgaaaacaga

SEQ ID NO: 352655 - DNA, 607 bp, Homo sapiens
gagttctttgccaaaaaccagcaccaacttgctagttatgtaagtgagacatgttggaagcatctccctggggcccagtcacattttgaaataattacagccctaatcaaaatctgggtgacaacctcttgaatacctctgaacctgaataacccacgtaagctgttcccttattactgagccaaagaaactgsgtaacacactattgtttattgatgttttctgttactacattatgaagtaatctgttatatggcaatggattgatacatatatgtatacacaatattcctgaaaagcattttgtttgattacttttgatcattggttaaggcaatactgatttctttctgtgctattcccttcgcgagctaagtaaaagtgctaattaggatctctttgtgtgctaagggaaattggtaatacaaacacatttgtggaagacaaattgcatacatcaaaataagcacattgataataataaaataatgtttataagctacagggacttaaaaatactcactccgaggtgacgggtttttatattcttagatgcagctgctaaccaaaaataacttcatattaaagggcaacaaggaatacactc

SEQ ID NO: 352656 - DNA, 607 bp, Homo sapiens
gagttctttgccaaaaaccagcaccaacttgctagttatgtaagtgagacatgttggaagcatctccctggggcccagtcacattttgaaataattacagccctaatcaaaatctgggtgacaacctcttgaatacctctgaacctgaataacccacgtaagctgttcccttattactgagccaaagaaactgggtaacacactattgtttattgatgttttctgttactacattatgaagtaatctgttatatggcaatggattgatacatatatgtatacacaatattcctgaaaagcattttgtttgattacttttgatcattggttaaggcaatactgatttctttctgtgctattcccttcgcgagctaagtaaaagtgctaattaggatctctttgtgtgctaagggaaattggtaatacaaacacatttgtggaagacaaattgcatacatcaaaataagcacattgataataataaaataatgtttataagctacagggwcttaaaaatactcactccgaggtgacgggtttttatattcttagatgcagctgctaaccaaaaataacttcatattaaagggcaacaaggaatacactc

SEQ ID NO: 352657 - DNA, 607 bp, Homo sapiens
gagttctttgccaaaaaccagcaccaacttgctagttatgtaagtgagacatgttggaagcatctccctggggcccagtcacattttgaaataattacagccctaatcaaaatctgggtgacaacctcttgaatacctctgaacctgaataacccacgtaagctgttcccttattactgagccaaagaaactgggtaacacactattgtttattgatgttttctgttactacattatgaagtaatctgttatatggcaatggattgatacatatatgtatacacaatattcctgaaaagcattttgtttgattacttttgatcattggttaaggcaatactgatttctttctgtgctattcccttcgcgagctaagtaaaagtgctaattaggatctctttgtgtgctaagggaaattggtaatacaaacacatttgtggaagacaaattgcatacatcaaaataagcacattgataataataaaataatgtttataagctacagggacttaaaaatactcactccgaggtgacgggtttttatattsttagatgcagctgctaaccaaaaataacttcatattaaagggcaacaaggaatacactc

SEQ ID NO: 352658 - DNA, 515 bp, Homo sapiens
ttacaattgaactcactcatggattctttagagaacccctttaaaagtaattagtgaaaggttacttttacagagatattatggtgaaaaactaattcaaatggaagccacttgagctaattttgcagacaccaaaatccaagtagaatcaaaaacactgaagtagcctcatgactgctacataactaagggcaatagaagcatgcataaactacagtgcaataccacctcacacccactagaatggctataataaaaaracatatagtaacaaatgttggtggaaatatgaagaaataggaaaccctattgctgtcagaaatgtaaaacagtgcatccacattggaaaacaatctgctagttcatcaagtggctacacataagagttaccagcaatttcactcctaggcatatactcaagagaaatggaaacatttccacaactacttttacaccaatgcctacagcaatattattcctattaggaaaaaaatggaaaccagattaatgtttgt

SEQ ID NO: 352659 - DNA, 570 bp, Homo sapiens
cagttcaactaaacccttgtttagtcaaagaatgagataaaaaaataaataaagataggttgaattataggccacaaattatttttccctcttcaattcatgtaattttgtagagttctcttatattgcgttagatttcagcttacttttgtaatcaaatgagctgaaagtgatggtgtctgtcttctttctgggcctaggtttcatgagactttgtatgtttccttgtgtcctatgccactgccacaggaaaagcatgattgggctaattaacttgtcctagcaggaggaagggaaacacacggggcaaagttgtcccaattaaggttcccaacctagcgtagatcaatctagtaaatgtgcagatgcacgatggagtgccccagagataaacagagctggcatcaaaagctagcctaattcagctagccctcagctaacccaccgacacatgcagtgtagttagacacagcttttttttaagayccctgagttttggagttatgtgttatttagcaacagctgattaacatgtctctgaatatatactattaaacaattatcatatgt

SEQ ID NO: 352660 - DNA, 624 bp, Homo sapiens
cactgcttctagcacagctttgcctatgtctagactgtgttgagttcaatttatttaatcacatcttgcctattactcttatatgatcatttatactattatctaaggtcatttttccttcttatattctagtacaattataaattaataatagtattctaggcatttcaaagatctagggctgaagttaaatttatagattgtatttagcctatccttttgaaaaattagcttttgaggttcttcttttgaggttaatcctatgataggaagttgtttgtgtatgtgagaatatatatgtgtatgtgttygtgtttgtatgtgtgtgtgccacttaaaaaattatcctgttctttgttttacccagtgtttctatctctattgttcagaggctcaaatttgtctttttctttattctcctgttgccttgtattgtcatttattgtatctatgctttctcacaattttttttttttttttgagacaagagtcttgctctgttgcccagactggagtgcagtaccgtgatctcggctcactgcagcctctgcctccagggttcaagcaatgctcacacttcagcctgtcaagtagcttggaccacaggcatggccaccatgcctg

SEQ ID NO: 352661 - DNA, 596 bp, Homo sapiens
aaatacaattaacaaatgaagaaaatttagcaatttttttwaaagttttcattatctctttgttcaagagaaaagcctaatggcaaatgaaattgtttaaaagtgaatcacgatgattaccgtacatacagttttggtgcatattgtggcaaagattaagcactgtctgccgaatattcctgctctcttttccagaaggtttatttttggtaaatggctacataatcagtgacattttacactctttcttgcctctaggtgagcctgatctcaccaaaataccaagatctcaccaaatggaatatgagcggaagtgatgaagcagtgggccacattttctccatggatgcaaaggatccttggtgatatcagagatatgaaatggaaggtagctggatttatggaccactgcttgggggagatccaactacaatcaggaagacttatttagaccaaacccaagcaagaaataaacttctattctgatgaacactgagacgtaggctcctgtgtgttataggagatactaacgacttaatgaatataaataaaacagttacaaagaggtgggggaaattagtatcctggttagtatt

SEQ ID NO: 352662 - DNA, 596 bp, Homo sapiens
aaatacaattaacaaatgaagaaaatttagcaattttttttaaagttttcattatctctttgttcaagagaaaagcctaatggcaaatgaarttgtttaaaagtgaatcacgatgattaccgtacatacagttttggtgcatattgtggcaaagattaagcactgtctgccgaatattcctgctctcttttccagaaggtttatttttggtaaatggctacataatcagtgacattttacactctttcttgcctctaggtgagcctgatctcaccaaaataccaagatctcaccaaatggaatatgagcggaagtgatgaagcagtgggccacattttctccatggatgcaaaggatccttggtgatatcagagatatgaaatggaaggtagctggatttatggaccactgcttgggggagatccaactacaatcaggaagacttatttagaccaaacccaagcaagaaataaacttctattctgatgaacactgagacgtaggctcctgtgtgttataggagatactaacgacttaatgaatataaataaaacagttacaaagaggtgggggaaattagtatcctggttagtatt

SEQ ID NO: 352663 - DNA, 596 bp, Homo sapiens
aaatacaattaacaaatgaagaaaatttagcaattttttttaaagttttcattatctctttgttcaagagaaaagcctaatggcaaatgaaattgtttaaaagtgaatcacgatgattaccgtacatacagttttggtkcatattgtggcaaagattaagcactgtctgccgaatattcctgctctcttttccagaaggtttatttttggtaaatggctacataatcagtgacattttacactctttcttgcctctaggtgagcctgatctcaccaaaataccaagatctcaccaaatggaatatgagcggaagtgatgaagcagtgggccacattttctccatggatgcaaaggatccttggtgatatcagagatatgaaatggaaggtagctggatttatggaccactgcttgggggagatccaactacaatcaggaagacttatttagaccaaacccaagcaagaaataaacttctattctgatgaacactgagacgtaggctcctgtgtgttataggagatactaacgacttaatgaatataaataaaacagttacaaagaggtgggggaaattagtatcctggttagtatt

SEQ ID NO: 352664 - DNA, 596 bp, Homo sapiens
aaatacaattaacaaatgaagaaaatttagcaattttttttaaagttttcattatctctttgttcaagagaaaagcctaatggcaaatgaaattgtttaaaagtgaatcacgatgattaccgtacatacagttttggtgcatattgtggcaaagattaagcrctgtctgccgaatattcctgctctcttttccagaaggtttatttttggtaaatggctacataatcagtgacattttacactctttcttgcctctaggtgagcctgatctcaccaaaataccaagatctcaccaaatggaatatgagcggaagtgatgaagcagtgggccacattttctccatggatgcaaaggatccttggtgatatcagagatatgaaatggaaggtagctggatttatggaccactgcttgggggagatccaactacaatcaggaagacttatttagaccaaacccaagcaagaaataaacttctattctgatgaacactgagacgtaggctcctgtgtgttataggagatactaacgacttaatgaatataaataaaacagttacaaagaggtgggggaaattagtatcctggttagtatt

SEQ ID NO: 352665 - DNA, 466 bp, Homo sapiens
atttgattggccaaactggccttcgttggtgtctgtgcttagtggtaggcatgttttcttatttaaaagtgtcactgaccagaaggaaataagtttccccaatgccattwgaaaacaaaacaaaacaaaaaaaaacaaaataaaacaaaactcttcaacctcaaattttctaacctctttttctctacccccggccttaaacttccaggcatggtccccagcattttataaaacaattctttatttacttctcttccctactgtcatggtctgtttcatagtaaataaaattgtcataacctttatgttgaggataaacattcagttctgctatttttaaacttgttcttcaagaaattaagtataacctagctagactgttgatcacctttaagaaaccactggtaaaaataagttattaagtgtaccagggagtgatactcttagaaaatggggcaatttcacc

SEQ ID NO: 352666 - DNA, 513 bp, Homo sapiens
attggccaaactggccttcgttggtgtctgtgcttagtggtaggcatgttttcttatttaaaagtgtcactgaccagaaggaaataagtttccccaatgccattagaaaacaaaacaaaacaaaaaaaaacaaaataaaacaaaactcttcaacctcaaattttctaacctctttttctctacccccggccttaaacttccaggcatggtccccagcattttataaaacaattctttatttacttctcttccctactgtcatggtctgtttcatagtaaataaaattgtcataacctttatgttgaggataaacattcagttctgctatttttaaacttgttcttcaagaaattaagtataacctagctagactgttgatcacctttaagaaaccactggtaaaaataagttattaagtgtaccagggagtgatactcttagaaaatggkgcaatttcaccaatactctgatttttttctaagtaattatttttaacatcttcagtggtcttc

SEQ ID NO: 352667 - DNA, 611 bp, Homo sapiens
attaatatttttaacattctttacttcataataatcagrgaggtacattcgattgacatttaaggttgttatatttagcaaacaaaaataaatggcaggattctcaattaaacgtgaatttgagatcaataacagcacacacacacacacacacacacacatgcttctcaacctacagtaagcttacattcttataaacccatttgaagttgaaaatatcttaaatcaaaaatgcatttgatacacataatttagtaaacattatagcttagcctagcctaccttaaatgtgctcagaacacattagcctacagtttgccaaacttatctaacacaaaacgtattttataataaagatataaagaattttgaatcagaattcaaaatatggtttctactgaatgcatattgctttcacatccttgttaagtcaaaaaatcttaagtcaaactattgttggttggagaccatctgcaacacacacacacacacacacatacacacacacatacacataaggtattaagtgtgtcccatataatatttgagatacacacaggcaaatattgtgctaagcatacatgcatatgttccaaatattattatattat

SEQ ID NO: 352668 - DNA, 611 bp, Homo sapiens
attaatatttttaacattctttacttcataataatcagggaggtacattcgattgacatttaaggttgttatatttagcaaacaaaaataaatggcaggattctcaattaaacgtgaatttgagatcaataacagcacacacacacacacacacacacacatgcttctcaacctacagtaagcttacattcttataaacccatttgaagttgaaaatatcttaaatcaaaaatgcatttgatacacataatttagtaaacattatagcttagcctagcctaccttaaatgtgctcagaacacattagcctacagtttgccaaacttatctaacacaaaacgtattttataataaagrtataaagaattttgaatcagaattcaaaatatggtttctactgaatgcatattgctttcacatccttgttaagtcaaaaaatcttaagtcaaactattgttggttggagaccatctgcaacacacacacacacacacacatacacacacacatacacataaggtattaagtgtgtcccatataatatttgagatacacacaggcaaatattgtgctaagcatacatgcatatgttccaaatattattatattat

SEQ ID NO: 352669 - DNA, 486 bp, Homo sapiens
gatgataaataataatttgatgtgaggctagagtggtacatgctggacagatagcttaaaatgtcagcccgagggaattggggtgtgtgtgtgtgtgtgtgtgtgtgtgtgtgtaaagcgtttgtcttcattttgaattaggtccaataagtgaatatattcatattgacaatatgcaaagtgtatttaatagacatttcataagaaatcctatattttcaatcaatttatcattgtttttatatgtgattatattcaacacttcattgtttctggtaaatgtttaatcacattagtttagagaaagtttattttacacttcacctttgaaaaatgtttattcttatttcatcttattktcatttggcaataatagctccaacagttacatagtcaatattgaaaaatcccttattgtaactttttgccaaatgaattttattataaataatacagttgttgttttctgtaacattcagtattttg

SEQ ID NO: 352670 - DNA, 611 bp, Homo sapiens
atcatgtcttgtttaacaatgtcccatcatcttgaactcttacagagttgttgataatgtatgtaagcttcaatttttattaatcgtatttctgaaaaaaaaaaaagcttccaaaaacgagaatgtcagtctgactttgtccaaaatgctgtaatatttgcttsgtctctgctctgtattggcatattcaatatttctgttttacaaatcaccttgtctctttcatcatgtaatagaatttgcattcattgttaccttagactttctttagaaaatatacctgggaacttaacatgtttatggtttttagaagttataaacttctggcagatatctagataattgccaggtttccatcatcaaattttctatccctttgtcagaattctgatttatatccactgtgttaccttgctatttctttgtccaattgctttagtaatataaaatccctaagaatatcttttttgattcatgtgtcttctaattgaacccaaatgttatttatcacatatacatgatctaattaatacatagaatggttatttatttttaaagatatcaaataaatgatattacaaatttagtctacattacaaaagcaaagggtg

SEQ ID NO: 352671 - DNA, 611 bp, Homo sapiens
atcatgtcttgtttaacaatgtcccatcatcttgaactcttacagagttgttgataatgtatgtaagcttcaatttttattaatcgtatttctgaaaaaaaaaaaagcttccaaaaacgagaatgtcagtctgactttgtccaaaatgctgtaatatttgcttggtctctgctctgtattggcatattcaatatttctgttttacaaatcaccttgtctctttcatcatgtaatagaatttgcattcattgttaccttagactttctttagaaaatatacctgrgaacttaacatgtttatggtttttagaagttataaacttctggcagatatctagataattgccaggtttccatcatcaaattttctatccctttgtcagaattctgatttatatccactgtgttaccttgctatttctttgtccaattgctttagtaatataaaatccctaagaatatcttttttgattcatgtgtcttctaattgaacccaaatgttatttatcacatatacatgatctaattaatacatagaatggttatttatttttaaagatatcaaataaatgatattacaaatttagtctacattacaaaagcaaagggtg

SEQ ID NO: 352672 - DNA, 611 bp, Homo sapiens
atcatgtcttgtttaacaatgtcccatcatcttgaactcttacagagttgttgataatgtatgtaagcttcaatttttattaatcgtatttctgaaaaaaaaaaaagcttccaaaaacgagaatgtcagtctgactttgtccaaaatgctgtaatatttgcttggtctctgctctgtattggcatattcaatatttctgttttacaaatcaccttgtctctttcatcatgtaatagaatttgcattcattgttaccttagactttctttagaaaatatacctgggaacttaacatgtttatggtttttagaagttataaacttctggcagatatctagataattgccaggtttccatcatcaaattttctatccctttgtcagaattctgatttatatccactgtgttaccttgctatttctttgtccaattgctttagtaatataaaatccctaagaatatcttttttgattcatgtgtcttctaattgaacccaaatgttatttatcacatatacatgatctaattaatacatagaatggttatttatttttaaagatatcaaataaatgatattamaaatttagtctacattacaaaagcaaagggtg

SEQ ID NO: 352673 - DNA, 557 bp, Homo sapiens
tttagtttctgtgtaacaaaatgctacctaaatatgtttgatggttaatattgagtgtcaacttgattggactgaaggatgcaaagyattgttcctggtgtgtctgtgagggtgttaccaaaggagattaacatttgagtcagtggactaggagaggcagacccaccctcaatctgggtgggcaccatctaatcagctgccagacaggctagaataaaacaggcagaagatggaagagcagacttgctgagtcttccggccctcgtctttttcctgtgctggatccttcctgaccttgaacatcagactccatgctcttcagatttggattcttggacttacaccagtggtttaccaggggatctcagtcctttggccacaggctgaaagctgcactgttggcttccctaatattgaggtttagggactcagactggcttccttgctcctcagcttgcacagggcctactgtgggacttcaccttgtgatggtgtgtgagtcaatactccttaataaactccctttcatatatacttctatcctattagttctgtct

SEQ ID NO: 352674 - DNA, 455 bp, Homo sapiens
ctctgcaatgcccggaattatgttatcatttcctggttctaactatgatttccggggtacagtgagagcttcatgtttccacgaggaagtttatgcaaaaccaattaatcagagaaaagtaatttcagattctatttgtatgtgtcctatagaaaataataaatcaactatattccagaaaaataaaactggtccagatattaccttaagaatgatttcctcttatatttgactttttacagtgatgcagtgagtgcatgcaaccatttttgctatcctgaataagctgggctacaggtgaaaatttaaatggaaacttacattacgtatttcaagtaggtacagacagacattttagattatatttcaaattttatttaggaaaaaatgaagcagattctayaaaaatttacctataaaagcatcatatgaaaccatcatttcagaatatagat

SEQ ID NO: 352675 - DNA, 589 bp, Homo sapiens
  misc_feature (1)...(589): n = A,T,C or G
cctggatggagaagcacagcagaaataaattctaaaatagtgccctgtctgcaaatattgtatccaacatgacaatgcattgtccaatatttaacattacggtctgtgcatttctcaggtcaaagtgaatattaccctatttctcccatttcacacccactgatcagagaagcaggggactcagaatgtttttctggtgtctgacatagataatctgctgattggtaatcaaatattgactatgttgtgtccagagaaatcaccaagtacaccatcaacaaatagatgtactggacagaaccaatrcaatcattttaaaaagaatgacaaagtttttgcacatgagttgatttaaggttgccattggaatactctacttatgcagaaatgtactactagagctatgggattaaagtatgagcccccccaaatggagaacaactgctttgagtcagacgcagttcattgtatctgctagtggtacnctgttacctgctgttttgcaccccataaccatcttttgaggcagaaatgctgaactcaggtaaaagcaataaagatactctaaaaattcgtgcacacacacaca

SEQ ID NO: 352676 - DNA, 589 bp, Homo sapiens
  misc_feature (1)...(589): n = A,T,C or G
cctggatggagaagcacagcagaaataaattctaaaatagtgccctgtctgcaaatattgtatccaacatgacaatgcattgtccaatatttaacattacggtctgtgcatttctcaggtcaaagtgaatattaccctatttctcccatttcacacccactgatcagagaagcaggggactcagaatgtttttctggtgtctgacatagataatctgctgattggtaatcaaatattgactatgttgtgtccagagaaatcaccaagtacaccatcaacaaatagatgtactggacagaaccaatgcaatcattttaaaaagaatgacaaagkttttgcacatgagttgatttaaggttgccattggaatactctacttatgcagaaatgtactactagagctatgggattaaagtatgagcccccccaaatggagaacaactgctttgagtcagacgcagttcattgtatctgctagtggtacnctgttacctgctgttttgcaccccataaccatcttttgaggcagaaatgctgaactcaggtaaaagcaataaagatactctaaaaattcgtgcacacacacaca

SEQ ID NO: 352677 - DNA, 480 bp, Homo sapiens
aagtctctccttcatttcttttaatattcttttatatttttgacatctttatctccctgcttcattttgcataatctatcctcagatagattctcrgatagatcctcagatttatccaccagttcaccaattgtttcttcaatttgtctaatctgcctgctgtttagtcttcctataaatgttttttctttgttttaaagtcttttcatgtatagaagtgatatttggttctttttcacatctttctattctttgtacatagtatcttctttaaagtttctcttcgtttttaaaatcaccataataattgtaaacatagctattttatattttctttcagaatttactattatcttcagaaactttaatgctaatacttgtgtatgttgtgtctccttatgctatgtgctttatagtgaactgtatcctcatatagtttaatttcttttcattatgagtacatctttatcagtcatctct

SEQ ID NO: 352678 - DNA, 567 bp, Homo sapiens
ctgcctttacgtgcatatattttgaatataaactatgtgagcaagaatctgacttctagccagtccttggtcatggaaatcaggcctaacatatgtagagacatttatagctccccttcaagttagagtaatttaggttctgttgattcaacttaccgctaaggaagtttcttcaccggagatcaacacttgtgtgttcttcagaaacacaagccatttctacttaaagagtatgatttgctttgcattgaatatagctaggaagagaaaagctccagtttctttgttctaagaccagrattggatttgagtgggacttgaatgctggtgctgtgtagctagaatagaatacatgccagtagctcacattagaaattgtctctggtgaagctgctcttccaggtggaaacatattttcatgaagaaggaaatgtttttctttttgtaaaggatcaaaagacttaatcagaaattttcttaagcctgggcttgcttttccctctgctctgtgtactagctgatgctctgctgcagaggctcctgggtgaactttggtccatcgtaaac

SEQ ID NO: 352679 - DNA, 496 bp, Homo sapiens
gcgggacgtggcagtgcacacctataagcccagctactcggttggctgaggcacaagaatcacttgaacctgggaggtggaggttgcagcaagccgacatggtgccattgcactccagcctgggtgacagagcaagactctgtctcaaaaaaaacattaaaaagtaaaattaaaatgataaaataaccccacaatattaatactttcatttaaagtatatgttacacatagatcaaactgatagattctctttgtgattctcatttagaatgtaccagaacttgagagtcatttaattyataaaattcatggaaaaaaattctaagattctcaaccacttggggatgttttgattgttaaacagttgaaatgcttaaaaagaaaactgaatatattaaacttataaatggaattataaaatgagttaaaaatgaacttagtttataaatgcacccaaagagtattcaaaggcaccataaatgtaattgttaaaatt

SEQ ID NO: 352680 - DNA, 518 bp, Homo sapiens
aaggcaggaggatcacttgaggccaggagttcaagaccagcctgaacaaaataatgagataatgtctctacaaaaaataaaaaataaattaggcaggcatgatagcacattcctacagtcccagctacttaggaggctgaggtgggaggattgcttgagcccaggagttcaaggctgaagtgagctatgattgtgccacagcactccagcctgggtgacagagctagggcctatttctttaaaaaaaaaaaaaaaagtamcagtaataataaataaataacagaaccaatatgaatccatcccaaaaccatgattcctatagttctttgaaaaatacatgccatgcaatggacactgtgtatttaaacttacaagaaagcagtaatagctgcacgtggttcaagacagttaacagattctcttgcatcatcttccagcttgcccttctccctgtcacatcccacagttgcacttctttttcctggccttttgtatttggtttgagatcctcacccagt

SEQ ID NO: 352681 - DNA, 518 bp, Homo sapiens
aaggcaggaggatcacttgaggccaggagttcaagaccagcctgaacaaaataatgagataatgtctctacaaaaaataaaaaataaattaggcaggcatgatagcacattcctacagtcccagctacttaggaggctgaggtgggaggattgcttgagcccaggagttcaaggctgaagtgagctatgattgtgccacagcactccagcctgggtgacagagctagggcctatttctttaaaaaaaaaaaaaaaagtaacagtaataataaataaataacagaaccaatatgaatccatcccaaaaccatgattcctatagttctttgaaaaatacatgccatgcaatggacactgtgtatttaaacttacaagaaagcagtaatagctgcacgtggttcaagacagttaacagattctcttgcatcatcttccagcttgcccttctccctgtcacatcccacarttgcacttctttttcctggccttttgtatttggtttgagatcctcacccagt

SEQ ID NO: 352682 - DNA, 616 bp, Homo sapiens
gctgcataaatgacttgttttgagaaatgtctgttcatgtccttcacccactttttgatggggttgtttgttttttttctcgtaaatttktttgagttcattgtagattctggatattagccctttgtcagatgagtaggttgcaaaaattttctcccaatttgtaggttgcgtgttcactctgatggtagtttcttttgctgtgcagaagctctttagttctattgttattgtttaaaatattttaatatttcttttgagatttcttctttgagccattagttatttagaagtgtgtttaattgccacatgctttgggatatttcagttatctttctgttatttatttctagtttaattacatgtggtctgagagcagacattgaacaatttttatttttttaatttgttaagctgtattttatagcccagaatgtggtctatcttggtgaatgttccatgtgagcttcagaagaatgtggattctgctgttgttggatgaagtaatttatagatgtcaattatatccagttaatcgatgacgttgttgagttaaagtatgtctttattgattttctgcctgctgaatctgtccatttgctgacagaggggcgtt

SEQ ID NO: 352683 - DNA, 482 bp, Homo sapiens
aatcagtatctaccaccttcgttactgttttctatctgccacccttgttcttttttcctttttttgtctttcgctcttttctcctctttatctgccttttgtggttttaactgagcattttatatgattccatctttttgtaatttcttagcatgtcagttatccttcttataactttttttagtgtttgccctagaatttgtaattgacatttataactaatggaagtccactttgaaataatactataccacttcacaggtartgtgaataccttgcaataacaaaataatcataatttctttcttcttttccttctatcattgttgttattcatttcactgatatataagcatacataagcataaataatatatatacataagcatgcataattgaatacatcatgctattattttgttagctcatttttttattttacgaagtaaaataaatttattcattttccaatgttctttctt

SEQ ID NO: 352684 - DNA, 240 bp, Homo sapiens
ctggagttgttcatttctccgggtgggtttgtggtctcactggcttcaggagtgaagctgcagaccttcgcagtgagtgttacagctcataaatgcagcatagamccaaagagtgagcagcagcaagatttattgcaaacagtgaaagaacaaagcttccacagtgtggaagggcacccaagcaggttgccactgctggcttgggcagcctgcttttattctcttatctggccccaccca

SEQ ID NO: 352685 - DNA, 617 bp, Homo sapiens
aatttggtggaaggtggaagcagagagcatccttactaattttaagagctcacccaagaccagtagttttccatccattagaatcacctaaggaattgctgaacaattccaatatttgggttccttcccacatcattcaaaccagacactctggtgatgggccaaggagtcagtattgttaaaaactgcccaggtgattctgtctggtgtgcagctgggactgaaaaacagtrtcctggtgggctaaggaagcactggtcatctgtcccttgcctttgggagcagccacaggtgatggtgatgatggtggtggtggtggtgagtggggaatttacatactctttcttccctaatgaatctaaactctgctacttgaagggtggtccctggactagctgcatcatcacttagggccttgttcaaaaatgcagaatttggggccccaccctagacctagacctattgaattagaactgtagtggggaaatgtttcttgaactttaatgtgcataggaaacacctgggatcttgttaaaatgcagattctgtttcagtaggtctggggtgtagtccaaggtcctgcctttctaacaatctcccaagtgattccagtgttt

SEQ ID NO: 352686 - DNA, 633 bp, Homo sapiens
ttcttaccctcctttttcccccctttccaaagcatcctatattccattttggattattcttgataagttkcgtttcctatggaatgtgctacctatctattagcaactgatgctacctctcttagcttccaacttgataaagaggcattattaatatagctgctggatccaaattgaagggaaggaataatctagcaaaatatccacaaattagctgcactttcttttgtaacataaggcagctgtattcactcacctgagatggggtggaagatctcacacactgttctctgctttccttttctgctttgttcagagacacaagatgtaggcaccctgctgagcatggaactcctggctgcctcctccacctcaacatatgcttgttcaggtagagcccagctagggactgacagtggtagagcattgctgatttaggttcctcacgtaaagcactgtagacaagggcagagacaaaaatctctggtagtgtgcttgcgggggatctgagtttttaatgtatttgattggtttagcatgtcaaagatcaagtcttgaaagtaggagagaaaaattatatgtctttccagcagagccaatgtaatgcttgcctgcgagtaaccaggaattgtg

SEQ ID NO: 352687 - DNA, 590 bp, Homo sapiens
ctcccagccctgaccccagttttattctctgcaaaaacagaattagagaggctcagtttcaaggacacccaacccagtataaggcaaaggtgaagcccaaggctgaaaacaatgacaatgtgcctacttggaacactcccaccctcctttcccatcttactttcggaacatttaaaaccaagcaggacactactggattattctttggagaaactggatggtctcacagacaagacctataaacttttttgctctctcaggaaaaaagtcaaccaatatccaatcaccctaatagaagccctccataaccaaccytacccaatgtaaataaagctcccagttagcagtttttcaaaatgaacagacaggcaagggggttcaaagaataagagagccaaaataagcaggggcaaaaaagagcgtgttttcagactcttgtagcaaatattctcaaataagccaagctctgtcccatctcatttacacatgtttttttctttgcttagaacacatgccattgttattctttgttgactcctcattcttcagaatcttttaaaaagttatctcaacagacttttctactactt

SEQ ID NO: 352688 - DNA, 631 bp, Homo sapiens
ggacttgggacttgagaatgctggaaagagaaaggtaagattgcctgtggcgctaaccccaccttggtccaaattacttctgacccgtggaacaggaccagggacactgcctctgaacttctgattgcaagaaaacacttctctaaacattgtgcagcagcatccttcaggaccgtaagacagtggctgtgcagcacaaagccctcgtgttctttgctcacctcttgcctctcttcctttctgcctcccttgtgtgttttcctgtgtctgcttttctccagtgttcaccacctctttatggacactgacagagtgttccctctctgcatcagttctggcaggaaatgcacgagctgacctctttgctaaaaaaagatccaccactgacagaatttcctcaggctccagggtctatgagcgcaaagctagggtagtacgtccccctcagggtccccagggcttacccctgtgcctgtacccaatacctccacaataaataattcttgaaaawttttaagaataaattctaaaacaaaatcagcacgtatatctgcctagggaactgctaataaaaaccctaacaaaccctagctctaagtagtaaaagctaaaatatgaccctgatattgtc

SEQ ID NO: 352689 - DNA, 519 bp, Homo sapiens
tttctgagaaaatttttttcacacttgggactttttctttcaatgccattttttttccataagatgcctccatagctggtgtacctttagaagtatatgtgtgagaacgtaaatggagggtttacacttgcatttttttcaaagctcatacaaagctagacaaagctataatgtgaacatgctaaactctgtaagtaagtagtcyccatggtcactaatgagcacataatcactgattctcagaacttgcatatatcagccagaatctgttaacaattagaagctgacagcctgggcaacatggcaagaccccatctctaccaaaaatataaaaaaaaaagctgtgcatggtggtgtatgcctgtggtagcagctactctgaaggctgaggtgagaggatcgcttgagcccagtgaggcggaggctgcagcgagccaaaactgtaccactgcactccagcctgggtgacagtgtgaggccgtctcaacaacaacaaaaaaagttgaacctgcttttctg

SEQ ID NO: 352690 - DNA, 555 bp, Homo sapiens
gtctggcttcagattacctgttaggagtgagtctaaagtcattgtgattgatttttttttttttctttacacatttcagattttttttttttaaccaatgatatttgttttttgcttttataaaacagggatggctagtcccctcagaagattttcatgctcacttgggcagagaatcagtgcataagtatttaagtaactctttaaagaccacagtaaggatggcagatagtttacacctaaattcaactgccaagtaattagcagtatttctttaattgacccagtstttgagggggagggacagcaaaagtgccaggtattttcctttccctgtgtgtgtttattctatagatgctttccatagaatattttcaggatgctttattgagaattaccacaaataactggtgtcatatatgtttgaatgtcttcattggtggcaaatcttagtcttttaaggttagatttaattattttcagtggccaagtataatttggagtatgcctatggaacagcagaagcagagagaggctctatagtcctgtccaaag

SEQ ID NO: 352691 - DNA, 327 bp, Homo sapiens
tactttttttcttttgagacagggcctagctttgtcttccagactggagtgtggtggtgtgatcatggctcaytgcaacctcgacctcctgaactcaagcaatcctccctcctcagtctcctgaatagctgggactataggcgcaccctatcatgcccagctaattaaaaaaaaaaatttttttttgtagagacgtggtctcactatgttgcctagtctcgaactcctggcctcaagcaatcttcccgccttggcctcccaaagttctgggattacaggtgtgagccaccacgcctggtctgcttattataccttttcaacaagatt

SEQ ID NO: 352692 - DNA, 620 bp, Homo sapiens
tcctgcctataatgcataagctgttagattagaatttaaggtcatgattcctttacccttttattcttagcatgtgccctgccaaataataacacattatattaaattccagagactcacaatttcccactgtgattcaaatcctgtacaaaatgtctcatcacagacagataaaccagcctatcatgaattctctaaatatttgcctgctcactaaaagcccctgggagacttaaaactacaaatttctgagctactccccagactgaattcaaatcttctgggctgaaacagaaatctgtatttttaaaaaatctcttttcccttggtctgtttgtttgtttttaaatggttgggagcatgaagcaagaggyttcattaggctgttgaaatgtatgatgtgagaggctcgtgataccaaatttagctcccattaggtattaacctgatgtagtttctccctgtttccaatccaccagccatgtacctaccaagaaggttaatagctactattcccatttactgtggatgtgagatctcttagctcttataatcatgcttagctaaaacttctaggaaaatattggcagaataaatcatttctaatttctaattttatc

SEQ ID NO: 352693 - DNA, 609 bp, Homo sapiens
aactttttcacattaagaattagatttccctcgactgtaaatattttgaagaaaaatgatagctaatatttatggagccactctcatgggttattatatttaatcctcagagagttcatagtcttatgacatggatttttatctcttatttctaagggtgatgataagggccagagagagacttgctcaaagtcaaaatactagttaggacatatctgggtctcagactctgtggtctgaccttagaatgtgcatactttaacagagttcagcatgatatctgtcaccagatttgccccaactctgacctgatagactcatgacttggtatcaggtagagaagatgctatgagtaaaacttgaaatagttgttttcactaaaatctcgtaaaacagcagtactttgatattcacatgactccatgccatgcgaaatgaagatgagtrgtccttcctcccccttctgtttacaatgaaccctttgcaccatgtattcagccactgaagtttctggaatatatactctcaatttggcatctggaaaattttgatacaagagcaggatattgcttgatggcacctaggagcagtagtactgagtggatgggc

SEQ ID NO: 352694 - DNA, 581 bp, Homo sapiens
tgtttgagcaggtattgttctccttgtacatctccatcagagcctgtgagtcactaagtacattgtcgatgagtagtaatattttcaaacatatctttttttctgagcagtaggtctcagcatggagcttaaaatattcaggaagccatctcataaacagaaatgctgttacccagtctttatccatttatagagcacaggtagaataggwttagcaaaattcttaagggctctagaattttcaaaatggtcaatgagtattggcttcaacttaaagtcaccatgtgtatcacctcccaacaagagaatcagcctgtcctttgaagttttgaaaccaggaattggcttttcctccctagatatgcaagttcttaatggtctcttcttccaagataaggctgtttcatctacactgaaaaatctgttgtttaatgtagccacctgcatcagtcatcttagctagatcttctggatagcttgctgcagcttccacagcagcaattgctgcttctttctgtatttttatgccatgaggacaccttctttctctaaacctcaagaagaaacctctgctagcttca

SEQ ID NO: 352695 - DNA, 554 bp, Homo sapiens
gttccaacttgcatggctgggctaaaatatctaatcatttagtatttcatagcagagatagatcaggagtttgttaatttaactcaacttagaagtgaagtttttgtactgcaatcattaaaatcaattttgttttacatataaacatattatcaggctaatcctagagcaaaatctatttattctattcagttgaattccagacattgatgaaccatgatattattttctaacactgcatatggaaatttaccgttttaatttgagttcactaatataattaaattgtggcaattcaaacaaagagatgccttccattagtamagttaataagacataacgaagggctagaacaaagcatgaatctaaacatatagaccagagtctctcccaagtcaggaaaaacaaagtggaatctacaggtttctttttatacaacagtttgttacaaggtttagaaatatactgattctctcatgcattgaatagccataaaataccaacactggtttttctgtgtaccttatggagatgcagctatgcatttttagtca

SEQ ID NO: 352696 - DNA, 617 bp, Homo sapiens
ttctgactcttacctccttctgtgttccaagggttctagcctggctgccagaccgaagtccccaacttttagttccatggcttcattaataaaaaagttccctagacgataaacaaaacaaaatgtgaatccctttgaaaatgcgttctaaccaagtacacacacatccactttggagccaggcagccaattgttatatgaaagtcgcccattcaaaagcaagattgcagacacsagatcccaattaagaacattaatatgtaaaaaaaaacagagagagaaaaaagaactctaacacaaaactcagcttttggcgtcaatgacttacctagtttgagatctctgtgcaagatttcttgttcatgaaggtatttcagtccagacacaatctgcctgaggtagtatcgaacttctggctctgtcaacacctttcttgctttcaaaatatgagccattgactaagaagaggagaaggaaaaaagagaatctgtcaaaacagttatcaaaatcactggtttccctttgcaggatgagcaatgaaagttaactttgcagtgtaagtgctgccacagctaaaatcccagataaaatactctttgaataccatgttaattcgg

SEQ ID NO: 352697 - DNA, 498 bp, Homo sapiens
actgaggctgttttattaccctgcactacaaacagaataaatgtttaattcactctttttaattaccaatttttcaaataaagattggtatgatagtaatatccaatgtgggcaaaaactttttgttttcacatttactgcttttttaatatcatttgtggcttcatggacttttatacttttcaagtgttttaataaactctattcgctattttttagtctaggcccattcagacaacagaaataggaagtacattttttatttttttatttttaatttttgtgggtacatastaggtacccatattaatagggtacataatatattttggtacagggcatgcaatgtgtaataatcatatcatggaaaatggggtatccatcccctcaagcatttatcctttgcattacaagcaatccaattatgcacttttagttatttttaaatgtacaattaaattattattggctatagtccctttttatgctatcaaatac

SEQ ID NO: 352698 - DNA, 498 bp, Homo sapiens
actgaggctgttttattaccctgcactacaaacagaataaatgtttaattcactctttttaattaccaatttttcaaataaagattggtatgatagtaatatccaatgtgggcaaaaactttttgttttcacatttactgcttttttaatatcatttgtggcttcatggacttttatacttttcaagtgttttaataaactctattcgctattttttagtctaggcccattcagacaacagaaataggaagtacattttttatttttttatttttaatttttgtgggtacatactaggtacccatattaatagggtacataatatattttggtacagggcatgcaatgtgtaataatcatatcatggaaaatggggtatccatcccctcaagcatttatcctttgcattacaagcaatccaattatgcacytttagttatttttaaatgtacaattaaattattattggctatagtccctttttatgctatcaaatac

SEQ ID NO: 352699 - DNA, 498 bp, Homo sapiens
actgaggctgttttattaccctgcactacaaacagaataaatgtttaattcactctttttaattaccaatttttcaaataaagattggtatgatagtaatatccaatgtgggcaaaaactttttgttttcacatttactgcttttttaatatcatttgtggcttcatggacttttatacttttcaagtgttttaataaactctattcgctattttttagtctaggcccattcagacaacagaaataggaagtacattttttatttttttatttttaatttttgtgggtacatactaggtacccatattaatagggtacataatatattttggtacagggcatgcaatgtgtaataatcatatcatggaaaatggggtatccatcccctcaagcatttatcctttgcattacaagcaatccaattatgcacttttagttatttttaaatgtacaattaaattattattggctatagyccctttttatgctatcaaatac

SEQ ID NO: 352700 - DNA, 461 bp, Homo sapiens
aaggcgctagcaggttcagtgtctggtgagaaccactctatgcttccaagatggcactgtgttgstacatcttccagaggggagggaagctgtgtccttacatgatggagaggcaaaagaaaacaaacttgctccctcaagtgcttttataagggccctaatcccttgagggtactacccacatgacataaccacctcctaaaggccccacctataaatactatcacattcacaataaagctgtaacagaggacttctgggggacacagtcagactatgcgttatccagtgcaacttcaaggaagagataattaggttgttggtgctatagttaaattttatctcagactactgggacttgaaaaacacctttccacaaaaattatagattttattatcatgctgactatggggtgaaagtctgcagttaagtgtgagatcttcaaatagaaatatcttgt

SEQ ID NO: 352701 - DNA, 461 bp, Homo sapiens
aaggcgctagcaggttcagtgtctggtgagaaccactctatgcttccaagatggcactgtgttggtacatcttccagaggggagggaagctgtgtccttacatgatggagaggcaaaagaaaacaaacttgctccctcaagtgcttttataagggccctaatcccttgagggtactacccacatgacataaccacctcctaaaggccccacctataaatactatcacattcacaatwaagctgtaacagaggacttctgggggacacagtcagactatgcgttatccagtgcaacttcaaggaagagataattaggttgttggtgctatagttaaattttatctcagactactgggacttgaaaaacacctttccacaaaaattatagattttattatcatgctgactatggggtgaaagtctgcagttaagtgtgagatcttcaaatagaaatatcttgt

SEQ ID NO: 352702 - DNA, 552 bp, Homo sapiens
gggacacagtcagactatgcgttatccagtgcaacttcaaggaagagataattaggttgttggtgctatagttaaattttatctcagactactgggacttgaaaaacacctttccacaaaaattatagattttattatcatgctgactatggggtgaaagtctgcagttaagtgtgagatcttcaaatagaaatatcttgttggtgcttttatttatttatttatttwttttgagatggagtcccaccttgtcatccaggctagagtgcagtggcatgatctcagctcactgcaatctctgcttcccaggttcaagctattctcctgcctcagcctcctaggtagttggaattacaggcacgagccactatgcccagctaatttttctatttttagtagaaatggggtttccatgttggccaggctgatcgtgaactcctcacctcaggcaatccacctgcctcagtttcccaaagtactgggattacaggcatgaaccactgcagccaggcattgttggtgcttttaaatgcaagaaagaatcagtagatt

SEQ ID NO: 352703 - DNA, 523 bp, Homo sapiens
ccagagacatagagctaataggagatatatacatatatatgtgtatataggagagatatctatcttacacacacacacacacacacacacacacacacacacacacacacacacayatatatatatatatatatatatggagagagagagattataaggaactgcttcacatggctatggaggctgagaagtcccatggtctacggtctgtaaactagagacccgggaaagctgatggtatagttccagtccaagtctgaaggtccaagactaggagaactgatgatgtaagtggtggaagaaagctggtggtgtagttctagtccaagtccaaaggcctgaaagtcagaagtgccagtggtataagtcccagtccaagtgtaggagaagactgatatcccaattcaaactgtcaggcagagagagcaaattctctcttaccctgccttttgttccattcaggcctccaacagattggatgaaggctaaaaacactggccatctgctttcctcagtctaccaa

SEQ ID NO: 352704 - DNA, 552 bp, Homo sapiens
gtgttcaacttagtaattttttcaatgtctttatatacaaataccatttttcataattctttaactgttgatatttgaggtcttaaaagttcatgtcaattttgaccataggtcaaaaatcgtatattgttttaatttgattttctgaagttttacaaaaatatatattctggatactaagttttctttatatctaatctaaacgctcttcaatgctgtgtttgccttttaatcatgtttagactatctgtgtttatcttaaattttaaatttagctaatgtacatatagaaaagtacacatgtatgtatacagctggatgaattttcagaaagtgtaatcayccagatcagaaaaaagaacatcagcccccagaggctgccttatactcctctctaatcactactcacttaccccttcctcaaagttaaccactattctgatttcaatcaccatagactaattttgcttacttaaaaatgtacataagtgaactcacagagtaagttagagtatattttgatgttcagccattgtacattttatatagtca

SEQ ID NO: 352705 - DNA, 587 bp, Homo sapiens
acacataaattttatgatataatgaaaaataatgtctcttattcttgctttcatgggaatgcttctaaagtttgttatttcataaggtgtttgctgttagctttcgaaagcttcactttagcatgttctcctttggtgctactttgctgggcttttttctttcttttaatcatgaatgggtattgttgcatttttatcaagttcatcgttaatctattgagatgatcatttaaattttgaggtagtcaaatgtatatttcttgtccttaatgcttttcttgtgactttttaagtgtctatttttccctaatgtatttacattgataggctttctaatgatgaactatacttcctaacttacctggttatgttgtattttgtacacataccttacatatataaaattacagatatatatgtgtgtgtgtgtgtrtatatatatacacacacatgaagttggacttgcttagctcatattttagttaaaaattttgcattcatgttcataagtgaaaatggattataaatccttttcttgtactctatcttggtttggtgtaaatattatattaatatcatagataaca

SEQ ID NO: 352706 - DNA, 511 bp, Homo sapiens
tcctcccaactctgccccagaccctgtgagaagttgtttaagtgtcaggttcccactttctgaaaaaacttgtaggtttgggggtacatgtgaaggtttgtaacataggttaacatgtatcatgggggtttgttgtacatattatttcatcacctaggtattaagctcagtacccaatagttatcttttctgctcctctccctccttccaccctccaccgtcaagtagatcccagtgtctattgtttccttctttgtgttcataagtttttatcacttagttcccaattataagggagaacatgcagtattaggttttctgttctcgcattagtttgctaaggataatagcttccagctccatccatgttcccacaaaagacataatcttattcttttttaaggctgtgtagttttccatggtgtatatgtrccacattttctttattcagtttgccatttatggtcatttatgttgattccatctctttgctattgtggatagtattaca

SEQ ID NO: 352707 - DNA, 607 bp, Homo sapiens
ttctgtccccaaaaggaaaatggtactttaaaggaaggaggctgtacttcttcccctaaactaagctttkgaataaagtcaccttctttataccaaacctcgctctttttagctgaattctgcaagtggtgagcaactgaacctgcattttggttacagaccctttctggtttctgcgactatctaagtcctccctagcttctgggttagtagctgtgggttctctttataaatgcagtctacagtatagactttctttcaagtagagcaaaaagaattcttcaggtattctttcgttcatagaaattctgggactcagtgatacccttctcagacttgctgatgaattggatatgggaaattgggaaagctgtagacaagaaatccctcatatcagggaaaaactggaatttgaaagtttggggagtgatgggtctgagtgagaagaaatgtagtcattctgtccttggcttggatggcaatacttcctctgtctctcaataaaggggtatgggcaatgagctaataagccaaaaaggagtccaaacagatttacctgccactagggccaaggtgcaattgttatagtattagaatcccatcttct

SEQ ID NO: 352708 - DNA, 602 bp, Homo sapiens
tgaaaaactggggccaaacttcttaattactctaagctgtccacaacagatcaaagaccagatgagaatcccttggctttcatggaaaggctaagaggccttaataaaacatacttccctgtctcctgactcagttgaaggacagctagtcctaaagtacaagtttattactcaggcagcccctgatattagaagaaaattacagaaacaggcaataggaccagacagtattctggagaacctcctcagggtagccacctcggtcttttacagcagggatcrggaggaggcccaggaaaaagagaggaagcacaggagaaggatggaatctctgatggctgctttagaggtctgtaaagtacaggatccactaattgctatccatgtggcaaaccagggcactttaagaaggactgtcctggcagtaagaagccacctcgaccctgtccagcctgtggcaaggacaactagaggtcggactgcctgcagagacggagagacatctccgtccagaactggtctcccaaatgctccagcagaactgatgggtcccagggctcaattcctcaactctagtggcccaaactgccgttacgcccagg

SEQ ID NO: 352709 - DNA, 619 bp, Homo sapiens
ttgctgcatacccatatggatttgctgccagtaattcagatatttgtcacaacccctaacagttgattctaagcactttacaagtagtaactcatttaatccttaaacaaccctgtgaagtaggtactactactatctaattgatacatttgaggaaactgaagtacagagagagaaagtaacatttttatgatcacacagcaagtaattggaaagccaagatttgaagccaaggaatctcaccccagagtctaaactcttagtcaccacgcaaaggcccatggctcaggtttaaacagtcggatacaatcacttcagatttatattcaagagctggtgctacagagatgtgatgatagggtactccatctakgactggggaaggtctactgtggctgccacatagacttttctaaggcagcaatggcagtgatgtcagtgatagtgactggggtccagggtgggctgggagtgctggccatatatgctgtagcttggagggctcagcagaggccgcaaagttccacttctggggttcaatgatgactgtgattatggctgtgcaactctctaccttgttctctctctctcggtagtcctgggaaaatgactctctctc

SEQ ID NO: 352710 - DNA, 589 bp, Homo sapiens
cccatggctcaggtttaaacagtcggatacaatcacttcagatttatattcaagagctggtgctacagagatgtgatgatagggtactccatctaggactggggaaggtctactgtggctgccacatagacttttctaaggcagcaatggcagtgatgtcagtgayagtgactggggtccagggtgggctgggagtgctggccatatatgctgtagcttggagggctcagcagaggccgcaaagttccacttctggggttcaatgatgactgtgattatggctgtgcaactctctaccttgttctctctctctcggtagtcctgggaaaatgactctctctctatcatcaacatctactatatctctctaattataaaactatatacagtcatattgatcactatatactatatataatatatatctcatatgatatgaatcagctgaaatgggcttctttggcttgcgactatggctcctaatagtgagcttttaaaggtgaggtttgatgccttcttatgtttgtatccttttggcttccagcaaaaatgttctgcatagagcagatgccctaaacacatttgtggc

SEQ ID NO: 352711 - DNA, 426 bp, Homo sapiens
gagtgcagtggtgctatctcaattcactgcaacctccatctcctgggttcaagtgattctcatgcctcagcctcccaagtagctgtgaccacaggcacacgccaccatgcccagctaatttgtatttttagtattgatggggttttgccatgttggccagcctggtcttgaactcctgacctcaagtgatctgcccactttggcctcccaaagtgctgagatgacaggcatgagccacagcgcctggctgctgtcttgcttttcttcattctccatgggtcaagttgtttgcttgattattcccagtgtgagtacctggatgtttctgttgaaggtattgtatttactcacttgttccattcctcttcatgagagtcatgcacactagctrcttctagtcaaccatcttggcctctccctcaagtg

SEQ ID NO: 352712 - DNA, 588 bp, Homo sapiens
tagcagttagtacaacccccatattggctccccaactagtaggatgagggctatwatggtgggaaaggccaactggaagccatcagagctgcctctacctagaaaaatagtaaatcaaaaacaatattgcatccctggaggaatcacagagattagtgccaccatcaaggacttgaaagatgcaggggtggggattcccaccacatccccattcaactctatttggcccatgcaaaagacagatggatctttcagaatgaccatggattgttgtcagcttaaccgaggggtgactccaattgcagttgctgtaccagatgtggttttattgcttaagcaaattaagacatctcctggtaccttgtatacagctattgatttggcaaatgcctttttctccattcctgtccataaggtgcacgagaagcaatttgccttcagctggcagggtgaggaatatacctttatcatcctacctcaggagtatatcaactctccgtctttgtgtcataatcttattcagagagaccttgatcgcctttcacttccgcaagataccacactggtccattacattgatcatattat

SEQ ID NO: 352713 - DNA, 588 bp, Homo sapiens
tagcagttagtacaacccccatattggctccccaactagtaggatgagggctataatggtgggaaaggccaamtggaagccatcagagctgcctctacctagaaaaatagtaaatcaaaaacaatattgcatccctggaggaatcacagagattagtgccaccatcaaggacttgaaagatgcaggggtggggattcccaccacatccccattcaactctatttggcccatgcaaaagacagatggatctttcagaatgaccatggattgttgtcagcttaaccgaggggtgactccaattgcagttgctgtaccagatgtggttttattgcttaagcaaattaagacatctcctggtaccttgtatacagctattgatttggcaaatgcctttttctccattcctgtccataaggtgcacgagaagcaatttgccttcagctggcagggtgaggaatatacctttatcatcctacctcaggagtatatcaactctccgtctttgtgtcataatcttattcagagagaccttgatcgcctttcacttccgcaagataccacactggtccattacattgatcatattat

SEQ ID NO: 352714 - DNA, 588 bp, Homo sapiens
tagcagttagtacaacccccatattggctccccaactagtaggatgagggctataatggtgggaaaggccaactggaagccatcagagctgcctctacctagaaaaatagtaaatcaaaaacaatattgcatccctggaggaatcacagagattagtgccaccatcaaggacttgaaagatgcaggggtggggattcccaccacatccccattcaactctatttggcccatgcaaaagacagatggatctttcagaatgaccatggattgttgtcagcttaaccgaggggtgactccaattgcagttgctgtaccagatgtggttttattgcttaagcaaattaagacatctcctggtaccttgtatacagctattgatttggcaaatgcctttttctccattcctgtccataaggtgcacgagaagcaatttgccttcagctggcagggtgaggaatatacctttatcatcctacctcaggagtatatcaactctccgtctttgtgtcataatcttattcagagagamcttgatcgcctttcacttccgcaagataccacactggtccattacattgatcatattat

SEQ ID NO: 352715 - DNA, 585 bp, Homo sapiens
gtctaccacagcatgaggttcatttctgtctttagttgaatgagatgaagacaccttatgaattaatactctttctcttttgtatattctttcttgatactcagccacaatctgcctctaattttaatctttgtatttttattttattttattttagcattatcttctccatttcttctctcttttttgaaattatactttaagttctgggatacatgtgcagaacatacacatttgttacataggtatacacgtgccatagtggtttgctgtacctatcaacccatcacctacattaggtatatctactaatgctrtccctgccctggtctcccatcctgtgacaggccctggtgtgtgatgttcccctccccatgtccatgtattctcactgtccagcttccacttattagtgagaacgtgtgctgtttggttttctgttcctgtgttaatttgctgagaatgatggttttcaccttcatccatgtccatgcaaaggacatgaactcatcctgttttatggctgcatagtattccatggtgtatatgtgccacattttctttatccagtctatcattgatggg

SEQ ID NO: 352716 - DNA, 585 bp, Homo sapiens
gtctaccacagcatgaggttcatttctgtctttagttgaatgagatgaagacaccttatgaattaatactctttctcttttgtatattctttcttgatactcagccacaatctgcctctaattttaatctttgtatttttattttattttattttagcattatcttctccatttcttctctcttttttgaaattatactttaagttctgggatacatgtgcagaacatacacatttgttacataggtatacacgtgccatagtggtttgctgtacctatcaacccatcacctacattaggtatatctactaatgctatccctgccctggtctcccatcctgtgayaggccctggtgtgtgatgttcccctccccatgtccatgtattctcactgtccagcttccacttattagtgagaacgtgtgctgtttggttttctgttcctgtgttaatttgctgagaatgatggttttcaccttcatccatgtccatgcaaaggacatgaactcatcctgttttatggctgcatagtattccatggtgtatatgtgccacattttctttatccagtctatcattgatggg

SEQ ID NO: 352717 - DNA, 585 bp, Homo sapiens
gtctaccacagcatgaggttcatttctgtctttagttgaatgagatgaagacaccttatgaattaatactctttctcttttgtatattctttcttgatactcagccacaatctgcctctaattttaatctttgtatttttattttattttattttagcattatcttctccatttcttctctcttttttgaaattatactttaagttctgggatacatgtgcagaacatacacatttgttacataggtatacacgtgccatagtggtttgctgtacctatcaacccatcacctacattaggtatatctactaatgctatccctgccctggtctcccatcctgtgacaggccctggtgtgtgatgttcccctccccatgtccatgtattctcactgtccagctyccacttattagtgagaacgtgtgctgtttggttttctgttcctgtgttaatttgctgagaatgatggttttcaccttcatccatgtccatgcaaaggacatgaactcatcctgttttatggctgcatagtattccatggtgtatatgtgccacattttctttatccagtctatcattgatggg

SEQ ID NO: 352718 - DNA, 345 bp, Homo sapiens
aggactgatctcagtctctgtgaactgtccttactgatttctggtgagtgagaatagggttatagatggggaccattgatcttgctgtttgtcagagtgttgtttctaaacactttctcttgagatctgattaatcatctgccttaagacatgtgtcactgtgtgtgcatgtgtgtgtgtgtgtatagggttgagtttagggtagtatatargaaaaaaggaccgtcttataatttttttttttgaaatatcataatgatggattatctcaggttcacacaaactaaagatatcacagtacatgtatgtggtacacatatgtatgtacgcatgtgggggcagtgc

SEQ ID NO: 352719 - DNA, 537 bp, Homo sapiens
tgtaccctatgatgaacatctgtccatttctcctacctcctagtccctggtaaccagtgttttagtctctgtttctatgagtttgacttttcaaaatttcacatgtatgtgagatcttacagtatttgtctttttgtgttgggcttatttcacttaccataatgtcctccaggttcatctgcgttgacatatacattccatgttcattgcagcattattcaccaaggtatggattcaatcttagaatttgatggacaaatggataaagaaaatgtggcatacacatacacacaaatgcacatatacacatatacatactatatataatacattagaatatgattcagccaatggaaaaaaaggagctctgtttttaaaaaatctgcactctgatcaagattayggagatagattttctctctcagtattctcctgtggttgggtttaaattatatatggaagagtagatattattggaaatctttatgttgtggtagttccctagtgttattaaagatgatacgtttgtctttagat

SEQ ID NO: 352720 - DNA, 574 bp, Homo sapiens
atatgaggcattgtgtaagtcctagtgggaagcaattcataagataagaaagatgcctatggaataacttggagctgaactatccctcctttgtaagtcatccatgcagtatgaaggttaaatgtcagggagaaagtaaacaggaaaaagccaaaagcaagcagctttgtgttttctctgaaggtatcagagtgcaagctcacagacttatctctccacctttttgtccagcctaggttgacctgctcccctcagcacttcactgtattctacttccagcatgtacttgtcagatccccagctcctcctatgcagacctataacctacattttcattctcttggtgcctcagacatcaggacttccatggttctgaagggagggacagcagttaaaatggcacttgarggactactgtcttggtccagggtgggttagtcactggcagggcacagacaggagccctgggcctaactctgaggtgtcagcaaagaatcttgttttaacttgtatgagagaaataaagtaataagaattaaaatttatcatggagtgaggaaaactgtcaagcagc

SEQ ID NO: 352721 - DNA, 553 bp, Homo sapiens
tgcaactgaagagtttgtgtctgacagctttaaattgagaaaatgagtatttttgaaacagcccagtaactattggtatgaatcaagtaattttgggctacaaatggataattagtaaaatccactctcttctgtaattttgttgcaaggatctgctcctgmcatgaaaagaaaagtgggcattaaatctaaaacacattttctttaactctaggggtgcctatggtaccttttcctcactatagattgaaagcaaaatgagatttcttgccttaagcttctctttggcttcccagagcaccaggcttcctaggatggtgaagcaggatacaggaaagacctgagtttggcttcctgtgctggggataataatagaacttacctcccagggttattgtaggattcagtgaaatatgcctgcaagactctcagcacacagctggcgcatagcacttagcaaaggctatcgccattattaatatcagctgcctccttggtcagagtgtcagtttccttatcagtaagatttggaatatatgaatcatccccatat

SEQ ID NO: 352722 - DNA, 565 bp, Homo sapiens
aaaaacaaaagattaataaaattgaaaatcccttaacaagactgattatttaaaaaaaaaaaaggcaagacaaatcatcaatgtcaggaaccaggaaggggcatcacaacaggtcctgcagacacgcaaagggtaatgagtgatgacacgaacaatttcatgctgatgcattcgacagcttagataaaatggacaaattccctgagagacacacattaccaaaataaacccaggcaaaaatagaaaatttaaatcgccctatatttgttaaagatattaattcataattaaactccttataaagaaaattccaggcccaaacaacttcattagtaaattccatctagtgtgtaagaaagaagtaacatctattctatataaactcataaactagaggaggaactatcatttcctaaagtattttatgacgttactataaccagaattcaaaaaccagacaaaggcattataaggtcagaaattgacagaccaawagccttcataagcatagatgcaaaaatcactaacaaaacataagcatatcaaattcagcaataagtaacaa

SEQ ID NO: 352723 - DNA, 567 bp, Homo sapiens
ccggctcccggagtacacagcaccggctcagcttcggggagatgaggtgctcccgctggcctggagcgctccgaagagcggaggaccagggccggagcaggccgcaggggaggcaggggatggtcagcccctaacgcgaagcgcaggcgggtcgcctattttgacggggttaccgttggccgtcggaaccatggaaggcctccggggagacaggccgggccctgacccttcttcggccagcctagccctggtgcttcaggagttaycctgggggccaccagttccccgcaccaagagctcgtccggagggagctccttccagcccagagaagttaactccagccaaaggcgaagccgggagcccggggcaccaggcaagggcctttctttctgagacctggggccagagaccttgggggcgcctgtgcccgcccaccgctcgggacacccggctggggtgtgggtttgagaggcctcacggtcgctgacgccgcactggcgaacctcgaggttggcaggtcatttcctcacagccccgaggccccctcggagccagtggtaggagaa

SEQ ID NO: 352724 - DNA, 475 bp, Homo sapiens
ggtgagtgtgcaaagccctgcgatgttgaggagccgctcacttggctgggagggagcttaaacttaggccgcatccctttccaaacagacaccaggtcaaggacggttcaactgatgagctcctccctccaactcttcccagacccaggggccctccctcgggccagtttcgggacaggcccccgctccggaagagcacggaactctggcaccccggtcgcccgcccctgcttccccacgcgccccggcccttagggttcagcggccccggctgggaagagctgggcctgcagggcccggaggacactgcggcaccggagccggccctgcgcgcgggctgtgaggtcgcgttcgggagccgccagttctcccgccccggggtcgctggacaccccctcctgtcgccaggtcgggcgcccacggtcggacccgcaccccccamcctggccctctgagaccgccaggccccggccca

SEQ ID NO: 352725 - DNA, 556 bp, Homo sapiens
ctgagaagtcggttgtagtccaaggcacaaaaaagccctaagccaaaatgaagaacaaaggtacctgtgtatactggaatgtgccctagtagatttaatggggggatagtaaagctctcaggccatatgccaaagaaggttgggggcggttctcctcggtcaggatttgtctctcctccttagctccaccttcccgggctatgtctctgtgctgctytctgatccaggtgaccacccgttttcatcccaggtatctcgctaaaaatgcccctgattacaccgagtactgtgcacttgtttgacttttcatcaatggcctaaaagttaagaaaaacactttcctgtaatatttatgattgatatgaagtgactttcagaattaggccgtaaaagtcacacatggtctttttgtttttttccaggtttatgatgataaagactacaggagaattcggtttgtaggtcgtcagaaagaggtgagtaaaaaatctagtgaagagaggtaagctttcctaaaacttttatgtaaccaacaagaaataaaaattaatatata

SEQ ID NO: 352726 - DNA, 546 bp, Homo sapiens
tagggcttggcaactcttgtgaaatttcatagatctcgtcgcttactgggagtctgctatattgttgttaaggtaattcctgttataacttaaaattggaaatgatttctcctacatttgggtgatactgatgacctttattttcacttaaggtctctttgttagtggtggtagaaattggagtattccctctcatttgtggttggtggctggatatctgttccttggtaagttgagtattcattattgtataatagcataatttaagggcttcaaaagaggaagtcttcagcatgtattctttttaaaggaaagcaaatatttgataatttgcttattcttttggcatgtgtatcagtataggatcttaatgttaatttttcttgagtacctgagtttttgaggctttgtgcaaatttttgatgtcaggatagtttgggtggaatctttctaatagtggagrattttattgcccattttgctgtcgtaaatttgtgtagataatgccaagacattatatacatagagaataatttgataaggaaa

SEQ ID NO: 352727 - DNA, 585 bp, Homo sapiens
aaagaagaaaaaacaagggtaccttgatgccccagggtggtctttgtaaaataatccaaagactataaagttcagtttaaaaaaaccaaacacatagctataataaattaggaccatctgttgttctacccaggcctgcgtactcagtctccagcctgttgcttatttaagaatgcctttacaatggtgaaggagtgctgcccagggtgtctggagggagtcaggggaggcgtgtggggcaaggaggaaggcagcagcttggggagccagcatgggctgctgtgctgttcccacactggttaccctttggggccagaatcaatgtggcmactgtggccttgagattcttgccacctgtggcctttgacagcccatccatgggtatgggatgggagttggggttggcctgcttaaaaaaaaaaaaaaaaaaacaaaacaagtgaaatcaattttagaatgttttgtaaaaagggaatttcacttgaacatttaataacctatgactcttttacatatacagcctccccttggtgttcaaggggaattggttccaggacctcccgctacaccaaaatctgtagatgt

SEQ ID NO: 352728 - DNA, 585 bp, Homo sapiens
aaagaagaaaaaacaagggtaccttgatgccccagggtggtctttgtaaaataatccaaagactataaagttcagtttaaaaaaaccaaacacatagctataataaattaggaccatctgttgttctacccaggcctgcgtactcagtctccagcctgttgcttatttaagaatgcctttacaatggtgaaggagtgctgcccagggtgtctggagggagtcaggggaggcgtgtggggcaaggaggaaggcagcagcttggggagccagcatgggctgctgtgctgttcccacactggttaccctttggggccagaatcaatgtggccactgtggccttgagattcttgccacctgtggcctttgacagcccatccatgggtatgggatgggagttggggttggcctgcttaaaaaaaaaaaaaaaaaaamaaaacaagtgaaatcaattttagaatgttttgtaaaaagggaatttcacttgaacatttaataacctatgactcttttacatatacagcctccccttggtgttcaaggggaattggttccaggacctcccgctacaccaaaatctgtagatgt

SEQ ID NO: 352729 - DNA, 552 bp, Homo sapiens
tgttacttttggtaaagtcacggctttgctttctcgatttccacagtacacagttttttgttccttttggtgagatggaagggaatggctctctgaagtacccgagatgggaagcacatttctctgtggtgcatggtcttgaactgtgtccatctggttacccccgtgtggtcatgttccttgttcataaccctcttgaagtgcaatgccctgggcactctgcctctcctgctgttgtctaagaaggcattagttttttgggcagctgcttcattgatgagtcactgaatgtataggaaacccagattcttgagggattaaaaaaaaaactaataattaactcttactaattcatatctctgttttgcrtagttgtttttaaatgtgaatgtaagacttaattttttttccagttaattttgtcctttattatctgaatctcttcagattctctttggatggggttctggttctctcagcttctatattggctgttcctcctcctaaagtggtgtcatccagaagtttgagaattataccattgacatactt

SEQ ID NO: 352730 - DNA, 618 bp, Homo sapiens
cttaagagagtcttcaaattgaattcttaatgaagatatttttaaatgatgaaagcaactgttaacatccagtaacagtaaaagtaaaaaaccaaaacaaaaaaacaaaacttactgctgccctaattttgtaggaaaaaggattaggcaatttaactctacaatggccatttttagaatccactatttaacatcttcttgactggggactgagaatcatatgaagatttcaatttgcttccatcctttgactacacattagctagagagaagattgtagtggagcagaaatgcgrcatatatggtagtgatgcttcccttaacaactgggatacattttgagaaatgtgttgttaggggatcagttgttcaaacttcatagtgtccttacacaaatttagacggcacagtctacttactacacatctaggccatatggtgtagcctgttgctcctatgctacagacctgtacagcatgttactgtactgagtactgagtactgtagccaatagtagcacagtggtaagtatttgcgtatctaagcatatctaaacatagaaaaggtatagtaaaaatgtggtattacaatcttacaggaccaccgttgtatatgtgg

SEQ ID NO: 352731 - DNA, 502 bp, Homo sapiens
atttttaaatgcacaattaaattattgagtacagtccccctgttctgctagcaaacagtaggtcttattcattctttctaactatttttttgtacacattaaccatccccacttcccctctacttcccccactaccctttccagcttctggtaaccatccttatyctctatctccatgagttccaattgttttaatttttagctcctacaaataagtgagaacatgtgaaatttgtctttctgtgcctggcttatttcatttaacataatgacttccagttccatccatgttgttgcaaataacaggatctcattcttttttatggctgaataaaaaatgtacattgtatttatgtaccatgttctcttcatccattcatctattgataaacacataagttgcttgtaaaccttggttattgtgaatagtgctgcaatgaacatgggagtgtagatatcctttcaatatactgatttcctttcttttgggtatatatccagc

SEQ ID NO: 352732 - DNA, 502 bp, Homo sapiens
atttttaaatgcacaattaaattattgagtacagtccccctgttctgctagcaaacagtaggtcttattcattctttctaactatttttttgtacacattaaccatccccacttcccctctacttcccccactaccctttccagcttctggtaaccatccttatcctctatctccatgagttccaattgttttaatttttagctcctacaaataagtgagaacatgtgaaatttgtctttctgtgcctggcttatttcatttaacataatgacttccagttccatccatgttgttgcaaataacaggatctcattcttttttatggctgaataaaaaatgtacattgtatttatgtaccatgttctcttcatccattcatctattgataaacacataagttgcttgtaaaccttggttattgtgaatagtgctgcartgaacatgggagtgtagatatcctttcaatatactgatttcctttcttttgggtatatatccagc

SEQ ID NO: 352733 - DNA, 578 bp, Homo sapiens
gtggggtattactcaagaaatttttgcccagaccaatgttctggagagtttcctcaaagttttcttgttatagtttcatagtttgaaatcttagatttaactctttaatctattttgattttygtatatggtgagagataggggtctagttttattcttctgaataagataccagttttcccaacacaatttattgaagagactctcttccttaatgtatgttcttgacacctttgtcaaaaatgaattcactgtaagtgtgtggacttgtttctgcgttctctattctgttccactggcctatatgtctatttttatgtcagtagcatgccatttggctacttagctctgtagtgtaattggaagtcaggtattgtgattcctccagttttgttctctttgctcctcaggatagctttggctgttctgggtcttttgtggtttcacgtatgttttaggattgttttttctatttctgtgaggaatgtcattagtattttgaaagggattgcattgaatctgtagattgctttgggtagtatggacagtttaacaatattggttcttccagtccatga

SEQ ID NO: 352734 - DNA, 464 bp, Homo sapiens
gatatactattctagtgtaaaagggttttttttttttttccttcagcactttaaatatgtcatgccactctctcctggcctgtaaggtttacactgagaagtctgcttccagacaatattggaactccattgtatgttatttgtttcytttctcttgctgcttttatgatactttctttatccttgacctttgggagtttgattattagatgccttgaggtagtcttctttgggttaaatctgcttggtgttctataaccttcttatacttgaatgttgatatctttctctaggtttgagaagttctctgatattatccctttcaataaactttttgttgttttttttgttgttgttgttgttgttgtttgtttgtttttttagacagagtttcactcttgttgcccaggctggagtacaatggcatgatcttggctcgctgcgacttccacctcccaggttca

SEQ ID NO: 352735 - DNA, 563 bp, Homo sapiens
aaggggaactgaaaatgactccaaacttattagactggaaactatgattccattkacacaaatttgtaagctgcaattaaagttggtttttggtggaaggtgacaaattctgctttaaacatggttttatagtgatgacagaacttagcaagagtgtctggttgtcacataaagaatattaactggagcacaggtaagagtagctggagatgccaatttgaaaggatttgcttagaaggggaagtttgagctcatgtgataatcatgcaaaacaactgaggatggctgggagagggaagctgtcttatcaaagtaggcaggagcccattcttcatgcctcagcctgtccctgtaggaaatccctaccatagcagtccatccatgggcacttcatgaactcaaaggctaggaaggtggctttcccagcctgtgcctcagaccttccttcacccctcagcttgatacaataccaggttaactgactcctttattattaagtatatgaggcatcatatcatactcatttttttttttgccccttttgggtagctgccgtaacattc

SEQ ID NO: 352736 - DNA, 613 bp, Homo sapiens
ataaaaattattgttcttttctctgctttgccatataaattatgtgagatctcatcctaactttgtagtctctagcaggctgcctgtgtgcatattctgttatgcttacttaataataaactgattttctttcttttctacattgtcacagagaagactctgttggtagcactttcatttcctcaacacctggaaaacagtgmccccgctttctcctcccagccctcctaaacacatgcacacacatgtacataactttcatgtcctcgatacctggcaaacagtgtccccgctttctcctctcacccctcctaaacacacgcacacacatgtaaataaccttgaaacaaaactgggatcacacgtatgcatgtgtgtttatatataattatataaataattatatatggacaataaatatttgatacatacatttgccttttaacttaaggttaaatcaagagtaactttcatatttatttctcgaattcctaatagatatacattatactatttaacagtgtgctggagtcagttcttactgactcatgacgactgattatccatgtctctttccatctccattttccgtgacagcatatcagtaataaaa

SEQ ID NO: 352737 - DNA, 628 bp, Homo sapiens
gaaagcatcttatcgtccatcggataagtactcagaaaattcagtcttcactgattctgcctttagaaaacactaaatacatcttttaatggctaggacgctgtttcatggctaggacatggtcatgatatgtcattctttttatacattgctggattctatttgctaatattttgttaagaatgtttgcatctatgctcataagagatattggtctgcataagacatttcttataatgtctctgtcagttcaggtatgagggagatgctggcatcataggatgggttcaaaagcattctgtctgcttctatcttctgagagattgtagagaatcagtataatttcttttgtaaatattttgcagaattcaccagtgactatctgggcctagtgctttctgtttgggaagattattaactgttggttccatttctttaatagctaaaaggtctattcagatgtctatctcttcttgtgtgagttttagcagactgtgtctttcaaggaattagtacatttcytctctgttatcaaatgtgagagcatagagttgttcatagcattccattataacatttttaatgttcacaggatctgtggatgttccctctttcatttctagtatta

SEQ ID NO: 352738 - DNA, 562 bp, Homo sapiens
gcatttttaatgtatgtaaattacatctaaataatgttttaaaatgtacttatgggaaagcaaactattctagaaaatatttcctaattcattttataaaactaacattaaaactcatctcctaactaatctacagagagaattcctacggttgagacaagatactgatatttacttcctaaagcaagaccaatatatccctatagctttcaatatagcttttttttttttttttaracagggtcttggcctgtcacccagaatggagtgcggtggcatgatcacgatcatggttcactacagccttgatcttctgggctcagctatcctcccacctcagcctctcaagtagctgggactacggtgcatgccaccacaccttgctaatttctgtattttttgtagggacagagtttggccatgttacccaggctggtctccaatgcctgggctcaagcaatcctccaccttggcctctcaaaatgctggaattacaggcatgagccacagtgtctgactacaaattgtaatactttaaaaattctctcaatattagagttaa

SEQ ID NO: 352739 - DNA, 556 bp, Homo sapiens
tttttaatggttttttttcttgtaaatttgtttgagttccttgtagattctggatattagacctttgtcagatggatagatggaaaaacaattgaaaaggagggactcctccctaattcattttatgagtccagcatcatcctgataccaaaacctggagagatacaacaaaaaaagaaaacttcaggccaatatctcttatgaacatcaataaagatgaattttaaagagaaatgctaatgtcaacagagagttacagatagactgtcaggatgattttgatgagcacaagttaagtttgtcaggattgtcacatgtttttgagttataatgaaaatttaatgaataaatcagcatttgacttaaatctttaaagcatgtgaatgatttagacaggagaggtgtggatgaggagaagactaaacaaagccacaaggatccttgactatcatctgaggttggctcctcccaaggctgagtgagagacaatggcctgggtggtgcttccaggatgcactgggaggaggwgtgaggagaaggacccaactccaccagg

SEQ ID NO: 352740 - DNA, 624 bp, Homo sapiens
cacaatgcaatttataaaatcctctttcaaaggggatcaaagagagagctgaaaatagyctatcacatccatgtttcttcccacactgaaggaatcagatatactgttggataaaggcagaggagaggagtgatattctatgaacgaggcagccgtcttctcagataattcatgggaaactttagttgcgggggaaacatagattattaagaggtcaagcatattgtactttgtagtcttttatactccataataaaactttatgataaggaaagtatatggtttcctacgtgaattttttctctctgttttttgttatgaagacagagtctggggctttgaagtaaatcagcatgatcatttaacccaccgagtttatgttaaataacttcaaccgttgtacatacttcttatttattttgaattaccataccaaaaaaaacccccaaataactataaaccaatctgcttcattttgtatcagtttttaataatctctaggaaaattagcgattttataaatcagcacttttttattgttgaagcatactttgtttccttattttctatttagctggtggtacctataaaactgacgggctcctggtattctgaaactattat

SEQ ID NO: 352741 - DNA, 624 bp, Homo sapiens
cacaatgcaatttataaaatcctctttcaaaggggatcaaagagagagctgaaaatagtctatcacatccatgtttcttcccacactgaaggaatcagatatactgttggataaaggcagaggagaggagtgatattctatgaacgaggcagccgtcttctcagataattcatgggaaactttagttgcgggggaaacatagattattaagaggtcaagcatattgtactttgtagtcttttatactccataataaaactttatgataaggaaagtatatggtttcctaygtgaattttttctctctgttttttgttatgaagacagagtctggggctttgaagtaaatcagcatgatcatttaacccaccgagtttatgttaaataacttcaaccgttgtacatacttcttatttattttgaattaccataccaaaaaaaacccccaaataactataaaccaatctgcttcattttgtatcagtttttaataatctctaggaaaattagcgattttataaatcagcacttttttattgttgaagcatactttgtttccttattttctatttagctggtggtacctataaaactgacgggctcctggtattctgaaactattat

SEQ ID NO: 352742 - DNA, 437 bp, Homo sapiens
acatcttcaggtactgggggttaggacttcaccacatgaattttggatttcatcccataccrggagcctcctcctaggactgctgagaggatgaaagtgcctcatctctacagagcacccagttaacccagcacccactgatgagtgagggctacctgggtgtcctccatcatgctgagatgctgtggcccaccgggagtctgtgcagtagctgtttttatgtccatgttctttctgctttctatgtcttgatcctatatgacttgtcaaacaaaagatcagggctattcttcacagggaattacaccttttataaataaaagagccatgtctaatctaataattttgcatgttaaattagatttcatcttaagttaaaattgttacctctgttttctttttttcctgatatatctttacatatctcctgttttcag

SEQ ID NO: 352743 - DNA, 582 bp, Homo sapiens
taaaatctggtcaccacatggtcaatacagtacaagtctctgatagccaagtgctgattctcaaatttgtgtccaaagtgcttcacaaaatcatgtccaagtatcagaagtcattctctcacttggaaagcaaaataactaagtgaaaatgtttgtatctaactatttctggaaacagggttaaaaacagaggcatctcctaaagctttcccctgagaatcttttctttgtgatattacactgagtatcaaactattttgacrtggataggataaaagaccttagtaagcacattgcaagttgcaggtgaaatactgtaagtactgatgacagcagtgacagatgagtgaaggcaaagaatctttcagacctaaaaaaaaaatgcctggttgatttgacataagcatgggagagtttaactttgcaagaaaaaggggccaggttgtgcttctgagcctgcagaaactccatgcatagaaatgagatgcgtgttccagctgcccctctgatgggccttccatttccatttgtcttctagtcatcgtatgatgtgagcgtggcgcggagccctttcttcctctc

SEQ ID NO: 352744 - DNA, 616 bp, Homo sapiens
ggtttcgcatttttgccactgcaaattgtgctgctataaacaagcatgtgctagtattttttgcacaatgatttttttttttacttctgtgtagctatccagtattgggatcaaatggtagttctacttgtggttctttaaggaawctccacactgttttctatagtagttgtattggtttacattcctaccagcagtgtagaagtgttccttgttcaccttatccatgccaacatctattattttttgatattttgattatggtcgttcttacaggaataaggtgtatcacattgtggttttgatttgcatttccctgatcactagtgttgttaagcatttttaatatgtttgttggccatttgtatattttcttttgagaattgtctattcatgtccttagccccctttttgttctgattatttttttttcttgttaatttgtttgactttgttgtatattttggatattagtcctctgtcaaatgtatagattgtgaatattttcccttactctgtggattgtctgtttactctgctgattgttcttttgccatgcaaaagctctttagtttaattaagtcctagctatttatctttgtttctaattgcattt

SEQ ID NO: 352745 - DNA, 616 bp, Homo sapiens
ggtttcgcatttttgccactgcaaattgtgctgctataaacaagcatgtgctagtattttttgcacaatgatttttttttttacttctgtgtagctatccagtattgggatcaaatggtagttctacttgtggttctttaaggaatctccacactgttttctatagtagttgtattggtttacattcctaccagcagtgtagaagtgttccttgttcaccttatccatgccaacatctattattttttgatattttgattatggtcgttcttacaggaataaggtgtatcacattgtggttttgatttgcatttccctgatcactagtgttgttaagcatttttaatatgtttgttggccatttgtatattttcttttgagaattgtctattcrtgtccttagccccctttttgttctgattatttttttttcttgttaatttgtttgactttgttgtatattttggatattagtcctctgtcaaatgtatagattgtgaatattttcccttactctgtggattgtctgtttactctgctgattgttcttttgccatgcaaaagctctttagtttaattaagtcctagctatttatctttgtttctaattgcattt

SEQ ID NO: 352746 - DNA, 557 bp, Homo sapiens
ttcaaaagcacatcctctataatggatagatcatccagacagaaaactaatagggwaacactgaacttgaacaatactttagaccaaattgacttaagagacacacatagaatattctatccaacaataacagaatatgataacttactaagcacacaactagaacagtttctagaatagatcactattgtgatctctggttaagccacaaaaccagtcttagcaaatttaagaagatggaaatcatatccatgatcttttctgacaacaatggtatgaaacaaaaaatcaataacagaaaaaaattcagaaaattaacaagtacatagaaattaaacaactggatcctgaacaatcaataagccaaaagaaattaaaaagaaaatgtaaaaatatcatgagacaaatgaaaatgaaaacacacacaccataaaagctcacacttatgagatgtagcaaaacagttttaagaggaacatttacagcaataaacaattatataaaaaaagaaagatctcaaacaaacactagacttcaaagaaatgaaaaatgaacaa

SEQ ID NO: 352747 - DNA, 626 bp, Homo sapiens
agctagtaaggagattaaatcagtaataagttttccatctaaaaaaagcccaggcttttgaggtggctcaggactgtaatcccatcactttgggaggctgaggcgggcagatcacgaggtcaggagatccagaccattcgtggctaacacggtgaaataccgtgtctactaaaagtacaaaaaattaactgggagtggtggcatgtgcctgcagtttcagctactcgggtggctgaggcaggagaatcagttgaactcgggagggggaggttgcagtgagtgagatcrcaccattgcactccagcctgggcaacagagggagactccatctcaaaaaaaaaagaaaaaaagaaaaaagcccaggctttgatggcctcatgttgaattgtatcaaatatttaaagaacttattccaatccatcagaagcttccaaaaagtcaaaaaggaggaaatacttccgaacattttttatgaggcccacattacactgacaccaaatcagaaaaagacatcacaaggaaagaaaagctgtaggttaatatccttgattaacatagatgcaaaagtcttcaacaaaataccagcaagccaagttcaacaacacagcaaaaggatcattagccat

SEQ ID NO: 352748 - DNA, 615 bp, Homo sapiens
attcgcctgcctcagcctcccaagtagctgggactacaggcacccaccaccactcgtggctaatttttgtattttcggtagtattggggtttcaccatgttggccaggctggtctcaaactcctgacctcaagtgatccacccaccttggcctcccaaagtgctgggattacagacgtgagccaccacacccagctgagaaaactcttttcctaaggaaaaacatacacttatttatgtatttatttattttgagacagagtctggcttttcgcccaggctagagtgcagtggcgygatcttggctcactgcaacctccgcctcccgagttcaagcaattctcctgcctcagcttcctgagtatctgggattacagccatgcgccaccacacctggctaatttttttgtatttttaatagagatggaatttcaccatattggccaggctggtctcgaactcctgacttttgtgatccacctgcctcagcctcccaaagtgctgggattgcaggtgaacatccactttttatacgcatatctagcatgcatcatatactaaggaatctcctacactctgtggggctctgcttctctggagattcagatcaaagtca

SEQ ID NO: 352749 - DNA, 390 bp, Homo sapiens
gttactagaggtggtctcacttgcatccrctgccctgggtgaagcactaatatgcagccccagcctgagaaccacctctcttggtggctgccagcccaacgtcctccttcgacccagctctgtgccgaaggtgtggtcacacgctgtggacagcaaatgaaagcactgcctggcatgagtgcaatggtctgggccttcacttttgaattctttctttgtaactcctggtgggggagactgaagattgtcaccccaatttcaggtgcagaagccgacactgaggttacaagacgtggtcaagctccctgaagacaggctgcaccaggcactggctcccaccacagttgttttaaagggcctgtgcattcagtaggtttatcattgttttaa

SEQ ID NO: 352750 - DNA, 390 bp, Homo sapiens
gttactagaggtggtctcacttgcatccactgccctgggtgaagcactaatatgcagccccagcctgagaaccacctctcttggtggctgccagcccaacgtcctccttcgacccagctctgtgccgaaggtgtggtcacacgctgtggacagcaaatgaaagcactgcctggcatgagtgcaatggtctgggccttcacttttgaattctttctttgtaactcctggtgggggagactgaagattgtcaccccaatttcaggtgcagaagccgacactgaggttacaagaygtggtcaagctccctgaagacaggctgcaccaggcactggctcccaccacagttgttttaaagggcctgtgcattcagtaggtttatcattgttttaa

SEQ ID NO: 352751 - DNA, 568 bp, Homo sapiens
tggccattcacagtggtctgtggcggaccgcccttcctctccatgtggccctcttgggttggccaagggtccttcagcgaggcagtacctggtggacatgttctcctggtcatttctttctgtggatcactacgggaaaattccatccatggcttccctcacactgaagctacaaactgttgttttgaaagtaaacaaaccaaaaaaatgaatagtaaatacaaactattcctttgcttgttggtttgtttttgaatttgtgctctgaggagaaaaatgttcctggaagcagcatgaatgatgaagaaggggcaaaatgagtcaaaaaacattctctaaccctcccacccactcccatgcttgtttagggcattctkgcactgctataaagaaatacctgaggatgggtaatggataagaaaagagtttgattggcttattgttgtgcaggttgtacaggaagcagagtgctggtatctgcttctgcagagcctcaggaatcttcaagtcatgacaggaggcaaagtgggagcaggcaggtcacatgtcaaagtcaggagcaagaaac

SEQ ID NO: 352752 - DNA, 475 bp, Homo sapiens
agctgtgcctagttgtacaaagtgaacttgaagagatttccagagcagatgccaattgtcaatgcaaatagagagcaagacagaaaaaaaaaaaaaaaaaaagagagaaaagagagaagagaaaaccaaaattgcgarcccttctgtctggagtctcgcataagatgatttgattgtctcagatgctctgtcctgccaacctgaatgggtccatttcacaaaagggaggttggggatcagagggacaaaacacctgcttaatcccaggactgagaagtcttgagttggactcacacattgctgcatgagctctgcagacctggggttctgatggttaggatgagccacttggctcatagatgataggtgagccattctaaaatcataaaaacaaaaatcaattcaatgaacttagtgaattcatcttactcagtctgtcttattaagtctcaatgcccccaggtcctttgcaaaa

SEQ ID NO: 352753 - DNA, 547 bp, Homo sapiens
gtggaattctcagcctaaccctctgcctgctttttcaatctgtgatagggaaggttcatttcattttctttgttcatggccaccagcctagacttccccatatttctaagatattattttacttcctctgtaaacctttataaagtaaagcaaacaaaagcaagcaaacaaacaaaacataccacatttatttgggattatttctgttcactgaaaatcgcatccagaagtggccactccacacaatcgaggtgattcaggtctcaaaaagccagcaaattcacgtgtraaggaatctcccggtctcagtccagtgtctgtcagcaccttttcaggccactccatgaagctggcaggatgtgcgaacaatatctgtttgctgctgaattcgtactacgaaagggtcggtcgatggggggatttcaagtgggcgccaaggcccatcagtctttctccgctgtcagtgataagaagccaacaggagagcaacgggacgaggggaaacacttccagggctcacaggagtagccaacggtcaccaaattaa

SEQ ID NO: 352754 - DNA, 545 bp, Homo sapiens
tgggccttgatctcccagaggcaccatgttcggaacaacccttagagcccttcgcctgagtcccccaggagtctggggacccctgcattgacatgcagctcctaacatctgcagtgattrcccatcctttgttccatggactctttgcttttcctctcctgctgatccccatggatgacacagcctcacgttgtccaagtgctacaggcaagatccagtctagcctttcagatttgtttcattaccgagtgattgatcactgtttttgtgcaacatgttggtttctctgctacttccagttactaaactagatatttatttgcgctcgtacagctttgcactttcaactttcctacatctttggacataattaattcaagaaaaactagaaggcacctcaaaattaagcacagatatggcaaaccagcctgaactgaagctgtcgtgggggtgactggcatgcagggtacattcttaatgtgctttccacgggacaaagtgaaccttggggcacaaaaagactttgcttatctccaaagttagta

SEQ ID NO: 352755 - DNA, 545 bp, Homo sapiens
tgggccttgatctcccagaggcaccatgttcggaacaacccttagagcccttcgcctgagtcccccaggagtctggggacccctgcattgacatgcagctcctaacatctgcagtgattgcccatcctttgttccatggactcwttgcttttcctctcctgctgatccccatggatgacacagcctcacgttgtccaagtgctacaggcaagatccagtctagcctttcagatttgtttcattaccgagtgattgatcactgtttttgtgcaacatgttggtttctctgctacttccagttactaaactagatatttatttgcgctcgtacagctttgcactttcaactttcctacatctttggacataattaattcaagaaaaactagaaggcacctcaaaattaagcacagatatggcaaaccagcctgaactgaagctgtcgtgggggtgactggcatgcagggtacattcttaatgtgctttccacgggacaaagtgaaccttggggcacaaaaagactttgcttatctccaaagttagta

SEQ ID NO: 352756 - DNA, 545 bp, Homo sapiens
tgggccttgatctcccagaggcaccatgttcggaacaacccttagagcccttcgcctgagtcccccaggagtctggggacccctgcattgacatgcagctcctaacatctgcagtgattgcccatcctttgttccatggactctttgcttttcctctcctgctgatccccatggatgacacagcctcacgttgtccaagtgctacaggcaagatccagtctagcctttcagatttgtttcattaccgagtgattgatcactgtttttgtgcaacatgttggtttctctgctacttccagttactaaactagatatttatttgcgctcgtacagctttgcactttcaactttcctacatctttggacataattaattcaagaaaaactagaaggcacctcaaaattaagcacagatatggcaarccagcctgaactgaagctgtcgtgggggtgactggcatgcagggtacattcttaatgtgctttccacgggacaaagtgaaccttggggcacaaaaagactttgcttatctccaaagttagta

SEQ ID NO: 352757 - DNA, 635 bp, Homo sapiens
tgtgacaatgaattccaaatctgaactaattaccggtggtttctccaaataaaatgatactgaatgttcaascatgcttaagaggagacttcccaccttagtcaaaagtttaaagaaaatgagattttttaaaaagtgatttgtagctttatatatcttttttaaaaaacttatactttatgaatttaatactttgaaacaaagcaggtcattctttctatttttttgatgaggaaaacaaaactcaaagaaaattggcaacttgtcaggacctcacaattgtaacagaatatatgaaaacttatcctctggatttgggacatattttaaaattataaattatgtgtgaaaatcagcatggtagtttattggggtcccaccacactcattaaatgtaaattgttatagagagcttcaaaaattttagataaagctacttaaagtatatagttgctttataaggtgagtgtttgaggactatcaagtcaatattaagccaatatatccttattttctgtaatttttaattatcctaaaagtcttttgtcaaaaatcatgtgcggttgactcaaacctatacagcttcttcaaaaatgtacaaagtcagacactcccactagttatgaggaatccat

SEQ ID NO: 352758 - DNA, 635 bp, Homo sapiens
tgtgacaatgaattccaaatctgaactaattaccggtggtttctccaaataaaatgatactgaatgttcaagcatgcttragaggagacttcccaccttagtcaaaagtttaaagaaaatgagattttttaaaaagtgatttgtagctttatatatcttttttaaaaaacttatactttatgaatttaatactttgaaacaaagcaggtcattctttctatttttttgatgaggaaaacaaaactcaaagaaaattggcaacttgtcaggacctcacaattgtaacagaatatatgaaaacttatcctctggatttgggacatattttaaaattataaattatgtgtgaaaatcagcatggtagtttattggggtcccaccacactcattaaatgtaaattgttatagagagcttcaaaaattttagataaagctacttaaagtatatagttgctttataaggtgagtgtttgaggactatcaagtcaatattaagccaatatatccttattttctgtaatttttaattatcctaaaagtcttttgtcaaaaatcatgtgcggttgactcaaacctatacagcttcttcaaaaatgtacaaagtcagacactcccactagttatgaggaatccat

SEQ ID NO: 352759 - DNA, 635 bp, Homo sapiens
tgtgacaatgaattccaaatctgaactaattaccggtggtttctccaaataaaatgatactgaatgttcaagcatgcttaagaggagacttcccaccttagtcaaaagtttaaagaaaatgagattttttaaaaagtgatttgtagctttatatatcttttttaaaaaacttatactttatgaatttaatactttgaaacaaagcaggtcattctttctatttttttgatgaggaaaacaaaactcaaagaaaattggcaacttgtcaggacctcacaattgtaacagaatatatgaaaacttatcctctggatttgggacatattttaaaattataaattatgtgtgaaaatcagcatggtagtttattggggtcccaccacactcattaaatgtaaattgttatagagagcttcaaaaattttagataaagctacttaaagtatatagttgctttataaggtgartgtttgaggactatcaagtcaatattaagccaatatatccttattttctgtaatttttaattatcctaaaagtcttttgtcaaaaatcatgtgcggttgactcaaacctatacagcttcttcaaaaatgtacaaagtcagacactcccactagttatgaggaatccat

SEQ ID NO: 352760 - DNA, 630 bp, Homo sapiens
cgaagcagcttgtttgttgatttcttgcagttgagtttttaaccttacaagatgtatttattcaattgcagcaggaaatgttaagctatcacagtccccccccgttcagctcatagtccaaagcaatcctgatattgaaaacaactttagcaatataatttttttaaagtttgctaagcaactatagtctttgcagtagagtcagctatagcagataatgtttgaaatagatttctaattataaatttatttacatgtacgccaagccagggaagaagattctccaccaaagatgcccatttaaagggatttattccttctgacagtttcctttttattccatagtaaaaatwaagaggtgttgaccaatgtttaatttccagttggttattgagtgacggatgtacttttagaatttctaatccacattggtcgcttatttttcacttactgagacacacagttgcctgcacatatggtaggttgttaaattctgtacaaataataatatatcctagacaggcacaactgacagttccatgtgggatgccttcttcattggaactcaccagtagaaattctctagtagtatttatccaagcctccgttatcaaaatattgcatggttag

SEQ ID NO: 352761 - DNA, 594 bp, Homo sapiens
tggaagagaaatctacttgtatagacgaagcagcttgtttgttgatttcttgcagttgagtttttaaccttacaagatgtatttattcaattgcagcaggaaatgttaagctatcacagtccccccccgttcagctcatagtccaaagcaatcctgatattgaaaacaactttagcaatataatttttttaaagtttgctaagcaactatagtctttgcagtagagtcagctatagcagataatgtttgaaatagatttctaattataaatttatttacatgtacgccaagccagggaagaagattctccaccaaagatgcccatttaaagggatttattccttctgacagtttcctttttattccatagtaaaaataaagaggtgttgaccaatgtttaatttccagttggttattgagtgacggatgtacttttagaatttmtaatccacattggtcgcttatttttcacttactgagacacacagttgcctgcacatatggtaggttgttaaattctgtacaaataataatatatcctagacaggcacaactgacagttccatgtgggatgccttcttcattggaactcac

SEQ ID NO: 352762 - DNA, 569 bp, Homo sapiens
ttttataatcatatttaaagcaaatatccaaatcacagagagcactaaaaaaacactagtatcattttagtaacctctarttgtgaattaacattagctaaggtttattagaaataaaaggtaaaaattaaaaacaacaaaatataaactacatgcatattgacacttatgaaaaatagagatcttggtggaagactacaattaatagcataatttatgttgataagctgtcattatcaatattattatatttattagggtatagtaggtgtgttatttaattttttcacgatctatggttcatagatggctagaaatcattaacactcattctgagaattatggaatattgaaagacacagatctatggactctcaaaatgtaatgtaagctattattttggaaatgttgctaaatatatacagccataacttgaagatatttcaggtttccctccataccactgcaataaagcaatattatgataaagcaggtcagacaaataatttggttttctagtacatgaaagttatgttcacactatccttagactgttaagtgttcagtta

SEQ ID NO: 352763 - DNA, 576 bp, Homo sapiens
gtgatctttgttctcctttttgccctttgaagcatgtgatctttgtgacctactccatgtccttgcaccccctccccttttgaaatccttaataaaacttgcagctttaaggctcaggcaggcatcatggtcttactgatatgtgatgtcaccccaggcagcccagctgtaaaattcctctctttgtactctttctctttatttctcagctggccaacacttatagaaaatagaaagaacctatgttgaaayattgggggctggttcccccgatattttgttgtcatttcaacacttttcagagcctctttgccaggagcagtttccatctcaagaaaccacattattttcccttcaatcagaagcaacttcttattcattcaagtcttattatgaaattgtagcaatttagtcatatcttcaagctccacttctaattctagttatcttgctattttcaaccatatctgcagttacttactccactaaagtcttcaactcctcaaaatcatccatgagggctgaaatcaacttcttccaaactcctgttattgttgatattttgactctaccgtc

SEQ ID NO: 352764 - DNA, 583 bp, Homo sapiens
agctggtaaacaagtctctgacctcttgaaagttctcttctacaggttggatgtttgtcctccaaacctcatgtttaaattagatccccaatgctggaggtaagcactaatgggaattgtttgtgtcatggacatgaatccctcaagaatggcttgataacatccttggagtaataagttcttgctcttattagttcccaggagagctacctgtttaaaaaacaaacaacaacaacaacaacaaaaccctgacacctcccccatctctcttttgcttcctctgtcaccatgtaacctctctacatgccagctcctgtttgccttctgccttgagcagaagcagcctgtagcactcactagatgcccagcattctagccagcagaattgtgagccaaataaactattttttaaaataaataaatcactgaaattcagatattactttatagcaacacaaatgaactcaaacacaatccaaaaacaaaaatctctggctatcatcaaaattccwggtaatttaaaacttgatactccagagaacaagggtaatcaatttggtgacattgtagctaacaatgcagc

SEQ ID NO: 352765 - DNA, 542 bp, Homo sapiens
cccttaattgtgggttgtgactttgtgctaaagggcagactggtatgttttctccttaactgtgaaattcttcacttttattatttctcacttgcactttaaaaccctgtaaatgttatattattacactattatgtaacacaatagctgctatctctcccttctctataatgatctatgcaaggcatcttctgtcaaataagtcaggacctcttgccagacgagagtgattcatcaaaactgctgagctttttcataatcrttattctcacagtgtattacaaagggccattaacagcgtttaatttttcagattgggtacagcatggcaactttagtttatgtttcactgcttctctttgtaaagaaatcaatcgttttaaaactgaactactcatgacaaacatgctagattcattagcatctgccctggttgtctgtatggaggttatattgcaaacctgatttgcatttttatctgcaaggagcacaaggtttgaactgcctaaatgtttacttaattattgctcccattctcttcc

SEQ ID NO: 352766 - DNA, 542 bp, Homo sapiens
cccttaattgtgggttgtgactttgtgctaaagggcagactggtatgttttctccttaactgtgaaattcttcacttttattatttctcacttgcactttaaaaccctgtaaatgttatattattacactattatgtaacacaatagctgctatctctcccttctctataatgatctatgcaaggcatcttctgtcaaataagtcaggacctcttgccagacgagagtgattcatcaaaactgctgagctttttcataatcgttattctcacagtgtattacaaagggccattaacagcgtttaatttttcagrttgggtacagcatggcaactttagtttatgtttcactgcttctctttgtaaagaaatcaatcgttttaaaactgaactactcatgacaaacatgctagattcattagcatctgccctggttgtctgtatggaggttatattgcaaacctgatttgcatttttatctgcaaggagcacaaggtttgaactgcctaaatgtttacttaattattgctcccattctcttcc

SEQ ID NO: 352767 - DNA, 542 bp, Homo sapiens
cccttaattgtgggttgtgactttgtgctaaagggcagactggtatgttttctccttaactgtgaaattcttcacttttattatttctcacttgcactttaaaaccctgtaaatgttatattattacactattatgtaacacaatagctgctatctctcccttctctataatgatctatgcaaggcatcttctgtcaaataagtcaggacctcttgccagacgagagtgattcatcaaaactgctgagctttttcataatcgttattctcacagtgtattacaaagggccattaacagcgtttaatttttcagattgggtacagcatggcaactttagtttatgtttcactgcttctctttgtaaagaaatcaatcgttttaaaactgaactacycatgacaaacatgctagattcattagcatctgccctggttgtctgtatggaggttatattgcaaacctgatttgcatttttatctgcaaggagcacaaggtttgaactgcctaaatgtttacttaattattgctcccattctcttcc

SEQ ID NO: 352768 - DNA, 642 bp, Homo sapiens
  misc_feature (1)...(642): n = A,T,C or G
gctttggctatttggccctgtttttgttccatgtggattttagaatagtttttactaattctgtaaaaaaaatgctgttggtaatttgataggaatagcatttaatctatgaattgctttgggcattatgaccattttaactattaggttgatgcaaaagtaattgtgtctttttttcattaaaagtaatggcaaaaaccacagttactttttcaccaacctagtattttgattcttcctatcaatgagcatagaattttttccatttgcttgtgtcgtcttcactttcttttagcagtgttttgtagttctcactgtagagatctttcacctytctggttagctatattcctaggtattttattcgttttgtggctattattaatgaggttttcatcttgatttggctctcagtttggatgttattggtatatcaaaatgctattgatttctgtacatttattttatatcctgaaaatttgctgaagtttttttatcatatataggagcctttgggcagatactatggggtattctgggaatagaatcatttgtctgcaaagagagatagctgacattcctctctttctannttnttnggaantgcccactntnttaattttctttttctattgactaatt

SEQ ID NO: 352769 - DNA, 550 bp, Homo sapiens
ccattttttgttttgcctacgttgaaccatcctggcataccaggattaaattccacctgatcatgttatgtataatcattttaatgtgttactaaatttgtttcgctagcatttggttgagaattttggcattttgcgtatcaggtatactggaataaaattttctttcatttcaatttccttctctggttttgatatcatggtaatactggccttgtacaaataagtttgggatgtttcttcctctttatattttttgcagagtttaaaaaggatttatgttaattcttcaaatgttttgtagaacttagccttgaagwtatctagtttgagcttttctttttgttcagagatttttgattacttatataatcttcttactcattactagtctgtttagattttctaatttttcgtgattcaatcttggtaggctgtatgttcctagaaattaatcaatatttctaaattattcaatttattggcatataatttttctgagcagtctcttgtgacattttgtgtttctttgttgttaaaatgtccatac

SEQ ID NO: 352770 - DNA, 632 bp, Homo sapiens
ataataaagtagttaaaatatgtaattcaaaaaagataccccaaaatttagtagcttaaaaagcaagagggttttttcttaagtaaatgttctgggcaggtatatcggccagcagaatactcttctgccttgtcatccaaaagctaagcccacagcagctatgaaattcaacagatgtctccaaggtcactttggttgttaccaggccagtcattcaagatggacaaagaacatggagtatcatacatgtgagaatttatgaacaagatctggaaggggtacccatcgattcctctaaccggtgatcgaatataaattaaccacatggccattcctaattgtaaaggaggatgggaaaaataaactagttttattatcaataaataagagaatatatatcagttggcagttagcagtctttcaattcaaaaaggtttctgcaaaaacattgagtcttacaaatataggtgcagataatgatatattttaatttttataataggaaattggaaacaaaatacttgttccactattgattattgattaaacaattatagctcatattttaacaaattaytatggagccattaaaacttacaatttagaatattttaaaacatgtcttgttgcta

SEQ ID NO: 352771 - DNA, 559 bp, Homo sapiens
catcatgtagtctgaatataatacccactcttgttgtcaagcacaaacagaaaagagtacagtttccctttaaaagcacaatgccctattgatgcctttaaaagtcattaaagaatatctcacaaagcccaggagagcattacaataattgcttccctttcctaggtgaaaaaggacatatctgtcaaatagaaaagtgcagaagcaattaacaccttaatactctactgggaaattgcctgaattaacagagatgcttcatggttattgtatttctaaagtttagttactagcatgactgtcctcagtcatttccatttactttccccaggacaacagggctcggagttaggtatgggcatggcagagggtgtatttgagtgtttgcatatgaggcacacatggttcttcagtcacatgtttcagaggatgaatgcagaagtagggctggtgtatgcacttatgaaatcaatacgtaaggatacatatgttttaaatcaayttctcaggcctaaaaaaaccccacacttctggattctgtgctgcccacccatggaac

SEQ ID NO: 352772 - DNA, 553 bp, Homo sapiens
gtccaaaaccttgaaacagtgtgtttatgagcatagagcactgagccagaaaataatcacaacaaccaggcttaggtacggcatcttggaagcctaaaagatttcctcagttttctatttgtcaagattccagccaattaaagtcttgaattgaatccagtgttggatttttataaagggcaataagagattttcccaggagactctggggttatctgcacttgatgctctattttaaggagctagttctttagaaatgtacccagtttgcatttcagaagtagtgaaccctggtaaaatggttttctcatttatatttgaaaacaacttccttgatttagaactgagatagtctagttgagcacatcyttaaaaggttgaaactgaattatagatgaccacctggccagcctctccatcaccacccccaacctccactcctgctcccagtatcaagagtgaacttactgagcacaggcaaaagtaaataattatctagaagccaaatcttgtattggttaaaggatcagaatgaaaaagttcagtgttatct

SEQ ID NO: 352773 - DNA, 595 bp, Homo sapiens
ttaaaaaatcttcacattagtactgacaatggaagtaaaggcttccagagcttgtgcaatgagggccatgatggtatgtacaaagtgtgcccccagttactatgtctgagctcagaaagacctttaagaaattttgtgccaggcatagtgactcacatctgtaatcccagcactttgggaggctgagktgggaggatcacttgaggtctggagtttgagaccagcctgggcaacatggtaaaaccctgtttctattaaaaaattaaaaattcgttgggtgcagtggcacacacctgtggtaccagctactcggtaggctgaggtgggaagatcacttgagcccaggagttcgaggctgcagtgagctatgatcataccactgcactatagcctgggtgacagagtgagaccctcactcaaaaaaaaaaaaaaaattgagacctgctttttcttattgtctgctgaattagtttgttttcacactgctgatgaagacacacccaagactgggcaatttacaaaagaaagaggtttaactggacttacagttccatgtagctggggaagccttacaatcatggtggaaggcaagaag

SEQ ID NO: 352774 - DNA, 510 bp, Homo sapiens
gtggcctaggcaccagagagcatctccttgtctgcaggttatgaagaccatgggaaaagcgtagtatctgggctagtgtgcaccattcctcacagcacagtccctcatggcttcccttggcaaggggagggagttccccaaccccttgtgcttcctgggtgaggcaacgccccaccctgcttcggcttgcccttcatgggctgcacccactgtctaaccagtcccagtgagatragccatgtacctcagatggaaatgcagaaatcacccgccttctgtgttgatcttgctgcgagctgcagactggagctgttcctatttgaccatcttgccagccaccagataactcaatatttttgtaagcattttgaccatactatattaaagatttcattgggcaggaagagaggagttgcaaacagtatgttaaaaagaaaaaagtaactagaaacttcatgagattcaatagaatatatttctttagtggaatcaaggagttcagcactactc

SEQ ID NO: 352775 - DNA, 574 bp, Homo sapiens
gaagttgtatgcatgcccatctgaaggtttcttcccttttctggtgggatgcccccaaaagtcatagtccaccattttgtctcttaatgcacgtgcccggttcactcgcccaatttctgagaccctgttgaaagccaattaccaattttaagtgtttttatctgtttgggaagttgcctctccctggtgtctgcattcagttaacacttcattgtgacagctgtggaccrtcaggagattatctctccctggtgcactggctgctgaattatcatttttagagcagcaatgtgataactgccaaaccatcacctgataatcacctgacattcctcgtaggtggggagcagagccctctcctgccctgctcatgcctaacttcatgtaacaatttctaatatgctaattgttcatttctgggtctttgaagtaatttggatagtctgattttagtgtagattatgttaggccattcttgcattgctataaagaaatacctgagactgggtaatttataaagaagagtggtttaattggcccacagttctgcaggctgtacaagcatggtgtcagc

SEQ ID NO: 352776 - DNA, 612 bp, Homo sapiens
gaggtggcagcttgaagtaggaaagtggagagagagggggaatccaaaccacaaacagggcagttgagtagaaggagcagaccagatggtttagggtaacaaaattatagtggctatgaaagtttytgctgcagattcctgagaaattctctaaacttaaatgtccaacgagtgaaatttgttgagtgaaaaataaatttatttcctttaaaagatactttattgttggcacgtaaatggaaaagtagacaaatcaatatactctaaactcatttgtttttattctgtgtgccagcaccatgctaagcaccgtatttgcctaattctcaatatccctgtgaggtagatgatttcatgatctccatttgacgtatgaggaaattcaggtttagagtggctgagtagctggccaaggtcatacaaagaggaagggctggaggcagagctgaaacccaggtctgcttcaccccgcagtgatctgtccgtgctagtgctttttttttcatgtcctgtttcattctagaaaggatgcgaattgaccaattcagctggcatcacagttgatgtaacttaagttcttatctaaacgactgtcctttcaatgcatagagt

SEQ ID NO: 352777 - DNA, 594 bp, Homo sapiens
attgtagtgcaattaaaatgtcagagcagtaaattctgatgtgtgactagtaaaccacttgaatcatgcaccaacgtgatttattgctctttcttttctttttctcaaaacaagtgctactaactggccaagatttgcaaatctttaattactaattgtgtgccatagatctttgaggggctgacttttaagttaaaaaaaatgttcttaatctcagctgcaaagcactgagggagattagaaattgattsaatagtcatcttaaaagaagaaaaaacgagctgaggaaagatatgcattattcttgggaagatgaaaagtttacatcctttatgttaatcatctattttgctgaccactgagaaaagggcaaagccaagtagatttgtttttatttgcaagcagctttcttttttgttatacttttaatttgggcaattcagttatttttcctcttttttggttctttgtttgttcgtttgtttttcttatttttcatcatcacttcatatgggcagtgaaaattcagaggagcgacaggcaacttacctgggattcctgggccagcaaccacagcagccttcacaccaacca

SEQ ID NO: 352778 - DNA, 582 bp, Homo sapiens
aatgagagtttaattataatcatatatttttagatgcctctttcattaaacagcaatcccactggtttcctctataagtaatctaaataatttcttagagatctgttatttcattctgagttcagtttgagtgtacttcagtcaaccagaagcctttttaatgtaaatgatactaataactttataaataattagagctaatacttacagagcattcatgagatgcyaacatgagtctaaatcctttatatgtataatcttatctcttctcacaataactcaataaaatgtaaaataacaaaacagataattccattttacaaaaggagtagtggttttaagaaagaatttgtcctcatctaaataggttgcatggcaaatctgaaatggaactgctattatattaaagcctagggcagggcaggcatattacatgcctagcactctgcttggtacctcacatacattatcagtactcacaacaatgtaattgcacaggtacaattacataacttgaagtatggggatacagaggcttatagagatgaaattatgtgcctaaatttaccctggaagcaacaa

SEQ ID NO: 352779 - DNA, 536 bp, Homo sapiens
ggcatcggcaattcaagactgtttttcctactcttgtcagtggctctttcagtgatatgaagttaaaaccaggtactgtgatcgctcacctgatttttggttcctacgaaggtgcttttcctgtgtagatagttgttaaatttggtgttcctgcagggaggatgatcagtggaggcttctattcagccatcttgctctgcctcccaaggtctgtattttttaatagaatataaattccttgaggtcagggactaagtctacatcatttactgctagatagcaaagtgcctagaatttaggaaattatcaatagatattcaatggaagatagggagggaaacaagggagggagagggaaggagggaggaratgaggaagagagggagggactaaagcatttcaaactcagagtgaggctagaagatagttatacttgggtaagatagtgttacataaggtgattgaggtactaataaaaaggatggatggcatcaaagaggaaacagtagtgactgctttatctgctcattctcttt

SEQ ID NO: 352780 - DNA, 653 bp, Homo sapiens
tactcttgcgactggtagaagttttatatcttgatatccccccaaaataaaatacaaactatagccaagatgcagttgtgataatgccaataaacctatagtttttgactgcaagggagttaataatctcttctgaagactyatagcagtcttgataaaaaggaattatttaaaaattgctattttatgtttgctcaagattaaaggcgtataagtaaggactacccatgtagctgctgggcaaagatataataccatagggcattcctttctttctttctttctttctttctttttttttacagagggatcttgctcttccacccattctggagtgcagtggtgtgatcataattcatggcagcctcaaactcctgacctgaaacaatcctccagcctccgcatcctcagtatctaagactacagatgggtgctaccatgcctagctaacactgtagggcatttctaaggaaatgataaaacttttctcagtatccttggttttgcatgctagcataatctaggtgatcaaaaagaaaggtttgaagctgagcaaggaaagtaacagctaaagggaaagacagagatttacaggaattcagaaaaatgtcataggtagattaagaggtgttgtgattgaaagatccacgatg

SEQ ID NO: 352781 - DNA, 666 bp, Homo sapiens
atagcttacaagtgaaaattacagatggaaagtttttccaaaggaaaactgcctgaggctcttgaagcaagtgygattccgagatatcctgcccagtgctttctcctggcccttatcaactcttacatttaaatgtccaccactcaggccatcatgcttaggaagagaggcggtttcactgaggtgagccatttcctgtttctgatatcttgcatcatggttttatttagactatcagatgattgtgtaggaatacgtgactgatagatgtgggtgctgtttgctattctacatccccctacccaacatacacacgaattataaaatgtcactccagcgtaaattgttctttgattgtcacattgctcaaacctgatcttctaggtcagagtttctaaagtagggtatatggataaaccccagggggaattcatgaattcccctgaaataatgcacacaatttttctgggacaagcgttcactgctttcattaaattctcaaagtagtctgtgacttcaccaacagttaaataccactgttaattcttttgtcttatattcataacaatcaaaatatagtagaaaattggcagtttgcatatctggaaatttccaatatccaaataacaataataatgacaataagacaacaataataccttggct

SEQ ID NO: 352782 - DNA, 653 bp, Homo sapiens
tactcttgcgactggtagaagttttatatcttgatatccccccaaaataaaatacaaactatagccaagatgcagttgtgataatgccaataaacctatagtttttgactgcaagggagttaataatctcttctgaagactcatagcagtcttgataaaaaggaattatttaaaaattgctattttatgtttgctcaagattaaaggcgtataagtaaggactacccatgtagctgctgggcaaagatataataccatagggcattcctttctttctttctttctttctttctttttttttacagagggatcttgctcttccacccattctggagtgcagtggtgtgatcataattcatggcagcctcaaactcctgacctgaaacaatcctccagcctccgcatcctcagtatctaagactacagatgggtgctaccatgcctagctaacactgtagggcatttctaaggaaatgataaaacttttctcagtatccttggttttgcatgctagcataatctaggtgatcaaaaagaaaggtttgaagctgagcaargaaagtaacagctaaagggaaagacagagatttacaggaattcagaaaaatgtcataggtagattaagaggtgttgtgattgaaagatccacgatg

SEQ ID NO: 352783 - DNA, 666 bp, Homo sapiens
atagcttacaagtgaaaattacagatggaaagtttttccaaaggaaaactgcctgaggctcttgaagcaagtgtgattccgagatatcctgcccagtgctttctcctggcccttatcaactcttacatttaaatgtccaccactcaggccatcatgcttaggaagagaggcggtttcactgaggtgagccatttcctgtttctgatatcttgcatcatggttttatttagactatcagatgattgtgtaggaatacrtgactgatagatgtgggtgctgtttgctattctacatccccctacccaacatacacacgaattataaaatgtcactccagcgtaaattgttctttgattgtcacattgctcaaacctgatcttctaggtcagagtttctaaagtagggtatatggataaaccccagggggaattcatgaattcccctgaaataatgcacacaatttttctgggacaagcgttcactgctttcattaaattctcaaagtagtctgtgacttcaccaacagttaaataccactgttaattcttttgtcttatattcataacaatcaaaatatagtagaaaattggcagtttgcatatctggaaatttccaatatccaaataacaataataatgacaataagacaacaataataccttggct

SEQ ID NO: 352784 - DNA, 666 bp, Homo sapiens
atagcttacaagtgaaaattacagatggaaagtttttccaaaggaaaactgcctgaggctcttgaagcaagtgtgattccgagatatcctgcccagtgctttctcctggcccttatcaactcttacatttaaatgtccaccactcaggccatcatgcttaggaagagaggcggtttcactgaggtgagccatttcctgtttctgatatcttgcatcatggttttatttagactatcagatgattgtgtaggaatacgtgactgatagatgtgggtgctgtttgctattctacatccccctacccaacatacacacgaattataaaatgtcactccagcgtaaattgttctttgattgtcacattgctcaaacctgatcttctaggtcagagtttctaaagtagggtayatggataaaccccagggggaattcatgaattcccctgaaataatgcacacaatttttctgggacaagcgttcactgctttcattaaattctcaaagtagtctgtgacttcaccaacagttaaataccactgttaattcttttgtcttatattcataacaatcaaaatatagtagaaaattggcagtttgcatatctggaaatttccaatatccaaataacaataataatgacaataagacaacaataataccttggct

SEQ ID NO: 352785 - DNA, 454 bp, Homo sapiens
tgcccaggagtataatttctggctcatagggtggttgcatatttagttttctaataaactgctaaactgttttccagagtagttgtcctattttacattcccatcagtagcgtcagagtgatctaattttctgcatcctcaccagcatttggtgttgtcactaatttttattttagcctttctgataagtgtgtaatgatatcaattgtagttttaatttttaagtaatttgagccatttccccaatggaaaatgttgagcattttttcrtgtgtacttacctgccatctgtatatcctctttaataaaatatttcatgtctttttcccattttctaattagattgtttgcttttttactgttgagttttgaaagttgcttgtatatttgaaatactagtcttttgtcttttgttggatatgtagtttgcagatattttttcctggtctgtaga

SEQ ID NO: 352786 - DNA, 592 bp, Homo sapiens
caaaccagaaatccaggaagctcagataatatcaattaggataataccaacaaaagtatacttatatttaaactgtagaaaaccaaaagtaaaagaaactttaaagaaggcgggtgcaggatgaagagcctgacctacagagaaacaagaatgagtggccttctcactggaaaccatgaaagcaagaagatagtgcagtatattttaagtgttttaatagaaaatacacaccaacctagaattttatatttagtgaaattacccttcaaaactgaaagagaaataagtactttctcagacaaacaaaaagtaaggaaatacatcaccatcagacctgccctatgataaatgtcgaaaaaaaattattcagtgagaaggaaaatgacataggtgagacatggacttacataaataaataaagaccatcaagagaaggaacaaatgatatytgaaagggtaaaaaaaaaaacctattttccctttgaaatatcttatatgaatgacggtaaatgactgccagtcatgaaagagctagtagttcaaccttttaccacagaacaaggcaaaacagtagactaaatctgcttgtcaa

SEQ ID NO: 352787 - DNA, 454 bp, Homo sapiens
taaaaaaaaaaacctattttccctttgaaatatcttatatgaatgacggtaaatgactgccagtcatgaaagagctagtagttcaaccttttaccacagaacaaggcaaaacagtagactaaatctgcttgtcaaaacagatagtatttacactcaacacgtgtctatttacaagaattgtactaaggtagtgctataggtgtgattactgacagtggacttttacaatttgagatcacaatggaaacacatgaaatgtacataatatcaatgaaacatatacttaaaaagatccmtaaacaaggtaaaatttcacagcagtagaaagcagaatttagtgcataaatgagtggttagaaaataaaagtagggaaaagatgcttataatcaggtaggccacttgaaggaaatgaaattctctatgatcaatttcagaacttaaataataaagcaa

SEQ ID NO: 352788 - DNA, 585 bp, Homo sapiens
actaacccatttaatattttgtggaaggtcctacagcttgaaatcttgaaatagaaaattttaaaagagcataagaaaaatgcaaatgcatgttctttaaatcaataactaaaatagataaaacactcatgaacctaatgatagaaaaaaaaggagaatagataaaattagaaaacaggaagtagaggcaaactaaaagaaaagaaaatccagaaactgtaagagaaaactacctgyaacctcaataaaaaataatttaaaacctaaagaaatgaaaactttttaaacccaaatatgaattgccaaaatttcattaagaagaaatgaaaaagcatgacattccaattatcataagaaaaaataaataaggtttaaagtgaaatattatttttaaaaaagttcacagttgaatctaatctaccatttctagaatattgtttcaattctctaaatcataggaaacatataagaagatggaaagttttttatggaaagttttttagtttgtttcatgaagccagcattatatgtttacatcagttaaggagaaaaaggcatttaataaaactgaaatgtcatttttaa

SEQ ID NO: 352789 - DNA, 564 bp, Homo sapiens
gaaatataaatagaaaaaaaagttccactaaaaatagagaccaaaaaaagtatgtatattagacgcaaatgactttttaaaaagggacagcattaatatgaagaaaaatacagtatttgttgaaaaccttaaaacatgatcttagccaacgggaaracaaaatattctttatccttcctgaataaaaatccaaaataagaaaaatcttagttgtaccaaaataaatatataaatttaatacaattcaatttattggatctgaaaaagtacctgaaagttgaaatatacatataaaaattctaacagaaccatatgaaaaatatgaacagcaaggtagtactttatagaaatcagataatagaatagagaaacaaaatagatcattactgtttttattacttaaaatataacacatttattttaattcagtgtgaaacatatttaacatatgtagatagatcaaaattcactaggaagaaaataaaattggatcaatattttacatcatatccaaaaatagattccataaaaagttttaattagggcagtattagttgttagttg

SEQ ID NO: 352790 - DNA, 480 bp, Homo sapiens
aatggatgcactcaataaaagccttgaaggggacaacatacagattgtgcagctttstgtgtgctatcccttcattctgatactacattctactaatcctatcggctttggcttctctggactttgagctcaactatagagactatagagactatagagactattcagctatctttggacactctttctttgctaggcctgaaaactttccacaggtagtacatttgggaactcctagcgcttatgttcattaattctcttctctcagaggtcctgtctttactgccggctgtccaatatctgacaacctttgatttatgtattttatgtgattttctggcattgaagttgggaatttaaatacatttctgttatttcctcataggcagtggtagaaatccataacaattattatatttttaatcaaggtctcagatgcagttagccaagtaaatatgctaatgagagcataaccaaatt

SEQ ID NO: 352791 - DNA, 623 bp, Homo sapiens
atatgcattattttctggggacttttattttgattacaaaatagatgaaaaggaacaaatagccttctttcttataaaaaatttttcttttttctgcttacccattttattcaataaatgtaatatttaaaaatatgaaatgtttccaaataagaaaagctaggaaaataatgagacacaattttttcaaagtttgtattctattcatttcaggctcagttgcctaattactgttaggttcaatatataaaaagcacaatcttgcttttttaataaaaagaatacatgtgtaaaatttttgaataaatattttaagcatctgtggagacccmagcttggtattaaaataacttgaatatttactcaatattgaaagtctttttaaaaattacagtatattattcctatcttaagtgtttgaaggaacatttgttcacttataatcaaatagttaagggtctgtatgccctaagctgtgttctaagcactgtagagtccatgtttaatcagatgtacatgtcctctgaccacaaggagcttgcaaattgatgagaaaaaaaagacaaaaactgttaaaaatatgagaaagatggcaaattattctctatggtgcaaaaaatgaa

SEQ ID NO: 352792 - DNA, 522 bp, Homo sapiens
aagcaatgaggttggaaagtttgacagaatgagaaacagtgggcagggcacaggcagtagttctagaatgggatgaagtcagaaattatgtgggaagttttggtcctggcctacagagttagtattttatttgggttgcaatgagaagtctttggaggattttgattttgtgtcttaaaaaataacacattttcctttacacaaactaattttctctggtgggtagagatgctgttatagatgtaaagaggaaaaactgaaaaagtaaaaccagaaaagctgttgaactagtccaggtaaaggaagatgatggctggtgtgtacaaggtcaaaggcagcagtgtctgtggrccacatggagtagagtttctcaaggtggtacatactcagctttgttcccactgtctgtcaccacagaggtcaggtcagtgaagagacaccattctttgagtagtcttaatagctataattgattgtcaggcaacactaattgttttcattgtatagacttcattttagctt

SEQ ID NO: 352793 - DNA, 615 bp, Homo sapiens
cagcagtgtctgtggaccacatggagtagagtttctcaaggtggtacatactcagctttgttcccactgtctgtcaccacagaggtcaggtcagtgaagagacaccattctttgagtagtcttaatagctataattgattgtcaggcaacactaattgttttcattgtatagacttcatkttagcttgcatttgcaaattaccattctttttctaggtcatgtctatagatatatgatcagaattgtacacagcaaaaaagatattagtgtgaaagtttaaaagtcaattttctcttttaatttttgttcagaaacagaagttagaaaatacaaagtgacacttggaatataacatggttcatcagcagtaaaacatttttaaatggacaattttactaccattttcgatctctatatttcacgaataactttagattaaccaaaattttaaattttggctaatgtcacatttgtcattaaaatggaccaaaaaagcactgaattttgtataaaagcttaatacattatattactcttaaatatcatgattggagaacctgagaaaaatatgcatttcttcagagcccatgcatgaccagtagctaatttttcaa

SEQ ID NO: 352794 - DNA, 562 bp, Homo sapiens
aaacataaatattcttttatcatgggagggtgcccattactggcatacaagaactggcatatgacagttcacatttctataaaccaataaaatatcatttcaatggattgctttattagccatgtgtatcattgtctaatacatatatcactacaataatttttaatcattttaaatgacaayatatgttcttcattttttcaggtttacatatttgaaataatctagaaaaaattcccactaaaagaaaaacctcttcattaattaaacagaaaaaatataaattttaaaataaattatgtcatcccaagtataaagcagtaatgttggctacatccaatagtcagaactgattatcccctagttatagtaactatcctattcagtgttttctagatttgtgcttaattaaataagagatgaaaatatatttgtcaagagtattgggtataaacaagccatatgttcgaaatacaaaatagaacaaactattatatgtgacatgtaaacttttttctcggtttggccaaaatcatgcaaatttgtatcaaggttgagtact

SEQ ID NO: 352795 - DNA, 583 bp, Homo sapiens
tagtacttttaccctctggtctggccattcttatgttttaccagacgtggaagcaacaagaagaaccacagtgaatccctcaagtccctgacacacacatatgggtctgctatgtgcatgtggagggcctgctacctacacatgataatcagaatagattatcctytacagtatatgaattatgtactttcctgctggacattgttaaatgacatggtgtatcatctcatgtttcaacttataaacagcatcttgtagcatagacctccaactcttcaaggtgtcattcagaatggtcactgtagctacgtgtttaatgatcacctatgcaggatttcatcactgtaaatcagacactctctatgccctcagatcataaaataatgaatgtttcttatcaaaatctattttcaagtaatattactccacttcacatatagtataagaacctctcagtggcatattttcatttctcctctcctagtccttataatattaatgtgaaacattatactcacatatatgttataaagctcacagctcattgttattatttgtttaaattgtcaattatcatttttaa

SEQ ID NO: 352796 - DNA, 583 bp, Homo sapiens
tagtacttttaccctctggtctggccattcttatgttttaccagacgtggaagcaacaagaagaaccacagtgaatccctcaagtccctgacacacacatatgggtctgctatgtgcatgtggagggcctgctacctacacatgataatcagaatagattatcctctacagtatatgaattatgtactttcctgctggacattgttaaatgacatggtgtatcatctcatgtttcaacttataaacagcatcttgtagcatagacctccaactcttcaaggtgtcattcagaatggtcactgtagctacgtgtttaatgatcacctatgcaggatttcatcactgtaaatcagacactctctatgccctcagatcataaaataatgaatgtttcttatcaaaatcyattttcaagtaatattactccacttcacatatagtataagaacctctcagtggcatattttcatttctcctctcctagtccttataatattaatgtgaaacattatactcacatatatgttataaagctcacagctcattgttattatttgtttaaattgtcaattatcatttttaa

SEQ ID NO: 352797 - DNA, 579 bp, Homo sapiens
cagtgattctcccgcctcagcctcctaagtagctgggattacaggcatgtgccaccatgcctggctaattttgtatwtttagtatagatggggttttgccatgttggtcgggctggtcttgaactcctgacctcaggtgatccacccacctcggcctccgaagtgctgggattacaggcatgagccaccacgcctggcccattttagaatttttaaaatcaaaattgaaaagtttagccatcctaatatcttttcgtgttctcctcctcattcctcctcttcttcgggaattataattgatgacttttaagtgttattcccatttagcaactatctcaatcaaatcacaaaaagcatttgaaaaaatgcaacattcactcctgattaaaattatcaggaactaaaaataaaagggaacagcctcaactgataaagtgcatttataaaaattatagcagagacaggaacacaagaaagatatctcctcacagaacttctattcaacattctactaaaatgtagggcagtgcaatcaggcaagaaaaataaataaagcacatccagataagaaaaaaggca

SEQ ID NO: 352798 - DNA, 589 bp, Homo sapiens
tgaataactcaaccctgtctatctatagtttctcgtatttttgggagaaacttctgaggtttatgtgataaggacatgtatgtttcttacatggacaccttaagcatcgcaatgtataggggaaaaaagtagaaatctcaaaaatgtctattaagtgtgaaatagaataatagatatcacaataacagtagcagccattgcttgagcatataccgtatsctaaaagttttatatgcgtacccttattgaactgaccgtatgaataattcaaaggaaattgagtcatatgaggagctacacggaagatattatactagaactcggataattgtctttacccattgtaggatctctgtttctagtgactcagttatgacagacatactatgtctttccctcaaagaatgttttataagctctgacacatttttattcctagcactttattttaacgtttataaactgtcatgaaaaatggtacaatttgtagcaagcctgaagatgtgcctaagaagtgctagtggcgtagattaaaatataggaagaaatcttgtttcataaaaatttatatccagatgtatccattatt

SEQ ID NO: 352799 - DNA, 589 bp, Homo sapiens
tgaataactcaaccctgtctatctatagtttctcgtatttttgggagaaacttctgaggtttatgtgataaggacatgtatgtttcttacatggacaccttaagcatcgcaatgtataggggaaaaaagtagaaatctcaaaaatgtctattaagtgtgaaatagaataatagatatcacaataacagtagcagccattgcttgagcatataccgtatcctaaaagttttatatgcgtacccttattgaactgaccgtatgaataattcaaaggaaattgagtcatatgaggagctacacggaagatattatactagaactcggataattgtctttacccattgtaggatctctgtttctagtgactcarttatgacagacatactatgtctttccctcaaagaatgttttataagctctgacacatttttattcctagcactttattttaacgtttataaactgtcatgaaaaatggtacaatttgtagcaagcctgaagatgtgcctaagaagtgctagtggcgtagattaaaatataggaagaaatcttgtttcataaaaatttatatccagatgtatccattatt

SEQ ID NO: 352800 - DNA, 558 bp, Homo sapiens
attgtctttacccattgtaggatctctgtttctagtgactcagttatgacagacatactatgtctttccctcaaagaatgttttataagctctgacacatttttattcctagcactttattttaacgtttataaactgtcatgaaaaatggtacaatttgtagcaagcctgaagatgtgcctaagaagtgctagtggygtagattaaaatataggaagaaatcttgtttcataaaaatttatatccagatgtatccattatttttcctttgctacagtatccttggggaacagagttagaatgtagctgaaagtttcaataagtggtgaaatttttgtatgttatttcatgcttctataactaggtcttgaatataaaaaatttaagaataagtaaaaataacatttgcgaagtgaacaattctaccattgtggcatttcttttttctatctaatctagaaaatgttacttaacttgtttttctttccttcttcttcttttttttttccattctctctacctgacttgtaaaatgcactggtatctgtgtgactcctt

SEQ ID NO: 352801 - DNA, 558 bp, Homo sapiens
attgtctttacccattgtaggatctctgtttctagtgactcagttatgacagacatactatgtctttccctcaaagaatgttttataagctctgacacatttttattcctagcactttattttaacgtttataaactgtcatgaaaaatggtacaatttgtagcaagcctgaagatgtgcctaagaagtgctagtggcgtagattaaaatataggaagaaatcttgtttcataaaaatttatatccagatgtatccattatttttcctttgctacagtatccttggggaacagagttagaatgtagctgaaagtttcaataagtggtgaaatttttrtatgttatttcatgcttctataactaggtcttgaatataaaaaatttaagaataagtaaaaataacatttgcgaagtgaacaattctaccattgtggcatttcttttttctatctaatctagaaaatgttacttaacttgtttttctttccttcttcttcttttttttttccattctctctacctgacttgtaaaatgcactggtatctgtgtgactcctt

SEQ ID NO: 352802 - DNA, 593 bp, Homo sapiens
gaagggcaatcagatcgtagcctacacttgtgctaatcactgagttttcatcagatgtagccaactgtttgaaccgtgttcaaataacacaaatgccaagctgtagccaatccaggagtttctgtacctcacttctattttctgtacaccactttcctttttctgtccataaatgttctttcgtcatgtggctgcactggagtctctgagccttctctggctcgggaagctgcccaattcgcaaatcgttcattgctcaattaaacaccttcaaatttaattgggctgaagtatttctttcaccaaagtctattcagtaatctttggtgacaacatatttttaartcttaagttctactgtaaactcatttctgtttttctacttgaaaaattttatgtaaagcgagtttggtatacctggcagcattttcttctcactattaagtaccaatttttgttaagttatacacttataaaatatgtacctattcatactatatggaaaaaatataaaacgtgatatcattttgaagaaaaaagatgcatgttcatgattgttcttgcatatagacttgaactttcattttaaatgt

SEQ ID NO: 352803 - DNA, 593 bp, Homo sapiens
gaagggcaatcagatcgtagcctacacttgtgctaatcactgagttttcatcagatgtagccaactgtttgaaccgtgttcaaataacacaaatgccaagctgtagccaatccaggagtttctgtacctcacttctattttctgtacaccactttcctttttctgtccataaatgttctttcgtcatgtggctgcactggagtctctgagccttctctggctcgggaagctgcccaattcgcaaatcgttcattgctcaattaaacaccttcaaatttaattgggctgaagtatttctttcaccaaagtctattcagtaatctttggtgacaacatatttttaaatcttaagttctactgtaaactcatttctgtttttctacttgaaaaattttatgtaaagcgagtttggtatacctggcagcattttcttcycactattaagtaccaatttttgttaagttatacacttataaaatatgtacctattcatactatatggaaaaaatataaaacgtgatatcattttgaagaaaaaagatgcatgttcatgattgttcttgcatatagacttgaactttcattttaaatgt

SEQ ID NO: 352804 - DNA, 593 bp, Homo sapiens
gaagggcaatcagatcgtagcctacacttgtgctaatcactgagttttcatcagatgtagccaactgtttgaaccgtgttcaaataacacaaatgccaagctgtagccaatccaggagtttctgtacctcacttctattttctgtacaccactttcctttttctgtccataaatgttctttcgtcatgtggctgcactggagtctctgagccttctctggctcgggaagctgcccaattcgcaaatcgttcattgctcaattaaacaccttcaaatttaattgggctgaagtatttctttcaccaaagtctattcagtaatctttggtgacaacatatttttaaatcttaagttctactgtaaactcatttctgtttttctacttgaaaaattttatgtaaagcgagtttggtatacctggcagcattttcttctcactattaagtaccaatttttgttaagttatacacttataaaatatrtacctattcatactatatggaaaaaatataaaacgtgatatcattttgaagaaaaaagatgcatgttcatgattgttcttgcatatagacttgaactttcattttaaatgt

SEQ ID NO: 352805 - DNA, 581 bp, Homo sapiens
tttctccatttcttacttttcaaaaattgtttcttcatcaaagtggcttaattaatattctacaagtgctctagagcccatagatgaagaacactgagcaaaacaccattttgcttttcatccttgtcattaaytatccatttttctcaattatttaatcaaaaaaggaaagataagtagtatcccatatcccttctacaaagttagaaaaaaataagcataacaattcttattcacgggaatgttatattgccaaatgcattatttactggctaatagatctatgatgcatctcattattctggctaataaaattactataatcttgagccttaagaatgtacagattgaaagtggtgactccttaatttttatgtactactgaaagagaaaaataattaagaagaaaaaaaggtaaaatatttttccttttcagtttataatgcttatgacaaatgtcactgtgcattctgatcttaaagatgttaaaaggccatatgttttgtttagacatctgattgtcacaaccacctacatattgtttttagacagtcgtgtttggcaatttttctttttttaag

SEQ ID NO: 352806 - DNA, 581 bp, Homo sapiens
tttctccatttcttacttttcaaaaattgtttcttcatcaaagtggcttaattaatattctacaagtgctctagagcccatagatgaagaacactgagcaaaacaccattttgcttttcatccttgtcattaactatccatttttctcaattatttmatcaaaaaaggaaagataagtagtatcccatatcccttctacaaagttagaaaaaaataagcataacaattcttattcacgggaatgttatattgccaaatgcattatttactggctaatagatctatgatgcatctcattattctggctaataaaattactataatcttgagccttaagaatgtacagattgaaagtggtgactccttaatttttatgtactactgaaagagaaaaataattaagaagaaaaaaaggtaaaatatttttccttttcagtttataatgcttatgacaaatgtcactgtgcattctgatcttaaagatgttaaaaggccatatgttttgtttagacatctgattgtcacaaccacctacatattgtttttagacagtcgtgtttggcaatttttctttttttaag

SEQ ID NO: 352807 - DNA, 581 bp, Homo sapiens
tttctccatttcttacttttcaaaaattgtttcttcatcaaagtggcttaattaatattctacaagtgctctagagcccatagatgaagaacactgagcaaaacaccattttgcttttcatccttgtcattaactatccatttttctcaattatttaatcaaaaaaggaaagataagtagtatcccatatcccttctacaaagttagaaaaaaataagcataacaattcttattcacgggartgttatattgccaaatgcattatttactggctaatagatctatgatgcatctcattattctggctaataaaattactataatcttgagccttaagaatgtacagattgaaagtggtgactccttaatttttatgtactactgaaagagaaaaataattaagaagaaaaaaaggtaaaatatttttccttttcagtttataatgcttatgacaaatgtcactgtgcattctgatcttaaagatgttaaaaggccatatgttttgtttagacatctgattgtcacaaccacctacatattgtttttagacagtcgtgtttggcaatttttctttttttaag

SEQ ID NO: 352808 - DNA, 598 bp, Homo sapiens
aaataattactcaagttgtttattccctgggctatttactagtgacacatatttttttctatgaaaatgtgtttgtaaaatatactaaaatacttttataaaaattaagagtttgctaaaaattaagccttttctgaaacattattatggagcttcacaagaacctaagagaaagtcacattgcaggatactataaccaaatagaamcttcgtgcatattatatgaaatcttaaaaaatgtaataatatacatatatgcaatacattctttcacattctgaagatgattctgtatgattttctggcattgaatagtctaaacatgctttctgctatgtgtttcatgaaagggccttatataaagtgacccccaaatgctgaagaagccaggaaaccgaaaaggaggcagacaaatccagtttgttggtatccagtgatgtattgagtaaacctacaggcagaagtgtggtcttaggcagtgtggatctctgcaccactattccttagacccaaggcttctataacatagggaaacagtatatgtgctccagcaagacaattaaaggcctccagaacaggcaagaatgctgtatgcatc

SEQ ID NO: 352809 - DNA, 609 bp, Homo sapiens
  misc_feature (1)...(609): n = A,T,C or G
nnnnnnncattattaaaataactttgagaatatttacaaactcagtattacactaagtatatcaggtattgacacagctgcctaaatatcctcttctgtctgctcccaattgaccaagctaagactgaacaaacagaagttatgtgggtttatttggtaaaattaagtgcatataattgcaaatatttgattgctttggtcttaaaatttggaatgaatgtgtacctaattaattctatacagagaagtawcctcaccacatacttccaagtcaatgggttgatgcttaaaattttttgtataattggggtttcatttatttttaaaagttttaaattattgtacagttaactgtatttttccttctaataaagtaaaacataccaatcagggctaagtctcacttgactttgtcctttttccttctctcagagggtattcaccattaaccagatggactttccagtatttttgctatacatttacattttacatgtgtggttgtatgttgcttcacataaaagatttgttgcttgaaacattctgcttcatttttcgcttactaacatgtctcaaaaatatttctttgtttgtacatataggtctgcc

SEQ ID NO: 352810 - DNA, 609 bp, Homo sapiens
  misc_feature (1)...(609): n = A,T,C or G
nnnnnnncattattaaaataactttgagaatatttacaaactcagtattacactaagtatatcaggtattgacacagctgcctaaatatcctcttctgtctgctcccaattgaccaagctaagactgaacaaacagaagttatgtgggtttatttggtaaaattaagtgcatataattgcaaatatttgattgctttggtcttaaaatttggaatgaatgtgtacctaattaattctatacagagaagtatyctcaccacatacttccaagtcaatgggttgatgcttaaaattttttgtataattggggtttcatttatttttaaaagttttaaattattgtacagttaactgtatttttccttctaataaagtaaaacataccaatcagggctaagtctcacttgactttgtcctttttccttctctcagagggtattcaccattaaccagatggactttccagtatttttgctatacatttacattttacatgtgtggttgtatgttgcttcacataaaagatttgttgcttgaaacattctgcttcatttttcgcttactaacatgtctcaaaaatatttctttgtttgtacatataggtctgcc

SEQ ID NO: 352811 - DNA, 609 bp, Homo sapiens
  misc_feature (1)...(609): n = A,T,C or G
nnnnnnncattattaaaataactttgagaatatttacaaactcagtattacactaagtatatcaggtattgacacagctgcctaaatatcctcttctgtctgctcccaattgaccaagctaagactgaacaaacagaagttatgtgggtttatttggtaaaattaagtgcatataattgcaaatatttgattgctttggtcttaaaatttggaatgaatgtgtacctaattaattctatacagagaagtatcctcaccacatacttccaagtcaatgggttgatgcttaaaattttttgtataattggggtttcatttatttttaaaagttttaaattattgtacagttaactrtatttttccttctaataaagtaaaacataccaatcagggctaagtctcacttgactttgtcctttttccttctctcagagggtattcaccattaaccagatggactttccagtatttttgctatacatttacattttacatgtgtggttgtatgttgcttcacataaaagatttgttgcttgaaacattctgcttcatttttcgcttactaacatgtctcaaaaatatttctttgtttgtacatataggtctgcc

SEQ ID NO: 352812 - DNA, 609 bp, Homo sapiens
ttaacccacatctgtaagcgttaatgtagcaaattctattatagatattatgtatataacttaatttcatttatgcttgacattgaatggcctcttcaaactgaaaaatattgaatctgcctttcaagtaatataggttcatttaaacatgcctaatattattatgccattggcaaatttacttctgtcatttagatcaaaggcatatattttctgcatttctatgcctgcttctcagaaatamcactgttctttcttcccattaatgacttaatgccttgtaattcttcagaatatagaaaattgcataactaaattgcataagtgatctcatttttccaaaaaacaatctttgtctccttgtgcaattacattgttatttgtttatccatgctgtgctttaattcatttaaataatttattttaagaaagcagtgtattacagtgggaaagaataataacaattgagtaaaaaaaaaatccaagctcgccagatgaaaatatatttttttctaatataaagagagaattttgatatctgaataaaggaactaaacactgtaataaaacatgtattaggataaatgtatagaaaataaatatgtcatg

SEQ ID NO: 352813 - DNA, 620 bp, Homo sapiens
cttgcactcattctccaagcccccgtgtgatccgattcttccggtacaccaaggcaagaaacccccggatacagaaagccctctgtccttgtgataaggcagggggctgtaatagagctgactaacacaagcggcctacggatggcaaaactaaaagagcacatggtaacacacacccactggggcttcagaagctgtaagcattcacccctagatgcagtcctaaggttgaagccccacaatctgcccttctgcatgctccccgtagaggttggatttaaacagaacaaagcaaattaaaagcagaacgagagaagaaaacatatcttaaatgttcatcatcattagagtgaatttttgaggtcgaccaggaagaagaaaaataatgtttttaacactttgtataagtcttagaggtgtagtagtactcttttgaggatgggcatgagcacaggctttataagacatatgcagattgtggtgagtgttacagttgcwcacatatgaaactcaacacagatcatttttgccataggctttttagagagtccgtctatcttccattgagcaggatgtgagggaatggtgtgaaaaaaagactatctgctcacctaatattc

SEQ ID NO: 352814 - DNA, 620 bp, Homo sapiens
cttgcactcattctccaagcccccgtgtgatccgattcttccggtacaccaaggcaagaaacccccggatacagaaagccctctgtccttgtgataaggcagggggctgtaatagagctgactaacacaagcggcctacggatggcaaaactaaaagagcacatggtaacacacacccactggggcttcagaagctgtaagcattcacccctagatgcagtcctaaggttgaagccccacaatctgcccttctgcatgctccccgtagaggttggatttaaacagaacaaagcaaattaaaagcagaacgagagaagaaaacatatcttaaatgttcatcatcattagagtgaatttttgaggtcgaccaggaagaagaaaaataatgtttttaacactttgtataagtcttagaggtgtagtagtactcttttgaggatgggcatgagcacaggctttataagacatatgcagattgtggtgagtgttacagttgctcacatatgaaactcaacacagatcatttttgccataggctttttagagagtccgtctatcttccwttgagcaggatgtgagggaatggtgtgaaaaaaagactatctgctcacctaatattc

SEQ ID NO: 352815 - DNA, 557 bp, Homo sapiens
tatatttgaaattaatgatatctaaatatttcaatccttttagatgcctctctataaaaagtaaaagataaagtgatatattatgagaagactctctataaaaagttaaaggcaggccaggcaggggctcatgactgtaaaccaaaattgggaggccaaggcaggcagattgctggaacccaggaaytggagaccagcctgggcaacatggcgaaacctcacctctacaaaaaaaaaatacaaaaattagctgggtgtagtggtgcatgcctgtgtcccagctactcaatggtttgaggtgggatgaacacttgagcccaagaagtcaaggcacagtgagctgtgattgcattgctgcaccccagcctggatatatagtgagaccctgtctcaaaaaagaaaaaagaaaaaaaaaacacagagggatattaaaggcaattataaaactttaattaaaatttcactaaaactatctactgagaaagaataactttcaaaaatcagttggctttcatcactctagcttcaaaatcgtgaaaaaaactattgagttttcc

SEQ ID NO: 352816 - DNA, 557 bp, Homo sapiens
tatatttgaaattaatgatatctaaatatttcaatccttttagatgcctctctataaaaagtaaaagataaagtgatatattatgagaagactctctataaaaagttaaaggcaggccaggcaggggctcatgactgtaaaccaaaattgggaggccaaggcaggcagattgctggaacccaggaattggagaccagcctgggcaacatggcgaaacctcacctctacaaaaaaaaaatacaaaaattagctgggtgtagtggtgcatgcctgtgtcccagctactcaatggtttgaggtgggatgaacacttgagcccaagaagtcaaggcacagtgagctgtgattgcattgctgcaccccagcctggatatatagtgagaccctgtctcaaaaaagaaaaaagaaaaaaaaaacacagagggatattaaaggcaattataaaactttaattaaaatttcactaaaactatctactgagaaagaataactttcaaaaatcagttggctttcatcactctascttcaaaatcgtgaaaaaaactattgagttttcc

SEQ ID NO: 352817 - DNA, 600 bp, Homo sapiens
ttctatatcatttcacgtcaaaaaggctcaggaggtctatttgactgttagctcagagtcatcagtgttatggctgccagcaaagccaatgggattggatgcagtgaactcacggccaatgttcagatcaagggaggtgacatttgcaccacgcatctgtgctgctcatattgcacttgttaaatttaacttagattcggatcctagattaaactattagtagttggttgactggacaggagtaaacagaatggagaaattgtttacgaccatatacttataaagaaaatggcaggaagtagttctgttagccgargaaatacatgacctggagaagagccacaaacacttcaactattcagaggctgaatcgtttagggggacatttcataatttgtgtattctagaggataaagttaacattcaagggtaattgaaggcagatgaggttttgttttacataagcctcacatatccattagaattctcaaaaatataaatgaactaacttggaagttaatttcctgtcactgaagtaatacagaaaaatctgatgaccagggattagaattgtcatataagagattccagtaagacact

SEQ ID NO: 352818 - DNA, 370 bp, Homo sapiens
ttccagtcttcaatgtctctcttataacaytgaatttctaaactatattcttttcaccttccgtatatgtcacctacataattcagcaggtaagtagattctcactttcctgtagccagtacagtgaggtttgaaattttagctgaaacagcaagcacataatcaggcaaaagcaagactataaaacatggaaaaataagagtccagagtttggaaggttgttatgaccatactgtgaaaataatatataaggagttcctatctcatttggaataggagactatagcattgccttttatatgagtccattgatccatttgtcaagagaaaggaagtatgatactttttctaatgtagacatattgtgatg

SEQ ID NO: 352819 - DNA, 370 bp, Homo sapiens
ttccagtcttcaatgtctctcttataacactgaatttctaaactatattcttttcaccttccgtatatgtcacctacataattcagcaggtaagtagattctcactttcctgtagccagtacagtgaggtttgaaattttagctgaaacagcaagcacataatcaggcaaaagcaagactataaaacatggaaaartaagagtccagagtttggaaggttgttatgaccatactgtgaaaataatatataaggagttcctatctcatttggaataggagactatagcattgccttttatatgagtccattgatccatttgtcaagagaaaggaagtatgatactttttctaatgtagacatattgtgatg

SEQ ID NO: 352820 - DNA, 555 bp, Homo sapiens
ttgcttctttctaacagatgcccctagccatgctgactcagtagtagatagcatggggcctgctatcctcaatatcataggcccagtttaccaattatcgtaagaccaattatcatcttcagcctcctaatgtcaggatcctcacttgctatgcaatatttccatatttccatttttagtatggcagcatgtcatttcaagctatccatttctagagttgttagagcaagtagtaccatacatggtcatgcctggctctgacaaataactgagattttagtgacagcacaataatcatttacttctcattcayatcactatccatggcaagttggtgtctgtcttataaatgttgactcaaggatccagtgtccttccatcttgtgatgctgccatcttcaatatgtagcctacaagatttgctagaaaggagagagataggaggagtgtgcagtggagaaaatcatgggacaggcctggaggagtcacacaattgctatcaggtacgtttgttccattgaccttagctcagtcatatggctccaactagaggtt

SEQ ID NO: 352821 - DNA, 555 bp, Homo sapiens
ttgcttctttctaacagatgcccctagccatgctgactcagtagtagatagcatggggcctgctatcctcaatatcataggcccagtttaccaattatcgtaagaccaattatcatcttcagcctcctaatgtcaggatcctcacttgctatgcaatatttccatatttccatttttagtatggcagcatgtcatttcaagctatccatttctagagttgttagagcaagtagtaccatacatggtcatgcctggctctgacaaataactgagattttagtgacagcacaataatcatttacttctcattcatatcactatccatgkcaagttggtgtctgtcttataaatgttgactcaaggatccagtgtccttccatcttgtgatgctgccatcttcaatatgtagcctacaagatttgctagaaaggagagagataggaggagtgtgcagtggagaaaatcatgggacaggcctggaggagtcacacaattgctatcaggtacgtttgttccattgaccttagctcagtcatatggctccaactagaggtt

SEQ ID NO: 352822 - DNA, 602 bp, Homo sapiens
agaatttgtggaaaatattttcagtgggacaagaggcactgcactttcctgactttattccaggatcacagatattccaaaagcattaaagtggaaaaaaaaaaaaaaaacaagcaaacaagcaagcagatgccacctgcctggcaatgagcattatgtcaattatgattaggattatacagaattttccctagaagaagctcaaacatttgtactattatctcccttattttccctaaattcctgggatatgaaaaaggcaagtacaattattattattttgagagggaagctgagaccaccaagattctaastgagctgcccaaagtcacagaaagaggcccaaaggtcttcctgccttcctgtcctcattctccttccaggaaacaatgctcccggagcagagatgcccacaagatacctaattttcccctcaggtatagaaaaattgaggcaagagaatgcaaattcctcagcactaaaaccagtgaaaatttttaatagacattttcaatctgaaggaaaccacctttatttcatacaaaaacacatggaactacctcagacgataaagaaaataccctcatgtttctaaatttgcc

SEQ ID NO: 352823 - DNA, 607 bp, Homo sapiens
ttaattaattaagttataattrtagaactgaaagaggtcacagagaacatctagtcttctaatttccttgaaattattacctttggagagcctggagtgactagaataaggctcctttactgatgggtgggttaggtcctcgggggtttatcccacacaaaaaaagatgtggatacctagcgacagtcagggaggtaccatctgtctaatatgatagtgctgagaacccctttgcagcttttacgtggcctcaaaggttcctgctctttctggaggcagctgtgtcattgctctgtctatgcctctgccctcccgccttggattctctctttttgggataagaagtgttcagcttctgtaggatgtttcattttgattaatgttatttccactcttctggaaagacacttaggtaccgctggctgtgtttctttttcagcatgtataaattcagatctgaaaggggtttcattgcttcatcatggaattttataatgaaataataatttgagtgcctggctagttttcttgattttttttttctcctggaacacaagtttggagagggatatgaagcaaagccatccatttatttcacactagagac

SEQ ID NO: 352824 - DNA, 600 bp, Homo sapiens
agtctaaacttttccctccttggcgtgaggcaattgctgcctgccctatttggcagttgctgggagtagctgtgaacactggtgatattgttggctgaggagtaaaacagaagctgcataaagtttggctccctgcatacttcagggcacaggttctgatcccaaggttaaaaacaacacagaaacagtaactaaaaatgtcattgaacagtgcatacttgaatggccttcagtgcccaatggggacatctgtgtttcattgttgaagatgccactgcaaacttccagtgctccaaatttttgctcctgtctctttatactgaaaatcttagcgtgaaatatttagtgccctaggaaagctaaattaatggtgagtcagagtaattaaggcaaagtaaataatctccaaggttctyattccccgtgaaactaatttcatatcgtatccttcatgtgttaaaaatagttctctgctaattcaagatgcctgtgctctgtgttggtgaagtgcacttcagttctattgaaaggatgcagattagagagttattttcaattgggcaatttttttttttttaagagagacattcattttggcac

SEQ ID NO: 352825 - DNA, 446 bp, Homo sapiens
atatagtaagtagtatttcccaagacttagctgacaactaactcctttggggtgagatgtcactaacctttgktctataaaacacaagctggagaaaaaattgaccacatatctacaattcaaccatgcgtatttgtgaaatattttctctgaattacgttaaatggcaaatcaaaatatggaaagtatcattaagaatctgactgactgggaaagaaagactgggagaaaatttctgccctttctttggctagctaagcttctgatgtgttctttctcagctgtattcatttgatcaataataataaccaccacaaaaaccacttagttccgtacctttgttttgcacatgagaaaactgaggcccaaaaaagttatctgctttgcctgaggtcattcagtgagaaagtggcagaatatggaacagaaaattcaatgttccacaa

SEQ ID NO: 352826 - DNA, 501 bp, Homo sapiens
gcacaaacaaaatcaaaactggactccctaagtccacaccatttcccttaggacaacaaaatgtatacatttacccaaaagcaatatggctagcctttatcccatatggcagatatttaaatttttctcttgggaagaaaatcttgagaattttttttaaatgagttaacaagaatcttactgtttttaatttaataaatgtgttttattattgactttattgcttgctaagcctgaaatyagatttctctatgtttgggtatgtcttgtctaaccaataacaggacaaccagactgcaattaaacagatattcccacttgggccataatgcataaacacacacacacacacacacacacacacacacacacacacacacactatcaggaggcacttaaagtttcagcacattctcgttgtcacttttctggcctgtttaggagaaggagatattaaatattaaaaggctcttctaatatacagacttcaaatcatttatc

SEQ ID NO: 352827 - DNA, 554 bp, Homo sapiens
tgctgcatcctcctaccctgcatgccagctagcagtggcagttcagtctctccagatgcctctcagaaaaagaaatgccacaaatataacaggagttgagatcctgggggagccaattagatttaaggtgctttcaaaattctgtaaaagaaaaaaaggcattagaaaaaacctggcacttgaaatgacattttatgtgttccgcttagggcctttggaatactactcatataagggctggttgccatgcttataaaataaactttgggtttttaatataacagaacaaaatcattagctagtaaaacaaacttagcttcagagggagaatgtggcacgtcaaatctaaggtatctcatcctttatctttggaattgtcagccaaaataagacaaatcaggccaaggtcaatggcagacactctactgagaaactctcctcctaagactgrctgttgtgtagtactttgaggttctggcacttgtcaagcaattatttgggggtgagctgcaaggcaacagaaattttcaggccccccacccaacaccatacca

SEQ ID NO: 352828 - DNA, 591 bp, Homo sapiens
taactctggtaataggttttagaggaaattcaactaaaaaggaaaatgaacttaaagagtctggatttttttcctaatccatagttatctaattcaccctttctcaaaagaaggctctctctttcttcctctttatcggctcttgcctgtctttccctttctccagttctctctcacacacagcttgtatctaaagctatgcaagaaatacattttatactagtgatttggtcagtgttaccctgcttcwtcttgctatgaatgcagtatatatgagataagtacaaaagaaagagtatctaactctcttattttcatcatgacccactgggacaaggggagagagagggcacagctgcctccacggaataccctgttattgggcatgacaaagccaaggtaaagttctctggcatacctggaattcagacatgattacatggatatatgtctcactttccttgattattaagttgtaactctagagtatttgaccagcaggaaaggataagctttttctgatgagtatttaaaaagaagggtagaatcattttacttttaaatcctgcttttaagaggaaaccaaatagg

SEQ ID NO: 352829 - DNA, 591 bp, Homo sapiens
taactctggtaataggttttagaggaaattcaactaaaaaggaaaatgaacttaaagagtctggatttttttcctaatccatagttatctaattcaccctttctcaaaagaaggctctctctttcttcctctttatcggctcttgcctgtctttccctttctccagttctctctcacacacagcttgtatctaaagctatgcaagaaatacattttatactagtgatttggtcagtgttaccctgcttcttcttgctatgaatgcagtatatatgagataagtacaaaagaaagagtatctaactctcttattttcatcatgacccactgggacaaggggagagagagggcacagctgcctccacggaataccctgttattgggcatgacaaagccaaggtawagttctctggcatacctggaattcagacatgattacatggatatatgtctcactttccttgattattaagttgtaactctagagtatttgaccagcaggaaaggataagctttttctgatgagtatttaaaaagaagggtagaatcattttacttttaaatcctgcttttaagaggaaaccaaatagg

SEQ ID NO: 352830 - DNA, 591 bp, Homo sapiens
taactctggtaataggttttagaggaaattcaactaaaaaggaaaatgaacttaaagagtctggatttttttcctaatccatagttatctaattcaccctttctcaaaagaaggctctctctttcttcctctttatcggctcttgcctgtctttccctttctccagttctctctcacacacagcttgtatctaaagctatgcaagaaatacattttatactagtgatttggtcagtgttaccctgcttcttcttgctatgaatgcagtatatatgagataagtacaaaagaaagagtatctaactctcttattttcatcatgacccactgggacaaggggagagagagggcacagctgcctccacggaataccctgttattgggcatgacaaagccaaggtaargttctctggcatacctggaattcagacatgattacatggatatatgtctcactttccttgattattaagttgtaactctagagtatttgaccagcaggaaaggataagctttttctgatgagtatttaaaaagaagggtagaatcattttacttttaaatcctgcttttaagaggaaaccaaatagg

SEQ ID NO: 352831 - DNA, 604 bp, Homo sapiens
aagaactagcttgttaatcttccttctccctccttctctcctcctcatcttcttccttcttttcctcctccttcatgaatgtttttcacattgatccctgccctcatcattgtttcccttttttgtgtttcaatttgttacttgctctttgcagattcttgtgttgactgtttaacttgcttgttttcagtctttcttgtttcgttaaaaatgtacttaaaattataatttctcttaagatttcttctgtaatggttatttaatatttattttgcaaacttattttttactttttttgttcctttgttattaatttctgattttactacatagtatggtcataaaaaattttccatatgatgttgagcctttggaatgtattgtgtttttcaatattgtggcctattacctcatcaatatttgtggttttaattgcatttctcaggtaactaatgatgtcaagctgaagccgtttcttatactaattcgccttttgcatcttcatttctcaaggttctatttcttttgtccattacttattgtgttgtctctttattaaaytgtagaattaaaaattatattttgtatatacatcatttgtcag

SEQ ID NO: 352832 - DNA, 590 bp, Homo sapiens
atgttttgtataacagaataacaaagattttaaaaaatactctgagttattgaagacgtgggaaaatgggcactgttaaatactgctgagagtaaactgataaaaatttgcaggaagtagtttaagagtacatattaaaaattatgacccagaattttcaccagaatgtatcctaaataacaacctaaacatctatcaatgaggtgttcttaaattatagtagctctttatattacagtatcatgtaccatcaaaatcaataacaygcatatttacaaaaaaagctacacctatgttataaatttattttaaaaactatatttgaaaacaatttataacacagttgtgtttttaaataggtgtgcttacatgtacaacaagaaaaaaacttagaaggatatttctcaaaatgtaaatcatcatctctaagaggtggaactatgaattccttctttataccttctttcctatacatagatttttgaattatctgattttttttcaaagagcatgtatacttttataattaaaattattatgaacaatataattatttctactgtttaataagaatggagaaagacaaaaac

SEQ ID NO: 352833 - DNA, 552 bp, Homo sapiens
ggattacaggcgtgagccaccgcacccggcctcatttttttcttcactttttacaaaataacagttttactgaaatatgatcctcataccctaaatattccccgtttttaagtgtacggttcagtgatttttaatatattcacagagttcggcaattatcaccattatttaattccagaacattttaatcatcctcaaaagaaaccccatatccatcagtagtcactccccatccccccactacaacccatgataactactactctactttctgtttctatgaatttggctattctagacatttcatatgaatgaaattatataatatgtagccttttgtgactagcttctttcactcagcataatgtcttcaamgttcatctatgttgcaacatgtgttggtatttcattccttttgatgccagaataatatttcatggtatagatatattaataccagattttgtttatctattcatcagttgatggacatgtgggttcttcccactgtttagctattatgactgatgttgttatgaacattcatgtaca

SEQ ID NO: 352834 - DNA, 625 bp, Homo sapiens
ggcttttttttttttttttttcttcataaagcaagagtctactcctactgagattctaaataaacctttttctcttttagaaaaattaccttcctcctacctagaaaactgagtttttaaaatttctttgttcttgaaacaaagagctattttctctcttaaaggaaacagaaagactttgttgctaattcattaacaagcaactcttaacaattaagctatagacatttaacaagttacacacagacctcagcctaacagatcatgtactctggaatatttagtaggagggtgagtcacctcagacataatacaaagtttatattattcagttatgacaataattgttcctaattatctcaggtttcaaaaaacttcaaatctatgtacagagaacaaagtcgcataaaattagacatgggtaggttatttgtacttaatgttgctccaaatgaataatgaaactgttttcttcttccaatatgtttagtcaagtgagagctcgtattctaatacagayttctgaactaaatcattatttagaatgtttcattaaaaatcctctgatctgaaacattgagtgagtatgtaaatgcgacaggaaaaacagggtaataggaacagg

SEQ ID NO: 352835 - DNA, 535 bp, Homo sapiens
aaactcagactctatggttctgaggaccctaggggacaaagtcagccttctcactcttcataaatacatgccactccgtctcagtggtgatgacacatccacctgtcttatcccacttggcccccacccaccacagaacctggatgaggccactagagattgcctgtcggaatcatcattataaatggctggacagaggcatcaccctgttcactggcgatgcctttgcaccatagaaggtgagaactcctcatcaagagaattcttctcacaccgtggaggggattcatcaattaaagtatttcaccagcagatactaaacttcataagacactagtgaccagctgagaaacacaatcccaaaaaaatccacatggaactcttcctcaggcagttcctccacrtgacagccatccatcattaccacttagaatacattcagaagctagccccaccagtaatttaaaagctgtcacaaaggcacttcatttggaactcactctgaatcacagacccaataatatactaggaaagt

SEQ ID NO: 352836 - DNA, 540 bp, Homo sapiens
ctacaaataaatcctttaatttaagaattcccaagctggaagagatcactgcagaaaatatagtctactagctaggtgtgacaaactgcatattataaatacttagacaaaaaaaaaaaaaggtgagtggggaggagtggcaatatcagaaagccacaggtgtggggccaaggcgatccctaaatcccagggcagggagacgtcaagtaagagaaaacatattacctacatcaagtaagagaagaaaagtgctgtaaagaaacacgagcagtttagtaaggttcaaaaccrtactattttgaccatctactaagtgcaaaaatgtatgctggtgtgaggggccccaagatgaaggaacagtctttgctggaaggaagctcagagccccatgggagagacagtcgatgtcatgcattaaataagccggtgctaccggagcacacagagagagggcagctgacggatggatctggtggttattattacacccctagcttcttgcagattgtgtttcctggctttctgctgtagaaacagaca

SEQ ID NO: 352837 - DNA, 540 bp, Homo sapiens
ctacaaataaatcctttaatttaagaattcccaagctggaagagatcactgcagaaaatatagtctactagctaggtgtgacaaactgcatattataaatacttagacaaaaaaaaaaaaaggtgagtggggaggagtggcaatatcagaaagccacaggtgtggggccaaggcgatccctaaatcccagggcagggagacgtcaagtaagagaaaacatattacctacatcaagtaagagaagaaaagtgctgtaaagaaacacgagcagtttagtaaggttcaaaaccatactattttgaccatctactaagtgcaaaaatgtatgctggtgtgaggggccccaagatgaaggaacagtctttgctggaaggaagctcagagccccaygggagagacagtcgatgtcatgcattaaataagccggtgctaccggagcacacagagagagggcagctgacggatggatctggtggttattattacacccctagcttcttgcagattgtgtttcctggctttctgctgtagaaacagaca

SEQ ID NO: 352838 - DNA, 674 bp, Homo sapiens
cacgtgcagagattctctttaaggagaagacagtcaaaacccacccccaggcaaatgcagagctgaccagcactgagagatgagaggagtggatttcttccatgctgaaccatggctatttcaggatgggtgcagagagagagggctgaacgtggcactggaggggtgtgaccgggagggccggaggagatttcaagaacaygaaaagcctcacacacaaccctaaatgcacggaactcacggcccactaactcaatctaatccaaacgacctcactaaaatcactcttgcaaagctgctgcttccttcagacagaaaccctcaggagagtttgtggacaagctgtcagagaggcctgtgccattatttgttgacacaacagcaggatccttcaagggtagtgctggtcctcgaacatcactggcgacagcagagttgtatgacaatggaaatattgtcaatcccagaaaccagcctacgggaactaaatagactctctaggctcggcacagtcaacagggtagagaaaagcattttaaaaatcaaatcccaaactgtcattatggatttgattagtgactttgttttttaaattatataaaataaattaagatgcacagaagcaacaaaatatatattattataaaaagcaacttgtggcttctaatttagaa

SEQ ID NO: 352839 - DNA, 674 bp, Homo sapiens
cacgtgcagagattctctttaaggagaagacagtcaaaacccacccccaggcaaatgcagagctgaccagcactgagagatgagaggagtggatttcttccatgctgaaccatggctatttcaggatgggtgcagagagagagggctgaacgtggcactggaggggtgtgaccgggagggccggaggagatttcaagaacacgaaaagcctcacacacaaccctaaatgcacggaactcacggcccactaactcaatctaatccaaacgacctcactaaaatcactcttgcaaagctgctgcttccttcagacagaaaccctcaggakagtttgtggacaagctgtcagagaggcctgtgccattatttgttgacacaacagcaggatccttcaagggtagtgctggtcctcgaacatcactggcgacagcagagttgtatgacaatggaaatattgtcaatcccagaaaccagcctacgggaactaaatagactctctaggctcggcacagtcaacagggtagagaaaagcattttaaaaatcaaatcccaaactgtcattatggatttgattagtgactttgttttttaaattatataaaataaattaagatgcacagaagcaacaaaatatatattattataaaaagcaacttgtggcttctaatttagaa

SEQ ID NO: 352840 - DNA, 556 bp, Homo sapiens
ttatgtgcatatatacataaatttatatttctatatacatagaaaaaacatgatgtgtagacatgaaaatgttaacagtagataactctgaccaagaggattatagatgatttttactttyttcttttctgtttatttgtatttcataattttccataataaacacatataatttatatacattttaagtttttaggaaagcaattcttgggtgtgggcagatgaagaaataaacccttgcacatgtttaaggtttgtatatggcattagtcagagcaatgttaagctatgctgcaataacaaacaaatccgaaaagctcagtgacttagcacaacgaagttacacttatacttcttatttatgtagaatccagtgtgggtctgcagagacagccttccatctgatagctcaaagatccatctccacttgtagctatcaaggtcactgcagcgggagagagggatgaagaagatacttacagccatagtttacatcacctaactgcaagggaggctgctgggacattggaggacgtgtacaggattcgattgcaca

SEQ ID NO: 352841 - DNA, 556 bp, Homo sapiens
ttatgtgcatatatacataaatttatatttctatatacatagaaaaaacatgatgtgtagacatgaaaatgttaacagtagataactctgaccaagaggattatagatgatttttactttcttcttttctgtttatttgtatttcataattttccataataaacacatataatttatatacattttaagtttttaggaaagcaattcttgggtgygggcagatgaagaaataaacccttgcacatgtttaaggtttgtatatggcattagtcagagcaatgttaagctatgctgcaataacaaacaaatccgaaaagctcagtgacttagcacaacgaagttacacttatacttcttatttatgtagaatccagtgtgggtctgcagagacagccttccatctgatagctcaaagatccatctccacttgtagctatcaaggtcactgcagcgggagagagggatgaagaagatacttacagccatagtttacatcacctaactgcaagggaggctgctgggacattggaggacgtgtacaggattcgattgcaca

SEQ ID NO: 352842 - DNA, 556 bp, Homo sapiens
ttatgtgcatatatacataaatttatatttctatatacatagaaaaaacatgatgtgtagacatgaaaatgttaacagtagataactctgaccaagaggattatagatgatttttactttcttcttttctgtttatttgtatttcataattttccataataaacacatataatttatatacattttaagtttttaggaaagcaattcttgggtgtgggcagatgaagaaataaacccttgcacatgtttaaggtttgtatatggcattagtcagagcaatgttaagctatgcygcaataacaaacaaatccgaaaagctcagtgacttagcacaacgaagttacacttatacttcttatttatgtagaatccagtgtgggtctgcagagacagccttccatctgatagctcaaagatccatctccacttgtagctatcaaggtcactgcagcgggagagagggatgaagaagatacttacagccatagtttacatcacctaactgcaagggaggctgctgggacattggaggacgtgtacaggattcgattgcaca

SEQ ID NO: 352843 - DNA, 386 bp, Homo sapiens
ttattagtttttcttttcttatctttttttttttctcagttttttatgagggtaacggacggggccagggtcatttatgatttgggatcttggggcagtcaagtttgcaacttcagctcaaaagtcttacgctcggagcgcgcaggctcagcgcgggctgcgagactgcgagtggagggcttgggaagccgcggtcttcgggaaaccgtccacgcggggaaggagaaaggcacggtgggtcctcggggkcactggctctgtggcccgaagtcccgggagcctagtgaggactagacttctttctagtaagagacctgaacgtgccctcccgctgggctgcggacactgggagccgggccggcgggtggcaggacaggcagtaaggt

SEQ ID NO: 352844 - DNA, 603 bp, Homo sapiens
tgaccaaaaccagcaatggtaacaatgaaaacattactcacacctggttttctctcttcacgggagstaagagcaatagtaaagataaagagaacttaatacatatattgaaaacgtagtagagtttctatcgaaaataaatccaaggtacttttaaaattttgaatgcattaagagaagatccaagtttcaaagtatctcggcattgttaggatttaggttatggaacatgggtataataaaacgaaaaagaagtaggagcactttttatcagaaaaaagttattgagtgtgctttccattaaaggtaagcataaagtatttccaaaccaaaagaacctttgagattgttagttgcatgagaggcatgagataaattaaattacacttaaaatgaaaaaatgaagggccaacagttttggaagatattttttggaacatttgagttgttaatgctcaatgcgtggaatcctgtattttctcttggttccattgatagtccctatatgacaatcagtaaacatatgataaatacatacagtgaagttcttttaaaaccaaattgttcctacatgtatttggttgtaaaatgtatactgtattc

SEQ ID NO: 352845 - DNA, 475 bp, Homo sapiens
gaagatattttttggaacatttgagttgttaatgctcaatgcgtggaatcctgtattttctcttggttccattgatagtccctatatgacaatcagtaaacatatgataaatacatacagtgaagttcttttaaaaccaaattgttcytacatgtatttggttgtaaaatgtatactgtattcagttatgcctttttaaagttaatttgtctgtaaggtagaattaggcctgatgtcccataacaagccttgtaatactgaatttttaaaaccaagaaatatatgaaacaaggaacaaataagaaattttagaaacaagatagatctcctgagaactgatatttttacatttgtgtataggtggttgtggacccttggacacatacatactgaataggggtgataagttgaatattgttttgagcacaaatcatcctttgttataataactcaattcccttcgaggaaaaagaga

SEQ ID NO: 352846 - DNA, 475 bp, Homo sapiens
gaagatattttttggaacatttgagttgttaatgctcaatgcgtggaatcctgtattttctcttggttccattgatagtccctatatgacaatcagtaaacatatgataaatacatacagtgaagttcttttaaaaccaaattgttcctacatgtatttggttgtaaaatgtatactgtattcagttatgcctttttaaagttaatttgtctgtaaggtagaattaggcytgatgtcccataacaagccttgtaatactgaatttttaaaaccaagaaatatatgaaacaaggaacaaataagaaattttagaaacaagatagatctcctgagaactgatatttttacatttgtgtataggtggttgtggacccttggacacatacatactgaataggggtgataagttgaatattgttttgagcacaaatcatcctttgttataataactcaattcccttcgaggaaaaagaga

SEQ ID NO: 352847 - DNA, 475 bp, Homo sapiens
gaagatattttttggaacatttgagttgttaatgctcaatgcgtggaatcctgtattttctcttggttccattgatagtccctatatgacaatcagtaaacatatgataaatacatacagtgaagttcttttaaaaccaaattgttcctacatgtatttggttgtaaaatgtatactgtattcagttatgcctttttaaagttaatttgtctgtaaggtagaattaggcctgatgtcccataacaagccttgtaatactgaatttttaaaaccaagaaatatatgaaacaaggaacaaataagaaattttagaaacaagatagatctcytgagaactgatatttttacatttgtgtataggtggttgtggacccttggacacatacatactgaataggggtgataagttgaatattgttttgagcacaaatcatcctttgttataataactcaattcccttcgaggaaaaagaga

SEQ ID NO: 352848 - DNA, 475 bp, Homo sapiens
gaagatattttttggaacatttgagttgttaatgctcaatgcgtggaatcctgtattttctcttggttccattgatagtccctatatgacaatcagtaaacatatgataaatacatacagtgaagttcttttaaaaccaaattgttcctacatgtatttggttgtaaaatgtatactgtattcagttatgcctttttaaagttaatttgtctgtaaggtagaattaggcctgatgtcccataacaagccttgtaatactgaatttttaaaaccaagaaatatatgaaacaaggaacaaataagaaattttagaaacaagatagatctcctgagaactgatatttttacatttgtgtataggtggttgtggaccyttggacacatacatactgaataggggtgataagttgaatattgttttgagcacaaatcatcctttgttataataactcaattcccttcgaggaaaaagaga

SEQ ID NO: 352849 - DNA, 548 bp, Homo sapiens
tgtttcagtcattaacattgcgtatgggacattcccaggacaaaacagaacaacttctaagcacctaggtagagcctagtgccggcagaattttcagtgactttgtgctgtgttgacttgaaggcagcttttcctggcttataggagtcacagaattggatcatagaagaaaacgtggcagaagaggagtaataaatagctgcagagaatagtcattcagtcagaggtggctgagtaagtgtcgtgttttattgaaccttgtgtgggaaataaatcagaggaaaawaaaatgattcatatgtagttttgtgagtgttataagtgaaatgcacgtatttcacagacttaagtgttgctcagtcttgtgcttttcgaagttcactgatggttcgtggtagagggtggctgttggcaatggttttctggctccgttattccagtactttcttctttcggattgttagttgaaaatgtgtcgttattttgctctagttgagaattaaaatatagaaactgggatttgctggtggaattaaacccataaaaac

SEQ ID NO: 352850 - DNA, 548 bp, Homo sapiens
tgtttcagtcattaacattgcgtatgggacattcccaggacaaaacagaacaacttctaagcacctaggtagagcctagtgccggcagaattttcagtgactttgtgctgtgttgacttgaaggcagcttttcctggcttataggagtcacagaattggatcatagaagaaaacgtggcagaagaggagtaataaatagctgcagagaatagtcattcagtcagaggtggctgagtaagtgtcgtgttttattgaaccttgtgtgggaaataaatcagaggaaaaaaaaatgattcatatgtagttttgtgagtgttataagtgaaatgcacgtatttcacagacttaagtgttgctcagtcttgtgcttttcgaagttcactgatggttcgtggtagagggtggctgttggcaatggttttctggctccrttattccagtactttcttctttcggattgttagttgaaaatgtgtcgttattttgctctagttgagaattaaaatatagaaactgggatttgctggtggaattaaacccataaaaac

SEQ ID NO: 352851 - DNA, 576 bp, Homo sapiens
ggctgctcaacactggccaagttatcctctctgagccataattcctacaaagataaaaagaagttagactggaagacctctacgatcccttgaaattctcaactatggaattgtaatttttttccttattcatagcctaaataatcttttagctgaggccgggaagagatcttgtgggatcatatgtggaattctggattttagccagacttcctccatagtaactaggtgagaattcttttagtttatcaaatcctttaagatgtcccacctttttgaagctaagtagtaggtgattcacagattttaygaataatgatgatagacaagatatccaaaaagtttcttcataaggtggaaaggtaaactgctttcctcctgcatatacaccagtttggtagcaaagagtattttggtaacaccttatttcaattttagtaagattgtgtccttagccacaaagaggtatctaagagtggacactgtaatatttctcaggccagtattctttgtaaatatggctactaacaatgcatcacctccaataaactgctctaaattactctttcaggttat

SEQ ID NO: 352852 - DNA, 603 bp, Homo sapiens
cggcaggagaatcacttgaacccaggaggcagagcctgcagtgagccgagattgcaccattacactccagcctcagtgacagagcgagactctgtctcaaaaacaaacaaacaaaaaaacaaaaaacagaaaatactcatctttcctcaatacccagaagaatatgttcctaaggacatgttggtaagctggaaagacgcggtaaaaaggaatcctgcaagcgtgtctgcttgtacatggaacgtagttastttggtgctgagatcctcccagcttggcttctcttcagtcgtcttttgacctgtgcatggaggaaggctgtgtcatctgtgtgcactctgccaggaggaagcttacagagctgccctccagacttctcaactagccctgaaatcaacttcaactggtgactggcaggggcccttttcagatgtacttgaacatcacctaatcttcagaattctctccctctgtattcaatttcaactggcactcaagaaaccagagtctctccttagtgactacggacagaggccctctcttctctcttcttcagagcaatcatatgtaggattcaactcgagcccaaatataattataccg

SEQ ID NO: 352853 - DNA, 636 bp, Homo sapiens
agaaaaaaaaaaaaaactgactcctaaggaatcccttggtatctctagcaaaagagtagtgagataacagttaaggatcccaaaagagctcagttccaaatatatactgaccctggatgagtcccagatcccgtgcatccctctatttatttacccttacaatgggaacaggagaagcagttatgagtaattgctamtaaaagcctatgtgcctctggcagaaatacaaatgcttgttgataacgatcatttttcccagaccttggtttatgtttctccattaacattccagtatccaactctcaggttcctaagatcctatgagtttgggtctctgactgaaaaagaccaagctgagatttggagagtcaccagagctaacttcatgaagcactagccagctccctaactcccaaacgagacactatacatacctgcaccgcatttaattttttgctgggatgacacccaatgtttgtgataaaaacgcacccaaggacactaccccaaaggacttgcttctcttggatccaccacaggataaaatgttcttgatgccacctcctaaaagataaacacccttccccaaatgtcccttctaactggctggttgactgtcccctgggtgtgactgca

SEQ ID NO: 352854 - DNA, 574 bp, Homo sapiens
  misc_feature (1)...(574): n = A,T,C or G
aagacccccagtgaatacttgacactacaatactactgaaccctatatacactaagttttttcctatacactaatgggctgatagcatatacgatgtggatacactggaaaaagggatgattcacattccaggcaggacrgagcaggatggtatgagttttcaccatgctactcagaaccacacacaatttaaaacttatgaattgtttatttctagaattttccatttaatattttcagaccattgttgactgcaggtaactgaaaccatggaaagtgaaattgcagataaaggagaactactatatcctaaaatgaagtgaaaaaattactaaataaatcattagggaatacattagaaaatattcacttaatgtaaaaagagaaagaacaaagtaagtaagaataaaggggaaagaaggcatgacatatatagaaaacaaaagtaaatggcaaatataaatccaactatattaatcataacattaagtatcaatagattaagtaatccaatcaaaagatagagattntcaccaacaaacatatgaaaagaagctcatcatcataggtcatt

SEQ ID NO: 352855 - DNA, 574 bp, Homo sapiens
  misc_feature (1)...(574): n = A,T,C or G
aagacccccagtgaatacttgacactacaatactactgaaccctatatacactaagttttttcctatacactaatgggctgatagcatatacgatgtggatacactggaaaaagggatgattcacattccaggcaggacggagcaggatggtatgagttttcaccatgctactcagaacyacacacaatttaaaacttatgaattgtttatttctagaattttccatttaatattttcagaccattgttgactgcaggtaactgaaaccatggaaagtgaaattgcagataaaggagaactactatatcctaaaatgaagtgaaaaaattactaaataaatcattagggaatacattagaaaatattcacttaatgtaaaaagagaaagaacaaagtaagtaagaataaaggggaaagaaggcatgacatatatagaaaacaaaagtaaatggcaaatataaatccaactatattaatcataacattaagtatcaatagattaagtaatccaatcaaaagatagagattntcaccaacaaacatatgaaaagaagctcatcatcataggtcatt

SEQ ID NO: 352856 - DNA, 581 bp, Homo sapiens
tgttcaagcttacaacaggaactgtgtgtctggggccaactgccctggggctgttaaagggtttggcatcaccgttctgccttatggactgagggggactctaccggaaatgaggaggccaggggtctcttaggcttacttacatcaggtctgtcttgtttgagtgagtttgtactttggaatctgcatgtgttggggtggtctccatggcaaccagacacctacagctagttgtactggtggtgatgtttcytgcttctctgcttttggtgatccatatctatgaggattagatttgactgagaataattgagacctgaaacatagtggctaaaacaagaaagaccccggagtctctccaagcaagatggtggaggagccgcagtccatgttgcagcttcctccctcaagtgctactggaggggaaggacttacggaggtctccccagaaacaaccactctggagcccccgtcttccactgcagtttctccgggaacagaggaacctgctggcgacaccaagaaaaaaattgacattttgctaaaggctgtgggagatactcctattatgaaaacaaaga

SEQ ID NO: 352857 - DNA, 506 bp, Homo sapiens
tatgtactggtgcagtcatgcatcactaacattgtagtatgttctgagaaatgcattgttaggcagttttgtcattgtatgaacattacagagtatacttacacaaatttagatgggcttagcctaggctctgctgtatggcatattgctcctaagctacaaacttgtacagaatgttactgtatggaatattgtaggcaattataatacaatagtatttgtgcattttttatactatattttaagttctgaggcacatktgcagaatgtgcagttctgttacattggtatacacaggccatggtggtttgctgcacccatcaacccgtcccctacactaggcatttatcctaatgctatccatcccctagccccctactccctgaaaggccccagtctgtggtgtttccctccctgtgtccatgtgttctcattgttcaactcccacttatgagtgagaacatgcggtgtttgttttcctgttcttgggttagtttgctgagaat

SEQ ID NO: 352858 - DNA, 420 bp, Homo sapiens
ccagcagtaagcaaggctccaacgggcttggattctgcccagccaggcatgggatataatctcctggtgtgccatttgctaagactgttggaaatgcacagtatttgggcgagagtgtcctggttttccaggtgccatctctcacagcttcccttggctaggaaagggaaatcctccaaccccttgygcttcctgggtgaagcaatgccccaccttgctttggctcaccctccatgggctgcaccctctgtccaaccagtcccagtgagatgaaccaggtacctcagttggaaatgcagaaatcacctgtcttctgcattgatcacgctgggagctgcagaccagagctgttcctatttggccatcttggaacagaaccccactcagtcttattctctaccttactccaggtaaaagcaa

SEQ ID NO: 352859 - DNA, 597 bp, Homo sapiens
atgcccactgctcctgagatgttcagacatctctggaggctttctgcacccacagcagctctgtggggaagcagggcacagatgcaatcctaatgcaatcctgagggagtgtctttctagttagaaggaaactcttccttctcttccacttttggttaatatttttttttctgtttcctgtattggtcttccccatgcttttgaatragatattttgtctaccggtactaatgaatcctcttttctccctgggacttaatcttttttataataaagctgggaagtcttataggagtttcagcattttagcctggtacctccatttcttgaggcaataaaaacaagctgaccacttgcttaaatagagacaagagaatgggaaagacgcaaggattactaaaaagactaatgtctcaaaatattacctttttttggtaatgaaactgccataatggcatagacacatttttaggtagaagacagcagtgaattaggattctggaacaaggagcttaataaagccccagaaataaatttcttaaatgaaaattttaagaacgcagattaacagttgattgtacaaatgacagaagaata

SEQ ID NO: 352860 - DNA, 597 bp, Homo sapiens
atgcccactgctcctgagatgttcagacatctctggaggctttctgcacccacagcagctctgtggggaagcagggcacagatgcaatcctaatgcaatcctgagggagtgtctttctagttagaaggaaactcttccttctcttccacttttggttaatatttttttttctgtttcctgtattggtcttccccatgcttttgaataagatattttgtctaccggtactaatgaatcctcttttctccctgggacttaatcttttttataataaagctgggaagtcttataggagtttcagcattttagcctggtacctccatttcttgaggcaataaaaacaagctgaccacttgcttaaatagagacaagagaatgggaaagaygcaaggattactaaaaagactaatgtctcaaaatattacctttttttggtaatgaaactgccataatggcatagacacatttttaggtagaagacagcagtgaattaggattctggaacaaggagcttaataaagccccagaaataaatttcttaaatgaaaattttaagaacgcagattaacagttgattgtacaaatgacagaagaata

SEQ ID NO: 352861 - DNA, 618 bp, Homo sapiens
ctaaatcacatatggacaagcctccctgtcgctggaagtatcttcatcaacttaccttcaatatggctggttgtaaattcttccagcacatatcagcaacagaaggatatgtcagaacttttttcacacagcagatattgatgagccatgatcagcaggaagccactgataaccattttgaaaactgccattgctttcgataataattctgtcatcataatagctacaaatcccctacaagtatgcagttatcatggytggggggattctggaaatgtaaattgggccgtttaccttaacggggtatggggtatagttgtcatggcagaaatccatatccctctgtcaaatttataatcctcttcttctaaggtaatagacttctcttctatgttaaataaatgacagtctgattttaagtgatagatatagattacatttcttattctcctttgcagcaaagcaaatttatataacatcctgagaacagaatataactacaaatgatatatacagattctggtaagagtacttaaatataaaaggcttatttatatttcctgacttttttcctgccttgtttgttagaatgcagatgtaatggatggaactgaagca

SEQ ID NO: 352862 - DNA, 568 bp, Homo sapiens
tggcatgaaattcagaaatataaaatgtcctagattatgcaaaataagtaagtagcacagactagccatgtctttgaagtttctagagaacatcattctctgacttgaacttctaactagaaactatattgtgagcatggatttgagaaacaagaaagcattctttttttgactagtttagaagctgccctggttcattttccctagctccaagtgccagcagaacagtggctaygaaagaattgaagacttagaagtgagattcataggcttcttaggaaaaactcattatgagaactccgactttttgctctataaaactccagtagcactcattattattgtggcacaaatatggaattattttcttttaaactttttttattatacaagcaatgtacattcactataaaaataacattttagctatcagataagtcaaagaaggaaataaaagcccaaatttttaccatcctgtagcacaccttaatttaaatacaagaatcatttcatttgtttccctgagtccctgtagatttgtcttgatgattttgaccagagtttcatt

SEQ ID NO: 352863 - DNA, 595 bp, Homo sapiens
tccaaactcataattctactcattggaaaattaataaattagttaacaaatgttgtttatttaaaaaaacaaaacctgtattgatttcttacctggcacctctgaggagcttttattgccaagataatagtgccctttctcttaatcttctccaggatgtacaaaacaggcgatatttttcatttcatttgttgaaaagtttatgtgatttctatagctagctgaatgaatacctgttttggccttttgtctgtctatgtattccaactcaaggattttttttttttctgtagaaagagaaaaccccgttcttttgttactcatgaatgaacatttttatttctgaaagccattaaataygctttaagtttcaagaaaggggctctttcctagtccctgacacctttcttctttcacttatagcctcttaggggagaaaaaaagcgaagtgagacaacatcctgcaaaagcactaatgctatgtcattaactacgaaaatgaccaaagtcagtgaaagaaaaagactgggaaataatgcccaacttctagtatcaggaacaaaaaggaacatgtccacagtcacagtaaatcatt

SEQ ID NO: 352864 - DNA, 595 bp, Homo sapiens
tgttctattttgaaatgctagaaggataaaacaatttatagataaggaatctgtgccctactttcagagactttctcccgtttttgaggaatgtgcttgtcttacagatagatgatgtaggtcttctgcctctcactggcagaagcttatattctattagtaaaatcaataacttctagaaatggagaccaccaaaatatttcttgactaaaatatttttactactggcttgcctaaaatatcaacctaaacactatgttgtcataattattttgttataagtaaaaggtcaacataatttattaaaatgatcaagtcttagttttaccatttacttcttctgagtttgtggaaaagttacttggagggttgttttctttattgtaaagtagaaataaaaattacttatcttagattatttaaaatattacatttaatacaagtaaaatcctcattacagcatctagagtctgtcaattagtattgtacataattacttatctatttycctgtatgtcacattgtttccatgtcaaaatgcaaaagttaattgcatgctatttgatctatttatttcttatcataaatttttctg

SEQ ID NO: 352865 - DNA, 629 bp, Homo sapiens
tgcttcctgtaagcctgcagaaccgtgagccaattaaaccccttttctttataaattacccagtctcaggtacttctttatagcagtgcaagaacaatctaatacaatttcgttctttgaaaagattaataaatcaacaaagcaattctacacttctcttccaaaaaataaaaagagaacagttcccaattcattttatgaaactagtattaccctaataccaaaaccaatgacagtacaaaaaaaataagaatacagagaaatatcccttatggctacagattcaaaaattcktaacatattggcaaatagaattcagcaatatataaaattaatggtactccatgacaagtagagtttattccaggctgactcaatatttgaagatcaatcattgtagcaaaaatcactggattgactggaagtcaatcagtcgtgagcctattaatcaccacattaataggctaaagaagaaacatcacataatcatatcaatcactgcagaaaagcatttgacaaaattcaacacccattcatgataaaatgctaagaaaaatagaaatagaaggaacttcttaaacctgataaagggcaaataatattatacttcatgggggaaagctgaatgc

SEQ ID NO: 352866 - DNA, 582 bp, Homo sapiens
catactttaaatgatggaaaaaaagagcctgatgcaagatcgcaagctctttattactcattgatcttggggcttaacctaagaatgaagaaaaagatgcaataaactaagttaagtctctcmaaaatttatgtgttgacgtcttaactcccagtgtgaaggtatttgaatacagggcacttgtgagataattagagttacattaggtaataagggtagggcccttgtgatagaattagtggccttataagaaaaggaagatagttctctttcttctctttctcatcctctgtctttctcattcacccactagactttgccaagtgtacacagtgaagaaagcccatgtaaggacatagtgagaaaacagctacccacatacaagccaggaatagagttctcaccaggaactaaattggccagcaccttgatcttgtatttccagcctccaaaactttgagaaaaaaagttctgttgtttaagctacctagtctatgatactttgttatggtatcttgaagtaactaaaacaaaagggtaataatggaaatggtcagataggtttggtggaatcctagcatg

SEQ ID NO: 352867 - DNA, 590 bp, Homo sapiens
catattatgcatgtggcatagtagctgatgaaggagtctctgtagataggcctaagatagcacccatacatctccacatcatttttagaatccagaagttttcacctccctattggaggatgcataaaggtaaaaggagtggtggacatgattactcctggctttgaagagaggaggcaacagttttggaacttcctgatcagaggttatggcaatcaagacaagagtagtagatgtaaaatgagccttttaacatatggggacctactgtacttcagaaaaggcccaaagaaggcaaggctatatcaggcatgactcagtaatcatcagggtggggcaccaagggataacactgactctgccggaaaatatgtataaatgataaaacttaacaaaragcctgtggattagataagagtctatcttgccttgaggcaagaggatgagtacatttctgccttcattctggaatatttgtgagatatcagagagaggggaagaccatctgagagatgataatggctctgccttgggacctttaaatgctgaatagactatgaaaacaagagaactcttctgcctgtagttga

SEQ ID NO: 352868 - DNA, 576 bp, Homo sapiens
tagaattaggtataaaagcatcagacgcatttttttttttaaagaagacttggctatttttctttctgttgcatttccaaaagcacatcagttgtcaatgttctgagaaggatacaaagcctatcttttcagcwgattttatggataagtaaagccacaccccatttgtttcactttgtttttcctattccctttatggaactttaggtggtgtaaccataaagtaatggttttcttatgtggctcgtaaactaactctgaacgcaattccaaaagagattcaacacagttaagagctatggcagcactgctaaaatggagtagaggctcctcaggtgattgctttgaagggggcaacagtcattaaaatgtatttctctggtatgttggttttaaaagcacgctttcctttatcttgaccttcatatacccactgattttctaggcattccatgaggatttattaagtaatttttggttataccttattttaaaggaaaaagaattatatcaaggaacctgtttcttccctttcagcaaaagacaaataggtttctgtctgcagggcttttgaca

SEQ ID NO: 352869 - DNA, 576 bp, Homo sapiens
tagaattaggtataaaagcatcagacgcatttttttttttaaagaagacttggctatttttctttctgttgcatttccaaaagcacatcagttgtcaatgttctgagaaggatacaaagcctatcttttcagctgattttatggataagtaaagccacaccccatttgtttcactttgtttttcctattccctttatggaactttaggtggtgtaaccataaagtaatggttttcttatgtggctcrtaaactaactctgaacgcaattccaaaagagattcaacacagttaagagctatggcagcactgctaaaatggagtagaggctcctcaggtgattgctttgaagggggcaacagtcattaaaatgtatttctctggtatgttggttttaaaagcacgctttcctttatcttgaccttcatatacccactgattttctaggcattccatgaggatttattaagtaatttttggttataccttattttaaaggaaaaagaattatatcaaggaacctgtttcttccctttcagcaaaagacaaataggtttctgtctgcagggcttttgaca

SEQ ID NO: 352870 - DNA, 546 bp, Homo sapiens
ttgttcaaagaagctttgttccctaggattttctaccctaggaatccctgtacctaggtaactgggaaagtataggctacatttcagatgatagactgaattttgccttcttatatgtcactttcagaatctttaagacattcagggataaagatgattatattttatcagacaaatattgatcattttcttgtatttatagatttttcatggaaaccaatatcrttactctccagtcacaattttattttcagatgttcaacaaccacttattgaggaccaattaaagtgtaatcactaataggttttgggagtacatagatgaaatacttgctctctaccctctcagagatgtaaatatagtaataatattgtacagtgattcctgaagtgtgctacagtgatcctcagaataccaatccataatggctgaaaaataaaaatcacatcttcacaacttcaagttcagttaacatattataatttatccaagtagaatattgatcaactgtatactttttaaacagaagtgattcttaataattg

SEQ ID NO: 352871 - DNA, 471 bp, Homo sapiens
gagataataaatgtgcattgtattaagccactaagttggcttacattttttttacacagcaatggaaaattaatgcatttgatgtagttccatatgaagaagactttattagtttttgtttatttatttattttgaaatttgagggcaggcaaaaaagttgaattaataagactcactgttttgtgaaatgctattatcattagtctaagactgcaatgatccgaatgttgatttaccccaaaatgtagatgttcgagctgaataaagtgatagtgttaagcatgtaccctaaaasttaaagtgtaataataataaaattaaaaaaaaaagaggtggggcttttaaggtaattaggtcatgagggttcctctgttatgaataaggttagtatccttataaaagaggcttgtgggagcctgttgtcccttttgccatgtgggaacacatagaaggtgctatctatgaagcag

SEQ ID NO: 352872 - DNA, 631 bp, Homo sapiens
ttatttatttattttgaaatttgagggcaggcaaaaaagttgaattaataagactcactgttttgtgaaatgctattatcattagtctaagactgcaatgatccgaatgttgatttaccccaaaatgtagatgttcgagctgaataaagtgatagtgttaagcatgtaccctaaaacttaaagtgtaataataataaaattwaaaaaaaaagaggtggggcttttaaggtaattaggtcatgagggttcctctgttatgaataaggttagtatccttataaaagaggcttgtgggagcctgttgtcccttttgccatgtgggaacacatagaaggtgctatctatgaagcagatagagcttttccctgacactgaatctgctagtgccttggtcttgggtttcccagcctccagaactctaagcaatacattttcattgtatataaattgcccactctaagctattttctcatagcagccaaagcagactaagacaaaggcccttttattaaactgatttggttaatttcttttaactatggtcttcactcacattctctttctatcaataagcaaccattcagatgagtttgatgtgtacctatttcattagattatattctaccaatta

SEQ ID NO: 352873 - DNA, 631 bp, Homo sapiens
gttttttttctgtaagtagtagtttgatccattaattgtggcacctatagttaaagatagcccaactcttttcctgaatacctctgaggaactaaacagcatgaaatcattacctaacaagtgttcaaaaactatcttgatatgtagtttttaaatttttatttgtataaacactgacagtcctatgtatataataggtttttagaattagaggaagtaaaatgtattagtcagggttttccagagaaacagaaccaataggatttgcatatgtgcttgagtgtgagtgtgtctactcactcaactatggaggcttggcaagtccaaaaatcagcagggtccaatatggacccwgggaagttgatgttgtagttcaaacctgaagatagtctggaggcaggattttatcttctttagggaacttcagtctgttttctcttaaggtctcaactgatgagacaagttccacccacattgtggaggacaatctgctttactcaaagtctattgactttcatgttgatatcacctaaaaatcaccctcccagcaacgtgcaaactggtgtttgaccaatatctagtttcctggtctcaccaagctcgcacacaatattaagcatcacacaaatta

SEQ ID NO: 352874 - DNA, 594 bp, Homo sapiens
gcatgccacagcaccatacttttgggtatcttgccctgagcacaagcattctccgaattattattaatttaatctgtttgcctgtgtctttacacataaatttcttttttaaaaatgttttatctaaggaaactacattgatattttggcataaacaaacttaaaaatttatatgcaatttactctatctgctgtacctccaaagcagttagcactctaatatctaaactccaatttttyctatgataactaaagttacatccaaatgtttctttgttgacacaagaaagtttgataattgaaagctaagacgttattttaacagagaacatgggatctgggctgacaagaatcatttttaactccatctctgtcaactttaactctgattttaagaaaggtattcaccatcttgaatcttatttttcttatcagcagaattttttttttaatggagtagttgtaagctgcctccttcgcagagctgttgttgtatggaacaaattgtggagagaatggatgttcaagtttttatgaactacaaagtaatggccaatcgttggtatcagttggataatcatttcaaggataatc

SEQ ID NO: 352875 - DNA, 613 bp, Homo sapiens
gtacaacctttttggaaagcaatttgtcagtacatactgaggtctgtaaaaagttcataacctttaatacagtaatttctcttctagagccttakccaaaggaaaaaaaaattagacaaacattttagtaaaaagatgaaaatcatgatgtaattataacagcaaaaacctataagcaacttaaatgtctaatgttcggataataattcaatgtattttagtggagctatagataaaacatgtagtatgattaaatgtagattcttaagcactatttaatagcatgggataatgcttatgatttacacttcagttaaaaataaggcaattctgtatcatctatttgatcttaatgtaatatgtagaaacatttataacttcaaatgcacaaatttagaaactgataaaaatatgtcaaagtgattacaataatttttacaagattttattgtatgtttctatttttctacatgctttcacttttttaccatgagcacatatttttctaaaaataaaaatatatcattattataattattataagtacataagttttattgcatttcaatctgagattaagcttgtaaatctgaatatttaaatttataatatg

SEQ ID NO: 352876 - DNA, 613 bp, Homo sapiens
gtacaacctttttggaaagcaatttgtcagtacatactgaggtctgtaaaaagttcataacctttaatacagtaatttctcttctagagccttagccaaaggaaaaaaaaattagacaaacattttagtaaaaagatgaaaatcatgatgtaattataacagcaaaaacctataagcaacttaaatgtctaatgttcggataataattcaatgtattttagtggagctatagataaaacatgtagtatgattaaatgtagattcttaagcactatttaatagcatgggataatgcttatgatttacacttcagttaaaaataargcaattctgtatcatctatttgatcttaatgtaatatgtagaaacatttataacttcaaatgcacaaatttagaaactgataaaaatatgtcaaagtgattacaataatttttacaagattttattgtatgtttctatttttctacatgctttcacttttttaccatgagcacatatttttctaaaaataaaaatatatcattattataattattataagtacataagttttattgcatttcaatctgagattaagcttgtaaatctgaatatttaaatttataatatg

SEQ ID NO: 352877 - DNA, 537 bp, Homo sapiens
ataaaacatgtagtatgattaaatgtagattcttaagcactatttaatagcatgggataatgcttatgatttacacttcagttaaaaataaggcaattctgtatcatctatttgatcttaatgtaatatgtagaaacatttataacttcaaatgcacaaatttagaaactgataaaaatatgtcaaagtgattacaataatttttacaagattttattgtatgtttctatttttctacatgctttcamttttttaccatgagcacatatttttctaaaaataaaaatatatcattattataattattataagtacataagttttattgcatttcaatctgagattaagcttgtaaatctgaatatttaaatttataatatgcaaatcatcaaaaactttaaaagtttatacatataaacttgaaattattttgtatacaagtacaaaaacactatatttttaaatatctgccattttacaaatataacagtttttcacagcaaaaggaagatttttttacttcatggcatacttttt

SEQ ID NO: 352878 - DNA, 537 bp, Homo sapiens
ataaaacatgtagtatgattaaatgtagattcttaagcactatttaatagcatgggataatgcttatgatttacacttcagttaaaaataaggcaattctgtatcatctatttgatcttaatgtaatatgtagaaacatttataacttcaaatgcacaaatttagaaactgataaaaatatgtcaaagtgattacaataatttttacaagattttattgtatgtttctatttttctacatgctttcacttttttaccatgagcacatatttttctaaaaataaaaatatatcattattataattattataagtacataakttttattgcatttcaatctgagattaagcttgtaaatctgaatatttaaatttataatatgcaaatcatcaaaaactttaaaagtttatacatataaacttgaaattattttgtatacaagtacaaaaacactatatttttaaatatctgccattttacaaatataacagtttttcacagcaaaaggaagatttttttacttcatggcatacttttt

SEQ ID NO: 352879 - DNA, 537 bp, Homo sapiens
ataaaacatgtagtatgattaaatgtagattcttaagcactatttaatagcatgggataatgcttatgatttacacttcagttaaaaataaggcaattctgtatcatctatttgatcttaatgtaatatgtagaaacatttataacttcaaatgcacaaatttagaaactgataaaaatatgtcaaagtgattacaataatttttacaagattttattgtatgtttctatttttctacatgctttcacttttttaccatgagcacatatttttctaaaaataaaaatatatcattattataattattataagtacataagttttattgcatttcaatctgagattaagcttgtaaatctgaatatttaaatttataatatgcaaatcatcaaaaactttaaaagtttatacatataaacttgaaattattttgtatacaagtacaaaaacactatatttttaaatmtctgccattttacaaatataacagtttttcacagcaaaaggaagatttttttacttcatggcatacttttt

SEQ ID NO: 352880 - DNA, 452 bp, Homo sapiens
gagaggcaagaaagcctggtgccctgcactatcagagaattatggctgctgctctacttctcttcgaatctcatggacatttcttttgtgatgtagtgtaacttcttagaatggtctataaaatataattccagcttagggacataacatagtataaaaccctctaaaatcccagttttcttccaggatgaaaggattattctagatatttgtcatattagtctgttctcacactgctatgaagatactacytgagactgggtaatttataaaggaaagaggttgaattgactcacagtttccacatggctgaggagacctcagaaaaataaacttacaatcatggcataaggtgagggagaagcaaataccttcttcacaatgcggcaggagagagaaagagagagagagagagcaagcatggagagagagagagcatgcaggagaaactg

SEQ ID NO: 352881 - DNA, 599 bp, Homo sapiens
tgactgttctctatttaataacctccactcaaatccattacacgatccctcttgtccattatgtttattttgaggctgaaccttgagggctgaatcatttgagctcatgcctattaaacttattgatgtgactacatacatacctcatcccccagaaggaggtggcctgacataacagtacaatgcaaaatcaaactcaagaaatggttatgtcaacatctagaaagccacacgtttraatatttggggtacagtatagccagtggtagtatatactttaaatcaagaaatgatatacgatgctataatatatgggtccactaatgaaatagtaagggtaggagtagatctttccactattatattatttccactataatattattatattataatattactgtaagtaataattgacttagagaatctttgtttgtgccttttaaccatgggtttggtgtgcttgcatgttctagtatccaagggagaaatattttgatctggaaacacagcaaatgattccattaacttggtagttaaaataaactttagctcatttgggctcctcatgccacttatgtgaaacaataaaaaaggag

SEQ ID NO: 352882 - DNA, 584 bp, Homo sapiens
gacatcttgacaatattaagtcttccagtacgtgaattttattaaatgctttttctacatctattgagatgattatatgttttttgtttttaattcgatttatgtggagaatcacatttattgatttgcataaattgatccatttttgcacccccaaaataaaacccaattaatcgtggtgaattaactttttgatgtgctgctggattcagtttgctagtattttgttgaggatttttgtgtctatgttggtcaggaataytggcctgtagttttttttgttgttgttgttttctgtgtctttgctagattttggtatcaggatgatactggttttgtagaatgagttatgaaagagtccattttcctttctttttcaagcagtttcagtataattggtatcaactcttctttatacatctggtacacatagagtgccttttcatttatttgtgtcatctttaagtttttccataaagttttatagttttcagtgtagtcgtttttctccttggctaagtttatttccaagtattatatttttaaccaatttgcatctttacgtatatatcgagacttgtgta

SEQ ID NO: 352883 - DNA, 569 bp, Homo sapiens
tgtacaccattttgagtagtgctgacatcttgacaatattaagtcttccagtacgtgaattttattaaatgctttttctacatctattgagatgattatatgttttttgtttttaattcgatttatgtggagaatcacatttattgatttgcataaattgatccatttttgcacccccaaaataaaacccaattaatcgtggtgaattaactttttgatgtgctgctggattcagtttgctagtattttgttgaggatttttgtgtctatgttggtcaggaatactggcctgtagttttttttgttgttgttgttttctgtgtctttgctagattttggtatcaggatgatactggttttgtagaatgagttatgaaagagtccattttcctttctttttcaagyagtttcagtataattggtatcaactcttctttatacatctggtacacatagagtgccttttcatttatttgtgtcatctttaagtttttccataaagttttatagttttcagtgtagtcgtttttctccttggctaagtttatttccaagtattatatttttaa

SEQ ID NO: 352884 - DNA, 584 bp, Homo sapiens
gacatcttgacaatattaagtcttccagtacgtgaattttattaaatgctttttctacatctattgagatgattatatgttttttgtttttaattcgatttatgtggagaatcacatttattgatttgcataaattgatccatttttgcacccccaaaataaaacccaattaatcgtggtgaattaactttttgatgtgctgctggattcagtttgctagtattttgttgaggatttttgtgtctatgttggtcaggaatactggcctgtagttttttttgttgttgttgttttctgtgtctttgctagattttggtatcaggatgatactggttttgtagaatgagttatgaaagagtccattttcctttctttttcaagcagtttcagtataattggtatcaactcttctttatacatctggtacacatagagtgccttttcatttatttgtgtcatctttaagtttttcyataaagttttatagttttcagtgtagtcgtttttctccttggctaagtttatttccaagtattatatttttaaccaatttgcatctttacgtatatatcgagacttgtgta

SEQ ID NO: 352885 - DNA, 572 bp, Homo sapiens
ttcaatgcaagaacactgaacactcaaaaagccagagttccctttttttcctccaaatgaccatatcactattccagcaagggttcagaaatgggctgaggctgagatggctaaaatgacagaagtggaattcagaatatggataggactgaagttcactgggctaaaagagtgcattgtaacccaatgcaagaaaggtacaaattatgataraacattacagcagcttacagacaaaatagccagtataaagaagcatgtaaccatcctgatagagctggcctacactgcaataatttcataatgcaatcacaagtgttagtagcagaatagaccaggtggaggaaagaatttcagagcttgaagactgcctttctgaaataaaacagacagaaaaggatagagaaaaaaaataaaaggaattaacaaaacctccaagaaatatgggattatataaaagaccaaatctatgactgattagtttatatgaaagtaatgaagagaacagaaccaattttgaaaatatttcaggatatcatccatgagaactttcccaaactagctatacaggc

SEQ ID NO: 352886 - DNA, 509 bp, Homo sapiens
ctctgagcaaaaagaataaaactggaggaattacataatctgacttcaaattatactatagagctatagaaaattaaayagcatggtactggcataaaaacagaaacatagaccagtggaactgaatagagaccccagaaacaaatccatacatttacagtgaactcattttcaacaaaggtgtcatgaaaatacattgggaagacagtctcttcaataaataataatcctactgagctatcaaactctagatcttattccttccataaaactctgcgtttgtactcactagccaatctctcttcaccaaaccctcacaccctttccagcctctggttactattattatgctcactaccttcatgagagcaatatttcagctatcacatatatgagcgagaacatgaaatatttgtctttctgtgctttgttaatttcatttaacataattacctccagtttcatccatgttgctgtaaatgacagaatttcctttgatttatggctga

SEQ ID NO: 352887 - DNA, 509 bp, Homo sapiens
ctctgagcaaaaagaataaaactggaggaattacataatctgacttcaaattatactatagagctatagaaaattaaacagcatggtactggcataaaaacagamacatagaccagtggaactgaatagagaccccagaaacaaatccatacatttacagtgaactcattttcaacaaaggtgtcatgaaaatacattgggaagacagtctcttcaataaataataatcctactgagctatcaaactctagatcttattccttccataaaactctgcgtttgtactcactagccaatctctcttcaccaaaccctcacaccctttccagcctctggttactattattatgctcactaccttcatgagagcaatatttcagctatcacatatatgagcgagaacatgaaatatttgtctttctgtgctttgttaatttcatttaacataattacctccagtttcatccatgttgctgtaaatgacagaatttcctttgatttatggctga

SEQ ID NO: 352888 - DNA, 509 bp, Homo sapiens
ctctgagcaaaaagaataaaactggaggaattacataatctgacttcaaattatactatagagctatagaaaattaaacagcatggtactggcataaaaacagaaacatagaccagtggaactgaatagagaccccagaaacaaatccatacatttacagtgaactcattttcaacaaaggtgtcatgaaaatacrttgggaagacagtctcttcaataaataataatcctactgagctatcaaactctagatcttattccttccataaaactctgcgtttgtactcactagccaatctctcttcaccaaaccctcacaccctttccagcctctggttactattattatgctcactaccttcatgagagcaatatttcagctatcacatatatgagcgagaacatgaaatatttgtctttctgtgctttgttaatttcatttaacataattacctccagtttcatccatgttgctgtaaatgacagaatttcctttgatttatggctga

SEQ ID NO: 352889 - DNA, 569 bp, Homo sapiens
caacttataagtgagaacacatggtatttatttttctgtttctgcattagtttagtttgttaaagataatggcctccagcttcacccatgtttctgcaaaggacattatccaattcctttttacaactgcatagtactccatagtgtatatgtaccatattttctttatccagtctaccactgatgggtatttcagttgacttcatgtctttactattgtgaatagtgctataatgaacatacacatgcatgygccttattgatagaataatttatattcctttgggtatatgcccattaataggattgctgggtcgaatggtagttctgcttttagctctgtgaggaattaccacactgctttccagaatggttgaatgaatataaactcttgccaatagtgtataagcattcccttttctctgaaaccttacaaacatctacattttatttttttggattttttagtaatagtcactctgactggtgtgagataatatctcattgtggttttcatgagtatttctctaatgatcagtgatattgcacaatttttcgtgtgcttgttg

SEQ ID NO: 352890 - DNA, 569 bp, Homo sapiens
caacttataagtgagaacacatggtatttatttttctgtttctgcattagtttagtttgttaaagataatggcctccagcttcacccatgtttctgcaaaggacattatccaattcctttttacaactgcatagtactccatagtgtatatgtaccatattttctttatccagtctaccactgatgggtatttcagttgacttcatgtctttactattgtgaatagtgctataatgaacatacacatgcatgcgccttaytgatagaataatttatattcctttgggtatatgcccattaataggattgctgggtcgaatggtagttctgcttttagctctgtgaggaattaccacactgctttccagaatggttgaatgaatataaactcttgccaatagtgtataagcattcccttttctctgaaaccttacaaacatctacattttatttttttggattttttagtaatagtcactctgactggtgtgagataatatctcattgtggttttcatgagtatttctctaatgatcagtgatattgcacaatttttcgtgtgcttgttg

SEQ ID NO: 352891 - DNA, 569 bp, Homo sapiens
caacttataagtgagaacacatggtatttatttttctgtttctgcattagtttagtttgttaaagataatggcctccagcttcacccatgtttctgcaaaggacattatccaattcctttttacaactgcatagtactccatagtgtatatgtaccatattttctttatccagtctaccactgatgggtatttcagttgacttcatgtctttactattgtgaatagtgctataatgaacatacacatgcatgcgccttattgatagaataatttatattcctttgggtatatgcccattaataggattgctgggtcgaatggtagttctgcttttagctctgtgaggaattaccacactgctttccagaatggttgaatgaatataaactctygccaatagtgtataagcattcccttttctctgaaaccttacaaacatctacattttatttttttggattttttagtaatagtcactctgactggtgtgagataatatctcattgtggttttcatgagtatttctctaatgatcagtgatattgcacaatttttcgtgtgcttgttg

SEQ ID NO: 352892 - DNA, 546 bp, Homo sapiens
taatttgaactcagacagcatggtccttcctgccttgcttttttttgcttagaattgccttgcccatttctgmtaatttttggttgtatgtaaattttaaaatagttatttttctagttatatacagaatttccttggtcatttaataagaattgcattgaatctgtaaattgctttgagcagtatagccattgtaatgatattgattgttcccattcataagcatggaatgtttttccatttgtattatctctgatttcttttagcaatgttttaaaattctcattgtagagatctttcaactcctcagttagctctattcctacatattttattcttttcgtagcaattatgaatgctattgcattcccgatttagctctcagcttggctgtggttggtgtataggaattctactgatatttgtatattgattttgtatcctgaaacttggctgaagctgtttatcagcttaaagaactcttgagccaagactatggggttttctagatatagaaccttgtcatctgcaaacagggatagtttg

SEQ ID NO: 352893 - DNA, 571 bp, Homo sapiens
taagctaccctatgcgcttgctcttaggttaagaagcagcaaacaataaggattttatcatatgccgttttcctcttctaagtgcagacttccctcaagaatatgactacttttgttgagtttcaagattcttcagttagattttttaaatttttaatggattttatagttcttatctgcaaaatgattatcaaatggagattactgagccttaccagtagcagagcttcctcgatacayttttaagcaaagaaaaaaaaatcatgttatataaaaaagagtatggtaagaactaaataatttaaatgattttagtatatctaacattccttgagcatttgagatgtgcctgcctttgtcataattgcattatatgcattgtcttatcgttaccaccatatgaagaaactttcctgattttgtagataggggaaaatgtctcagataagttaggtaagttgcctaaattcatttatctagtaaattgtggagctggaactccaagtatagttctttgactccaaatcaacctacctatgaaacactacccttctacattctgcatagtttt

SEQ ID NO: 352894 - DNA, 549 bp, Homo sapiens
ccccaattaattgtcttaagttctcactagagtgcatataatttatttaggagaccacttaactattaaacaactattttcttctgtctttcaaaaacatcatgattattttgactttgttttgattttttgtctatcctgctacataaaaaagtaaattaaatcggtgtagctttactttttcttaggtaataaacactggcttctaataatccatgccaataaatttcttctaaaccacactgcccatgattattctggaaccatgtccaagttctaccttcttgatattttgggaaaaaaagggattattctccatgactccctgaagattatttgtaaaaattgaattatcttattagtacrttttccctggaatctgaaatgcaatgccttcacaccaggacacataagcccaactcaatgtttggagaagtaaaaattacagaagaaatattattatactatttgcataattactcaggctgacatctatttgcaaagacatggtatatttcgaaataaaagtaaaagccatgacccctgaaa

SEQ ID NO: 352895 - DNA, 566 bp, Homo sapiens
cctggtgccttttcctcttcttataaaaccatgagtcctattggatcagggccccacactttgtacttcatttaaccttaattacccccttaaaaactctatcttgaaatacagtcacactaagtcttaggkcttcaactaattaattttttctcaaggaaggggacacaagtcagttaataatatctcaactttagatatttttattggtaaaatatttattataataaatatctatgtatagattattttgatgaaatctagtcctttatgaattaaagtttcaggctttaagtcaactgatgattagattaattatgttcaaactttttattaataaaaccttttcacaaaaccaaatttgttcacacactcaaaaaattaaagcctcaaaataaactgaagactcaaaataacattagtcaagttaaggaaaaataattgcaaagtaatgataatacatgaatacaatattttagtattcataatggcaagtacaattactgtgctattcattatttacctatcagcaggtatttttttgtgtagaatttctcaattccata

SEQ ID NO: 352896 - DNA, 541 bp, Homo sapiens
tttatacccttcctatcaatgtttttatagtcttactgcaaatcaatatatccacaagttttgtatgaatggcattatagtgtgtatattactgtgtaacttgcttcatttttctcaatattrttctctgaattatccaagtcaatatatgtaggttttatatattaactttattttctgtataatattcaatcatatggctgcaccaaaatgtatttatacattctcttgctaatcaacatttgggtctttaaaaatattgtattattacaaatgaatgttgcaattaatacctttgtgtgtgtctctttgttcaaatatgtgaaactttttctagggaatccacaaagataataaattgcgaggtcaaaggatgtatgcaaattttaatttactagatattgcaaagttgctctccgaagtttaaaagtttataatcccagcctggcctacatagcaaaaccctatctctactaaaagtacaaaaattagccgggtgtggtggcaggtgcctgtaatcccagctactctggaggctaag

SEQ ID NO: 352897 - DNA, 522 bp, Homo sapiens
tgtttttatagtcttactgcaaatcaatatatccacaagttttgtatgaatggcattatagtgtgtatattactgtgtaacttgcttcatttttctcaatattgttctctgaattatccaagtcaatatatgtaggttttatatattaactttattttctgtataatattcaatcatatggctgcaccaaaatgtatttatacattctcttgctaatcaacatttgggtctttaaaaatattgtattattacaaaygaatgttgcaattaatacctttgtgtgtgtctctttgttcaaatatgtgaaactttttctagggaatccacaaagataataaattgcgaggtcaaaggatgtatgcaaattttaatttactagatattgcaaagttgctctccgaagtttaaaagtttataatcccagcctggcctacatagcaaaaccctatctctactaaaagtacaaaaattagccgggtgtggtggcaggtgcctgtaatcccagctactctggaggctaag

SEQ ID NO: 352898 - DNA, 575 bp, Homo sapiens
aggaatggtttagcattccttgacactattctcatgatagtgagttcttgcaagatctggtttaaaagtgtgtaacacctctgccccccccacccccaccatctcctgctcctgcttccaccatgtgacatgtctcattccccttttgccatctgccatgatgggaagcttcctgaggcctctccaaaagcagaagccactatgttccctgtacttcctatacaactgtgagccagttaaacctcttttctttataaattactgagtctcaggtatttctttatarcaatgcaagaactgactaatatacgtgcacatgaacaacagccctgcattatcaaatggaagtaatatttatgagatcgggcttgagcaggccctaagggcacaagcaagtaacacaaggtaaaggtccaaatattcatgctccctactattaatatactatcattttcttcccagcccaattctatggcctcttaggaagttccctacaagaagtttaccaaggaagagaaaacttgggcctggtttacaaatagttctctatgacttgtgggtactaccaaaaggta

SEQ ID NO: 352899 - DNA, 575 bp, Homo sapiens
aggaatggtttagcattccttgacactattctcatgatagtgagttcttgcaagatctggtttaaaagtgtgtaacacctctgccccccccacccccaccatctcctgctcctgcttccaccatgtgacatgtctcattccccttttgccatctgccatgatgggaagcttcctgaggcctctccaaaagcagaagccactatgttccctgtacttcctatacaactgtgagccagttaaacctcttttctttataaattactgagtctcaggtatttctttatagcaatgcaagaactgactaatatacgtgcacatgaacaacagccctgcattatcaaatggaagtaatatttatgagatcgggcttgagcaggccctaaggrcacaagcaagtaacacaaggtaaaggtccaaatattcatgctccctactattaatatactatcattttcttcccagcccaattctatggcctcttaggaagttccctacaagaagtttaccaaggaagagaaaacttgggcctggtttacaaatagttctctatgacttgtgggtactaccaaaaggta

SEQ ID NO: 352900 - DNA, 622 bp, Homo sapiens
aaatatggatgaaataatgtatacaaagaaagagagatttattgactgctgttaaactgtatttatggtcttcagaggactaataaaaagctgacagctcttaacacaaagtaaagtcaataaaaataacattgaaaacaaaaactaagtgtgagagagccccaggggttctttggtagttgacaaggaagtccttatctttggcagtgaaagggtagatacaatcaagcaacaacctgaagatttgatagagttgtagagctccagaatcacataaaccttatccaaataaagtcttgatgctagcgtatgctctgtttttaaraaaatttgggaccttgaaacaggatgggaacaccagatgggaccatggcagaatcccctgaaacaagagtctgcagaggtaaaatagtattccatagaagcaagcttatactttccacaggctggaagactctacagatgttgaaatcttgcaaggtaagatgtacacatcttcataaatcagccccacctcctctcctggctgctaggctgataattataattaaattcaaaaatgaacctagttgaaaaacactggtctagataatgaaggaaaaaagattgtacactgatgaag

SEQ ID NO: 352901 - DNA, 622 bp, Homo sapiens
aaatatggatgaaataatgtatacaaagaaagagagatttattgactgctgttaaactgtatttatggtcttcagaggactaataaaaagctgacagctcttaacacaaagtaaagtcaataaaaataacattgaaaacaaaaactaagtgtgagagagccccaggggttctttggtagttgacaaggaagtccttatctttggcagtgaaagggtagatacaatcaagcaacaacctgaagatttgatagagttgtagagctccagaatcacataaaccttatccaaataaagtcttgatgctagcgtatgctctgtttttaaaaaaatttgggaccttgaaacaggatgggaacaycagatgggaccatggcagaatcccctgaaacaagagtctgcagaggtaaaatagtattccatagaagcaagcttatactttccacaggctggaagactctacagatgttgaaatcttgcaaggtaagatgtacacatcttcataaatcagccccacctcctctcctggctgctaggctgataattataattaaattcaaaaatgaacctagttgaaaaacactggtctagataatgaaggaaaaaagattgtacactgatgaag

SEQ ID NO: 352902 - DNA, 527 bp, Homo sapiens
atatctagtgaaaatatccttcagacatgaaggagaaataaacacttttccaaacaaacaatgctgagtgatttcatcaacaccagatctgttttataagaaatgctaaagggagttctacagtctcaaagaaaagaatattaacgagcaataaaaagttatctgaagatacaaaactcactggtaatagtaagtacacagaaaaacacaaactattatarcaatatttgttgtgtgtaaaccactcatattttaacctgaaaggctaaaatatgaactgatcaaaataataactataacaagttataaagacatatcataataagaaaaaatttgaagtatcaaaactattaaaagcagagtggatgaagttgaagtgtagatttttcattagttttctctttgcttgtttgttagattatttgtttgcctttgcagttagtgttatcattcattaaaaataattggttataaggtgttatttggaaggctcatcttaagtcctaacttatcaataataacactaa

SEQ ID NO: 352903 - DNA, 630 bp, Homo sapiens
ttgtttatacattcaccaacagaaaaacatcttagttgcttccaagttttggaattatgaagaaagctgctataaatgtctatgtgtagaattttacgtgggcctaagttttcaactcatttgttatatrccaaggagcacagttactggaagttatagtaagagcatatataattgtgttacgaactgccaaactatctttcaaagtggttgtgccgtttttgtattttcaccagtgatgaatgagaaatgctgttgcttcatactctcaccagcatttggtgaatttagcatttagaatttcaccattcaaatagacctttagtggtatctagttttttacatttgcaattcgcaaatggcatataaggtggagaacattttcatgtgtgtttgccaatggtatgtcttctatggtgaggtttatgttcagctctttagtccattttttaattgaatttttataacttattgttaagttttaggagttccttatatattttgaataacagatatatgtcagtcaactgagctgacataacaaaaatatcacaggctttatggccaagatacatgtgccagtattgtcagattctattgaggtctctcttcttatcttgcagacagctg

SEQ ID NO: 352904 - DNA, 422 bp, Homo sapiens
atcaaatttttccaagaccatttattaaagagactattctttcttcattgtctattcattcacccttgtcaaagatcagctgactgtgaatgtgtagatttttttctgagatctctattctkttccatgtgtctatgtctgttgttgtgccagtactcaactgttttgacaaatgtacatttttaatatgttttgaaattagcaagtgtgatgcctctctctgtattcttgttcaagattactttggctatttgggggcctttctgattccatgtgaattttaagattattttttatatatctaaaaagaataccactgggactttgatagggattaaagtaaatctgtgatacctttgagtggtatggacattttaacaatattagttattcaaatcaataaacatggagcatctttgcat

SEQ ID NO: 352905 - DNA, 422 bp, Homo sapiens
atcaaatttttccaagaccatttattaaagagactattctttcttcattgtctattcattcacccttgtcaaagatcagctgactgtgaatgtgtagatttttttctgagatctctattcttttccatgtgtctatgtctgttgttgtgccagtactcaactgttttgacaaatgtacatttttaatatgttttgaaattagcaagtgtgatgcctctckctgtattcttgttcaagattactttggctatttgggggcctttctgattccatgtgaattttaagattattttttatatatctaaaaagaataccactgggactttgatagggattaaagtaaatctgtgatacctttgagtggtatggacattttaacaatattagttattcaaatcaataaacatggagcatctttgcat

SEQ ID NO: 352906 - DNA, 457 bp, Homo sapiens
caagttttcattcttccgcatatggctaaccaactatctcagcaccattattgtataaatagagggtcctttacccattggagtacacagattcctttatctattgctttttcagtcaactttgtcaaaaatcagatggcttagttgtatgattttattttggggatctctattctgttttattggtctatgcatctttttttttgtatcagtaccatgctgttttagttactatatcatgatagtatagtttgaagtcaggtaatgtgatatttccacctttgttctttttgcttacaattattttgattagtcagggtcttttgtgttccatacaaattttagaatagttttttttctaattatataaamaattacattgttattttgatggaaatagcattgcatttctagattgctttgggcagtatggctattttaacaatattgattcctc

SEQ ID NO: 352907 - DNA, 466 bp, Homo sapiens
ggcttcttcattgtgcatgattatttttaaatatatccgtggtcttgtttgtgttaacaatcatttttgtccctgagaagtatctcattatatagatatgccactgtagctttatctattcacttgttaaaggaaatttgggacttttcttgttttggctactgaaaataaagctgctttgaacaatcaggtcccaatatttgtatgaacatatacttttatttctcttgggtaaatccctataagtggaatgtctgaattatatggtaggtgtgatggttaatactgtcaacttgattggattgaacaatacaaagtrttgatcttgggtgtgtctgtgagggtgttgccaaaagagattaacatttgagtcagtggtttggggaaggcagacccacccttaatctgggtgggcacaatctattcatctgcccgtgctgctataatataagcaggcagaaaattg

SEQ ID NO: 352908 - DNA, 483 bp, Homo sapiens
ctcctaagttcagtggacaaagtgatgaaagaaaattatgaactcagggattctacctcccggcttcagaagcagacactgaacctccaatctactaagattgccttgagtgagagtcttatctcctgcagagaaagagctgaaattgtgaaaaaccggacacaagctcttatcatgtgagtggctgacctgcaatgaaaggtgcaagcacagcctcaccaggtgtctactgttaaagtgagggcattgattggaaaaaaactggaccctgcaacttggaatggggacatgtggaaagaccttgatgaagctggggacactgagtttgtaaactctgatgaacctttttgtgccagaagaaacaatttccccatctccattagtggcgacatcccctccacgacccacgctgccatcagcctttccaccactgtctgaggagataaagcctgygccgtctgaggcaacagtgagggcctcccc

SEQ ID NO: 352909 - DNA, 617 bp, Homo sapiens
aatttttttcaccaaaattgtacagatgtatgactatgtagtaagaatgtaatagctaaattctgtcatataaactgaaaaataaaaacttgaaagctagcaaactaattacaagtaatttaatggcaacacatctaaatgaaatggtaattacacttaatttttatttaaaattaatataaaatagaaacttgaccctttcctctgatatgtasaaaaccacaaatttgatccagattagagctatttcaaaaaacaatttctgaaaaatgtaatttatatcaggaagaattctgaattgtatcttttttttattttttcacaaatttttgagacacatattgagttgacatgacctttaaggtacttatgatctactcattcttaaatctgaaaaggtaaaaagacttaaatttcaaaaatttattgaactaaaatcaattctaagacccataaggtatagaagattgattttatctctgtaatatattgcttcaacaatatattatcttggttataatggcaggcagaacaatggtttattattttcatttctttaaattatgagcaggaagcagataatcatgaataactgaaatggagtaccaaatcatata

SEQ ID NO: 352910 - DNA, 425 bp, Homo sapiens
atttctcttgagtgaatacctaagagtggactacatggatcatataatagatttatagataactttttaaggcactgccaaacagttttccaaagtgattgtactattttaaatttctgccagtagcatatgacagttgtagttattccgcatccataggatggccatgttttwaattttaaccattctaatgggtgtgtagtactatctccataatggttaccgatgttgcacatctctttacattcttgtttgctatcagtatatctttttcggggaactgtcttttcaaatattctgctccttcccttattttgatatattcccgaaactggttgtttatcaaacagtttaatatacaaaattaattgtatttctatacactaccatgatatgaaaatattttttcccaatatttgctttgc

SEQ ID NO: 352911 - DNA, 620 bp, Homo sapiens
tttcccttttaattgttgtaatagttgtaatatgtaacatatataggtcacttgtcaaatctataatttgcaaaaatcttcccccattctgtgggctgaattttcactttttgatggactctattgaggcaaagaagtttttaattttataaggaccatttatatacgttttgttttgtttcttgtgctttttgtattgtatctaagaaatcattgcctaatataaagttacaaagactcactcctactatttgttctaagacttttatagttttagctcttatatttaggtatctgatcaattttgagctaatatttgtatatggtatgaagtaaaggtgtaattctattctttggcatgtagacatatccaaacatcatttgtttaaaaaacatttctcctcwtagaactgttttatcacctttgtttaaaactagttgaccacagatatatagttttctttctagactctcaatttaatctcattaatctacatggctgtatttatgtcagcaccacattgtgttggttatcattgccttgtactaagttttgaaattggtgaagtggttctatttttgttttctttttcaagattggttgtgacgatttgccatta

SEQ ID NO: 352912 - DNA, 619 bp, Homo sapiens
tgaactccatgtgtatgaacataattaaatattttttatccttttaatttgccctatattgtcagaggtgttcaaacaagagtgactccatcttgataggggctgagtaaaataaggctgagacctactgggctgcattcccaggatattaaggcattcttagtcacrggatgagataggaggtcggcaaaagatacaggtcataaagaccttgctgataaaacagcatgcagtaaagaaccagccaaatcccatcaaaactgagttggcgacaaaagtgacctctggtcatactcactgctcattatacactaattataatgcattagcatgctaaaagacagtcccaccagctccacgacagtttacaaatgccatggtagcatcaggaagttacactattttgtggaaaaacgggtggaacccgcagttctgggaactgcctaccccttttcctagaaaatttacgaataatctaccatttgtttagcatataatcaataaacaaccataaatacagtgaatcatcagccctcagggctgctctgcctatagagtagccattcttttatttccttactttcttaagaaacttgattgcactttatggattagcctt

SEQ ID NO: 352913 - DNA, 568 bp, Homo sapiens
gacaaaccaaactgaagacgcaagattctccatgatttcaactatatggcatcaagaaaaggtaaaattatggagacagtaaaaagtttagtggtttcctacttctttttcctaaagggaaagagaggcagggataaacggatggagagcagggaattcttagggcagtgaaactattttgtatgttactttaataacagatacatgtcattacacattcttcaaaatccatagaatgtacaacagaaagaatgaacccaaatggaaggagagcagggaattcttagggsagtgaaatattttgtatgttaatttaataatggatacacgtcattacacattcttcaatatccatagaatgtacaacaaaaagaatgaaccttaatgtaaactgtggactttagtcataagaatgtattaatatctgttcataaattataacaaatataccacactaatacaggatgtaaataatacagaaaaatgtgtgtgggggtggggagagggttacctgagaactatttgtattttctgatcaatttttccgtaaatctacacttttcttaaa

SEQ ID NO: 352914 - DNA, 473 bp, Homo sapiens
cgctttattgagtgacatttctttgtgaactccatgtgtatgaacataattaaatattttttatccttttaatttgccctatattgtcagaggtgttcaaacaagagtgactccatcttgataggggctgagtaaaataaggctgagacctactgggctgcattcccaggatattaaggcattcttagtcacaggatgagataggaggtcggcaaaagatacaggtcataaagaccttgctgataaaacagcatgcagtaaagaaccagccaaatcccatcaaaactgagttggcgacaaaagtgacctctggtcatactcactgctcattatacactaattataatgcattagcatgctaaaagacagtcccaccagctccaygacagtttacaaatgccatggtagcatcaggaagttacactattttgtggaaaaacgggtggaacccgcagttctgggaactgcctacc

SEQ ID NO: 352915 - DNA, 565 bp, Homo sapiens
aactgggttaaaaggtacaagtgaactttctgttctatttcctacaactgtatgtgaaactacaattatctaaaaaaaacaaccaaatacatgtaggaaaaatagacagaaataaagaaatagtcaaatctatagtaacagctgtagattttaacrcctcctccaagtaatgtgtagttggcatttacacaatattatgacaataatttaaaattacacatttttgtaatgtgcatatgaaccatttacaaagttggatcttatgccattttacttaaatatcaatgttttgaaagttcataatcatactgtgcatctttttctttaaaaatgaaataaattagaaatacttttaagatatctagaaaattaacaagtattttgaaatcacataaaacataattaaatgtctcctaaatttaaaaagatatcccaatggaaattaaaaaatattttgaacaaaatgacaatgaaaacacatgtcaaaattggagagatgcagtttaaagcagtgtttaatggaatttttatagctttttatcctatattaatattgaaaattaca

SEQ ID NO: 352916 - DNA, 643 bp, Homo sapiens
ctgggagaaggagcccagcctgcgaatgattttatagaattgcttatagctcctctgtccaaacgtccctcacatcaggctgttccaagagttgcaaacccttgaaaaatgtgctgatttgagtcttatcacctctttgtctatttttgatggaagtgctaaaaatacaaaagagtaaaattatccaaaaggcagacagaagaaaaagaaaaaggggcagatagtctcctatcttggctagcagagcactcatggtgtcttctcccttatgccaagtgmtactgtgatgataggtagacagtgctggtagattcggttggtagaccagatgaccgagggaactgtgattgcaatcatagattcttaatcagaaggagagttgttttttcattttggttttggtttttgttttttttcaagatggatgcagatggtggggtcagcttctcaggtggagtacagttttagaaccaccaccatcacccaacccctcaaaaggaagcacaggcttctatacacttacttctttcatggcccagggtctgggtgttttggctttcctggaaccagtctcaaatcagtgaagcttggctagcagagatgggttggggggaggcaggagcaaggtcttaaacagagaaag

SEQ ID NO: 352917 - DNA, 643 bp, Homo sapiens
ctgggagaaggagcccagcctgcgaatgattttatagaattgcttatagctcctctgtccaaacgtccctcacatcaggctgttccaagagttgcaaacccttgaaaaatgtgctgatttgagtcttatcacctctttgtctatttttgatggaagtgctaaaaatacaaaagagtaaaattatccaaaaggcagacagaagaaaaagaaaaaggggcagatagtctcctatcttggctagcagagcactcatggtgtcttctcccttatgccaagtgatactgtgatgataggtagacartgctggtagattcggttggtagaccagatgaccgagggaactgtgattgcaatcatagattcttaatcagaaggagagttgttttttcattttggttttggtttttgttttttttcaagatggatgcagatggtggggtcagcttctcaggtggagtacagttttagaaccaccaccatcacccaacccctcaaaaggaagcacaggcttctatacacttacttctttcatggcccagggtctgggtgttttggctttcctggaaccagtctcaaatcagtgaagcttggctagcagagatgggttggggggaggcaggagcaaggtcttaaacagagaaag

SEQ ID NO: 352918 - DNA, 503 bp, Homo sapiens
ctggcacataggaagtactcaataaatgttaactatgatcatgatcactgggaaagataaaacacttttgattaaaggccagtataggaaaaggtagayttaggataccccaccaccactgccttcaaaggagctccaatggagaccatctggatgggcaagttgcttctccactctcagactcaaggtcattcatcatcttttgactgggaataatgatgataataattatacttcagtgggaagtcatattattaaataagagaattactaagtaaaatcactgagtaaaattcatggcagtagggtagtttcagggtcatatttttaaatacaattccagtcctttcctggaccttctgataattttattccactcaacccatctcactccagcttctctcccagaacccctagggaagggtttgttttaaataacaagtcatgttgaccaataatctttaataacatgtatgcttatagaacttaacctgtaaaagaca

SEQ ID NO: 352919 - DNA, 503 bp, Homo sapiens
ctggcacataggaagtactcaataaatgttaactatgatcatgatcactgggaaagataaaacacttttgattaaaggccagtataggaaaaggtagatttaggataccccascaccactgccttcaaaggagctccaatggagaccatctggatgggcaagttgcttctccactctcagactcaaggtcattcatcatcttttgactgggaataatgatgataataattatacttcagtgggaagtcatattattaaataagagaattactaagtaaaatcactgagtaaaattcatggcagtagggtagtttcagggtcatatttttaaatacaattccagtcctttcctggaccttctgataattttattccactcaacccatctcactccagcttctctcccagaacccctagggaagggtttgttttaaataacaagtcatgttgaccaataatctttaataacatgtatgcttatagaacttaacctgtaaaagaca

SEQ ID NO: 352920 - DNA, 503 bp, Homo sapiens
ctggcacataggaagtactcaataaatgttaactatgatcatgatcactgggaaagataaaacacttttgattaaaggccagtataggaaaaggtagatttaggataccccaccaccactgccttcaaaggagctccaatggagaccatctggatgggcaagttgcttctccactctcagactcaaggtcattcatcatcttttgactgggaataatgatgataataattatacttcagtgggaagtcatattattaaataagagaattactaagtaaaatcactgagtaaaattcatggcagtagggtagtttcagggtcatatttttaaatacarttccagtcctttcctggaccttctgataattttattccactcaacccatctcactccagcttctctcccagaacccctagggaagggtttgttttaaataacaagtcatgttgaccaataatctttaataacatgtatgcttatagaacttaacctgtaaaagaca

SEQ ID NO: 352921 - DNA, 503 bp, Homo sapiens
ctggcacataggaagtactcaataaatgttaactatgatcatgatcactgggaaagataaaacacttttgattaaaggccagtataggaaaaggtagatttaggataccccaccaccactgccttcaaaggagctccaatggagaccatctggatgggcaagttgcttctccactctcagactcaaggtcattcatcatcttttgactgggaataatgatgataataattatacttcagtgggaagtcatattattaaataagagaattactaagtaaaatcactgagtaaaattcatggcagtagggtagtttcagggtcatatttttaaatacaattccagtcctttccyggaccttctgataattttattccactcaacccatctcactccagcttctctcccagaacccctagggaagggtttgttttaaataacaagtcatgttgaccaataatctttaataacatgtatgcttatagaacttaacctgtaaaagaca

SEQ ID NO: 352922 - DNA, 595 bp, Homo sapiens
cttcactgtaaagtgactcttctccccacttccatactatcctctttggaaggaagtcaccaagccctccatgtctaaagagtgctccatctcctccagggccaagtatctacataagttatttggaacccatgcatgattttggcagatcccccaaaaggactccatgtatgttagctaacattattttttaaatacctatggaattatctaatttatatctgttctctccactaagcggctagctgcagagggcagagagaggctgcttggttgcagctctgacccaggaccctctaytgggccccgcacacataaattccccatcaatagttgctgaatgaaggaatgctccaccctgccatgaggcctttgccgttgctgttcaggatgtctggtacattgttcccgttcctgtttgcctgattaactccctttcattcttcagatgtgagacttaaagatctttggttctgggaaatcttctctgacctccttccaggggcaattaagtccataataaagcttctctgcttacctttctctgtatggttgtttgatacctgttctttctacactagatggaagcaggagc

SEQ ID NO: 352923 - DNA, 595 bp, Homo sapiens
cttcactgtaaagtgactcttctccccacttccatactatcctctttggaaggaagtcaccaagccctccatgtctaaagagtgctccatctcctccagggccaagtatctacataagttatttggaacccatgcatgattttggcagatcccccaaaaggactccatgtatgttagctaacattattttttaaatacctatggaattatctaatttatatctgttctctccactaagcggctagctgcagagggcagagagaggctgcttggttgcagctctgacccaggaccctctactgggccccgcacacataaattccccatcaatagttgctgaatgaaggaatgctccaccctgccatgaggcctttgccsttgctgttcaggatgtctggtacattgttcccgttcctgtttgcctgattaactccctttcattcttcagatgtgagacttaaagatctttggttctgggaaatcttctctgacctccttccaggggcaattaagtccataataaagcttctctgcttacctttctctgtatggttgtttgatacctgttctttctacactagatggaagcaggagc

SEQ ID NO: 352924 - DNA, 597 bp, Homo sapiens
catccatgtttactgagcatctactgtgtgctaggccctggactagatgctggggatacagcagtgacccaggcagataatgccagagccttcagggaaactggagctttgtgtgtgtggaggcagaaaataaatatataaaaaaacagatgagataatcatggagtgtgataaatactaggaaaacaatcacagggtaagggaatggagagtgactttgggggtggatagcagggaccaccttagcaggagaggcctctctgagggatgaggggctctagggatcaaccacattcctatttatctcacagcaatcctctggataggagatgtaggtacacaggaaatgcactcattttatagataagaccagcgaggcccaaggagacaaaatagcttgtgaaggggggcacagccaagaaacagagctgggattcaaactgccgcccttggctctgtggctttctatgggaactgagctgggtcgggtggggagactaaactcagggwattgtctgaagggctaggagggctcccaggagaatgcattctggcatggcaaaggagcagcatgcccaatggctagaggtgagaagc

SEQ ID NO: 352925 - DNA, 435 bp, Homo sapiens
tgactatttaccatctttgctttgcagcctcatgtatcccagaggtttttatgtgtgtgtttctttcttctgtagtctaacatcatttctggcatctttagctctcttgagttctgtttccccacactgtatagtcttcccaaggctccctatggtgcagaatgggcagggtgggtaggcaacggtttgggtcatgtgctttggaacatggttcatgccatggcttcatcactggtgaagctcttggaaaaatcatccaaccctctgaacctcagttttctcatctgtagcacatcgtggcaggccctggctcatasgaaatgccttagcctggtgttggtggtcactactgttaactgaccccttcaccttacatttcttcttggggcagattatccattatggggctctctgccaagcaaggcaaaatattaa

SEQ ID NO: 352926 - DNA, 511 bp, Homo sapiens
catttgcctttgatatgcaataaatcctgagtccacacttcccatctgcctcctttatcaggcttctgcagagcaagacactattcccatgccctaaatcaccccaaggccaggtaccaggcaactagggattatcccgacccctatggcccagagcccaccatgttattcaaactctccaattcccaggctgctcagcctgctcactctgcctcgctcatttattcccaagaaaaccacaataagggctcctgcccatgttttcccctcactccctctgcttctggaccagccctggggcttccccatgtggccctgcatggcacggcacaccccctctccagaactgtgagtaataaactatttttcaatagccctcatcttctgatctgttggtctcaccaacctgaataaaagcaaaacctaccttttaatacagtctcctgcccccaaacacagatcagcactcaactaacacwcaacaaatatcaaatgagggcaggagccacac

SEQ ID NO: 352927 - DNA, 599 bp, Homo sapiens
ttatcaatacagttaggcctaaatttatcattttcaatttgttttctatttgtcccatttgttctttgttcccttttccacatttctctgctttcttttgcattgagatttttttttataatttcgtttctctcctttgttggcttattagttataactttttgtattgccattttagtggcttttctaggatttacagaatacgtttataacatatcacagtctactgacattatatcactttatggtayaaaaaccatacgacagtatatttccatttcccccatctttgtgctattgttatcataaattttacttctacatatattataaactctacactactttatcactgtttctgtttaagtagccaattgtgttttttcatttaaaaaattcggtaaaatacacataacaaaattttctatttggatcatttttaagtgtataggtcaatgcttcattggcattaagcacattcacattgttgtgcagccatcaccactatctttctccagaactttcatcattccaaactgaagctctatacccattaaacaataactccccagtcctctctttccccaacccctagaact

SEQ ID NO: 352928 - DNA, 606 bp, Homo sapiens
atcaggtaaatattcacttatatatccttcccattcttcagtacttttacaaattttaataatttttatattataaatttcaataatttgtcatctttaatcagatttctgtatttcaaagataactgaagaagtgtggagaaggttccagaggggaaggaactggtatcagggagaccaattaactaggtgttgcagttgcccaagagggatctggccatggcagtgattccaaccctttcctgcccccacacagtctaattgtacagagtacacccatcaggagtagctctcactatgtgcagtgattctcaacctcaggtaggggcaggggcaggggcaggggcaggggcagggactctcagctcagttgagaatcccagtggagttttaaaggaaagaacatattgaacagaggctcaggagggcaggcaactgaatggctgtaggtgatgagcagagtaactggtgactcaggtattttatttaggtgagttggtagatcacggttccattagcctagaccataacaactatgggaggcagaggcagagccmtagaaaggaggggaagagcatggaagatgacacagacatgttagaacgt

SEQ ID NO: 352929 - DNA, 524 bp, Homo sapiens
taagtggtatgagaattttaaattttgatagatattgccaaattgtccactctaaatgactatatcttatactccgaccaaaaatgtcttcttacatccttataaacattggttattatmaacactttaaagactgccaaatttatagttgaaaaatcatatttcattattttgatctgaatactactgtaattattattttttaaaagatctgaaatgaagcacgtgtaaaatcacctaaacttgggcctttattatgaggtaattctttgataattttcttaattcctcctttgtctattgccatatttatgttactgtctcttcttggatcaacctagttaatattttttaaaaattataatttcattaatattttaaaatgtatttggataattctacaaaatactcttttaatgataatttcaattcttctgtgttcttctaaacaagtattttaaggttttttttttaagactagctacgtcctttgccttccacttcccaacttccatttgcccaac

SEQ ID NO: 352930 - DNA, 345 bp, Homo sapiens
ctgtggcaaggaagaaggtgcgcgtaaatctaaacggaggaagcttcagctttgatctagcacatactcgtttaagattttttttttttwaaataattccgttgagtttaggttaaatgctgtatctggagacttaaataccggaaagtgcacagaaaatgactatttcatctgcaattgtcagtttacaaacacttgcaatttcggaccggatgggtaaattaacacttctcttgaccatctcatgtatgtatttccttccttttgactcatacgactctcaacttttcaatataatattaatgacacggcattttagaaacatttttcattttatagagactt

SEQ ID NO: 352931 - DNA, 447 bp, Homo sapiens
tattatataaattattttaacacgtttttttttctcatgtgtttttaccttacaacttggaaatttttacttgcakttaatttggaagagtgcttcaggtctgcagacctcatccggtcaagtgatcctgatttcagagttctaaatgatgggtcagtgtacacagccagggctgttgcgctgtctgataagaaaagatcatttaccatatggctttctgacaaaaggaaacagacacagaaagaggttactgtgctgctagaacatcagaagaaggtatttaaagtacattaaatattttcagtcattttttcattaaaatactcttattaaaaattgcaaagagaaacaaggataaatagggtattttccccttttgttttcattttgtttcctttcctttcacttcgtttccattttcttacccttttccttcccctccatttt

SEQ ID NO: 352932 - DNA, 447 bp, Homo sapiens
tattatataaattattttaacacgtttttttttctcatgtgtttttaccttacaacttggaaatttttacttgcatttaatttggaagagtgcttcaggtctgcagacctcatccggtcaagtgatcctgatttcagagttctaaatgatgggwcagtgtacacagccagggctgttgcgctgtctgataagaaaagatcatttaccatatggctttctgacaaaaggaaacagacacagaaagaggttactgtgctgctagaacatcagaagaaggtatttaaagtacattaaatattttcagtcattttttcattaaaatactcttattaaaaattgcaaagagaaacaaggataaatagggtattttccccttttgttttcattttgtttcctttcctttcacttcgtttccattttcttacccttttccttcccctccatttt

SEQ ID NO: 352933 - DNA, 447 bp, Homo sapiens
tattatataaattattttaacacgtttttttttctcatgtgtttttaccttacaacttggaaatttttacttgcatttaatttggaagagtgcttcaggtctgcagacctcatccggtcaagtgatcctgatttcagagttctaaatgatgggtcagtgtacacagccagggctgttgcgctgtctgataagaaaagatcatttaccatatggctttctgacaaaargaaacagacacagaaagaggttactgtgctgctagaacatcagaagaaggtatttaaagtacattaaatattttcagtcattttttcattaaaatactcttattaaaaattgcaaagagaaacaaggataaatagggtattttccccttttgttttcattttgtttcctttcctttcacttcgtttccattttcttacccttttccttcccctccatttt

SEQ ID NO: 352934 - DNA, 447 bp, Homo sapiens
tattatataaattattttaacacgtttttttttctcatgtgtttttaccttacaacttggaaatttttacttgcatttaatttggaagagtgcttcaggtctgcagacctcatccggtcaagtgatcctgatttcagagttctaaatgatgggtcagtgtacacagccagggctgttgcgctgtctgataagaaaagatcatttaccatatggctttctgacaaaaggaaacagacacagaaagaggttactgtgctgctagaacatcagaagaaggtatttaaagtacattaaatattttcagtcattttttcattaaaatactctyattaaaaattgcaaagagaaacaaggataaatagggtattttccccttttgttttcattttgtttcctttcctttcacttcgtttccattttcttacccttttccttcccctccatttt

SEQ ID NO: 352935 - DNA, 569 bp, Homo sapiens
gatctttatttgtttattcatttatttagcagggagttactgagcacttaactatatcctgcrggaggtactgctctaagtactaaagatataagtaaatttagtcatggcccttgctctcatgtgggttattggcctcgtgaaggagacagaagtaggataataattacaattttcagtgatgagtgctatgattctagtatagagatgttgggtgatttggtaacaaatgagatgaacattaaaccctgaggtaaggtggtaaaaagcaagagaaggcttagagaaggagacatctgagtagagtcctgaagaatggaaaatttttctgcaggtaaataattgcagaagaagaggaaagtacagaagtgagagctccttagaggagctctgggtggcttagtcttccaaggtttgatggaatggagcagggagatgaggctgaagagggaggtaggggtcaaaccactatggactatgtgcattctactagtaagtttaactttatcttaataataaggagaaattcttaagcagattactgacatgatcaggtttagttttctcat

SEQ ID NO: 352936 - DNA, 569 bp, Homo sapiens
gatctttatttgtttattcatttatttagcagggagttactgagcacttaactatatcctgcgggaggtactgctctargtactaaagatataagtaaatttagtcatggcccttgctctcatgtgggttattggcctcgtgaaggagacagaagtaggataataattacaattttcagtgatgagtgctatgattctagtatagagatgttgggtgatttggtaacaaatgagatgaacattaaaccctgaggtaaggtggtaaaaagcaagagaaggcttagagaaggagacatctgagtagagtcctgaagaatggaaaatttttctgcaggtaaataattgcagaagaagaggaaagtacagaagtgagagctccttagaggagctctgggtggcttagtcttccaaggtttgatggaatggagcagggagatgaggctgaagagggaggtaggggtcaaaccactatggactatgtgcattctactagtaagtttaactttatcttaataataaggagaaattcttaagcagattactgacatgatcaggtttagttttctcat

SEQ ID NO: 352937 - DNA, 569 bp, Homo sapiens
gatctttatttgtttattcatttatttagcagggagttactgagcacttaactatatcctgcgggaggtactgctctaagtactaaagatataagtaaatttagtcatggcccttgctctcatgtgggttattggcctcgtgaaggagacagaagtaggataataattacaattttcagtgatgagtgctatgattctagtatagagatgttgggtgatttggtaacaaatgagatgaacattaaaccctgaggtaaggtggtaaaaagcaagagaaggcttagagaaggagacatctgagtagagtcctgaagaatggaaaatttttctgcaggtaaataattgcagaagaagaggaaagtacagaagtgagagctccttagaggagctctgggtggcttagtcttccaaggtttgatggaatggagcagggagatgaggctgaagagggaggtaggggtcaaaccactatggactatgtgcattctrctagtaagtttaactttatcttaataataaggagaaattcttaagcagattactgacatgatcaggtttagttttctcat

SEQ ID NO: 352938 - DNA, 615 bp, Homo sapiens
cagtaaaatgttgaaactttttctctaatgtcaggaccaagaccaaaatgaccactttacccacttctactcaagayagtactggaaattctagccagaagaattcagtaagaaaaagaaataaagccatctaacttgttaaagaaagaagtaacattttctgttctcaggcaatataatattacacataggaaaccctgaagcctcaacagcaacaaaacaagcacaacaccaactgctagaacgaataaacaaactcgggaaagttgcaggataaaatattaacatacaataatcaagttgagttttttaaatatcagaaaaagaagtgagaaaaaattacatttacaatagcatcaaaaagaataaactatgtagacacaaacttaatcaagaaggtaaaagatatgtatgctcaaaactataaaacattgaaaaaagaagttgaaaaagtcaaaataaatgaaagaattaataatgctaaaatgtatatattatctgaagcaatctacaagttcagcataattcttatcaaaattctaaagacttatttttatagaaatagaaaaacaatctcaaattttatatgaaactacaaaagaccttgaaaggcca

SEQ ID NO: 352939 - DNA, 221 bp, Homo sapiens
gggtcaaatggtagttctatttttagctctttgaggaattgcctcactgccttctacaatggttgaactawtttacactcccacaccaacagtgtataagcactcccttttctccacaaccttgccagcatttgttattttttgactttttaataatagcgattcaactgctgtgagacggtatctcattgtggttttgatttgcatttatctaatgatca

SEQ ID NO: 352940 - DNA, 560 bp, Homo sapiens
ggaggactgtcttcaaccctttcaaactctactgttatcttatatgtgttgtcccttgtaattccttagaagggagccctaaagaaataatttgkcattggagtagcccagtagtattccagtaatgtttatctatacaaactaatactgttaggttggctgttaacatacacttcaagcatttttctttagtaccaatgtatctacaggtacacacaaatagtttctgaagtttacgtttcttatccattgaccttctagtatttgcgcactattcatatggataaggtaatttttcaaagcacaatagattgtttacgattaacacctttgcatctggaagtaatcttagtaccagaagctaattaatgtcactcaggctacttataaggcttacacaaaacagaaatatctatataacaattcacttttatcaactctgatagtcaattttccccaatagtcttgatctattattttaatgaccatattgtcaactaaccaaaagctccacagaatttcaatggcagttacagcctccctgagcttttataatagac

SEQ ID NO: 352941 - DNA, 571 bp, Homo sapiens
gggataataacaccttgtcatataggggatatgaaaactatgtacaacttatgtaaagtgcctagcattttctgtgacataaaaggaacttgattcatggtarctacttttaaaattctaaaaatattaaaagtatttccttcatgtagaaactaggatgtaatatcaaatataagggtaactatcttatgttttaaaataatggaaataaatgtatataaatgtattggggaaatttttgatacactccagatgtgaaattaagttaatctgaaccaaaaacaaagcagtaaagtattattatctaactgctgcccattctggagaatcctggagtgctactcagaaatgaaacaaatgcatgtcagtcacatggaatgagaaatattctatgatataggttataacttccaatcacctttggaaatgtttttcttaatacctctatggtcagaactccttggacaaaaaaacatacaaaagaacattgagtacatatactcattgattaggcctttttaaaaattagagtatattctttagaaaaagtttgctagagatcattttgtat

SEQ ID NO: 352942 - DNA, 662 bp, Homo sapiens
tagccagcaatccacaattgctactctgcctagtgagcagccctgctctgtctgtgaagccaccattttcctttgtctgttgctctaataagcttgctttgctttcactttactctactgtcttgctcttgaattcttttccaggtgaagccaggaaccctctgggctgagccccaattttgggatttgcctgcatcaggaggaagaggggagaagggtgtccaggagaacatttaacagaacatctgttgcaatcacatcaattcgaaacatatgcctgtactacctaagtgttcagccttggaaactgtatgagatatacggtagcccttttcagaacaattatacaccacagcccctcagccagttcccatgtgtgctgtagattcacwtctcaagactcaaagatttggctcttcagattcagggttccctctaaaaccagagggctccctcagcagacagcaggcacagcccaatccagaagtgtggtgaatttaaggatccctgggtgaaaccttcaaccagtggggcctgggtactgagaagggatgtgaggggtaaataccccaagtatccatttttgaggggataattatgaggcaagttctacatggtttcttgtatggatgaacaccaaagatgactagctcaataatgca

SEQ ID NO: 352943 - DNA, 648 bp, Homo sapiens
tttacaagtgtgaggaaattaaacaatacagtcttaaacaacaaatagatgaaggaagaaatcaaaacgcaaattagaaaacacttatatattaatgaaaacaaagatacaacatgccaaaacttacgagattcagagaaagcagtgataagggagacatttatagttctaaatgattacatgtctaaaaagacctcaaatcaacaacctaacttcacaacttaaagaaccagaaaaagaagaacaaactaaatccaaagctagcagagagaaggaaataacaaagattacagaaaagataaattaaatagagaatagaaaaaaatagagaaaaatcaataaaaccaaaagttggttctttgaaaagatcaacaaaaatgacaaaccttaagcyagatggaccagagaaagaaagaagagtcacattactaaaatcataaatgaaagaagagacattattaccaaatctacaaaaatagaaagtattacaagataatactataaataagtgtatgccaacaaattcaataacttaaatgaaatgaacaaattcttaaaaacacaaaacataccaagactaaattacaaataaacagaaaatctgaatagacttgtaattagagaggtcattgaatcagtaatcaaaat

SEQ ID NO: 352944 - DNA, 569 bp, Homo sapiens
ttttaccagcatatttgactataaaccctttttcatggcacatactttggaaagcctaggctacatgccctgaagggtgactaaatattcctgaaccagttggtaggtagatagcagctcgtgttagaagaggtagatactctagaccctgaaaccataggctagcttcacagctatccatccccttacaacacataataaccctgggcatggtctgcttccagcttcccagaaaaccccaatagaagtagcatatgtcaagacaaaccagctgtaatcaagcgaccttcatcctgggacaagaagaatgggaaattaattagagcaagacacactgatgtcaaaaattcccaaggaaatcttaacaaatacctattatctggttactcatctttcgactagattgaaatgtcaaaggagagcaaaactgcaccagaattttaaataggccatctagttttatcccaaactgaattaaattgaaattatggatcaaaagcaccatcagaaaaactatgaaaattatggcatayaaattactttgggaaaaaaattgaaacaagaaaaac

SEQ ID NO: 352945 - DNA, 540 bp, Homo sapiens
cagcatagtcataatttttttttttttttgagacaaggtcttgctctgttgcccaggctggagtgcagtggcataatcacagctcactgcagccttgacctcctgagctcaggtgatcctcccacccyagcctcctgagtacccaggactataggcatgtaccaccacacctagctaatattttcattctttgtagagatgggttctcaccatattgcccaggctgatcttgaactcctgggctcaagcaatcctcctgccttagcctcccaaattgctggaattacaggcatgagctacctcgccaggtctcataatcttgatgttagcccagaacaatctgtgactaggtaggatggatggatggatagatagatagatagatagatagatagatagatagatagatagatagatagatcagccagtactagttttggcttcacaatcatatcctgctaccaaattttccttttcaacagctgccgtcttaaagttgtaagaactttaacctatttatatctgattggttttgcctct

SEQ ID NO: 352946 - DNA, 540 bp, Homo sapiens
cagcatagtcataatttttttttttttttgagacaaggtcttgctctgttgcccaggctggagtgcagtggcataatcacagctcactgcagccttgacctcctgagctcaggtgatcctcccaccctagcctcctgagtacccaggactataggcatgtaccaccacacctagctaatattttcattctttgtagagatgggttctcaccatattgcccaggctgatcttgaactcctgggctcaagcaatcctcctgccttagcctcccaaattgctggaattacaggcatgagctacctcgccaggtctcataatcttgatgttagcccagaacaatctgtgactaggtaggatggatggatggatrgatagatagatagatagatagatagatagatagatagatagatagatagatcagccagtactagttttggcttcacaatcatatcctgctaccaaattttccttttcaacagctgccgtcttaaagttgtaagaactttaacctatttatatctgattggttttgcctct

SEQ ID NO: 352947 - DNA, 450 bp, Homo sapiens
ctcttttcttttagtgtttgtgccttctaggtgggtttctattttttcacaagttgtacagttccctacgttttgcaaacctttccctctcctccctggactagtgcctttaggtccagtccattcagaaaatcactccattattaaaaatactcagaatgcactttctacctaaattgatttttattctacttggggtttgttggatttcttgaatgtgtgagtttatagttttcatcaaatttgaaaaatgttctgccattatttcttcaaatagtatttctgttctctcagccctcttttaggattttagtgacactattttagaccatttgacwttttctcatgggtaactgatgttctatttgtctttttttttttttttgataggagaatatgcgattgggtaacaagaactataaaaaaactattgtcaatatgtttaagaat

SEQ ID NO: 352948 - DNA, 518 bp, Homo sapiens
tctctagtgatacagaatataccacagagatatagaatgtaacctatattctagatcacagctatgtaaactgctggtaattcccaaaatatgctatgctcaattacctttgggtctccatatattgtcttttgggtggacctcttagcccatctatcttggcctaacaccttctggccttttagatggcagtttacctgtcactttctccaggaaactttccctgatcactcccctcccctactaaaacgggattgagtccttcacatactcccttaacattttagagcttattcttatcatgacactgaacacattaattgcaactgcctgcttacaagtctgtattcaccaactataaactcctaaagacattaaatttaaaagaaaaagcattcattgttttcactttactaagttttaatctctgcagcggttcaccaaaattttatgcactatggaaaaycaaagaaaggaaaagatttctgtactagatttttgaaaataaagtgtgtgtc

SEQ ID NO: 352949 - DNA, 604 bp, Homo sapiens
tatacgccctcaatttttgttggtttcctctctgtaaaatggaaggtttgccctgcatagattatttttaagtttcctttgagtttaatattccttggtcctacaggaggatatggtgctgttgtttttgttggaaattcaagatggtagcatataaaaagaggattagacagagaaacagaaatttgtcttggagtagactggcaactaccatctaagacccttttctgtctggacaggtctttgaatggtcagcattagcataagtggaagtaagtcagcaattgctccatattcacctggagtttaaaattggcagccaaaggttgcaaactcaaatgcctccagggtttggaggttggtactgtaggtgggggcctgaggggaatggtaggaaccccagtctgtaggagagtgcttgtctcctccttraaagtatctaagtaaataaataaataaataaaggtggcccaaacacacagacaaatctctgactttatttagcctacaggctactagtttcctacccttaaattccatatcagcctatctgttcattttttaagtaaagaatctgagggacagtaatttgcccaaggtcaga

SEQ ID NO: 352950 - DNA, 524 bp, Homo sapiens
acattttttcatacgtttgttggccatttacatatcttcttttgaggcatgtcttgaaccataacattttgtcagctcattttatctctttctataatcagagaaagtgttcaaccaatatcattatatattgttaaattgttacatatcactaaaatattgaaagtattttcattctgattagtatagccactgtccttagttctatgagtagcccacaccaatactctgccccccaccatattaatgctcactcaagcagcaaggctccaggcatcactgcccaagccagtcagccatcacacaccctatccatgccctacaccagtgtcaccagggatctctggyggccagcaggccaggcctggccctgcctgttctcccagctaaagcatgcctgaatttaggtagaggagatggaagacctgctggtagttctggctcccctctgagcaaatgcccaatgttatctacaccctcaaagctaccacaggcagaaacacccctatgaccactgagacatt

SEQ ID NO: 352951 - DNA, 559 bp, Homo sapiens
tcattctctgtgctgagtctcattcagaaaaaataatccaagttgggttcttttacactctttttattgttattattacttcttgagatggagtctcactctgtcacccagattggagtgcagtggcgcaatctcagctcccggcaacctccacctcatgggttcaaccaattatcctgtcacagtctcccaagtagtggggtctacaagcacctggcaccatgccaagctaatttttgtatttgtagtagagacaaggtttcaccaagttggccaggctggtcttgaattcctgacctaaggtgattcacccgtcttggcctcccaaagtgctgggattacaggcgtgagccaccacgcctggccgggttcttttacactctgagataataaaaagtaggcaatgtttattaagcaatgcccttgggatccactgtggaagcaaaggcaaaaacataagacgagacgggagacrttgatttgtgatgtggacatgacatcaatctcgataatcttgacaacgagctcttgaactaaaatggctctaactctctgggct

SEQ ID NO: 352952 - DNA, 557 bp, Homo sapiens
ttaagcaggagagtgacaccatttcatctatacatttaaaagaccacattggtgcaggatctgtggctcatccctgtaaacccagcactttgggaggctgaggtaggaggatcgcttgagcccaggagttcaaaaccagcctgggcaacatggtgaaactccatccctataaaaaaaaatacaaaagttagctgggcatggtggtgcatgcctgtagtctcagctacttgggaggctgaggcaggagaactcattgaactcagaagttctgggttgcagtgagcggagatcacgccactgtatttcagcctgggcaaaagagccagactgtatctcaaacaacaaaaacaaaaacaataacaacaacaaaaccccaaaaaacacattggctgcaaaataaacattggrttagactgaggtaaaagtggaagaaaatagaaattgtttggagaaaattgcgttagcctaggtgaaagagttgcaacagtttggactggcatgttggctatgagaagggagagtaatgggtggacttggggtattttgacggtaaaatt

SEQ ID NO: 352953 - DNA, 580 bp, Homo sapiens
taccaggcacaggctcttgctcttttctcttactttctcccaaatgaacagtgttcctctttgtgttgagtaacctggaactggggatgtggtgatgcaagcacccctgtggtcaccactactggggctgcacttggtcagacctgaagacagcacagcactgggtttttcccaaggcccttcccttcagggcagcgaactcccccaagcccgggaatgtctgtaaatgttttctgggagccagagattagactaactaaatcttagctatttatcttatgttctgttcyactgcggctaagctgacactcaacccacaatacaaagtccttcttgctctttcctctgctttccacaggcagaggagctctcactgtggccaccaccaccactggtccatgggcagttctacccaggccactgctaatattcactcaaaacccaaggctcttctatcagcttttcgttaatgttcccaggcctaggactcacccttcagggcagtggactcccgtctgggccaggacgtgttcagaaatgctgtccaagtgcctgggcctggacttggggaccccaagag

SEQ ID NO: 352954 - DNA, 580 bp, Homo sapiens
taccaggcacaggctcttgctcttttctcttactttctcccaaatgaacagtgttcctctttgtgttgagtaacctggaactggggatgtggtgatgcaagcacccctgtggtcaccactactggggctgcacttggtcagacctgaagacagcacagcactgggtttttcccaaggcccttcccttcagggcagcgaactcccccaagcccgggaatgtctgtaaatgttttctgggagccagagattagactaactaaatcttagctatttatcttatgttctgttctactgcggctaagctgacactcaacccacaatacaaagtccttcttgctctttcctctgctttccacaggcagaggagctctcactgtggccaccaccaccactggtccatgggcagttcyacccaggccactgctaatattcactcaaaacccaaggctcttctatcagcttttcgttaatgttcccaggcctaggactcacccttcagggcagtggactcccgtctgggccaggacgtgttcagaaatgctgtccaagtgcctgggcctggacttggggaccccaagag

SEQ ID NO: 352955 - DNA, 580 bp, Homo sapiens
taccaggcacaggctcttgctcttttctcttactttctcccaaatgaacagtgttcctctttgtgttgagtaacctggaactggggatgtggtgatgcaagcacccctgtggtcaccactactggggctgcacttggtcagacctgaagacagcacagcactgggtttttcccaaggcccttcccttcagggcagcgaactcccccaagcccgggaatgtctgtaaatgttttctgggagccagagattagactaactaaatcttagctatttatcttatgttctgttctactgcggctaagctgacactcaacccacaatacaaagtccttcttgctctttcctctgctttccacaggcagaggagctctcactgtggccaccaccaccactggtccatgggcagttctacccaggccactgctaatattcactcaaaacccaaggctcttctatcagcttttcgttaatgttcccaggcctaggactcacccttcagggcagtggactcccstctgggccaggacgtgttcagaaatgctgtccaagtgcctgggcctggacttggggaccccaagag

SEQ ID NO: 352956 - DNA, 604 bp, Homo sapiens
taaaactaggtactgtgatcctgcatctgatttttggttcttgtgatgccgtggtacatttctatgtgcagatasttgttaaaatttggtgttttgggtggtgaagtggggtgaattatgtagccttctattccaccatcttgctgtgttccctctcgttgttttaatttgcaattccctagtgatatgtgattttaagcgtcttactatgtgcttacctgttatctttatatcttctttggtgaaatcatatcttttgccagtttttaaaatcaagctttctgtttcttcagtcttgatttttgagagatctttgtttattttgaataatggtcttttatcagatgtgtcttttgcaaatatttcttctagtctgttgcatgtcttctcacgtcatgacattgtctttcacagagcagaagttttaaattttattaaagtccagactgccaattatttcttttctcgatcatgtatttggtgttgtatctaaaaagtcatcactatacccaaggtcttctaggtcgtctcatatgttatctttaatagttttagagttttgtatttcacatttaggtctatgatctattttgagctaattttt

SEQ ID NO: 352957 - DNA, 604 bp, Homo sapiens
taaaactaggtactgtgatcctgcatctgatttttggttcttgtgatgccgtggtacatttctatgtgcagatacttgttaaaatttggtgttttgggtggtgaagtggggtgaattatgtagccttctattccaccatcttgctgtgttccctctcgttgttttaatttgcaattccctagtgatatgtgattttaagcgtcttactatgtgcttacctgttatctttatatcttctttggtgaaatcatatcttttgccagtttttaaaatcaagctttctgtttcttcagtcttgatttttgagagatctttgtttattttgaataatggtcttttatcagatgtgtcttttgcaaatatttcttctagtctgttgcatgtcttctcacgtcatgacattgtctttcacrgagcagaagttttaaattttattaaagtccagactgccaattatttcttttctcgatcatgtatttggtgttgtatctaaaaagtcatcactatacccaaggtcttctaggtcgtctcatatgttatctttaatagttttagagttttgtatttcacatttaggtctatgatctattttgagctaattttt

SEQ ID NO: 352958 - DNA, 567 bp, Homo sapiens
cacctttttgtagatgttcttaatttagttaaagaacttccctctattctgttgagcgctttttatgatraatgagtattggaaatagttaaatgttttctctgcatctgttgataagagcatgcgatttttcttcttaagcttgttgatatggtggattgtattaattgatttttgaatgttaaaccagccttgcataactggcataaatatgactttgtcatggtatataattttttttttttttttgagagacagagttctactctgtcacccaggctggagtccagaggtatgatctgggctccctgcaacctctgtctcctgggttcaagcaattctcctgcctcagcctcctgagtagctaggactacaggcacatgccaccacacctggctaatttttgtatttttagtagagacggggtttcatcatgttgggcagactggtctggaactcttgacctcaagtgatccacccaccttggcctcccaaagtgctgagattacaggtgtgagccaccatgcccagcttctttttatacattgttgaatttaatttgcgaat

SEQ ID NO: 352959 - DNA, 632 bp, Homo sapiens
ttgatatggtggattgtattaattgatttttgaatgttaaaccagccttgcataactggcataaatatgactttgtcatggtatataattttttttttttttttgagagacagagttctactctgtcacccaggctggagtccagaggtatgatctgggctccctgcaacctctgtctcctgggttcaagcaattctcctgcctcagcctcctgagtagctaggactacaggcacatgccaccacacctggctaatttttgtatttttagtagagacggggtttcatcatgttgggcagactggtctggaactcttgacctcaagtgatycacccaccttggcctcccaaagtgctgagattacaggtgtgagccaccatgcccagcttctttttatacattgttgaatttaatttgcgaatattctgttgagggtttctacatctatgtttatgagatatattggtctatagttttcttttcttttaatgccttcacctgttttgctatcggggtaattctctccttatggaatgagtttggaagtattctctttgtttctatcttctgaaagaaattgtagatcactggcctaattccttttttaggtgtttggtagaattcaccaacaa

SEQ ID NO: 352960 - DNA, 566 bp, Homo sapiens
tagggattgggctgggaacaattcatcagagagtatcatagcactgtaggtctcaagagggcatttaatagcgcccrtggcaataacaaagagatgcagagaaattcactcaccagatcttttggcagaaaaaaataaattgatgaaggcaggttattgttgggcccatagggagaaatattcccacaggtaaggaaaagtaagcatcatactggagattcagagaaatcaacagtctataaaattagtttacagcaaaaaccaaaaaaaaaaaaaccttggttttccttagtaggtttctagtgaacataatttttaagaaccagaacaagaaagcaacaagagaaaattaatgaaataaaaagaaattatggcttccgagttccaagatggcagaataggaacagttccaatttacggctcccagcgtgagcgatgcagaagacgggtgatttctgcattccaactgaggtactgggttcatctcactggggcttgttggacagtgggtgcaggccacagagtgtgagccaaagcagggcgtggcatcgcctcacccgggaagt

SEQ ID NO: 352961 - DNA, 560 bp, Homo sapiens
gactcacatatatggacactgactttcaatgaagctgcaaaagcaagttagtggggaaaaatagtctctattataatgctgaaacaaatggatatccatataaaaataaatgcatttatacaaaaayctactcaaaattgatcatagacctaaatgtaaaaccaaaactaaaaaacatttaaaagcacacatagaagaaaatctttgtgaccctagttagtcagcagtttcttagataccacaaactgaattcaaaacattgtaagttgaccttcactaaattcaagtttttgttttttgaaagacagtattaagagaatgaaaagacaagccacagtaagaaaaaatattttcaagtcatatgtctaataaagaatttatccagaacatataaaaacaaccctcaaaactcaatactacgaaaacaaacaacagaatttttaaaaggacacaagacttaaacagaaacttcatctgttcaacagatggcaaacaaatgaaaagatgttcaacatcgttggtcattagaaaaatacaaagtaagtccacagtgagatacc

SEQ ID NO: 352962 - DNA, 449 bp, Homo sapiens
tcattcatgatttttatttattgaaaagtaaagcttatgcttttatgtctgatcccacacaaattgcctcctacatatcatttctaatcatctaaaaccaaggaagatcatggatcaaccactttggttttacaggtgaggaaactgagacaggggcttccttctagttgtgacttactgatcgaggtgggattggtacctaaatcctgaacctaaagttgacccacaacccctctgatttcctttcacctccagccaggatttctttctggcccattgtattcatctcacatcccacagacccatctggcctatcgataaaaggaaagctagaattcaacagaagacccctctccccatttgaggtccaatggaccattccagtgcgccatgaatttttaacwtctgcccagattttcaaggtaaacacatccctttctctccttctg

SEQ ID NO: 352963 - DNA, 592 bp, Homo sapiens
tctttaattattgattctctgctattcttttcattctcttcttctgagattcttcatcctctatgcctcctaaatgctgttgaatttttagaaatctctttttctgtgcctgttctggagggattctttaacatctttttaaaccatgaacttaatctttgatcatatcctatttaaaaaataatttaaattattcacttgtttaatgtccagagttatttagttattttttcctgttaaccaggtattagcaaagaytgttgtataacaaatcctaactcgcttatcttaaacgtgattatttaaatatttttatcagaatcttctaaaatatgcttcatctgaagtgaatttatatcttgatgtattttattggctttctctaaatattaaatttcttcatgtgttgtgtaattgtgtttctttttcatgagtaaactctaattctcatttacttagtttttttattaatttaaaaatttttgaaataattgtaggcttaaagtagagaagcaagcgcagtacaaagatttttttcctgaatcttttgggagtaagttacagacatgatcatccttgaatattgcagtgt

SEQ ID NO: 352964 - DNA, 565 bp, Homo sapiens
tcacttgcaactcatcttactaggacctggtgctcmattttgaaacctcagtctcttctcccctgtgtctctggaatatcttagttctcattactatgattttgtctcaacatcttctgtttcctgttaaggacaactactttgtatcctcatgtctgattagaaccagcttcttgctttgcctttttaatttttctttccatggggtatggctatctccaaccccaagtccattggcagaggcctaatgcctgttaatacttggattttgcacttgcctgaatatctattggtatgcctttctgttaggttctgcctatgtctcctcataaaatttttcttcctctatctccaaacatcaatccctttttaaaccgtttcttggacttttgttttagtagcttgttgcttgtaatacttctagttcttgttatttttccccctaagtatcaccgtaatatttggaatatatagaaaaccatcagaaaccactcctctgtgtactcctgttaatattgtggtgcattttgccccagcaccagggtgagtctagaccttggccttg

SEQ ID NO: 352965 - DNA, 634 bp, Homo sapiens
aagaaaagcaaggggccagatcatgtaggtcatacgggcttccataagaactttagcttttgttctgagaaaaatragaaacaaatgatggattttgaacagaagaacggcatgatctgacttatatcacaaaaggatcacctgttggctaagaaatagtaatagaggccgggcgtgggggctcatgcctgcaatcccagcactttgggaggctgaggcgggtggatcacgaggtcaggagatcgagaccatcctggctaataaggtgaaaccccgtctctactaaaaatacaaaaaattagctgggcgaggtggcgggtgcctgtagtcccagctactctggaggctgaggcaggagaatggcgtgaacccgggaggtggagcttgcagtgagcggagatggcgccactgcactcctacctaggcgacagagcaagattctgtctcagaaaaaaagaaagaaagaaacagtaatagaaggaaagaaataaaaagaagccaaagaaagacagacacatagtaaattcataataaagtgatatgattacacatacgcatacatcaataatcacaaacaatacaaatggactaaactctctagttagaagacaaatactgtcaataagggtaaaaa

SEQ ID NO: 352966 - DNA, 576 bp, Homo sapiens
gaatgcaataaagcagaccaacaaatgcatcataggagtcccagggaaaaagaaagaagaaatggggcagagagattgttctctctattggaataatgactgaaaacctcccagatttaatgaaagacatgcatataaatatccaagaatctcaacgaactccaaataagatgaactcaaaaagtctgacacaaagacacagcataattaaactgtcaaaagtcaaagggatgatttcttctctctcctttctctgttttgaaagcagagagaagaaatgatcacatatgaggggtcctcagtaagattaacatcagatctttcatcagaaactagaaggtagtgggctgatatattcaaagcacacacacrcacaacgctgagggagttcattaccactagacctgccctgcaagaaatgttcaaggaagtcctacaggttgaaacaaaagaatactcgtcagtaacctgaagccttatgaagaaataaagatctctgcaaaggtaaataacatgggcagttagaaaagctattattgtataacaacagtttatagctctactttttgtttttaa

SEQ ID NO: 352967 - DNA, 576 bp, Homo sapiens
gaatgcaataaagcagaccaacaaatgcatcataggagtcccagggaaaaagaaagaagaaatggggcagagagattgttctctctattggaataatgactgaaaacctcccagatttaatgaaagacatgcatataaatatccaagaatctcaacgaactccaaataagatgaactcaaaaagtctgacacaaagacacagcataattaaactgtcaaaagtcaaagggatgatttcttctctctcctttctctgttttgaaagcagagagaagaaatgatcacatatgaggggtcctcagtaagattaacatcagatctttcatcagaaactagaaggtagtgggctgatatattcaaagcacacacacacacaacgctgagggagttcattaccactagacctgccctgcaagaaatgttcaaggaagtcctacaggttgaaacaaaagaatactmgtcagtaacctgaagccttatgaagaaataaagatctctgcaaaggtaaataacatgggcagttagaaaagctattattgtataacaacagtttatagctctactttttgtttttaa

SEQ ID NO: 352968 - DNA, 576 bp, Homo sapiens
gtgacaaccaaaaatgtcctgagacactgccaaacctcccctgggatggggtaagaagcaaaattgcccccagttgagaaccaccaaaatagaccattttgggcctcttttttacttaaaaaaaaaaagtcaagccatttccttagcaccccaccttagcctccagagtgctgccttgcatctatctccaccacaaatgggaaaaggagaggaagcagaacacagattccaactacgctgcaggtccacagtgattacatttgccaatcaggaaaagtacagtgtgaaaagaaggttcctcccccttcccattaactattttgtcaatggcacattatttgttaaatagatcatattctagttgtaacccacttctgaaggatcragctgcaattttacagcttgacaccaatagtctctaaagacaatctggcttttatttcttgaacataatcttcacaaatgcaattagtgaagtaacatacaacccagttgttagaataactgacaaagagtctacaactgggtaacattcccacttgtgtggattcaagttcaaatgttttctcctttccg

SEQ ID NO: 352969 - DNA, 597 bp, Homo sapiens
cagatatgaaggccgcaacatttgattggtgttgaaagtatgtattaattagaagataatatattattggaatcaggagatccccaaatatcagtagcttaaataacagtaaagtttagttctctgtcacataacagttcaagatgagcacttcaggaagctctgctccaatggccatgtatcccaaggatgttgtcctcatccactaagtccaaggtatgtagaccaatccagggtccagctgcagaaagggaaagaggactccttctgccttagtctgtccctcccgaagtgaaatataacctccacccccgttccatgggagagaacagagccagatggcctcaagggattctgggaaatgcatccctacctagacagccatgggcccagctgcacatctattactatggaaaagggaaaatggactttttaagacagcctayggtctccagcaccaaagggacttcaattatgtaaaaaacaataagatagctctctattccccaaggatctgagagtcttagataacgctaaattctagccccaatgggccgggcgcagtggctcagggagccactttgggaggccgagacg

SEQ ID NO: 352970 - DNA, 588 bp, Homo sapiens
atgtaattttggtaaccattaaaatagtaaccaaaagattataaaaacttggaaaatataataaaagaactagaatatcaggtagttactactatgttaaaaaaaaaaaagatgagctygtgggcaagcactggtggtgtcattttacagaattgaaaataaagggatttttttcttttcttaaaatgttttggtgcagcatggtggctcccacctgtaatcctagcactttgggaggttgaggcaggaagattgccaaacccaggagtttgagacaagcctaggcaacctagtgagaccctgtctctacaaaaaatacaaaacttagccaggagtagttgtgcacctgtggtctgggccacttgggaggctgaggtgggaggatcacctaagcctgggaggttgaggttgcagtgagccgtgatcatgccattgcactccagcctgggcaacagagtgagacccagtctccagaaaaaaaaaaaaaaaaagctgttttacattgtctgtctgtgtattacatgtgcatgtttatgctcatgcatgtttatatatatgtaaagcactcatgaagtctcacaaagagga

SEQ ID NO: 352971 - DNA, 588 bp, Homo sapiens
atgtaattttggtaaccattaaaatagtaaccaaaagattataaaaacttggaaaatataataaaagaactagaatatcaggtagttactactatgttaaaaaaaaaaaagatgagctcgtgggcaagcactggtggtgtcattttacagaattgaaaataaagggatttttttcttttcttaaaatgttttgrtgcagcatggtggctcccacctgtaatcctagcactttgggaggttgaggcaggaagattgccaaacccaggagtttgagacaagcctaggcaacctagtgagaccctgtctctacaaaaaatacaaaacttagccaggagtagttgtgcacctgtggtctgggccacttgggaggctgaggtgggaggatcacctaagcctgggaggttgaggttgcagtgagccgtgatcatgccattgcactccagcctgggcaacagagtgagacccagtctccagaaaaaaaaaaaaaaaaagctgttttacattgtctgtctgtgtattacatgtgcatgtttatgctcatgcatgtttatatatatgtaaagcactcatgaagtctcacaaagagga

SEQ ID NO: 352972 - DNA, 588 bp, Homo sapiens
atgtaattttggtaaccattaaaatagtaaccaaaagattataaaaacttggaaaatataataaaagaactagaatatcaggtagttactactatgttaaaaaaaaaaaagatgagctcgtgggcaagcactggtggtgtcattttacagaattgaaaataaagggatttttttcttttcttaaaatgttttggtgcagcatggtggctcccacctgtaatcctagcactttgggaggttgaggcaggaagattgccaaacccaggagtttgagacaagcctaggcaacctagtgagaccctgtctctacaaaaaatacaaaacttagccaggagtagttgtgcacctgtggtctgggccacttgggaggctgaggtgggaggatcrcctaagcctgggaggttgaggttgcagtgagccgtgatcatgccattgcactccagcctgggcaacagagtgagacccagtctccagaaaaaaaaaaaaaaaaagctgttttacattgtctgtctgtgtattacatgtgcatgtttatgctcatgcatgtttatatatatgtaaagcactcatgaagtctcacaaagagga

SEQ ID NO: 352973 - DNA, 588 bp, Homo sapiens
atgtaattttggtaaccattaaaatagtaaccaaaagattataaaaacttggaaaatataataaaagaactagaatatcaggtagttactactatgttaaaaaaaaaaaagatgagctcgtgggcaagcactggtggtgtcattttacagaattgaaaataaagggatttttttcttttcttaaaatgttttggtgcagcatggtggctcccacctgtaatcctagcactttgggaggttgaggcaggaagattgccaaacccaggagtttgagacaagcctaggcaacctagtgagaccctgtctctacaaaaaatacaaaacttagccaggagtagttgtgcacctgtggtctgggccacttgggaggctgaggtgggaggatcacctragcctgggaggttgaggttgcagtgagccgtgatcatgccattgcactccagcctgggcaacagagtgagacccagtctccagaaaaaaaaaaaaaaaaagctgttttacattgtctgtctgtgtattacatgtgcatgtttatgctcatgcatgtttatatatatgtaaagcactcatgaagtctcacaaagagga

SEQ ID NO: 352974 - DNA, 598 bp, Homo sapiens
cagactttttgaaccaaaatggttttgagaaaggctgtggcttatccctcagctctcgttcgaggcagcmgaggggcttggctcatcacgcgggtgtcagatccacgtctcccggcttcccattctgctggctggcacacgggctggtagcatttccacctcttctagaataccactgatgacacgtcatgaactcagcattggaagtttttctagtgttcatctccctatctctggtgctcgccaaagacacaaggaacagaaataactaactgaaggatgaacccaattctaagtatctgtttttactctgtagcacctcatgaagacgcgcgcttaactccggaggagctagaaagagcttcccttctacagatactgccagagatgctgggtgcagaaagaggggatattctcaggaaagcaggtaaaatgcttctcatgtttatagcgtgtctgatttaattgctactgaacttaccgtctgtcctcatctagaagaggtaaagctctattttggaatataaagatgagctatataaaataagtaattaccaacactctcccctcccggcctgtgcaaccttcttttccccag

SEQ ID NO: 352975 - DNA, 598 bp, Homo sapiens
cagactttttgaaccaaaatggttttgagaaaggctgtggcttatccctcagctctcgttcgaggcagcaraggggcttggctcatcacgcgggtgtcagatccacgtctcccggcttcccattctgctggctggcacacgggctggtagcatttccacctcttctagaataccactgatgacacgtcatgaactcagcattggaagtttttctagtgttcatctccctatctctggtgctcgccaaagacacaaggaacagaaataactaactgaaggatgaacccaattctaagtatctgtttttactctgtagcacctcatgaagacgcgcgcttaactccggaggagctagaaagagcttcccttctacagatactgccagagatgctgggtgcagaaagaggggatattctcaggaaagcaggtaaaatgcttctcatgtttatagcgtgtctgatttaattgctactgaacttaccgtctgtcctcatctagaagaggtaaagctctattttggaatataaagatgagctatataaaataagtaattaccaacactctcccctcccggcctgtgcaaccttcttttccccag

SEQ ID NO: 352976 - DNA, 598 bp, Homo sapiens
cagactttttgaaccaaaatggttttgagaaaggctgtggcttatccctcagctctcgttcgaggcagcagaggggcttggctcatcacgcgggtgtcagatccacgtctcccggcttcccattctgctggctggcacacgggctggtagcatttccacctcttctagaataccactgatgacacgtcatgaactcagcrttggaagtttttctagtgttcatctccctatctctggtgctcgccaaagacacaaggaacagaaataactaactgaaggatgaacccaattctaagtatctgtttttactctgtagcacctcatgaagacgcgcgcttaactccggaggagctagaaagagcttcccttctacagatactgccagagatgctgggtgcagaaagaggggatattctcaggaaagcaggtaaaatgcttctcatgtttatagcgtgtctgatttaattgctactgaacttaccgtctgtcctcatctagaagaggtaaagctctattttggaatataaagatgagctatataaaataagtaattaccaacactctcccctcccggcctgtgcaaccttcttttccccag

SEQ ID NO: 352977 - DNA, 594 bp, Homo sapiens
acagggtctcactctgtcacccaggctggagtgcaatggtgggatcatagctcactacagcctttaactcctgggctcaagagatcctccagcctcaacctcctaggtagctggggaccacaggcaagcaccatcatgcccagctaattttgtttcttttttgtggagataaagtcttactatgttgtccaggctgaccatgaactcctggcctcaagtggtcctccagcctcagcctcccaaagcactgagattacaagtgtgagtcacctgccctcatcaattctcacagattttaaaccctagtctgacactgtaagactaacaagcctttagacactgcttcattattcagcacttaatagttctgtgctcattgtgtaattggaaatcaaaggaagcagacagtgaaaaattagggaaagacttcacaaaggaggtgatattctagctgaaagttgaaacttaggcaacacatagactgacagtaaatgagatttaacagatataaaggaatctgatgggagtacgggtataaggacaggcatgagaaarcctgctgagaagggaattaacaggaatgacttgggcaac

SEQ ID NO: 352978 - DNA, 618 bp, Homo sapiens
catcacttctagtgctaacagacaggacacatgttcctgaatgcagacccagtaggtaaggtgtggccagtctgcaaaccatcgagagtgcaaacaccactgatacttaacggtgtccgggtgtacctcatgtacactagatagacccggagatcgtctgagattaagctgcacttatgttaggccagtaactcagaactttttgcagatgcttaaggagatttaatgcctgagggtaaaggaaaacccatcttccagggcttttggagggctcctaatggttatgagaaaatggacagaagatttggttaactaagacttgtggcgtgtggagaagattcttgcattctttatygtggaatgactgtaggtccaaagaggatataagttaaaaaaaaaaaccccatactgaagtatttgtttatttctgtagatttctgagaatggctagttgcaaatggtccgtaactgactttgggaacccacagctcattttctggcccctactatttgccaggcacataaggtgctgggaatgcagcaataaaacagtcactgccctcaaggaactcctacattttattggtgggagacagataaattaaataaattatacag

SEQ ID NO: 352979 - DNA, 569 bp, Homo sapiens
ttaattacaggttggtaaatggttgcaggctatgttcttctacctgaagcagatcccacgttaccttatcccatgttactttgatgctatattaattggtgcatataccactcttctggatacagcatggaagcagatgtcaaggtatatccaacaaagcttgaataaatgggcatatctgtgttgaaactatatrcagagtcacttcatacatgttcttaaaaaaccaaaccataaagaattgtcatagaactgaaaaggcttgtaggtggatagtaaatttattagcatcctttagtctgtgtagcatacaaaaacaaacttgaatattataaaatctgttctaaaagctaataaaacatattgataagaatattgttttatattgtttctatgtattcactgacttattgagttaattgataaagtttctgaaatctacatgtacaatttttctaatttttcatcaattaggagaaaaaattccactattactatgaatgaaatttgcctttaatgatgaatttccctaaaatgaaaccacaaatttaagtgtactcgtgagagcc

SEQ ID NO: 352980 - DNA, 598 bp, Homo sapiens
tgctctaaggatttacctgagtcccatctttctatgaggctaatcaaagatgcaggaatatatcgggagttcagcctttccagtgagtaggatctaaatctaggtttaatatccaaagtgccctgggcatatgtgtttccataagtaatctggctgtgccagcctctgtccctgctttgttgaccctgtttgtgcacmtgggctttagcctgggcctcccttcctactattctacagaaacattagagacctaccatgataacttttgtagcctgttctaagctttttctctgggatatgagatcctctttctcacacctcagtcattggctggagttctcatgaccaaaaggattttttgaaaccaccatgacacctcatctgaattcaaatattgcctctggtctaagtcttctacacctcactgaacaacggaggtttctttgtgctgagatgccaaaccagaggtggaggagaggtggggaataaagactgaagtatcagaagatggcggcgtgggcaagttcatactgagaaatagtctggtttagggtcaaatactggagcatactttactttggacagcaagttacccatc

SEQ ID NO: 352981 - DNA, 598 bp, Homo sapiens
tgctctaaggatttacctgagtcccatctttctatgaggctaatcaaagatgcaggaatatatcgggagttcagcctttccagtgagtaggatctaaatctaggtttaatatccaaagtgccctgggcatatgtgtttccataagtaatctggctgtgccagcctctgtccctgctttgttgaccctgtttgtgcacctgggctttagcctgggcctcccttcctactattctacagaaacattagagacctaccatgataacttttgtagcctgttctaagctttttctctgggatatgagatcctctttctcacacctcagtcattggctggagttctcatgaccaaaaggattttttgaaaccaccatgacacctcatctgaattcaaatattgcctctggtctaagtcttctacacctcactgaacaacggaggtttctttgtgctgagatgccaaaccagaggtggaggagaggtggggaataaagactgaagtatcagaagatggmggcgtgggcaagttcatactgagaaatagtctggtttagggtcaaatactggagcatactttactttggacagcaagttacccatc

SEQ ID NO: 352982 - DNA, 548 bp, Homo sapiens
  misc_feature (1)...(548): n = A,T,C or G
ctttactttggacagcaagttacccatcaagagctatttctataaattgatcgattctgcacagaactactgtattagttggttctcacactgctrtgaagaaatacccgacactgggtaatttataaaggaaaaagtttttattgactcacagttccacatggctggggaagcctcaggaaacttacaatcctggcagaaggcaaaggaaaagcaggcaccttcttcaaagggtggcaggacagagtgagtgcaagcaagcgaaatgccaaatgcttataaaaccatcgtatctgttgagacttactcactgtcgtgagaacagtatgggtgaaactgccctcatgatccaattacctcccccaatcccacccttgacacatggggattatggggattatggggactacaaatcaagatgagattttgggtcaggacacagccaaagcatatcaactatcctcctcccttacccacttgttttttggtcgaaattggacacgcttcacaaccagactggcttcagttannnnnnnnnnnnnnnnnnn

SEQ ID NO: 352983 - DNA, 567 bp, Homo sapiens
taattctttaggcaagtaatgatgaaaacctaactaggagaggaaagattagagaaatatttaagagaataggtgtgaagatattttagctaatggggctgtctccatcagtttaggctgctgtaacaataccataggctaaatggcttaaataagaaacatttattggtcacagtcctggagtctgggaagtccaagatgaaggtgctatcagattcagtgtctagtgagggagtgcttcctggcttgtagacagccaccttctcatatcatcacatggccaagayagaacagctctcatctctttctcttcttgtaagggcactaatcccatcttgggggctctaccctcaagaccttatctaaacctaattacctcacaaagcctctacctcataataccatcccactgggagttaggttttcgacatatgaattttggcagatcacaaatatatagtccctaatgggcagcctagaaggaggaatcaaagagaacccaaggttcctgaccttggtggtgctgagcattagggcagatgaagaaattgggatgcaggaaatggt

SEQ ID NO: 352984 - DNA, 567 bp, Homo sapiens
taattctttaggcaagtaatgatgaaaacctaactaggagaggaaagattagagaaatatttaagagaataggtgtgaagatattttagctaatggggctgtctccatcagtttaggctgctgtaacaataccataggctaaatggcttaaataagaaacatttattggtcacagtcctggagtctgggaagtccaagatgaaggtgctatcagattcagtgtctagtgagggagtgcttcctggcttgtagacagccaccttctcatatcatcacatggccaagacagaacagctctcatctctttctcttcttgtaagggcactaatcccatcttgggggctctaccctcaagaccttatctaaacctaattacctcacaaagcctctacctcataataccatcccactgggagttaggttttcgacatatgaattttggcagatcacaaatatatagtccctaatgggcagcctagaaggaggaatcaaagagaacccaaggttcctgaccttggtggygctgagcattagggcagatgaagaaattgggatgcaggaaatggt

SEQ ID NO: 352985 - DNA, 551 bp, Homo sapiens
tttttacaatgactatttctgacatttgattttgattctagttagacttccttactgcctccaaaaaatgtggtggaaaaacatgataaactttattaggaaaaactaacgcttatggagtttctgtggagagagcagtccccccaaaagtccattctcacttttttatttctacctttgattctcccattgctccaattcaaatcatgctcattcagaatccctctttttccataatgccttatttacttactgtgtcagccttaagggtctgatttgaagctatggatagtttggtgatcaaaacctcacaaagtaggccagagaccatacttttcacctctcattttctgtaactttggcaagtgtcttaatcagtgccctattttacatatggggacaatagtacctcccatagttccctaggttgttctgaggaatgcatactaagtccttgacatgatgtgttgtaagcccttagtarttgttaactcttctactattatttcttccatacctctaaattactatagcgaaatgcagttttaaaa

SEQ ID NO: 352986 - DNA, 603 bp, Homo sapiens
tgctacgtttgtctcttagatgaaccattcctaataccttcaggtttcttccaggcacataaccaatacaactaggattgaaaatctccagactacgacaaactcagaatattttcctacaataattgtaatatgttgagtaaatgcatctggttcatatttagctataacttcttatttaacaaaatcaaaaatagtcattggagaggatatttttcgcctttcaattgatagtcaccatgtcctttggattatgtagctaaaaaacaaaactattaaaatcacagccatcatagttacttcagaattgttgtggctctgagtggataatagtaataactattgagcaataactattgaataataacaatgaacaattatttcaagcctgtcactcatcatagtgagaggatgaccaaaagaaaaaatggtttctgctaratgatcttacagtcaagttcagagaccaagaatagcaggaaacaattagaaaacaaagctggaaatttgtggcattcactacaagttaaagtacatagaagtgaaaggatagcatgagatggagaatttaataagggcttcatgaaggaagtatgccttgaa

SEQ ID NO: 352987 - DNA, 462 bp, Homo sapiens
ttggtaagagttcttcctggcttgcagacagctgccttctcgttgtattttcactagggagaaaaaagaaggtcgagtgtctcttaattggataaatttttaaaaccaaaattattgaaggtgattctaatacacctttctcagtaactcatataaatataccggatgcattattaagattattagtgtatttaaaaatatacaatttctggctgggcacagtggctcatgcctataatcctagcactttgggaggycaaggcgggcggatcatgaggttaggagatcaagaccatcctggctaccacagtgaaatcccatctctgctaaaactacaaaaaaaaaaaattagccggatgtggtggcgggcacctatagtcccagcaactagggaggctgaggcaggagaatggtgtgaacccaggaggtggagtttgcagtgagccgaaattgtgccactgc

SEQ ID NO: 352988 - DNA, 444 bp, Homo sapiens
ctgaacaatgccaagatatacattgtctgatttcttctttcatttagatatttgyatgaattttaaagcttttgtatattttttattttattaaaaataattttctgtcttgcttaatatttacttatttaaaaacataaaatatttaatctacttcatatcatccaaatatatgaattagctcatttcctcttctctatatatgatcttgtgtctttattcagacaaaatagttctgtcatttaaatgcttccttatctttagcatagtgtgatttttctttttaaaattattatagttcaataatatatcaagctggtgggagaaaagcaaaggtgaattaaactatgtttcagtaaaatgtaaaaaaaaatctgattttaagtaattactaactatgtacagtcacgaactcatgaaccaacagtatagaagaaataattg

SEQ ID NO: 352989 - DNA, 633 bp, Homo sapiens
agtaactttattgttaaatattataattttaaattattattgatggtttttacaatatgtattgtattagtaatacaccttaacacatcaaaagtatgtcagcccataatgatgttgttttactcatttattttagttgcatgtttgaaacttttatgttcagctaatagaaaaaaaaaaacaagacagagaaatacaaatatagcaaatatcgtccaagcaataatccccgactgaacaatgccaagatatacattgtctgatttcttctttcatttagatatttgtatgaattttaaagcttttgtatattttttattttattaaaaataattttctgtcttgcttaatatttacttatttaaaaacataaaatatttaatctacttcataycatccaaatatatgaattagctcatttcctcttctctatatatgatcttgtgtctttattcagacaaaatagttctgtcatttaaatgcttccttatctttagcatagtgtgatttttctttttaaaattattatagttcaataatatatcaagctggtgggagaaaagcaaaggtgaattaaactatgtttcagtaaaatgtaaaaaaaaatctgattttaagtaattactaactatg

SEQ ID NO: 352990 - DNA, 488 bp, Homo sapiens
taattactaactatgtacagtcacraactcatgaaccaacagtatagaagaaataattggtgcgatttgggcaaactagaaaaagccaagaaaaatgaaaagatctttttatatgatcattcttaattagagccactgacagtgaatgtaagaatgtttaatgaatgtgacctataaagctttgctagattctgactgactcagaggttatatattacttctcacacttctttattaaaattgttttgtttttaacttaagcatcatttttataactaaagtgacagttatacatgaacaagtataatagtttgtctaaaatattttgtaccaaaacaggaagactgaagtgtgaataatctcagtaaaaaagtataaaatatattttagacatgcagtcactcattgaaatgtacacatgaagtaaatcaagtgacctcattattgaataaattgaccgagaaatatttgaggttgaattaatttct

SEQ ID NO: 352991 - DNA, 488 bp, Homo sapiens
taattactaactatgtacagtcacgaactcatgaaccaacagtatagaagaaataattggtgcgatttgggcaaactagaaaaagccaagaaaaatgaaaagatctttttatatgatcattcttaattagagccactgacagtgaatgtaagaatgtttaatgaatgtgacctataaagctttgctagattctgactgactcagaggttatatattacttctcacacttctttattaaaattrttttgtttttaacttaagcatcatttttataactaaagtgacagttatacatgaacaagtataatagtttgtctaaaatattttgtaccaaaacaggaagactgaagtgtgaataatctcagtaaaaaagtataaaatatattttagacatgcagtcactcattgaaatgtacacatgaagtaaatcaagtgacctcattattgaataaattgaccgagaaatatttgaggttgaattaatttct

SEQ ID NO: 352992 - DNA, 488 bp, Homo sapiens
taattactaactatgtacagtcacgaactcatgaaccaacagtatagaagaaataattggtgcgatttgggcaaactagaaaaagccaagaaaaatgaaaagatctttttatatgatcattcttaattagagccactgacagtgaatgtaagaatgtttaatgaatgtgacctataaagctttgctagattctgactgactcagaggttatatattacttctcacacttctttattaaaattgttttrtttttaacttaagcatcatttttataactaaagtgacagttatacatgaacaagtataatagtttgtctaaaatattttgtaccaaaacaggaagactgaagtgtgaataatctcagtaaaaaagtataaaatatattttagacatgcagtcactcattgaaatgtacacatgaagtaaatcaagtgacctcattattgaataaattgaccgagaaatatttgaggttgaattaatttct

SEQ ID NO: 352993 - DNA, 488 bp, Homo sapiens
taattactaactatgtacagtcacgaactcatgaaccaacagtatagaagaaataattggtgcgatttgggcaaactagaaaaagccaagaaaaatgaaaagatctttttatatgatcattcttaattagagccactgacagtgaatgtaagaatgtttaatgaatgtgacctataaagctttgctagattctgactgactcagaggttatatattacttctcacacttctttattaaaattgttttgtttttaacttaagcatcatttttataactaaagtgacagttatacatgaacaagtataatagtttgtctaaaatattttgtaccaaaacaggaagactgaagtgtgaataatctcagtaaaaaagtataaaatatattttagacatgcagtcaytcattgaaatgtacacatgaagtaaatcaagtgacctcattattgaataaattgaccgagaaatatttgaggttgaattaatttct

SEQ ID NO: 352994 - DNA, 569 bp, Homo sapiens
aaaccacatttagtttgtacatatattttagagagaatatttgtgaagtgttttattttttaaaaaaaaagctaactaaagaactaaaagaaccacaagcaaaccaaaatataaaaaataaacatttttctagctctgcaatgtaagacacatactttaaattattcaaatatacctaaataggaatctaatttaatttcaagtttatgctatttttgaagtaagaaacatgctgtgtcatttatgaaactagaaatatatgattgaaaaagagtctacatagtgagagaacttgaccataatctttgaaagtaaaatcaaacgaaagcttatgtaaaaagtgtgattattaggctttaatttttaaaatatgataataaaataagagatattgaatgttgctaaaatttttaaatgtgttatgaaaacagcatacatggaatattatacatttattsaaattatgttttaaaaataatgacataaacatacttcttatacattatgattgaaatgctgaggttttatttaatacataaccaataaagctaagaaacccttaaaaatca

SEQ ID NO: 352995 - DNA, 521 bp, Homo sapiens
cccttaaaaatcaagatgtactccttaaataaaatattgagtgagtacttataaggcaataagttttgtaaaatatgctaaaaatttttaaaaattctctacatattcgagacatgcttgaagatactgtgggttttgttccagaccatcacaataaagcaaaaatcacaataaaacaagtcaacaaaaatttttggtttctcaatgcatataaaagttatgtttacattgtactgtaaagkgtgtaatagtattatggttaaacaaataatgtacttaccttaattttaaaaagctttattgctaagtaatgttaatcatctgagccttcagtgtgtcataatgttttggtttctggagggtcttgcctcagtactggtggttgctgactgatcagggttgtgattgctaaaggttggggtggctgtgggaatttctttttcttttttttttttttttttttttgagtcagagtctcactccatcgcccagtctggagtgcaatggtgccatctcggctc

SEQ ID NO: 352996 - DNA, 521 bp, Homo sapiens
cccttaaaaatcaagatgtactccttaaataaaatattgagtgagtacttataaggcaataagttttgtaaaatatgctaaaaatttttaaaaattctctacatattcgagacatgcttgaagatactgtgggttttgttccagaccatcacaataaagcaaaaatcacaataaaacaagtcaacaaaaatttttggtttctcaatgcatataaaagttatgtttacattgtactgtaaagggtgtaatagtattatgkttaaacaaataatgtacttaccttaattttaaaaagctttattgctaagtaatgttaatcatctgagccttcagtgtgtcataatgttttggtttctggagggtcttgcctcagtactggtggttgctgactgatcagggttgtgattgctaaaggttggggtggctgtgggaatttctttttcttttttttttttttttttttttgagtcagagtctcactccatcgcccagtctggagtgcaatggtgccatctcggctc

SEQ ID NO: 352997 - DNA, 521 bp, Homo sapiens
cccttaaaaatcaagatgtactccttaaataaaatattgagtgagtacttataaggcaataagttttgtaaaatatgctaaaaatttttaaaaattctctacatattcgagacatgcttgaagatactgtgggttttgttccagaccatcacaataaagcaaaaatcacaataaaacaagtcaacaaaaatttttggtttctcaatgcatataaaagttatgtttacattgtactgtaaagggtgtaatagtattatggttaaacaaataatgtacttaccttaattttaaaaagctttattgctaagtaatgttaatcatctgagccttcagtgwgtcataatgttttggtttctggagggtcttgcctcagtactggtggttgctgactgatcagggttgtgattgctaaaggttggggtggctgtgggaatttctttttcttttttttttttttttttttttgagtcagagtctcactccatcgcccagtctggagtgcaatggtgccatctcggctc

SEQ ID NO: 352998 - DNA, 521 bp, Homo sapiens
cccttaaaaatcaagatgtactccttaaataaaatattgagtgagtacttataaggcaataagttttgtaaaatatgctaaaaatttttaaaaattctctacatattcgagacatgcttgaagatactgtgggttttgttccagaccatcacaataaagcaaaaatcacaataaaacaagtcaacaaaaatttttggtttctcaatgcatataaaagttatgtttacattgtactgtaaagggtgtaatagtattatggttaaacaaataatgtacttaccttaattttaaaaagctttattgctaagtaatgttaatcatctgagccttcagtgtgtcataatgttttggttkctggagggtcttgcctcagtactggtggttgctgactgatcagggttgtgattgctaaaggttggggtggctgtgggaatttctttttcttttttttttttttttttttttgagtcagagtctcactccatcgcccagtctggagtgcaatggtgccatctcggctc

SEQ ID NO: 352999 - DNA, 544 bp, Homo sapiens
catgatgatgatcttttcaaaactaagtaagttaagtacattatttaaaagattttagtcctgttttacctgttatttcactactaaaggatttttctactctgagttcactttatcattctttttttcagaattttatctgtgcttattttaaataaacatgaaaattactacatttaagataaatgtccttttatctttcaattatttttccagagyagtgctttaagtattcatataattatgagtttctaaaattttacatattttataacagttcattctgtgtgagttttcttttaatttttataagaaatatcttgagagcagtgatacataatatattatgcaaaacctgaaaaaaatagtaagtgatttccagcatcaaaggtcatttattcttctgagagcctagtgaccttcaagttaatttcctattttatggatttttataaattacttagtatgtgggttatgtgtaaagaaagcacaccacgtaactttaaattgttctcaaatcattttgtaagtcatcagataagta

SEQ ID NO: 353000 - DNA, 572 bp, Homo sapiens
catttctcaccagcagtaattctactgtgaaatggctcattactggatctctggaactttagtttctcccattgaccttactatcatgaggaaaggattagttctctgctagtgctaatactttcatcactaktccttgctttgtttcttagttattttcaccctgatgttacctgctccacataataaaatcagattgtttgtaagtcctagactagtttctgccttgctggctatatcctcaatgaagagcaaatatttacctcatgggagaaatagacctaatggatttaggagtttagcagtttacagggcacaaattaaatctcaataaatatttactctgagtaaaaaagtacaaaatagaagtacaattcttttttattgtcgttgatttcagagcaaaatgaatcaacagttgacaaattaaggattaacttatgcaagattattcaacaaatatttattattcatttgctctatgccagaaatgtgtcttcatgccaggttaagaaaaagagaaaacagaaaaaaaaatagccgtccctgactaaaagagcttatgttctttc

SEQ ID NO: 353001 - DNA, 572 bp, Homo sapiens
catttctcaccagcagtaattctactgtgaaatggctcattactggatctctggaactttagtttctcccattgaccttactatcatgaggaaaggattagttctctgctagtgctaatactttcatcactagtccttgctttgtttcttagttattttcaccctgatgttacctgctccacataataaaatcagattgtttgtaagtcctagactagtttctgccttgctggctatatcctcaatgaagagcaaatatttacctcatgggagaaatagacctaatggatttaggagtttagcagtttacagggcacaaattaaatctcaataaatatttactctgagtaaaaaagtacaaaatagaagtacaattcttttttattgtcgttgatttcagagcaaaatgaatcaacagttgacaaattaaggattaacttatgcaagattattcaacaaatatttattattcatttgctctatgccagaaatgtgtcttcatgccaggttaagaaaaagagaaaacagaaaaaaaaatagcygtccctgactaaaagagcttatgttctttc

SEQ ID NO: 353002 - DNA, 603 bp, Homo sapiens
cccatattgttgctttcacamacaatgacaaggttttgggttttactttgagaaggggaacaattagaaagctatgagcaagactgtgaaattatttgatttatgttttataatcattctgactcctggctgaaaaacagcctctaggaatgaaagtgagagaaacggggtcatcatttatgaagctattccaatgatccagtgctttggcagttgcctggacatggctagtaagaggtaaaagtaatctgatacatcttaaaggcaggtgttcatggatttgatatggcaaatgaaagaaagaagccactatgtgttatattccttgagccaaaattgaggtgtaaaataaacatgcccacataaatggttgattatgttcttaaatgaaggagaaaatagttgcagtgatgttaagtcatcaaccatttaaaatgttgcttttgaaagagatgaatcaagggagggatggatgtgaattttccttgcctaaaaagctagtgaaaattaagagtgacatgaacaggattaaaactttattttatagtggtactgagatgaaacatcacactatctgacttcatagcttaaaaatataatcac

SEQ ID NO: 353003 - DNA, 639 bp, Homo sapiens
tagtgaaaattaagagtgacatgaacaggattaaaactttattttatagtggtactgagatgaaacatcacactatctgacttcatagcttaaaaatataatcaccccaccaacttctcactcttttcaaggattttgtgagtaaccagctttaatttggaaaacctagacttctacatacagattgttatgtttgtgagtatgattatttctatcattttgttttacattgtgctttatcattcaataattaatatctatcattttccattaactaatttattttatgaccatttattattattattaccctatggtagtcaataattactgatacatattccattgttttttgggatttgatatagaatcagagaagtttgttgccaactcctttttagttgaatatatattgtttttgtcttatatttagtttttgtaaaacttcagattttccatcttgccccactatttattgctaaaaatcatatccaaatatrgcaaggtttaggaacacacacagttaatgaacacatgttaaagtataataacacagaatacatttttgaaagtaagtttattaaaattagcaatatatttctagttatatgcataaggatataccaacatggattttgc

SEQ ID NO: 353004 - DNA, 639 bp, Homo sapiens
tagtgaaaattaagagtgacatgaacaggattaaaactttattttatagtggtactgagatgaaacatcacactatctgacttcatagcttaaaaatataatcaccccaccaacttctcactcttttcaaggattttgtgagtaaccagctttaatttggaaaacctagacttctacatacagattgttatgtttgtgagtatgattatttctatcattttgttttacattgtgctttatcattcaataattaatatctatcattttccattaactaatttattttatgaccatttattattattattaccctatggtagtcaataattactgatacatattccattgttttttgggatttgatatagaatcagagaagtttgttgccaactcctttttagttgaatatatattgtttttgtcttatatttagtttttgtaaaacttcagattttccatcttgccccactatttattgctaaaaatcatatccaaatatarcaaggtttaggaacacacacagttaatgaacacatgttaaagtataataacacagaatacatttttgaaagtaagtttattaaaattagcaatatatttctagttatatgcataaggatataccaacatggattttgc

SEQ ID NO: 353005 - DNA, 570 bp, Homo sapiens
tatatattttgttaagttagaaactcatattcaatcaaaggaaataaaagttccccctaatttctaggaatataaaaaaataggtacacatagcttagataatattttctatatttgttcaagtaaatcagtttagtaattgtttgaaatacttccaattgatatgagtccaattttagaaggaattttagttggaagtgttattctctttatgaagatgtaaatggctstgtttactggccaatatttacatatacatacagtcaatgaatgttaatttgcacatagtggcatatataattcaaagttcattttattagttaatttagatatggttcaatgagagtttcaaactgagggcatagagtcatataacatactctagaacaacttctcacaaaaactaaaataaattgctttaccatgtttgcctttgtatttcactttttctgttctgaagaatgagcatggtaaaatttacatatatctaatgcatataatgggcaatgtatgaattattttacaaattactcataaccagaagagttctgttggattttaccatatggc

SEQ ID NO: 353006 - DNA, 570 bp, Homo sapiens
tatatattttgttaagttagaaactcatattcaatcaaaggaaataaaagttccccctaatttctaggaatataaaaaaataggtacacatagcttagataatattttctatatttgttcaagtaaatcagtttagtaattgtttgaaatacttccaattgatatgagtccaattttagaaggaattttagttggaagtgttattctctttatgaagatgtaaatggctgtgtttactggccaatatttacatayacatacagtcaatgaatgttaatttgcacatagtggcatatataattcaaagttcattttattagttaatttagatatggttcaatgagagtttcaaactgagggcatagagtcatataacatactctagaacaacttctcacaaaaactaaaataaattgctttaccatgtttgcctttgtatttcactttttctgttctgaagaatgagcatggtaaaatttacatatatctaatgcatataatgggcaatgtatgaattattttacaaattactcataaccagaagagttctgttggattttaccatatggc

SEQ ID NO: 353007 - DNA, 570 bp, Homo sapiens
tatatattttgttaagttagaaactcatattcaatcaaaggaaataaaagttccccctaatttctaggaatataaaaaaataggtacacatagcttagataatattttctatatttgttcaagtaaatcagtttagtaattgtttgaaatacttccaattgatatgagtccaattttagaaggaattttagttggaagtgttattctctttatgaagatgtaaatggctgtgtttactggccaatatttacatatacatacagtcaatgaatgttaatttgcacayagtggcatatataattcaaagttcattttattagttaatttagatatggttcaatgagagtttcaaactgagggcatagagtcatataacatactctagaacaacttctcacaaaaactaaaataaattgctttaccatgtttgcctttgtatttcactttttctgttctgaagaatgagcatggtaaaatttacatatatctaatgcatataatgggcaatgtatgaattattttacaaattactcataaccagaagagttctgttggattttaccatatggc

SEQ ID NO: 353008 - DNA, 439 bp, Homo sapiens
aagtttatgctaaatttaaatgaaatgaaataacaaagtagtttgaaatgaacattccattgattatttttaaaattttatttattaacaaagtagcttatactaactgcccactgtctatcccaatagttacagcaataacatatagttaacatttgtaattaaatatttcatttcatacaaatagtattttaaaattcaagtgttgatttttaagcctttgaatgtttgrctgtttaaaatttaagtgcatataaaaattgtagaaaagggtcattattaataaaatattcaaaatatggtaaaatttgcaagatgatttaatatatgcaaattgacaagtgatgtgaatagtacatttgaatagagaaaatatgtacataaatgaatggtatttcagaatctaagcaaattgatgactacattatgtacttgtccc

SEQ ID NO: 353009 - DNA, 439 bp, Homo sapiens
aagtttatgctaaatttaaatgaaatgaaataacaaagtagtttgaaatgaacattccattgattatttttaaaattttatttattaacaaagtagcttatactaactgcccactgtctatcccaatagttacagcaataacatatagttaacatttgtaattaaatatttcatttcatacaaatagtattttaaaattcaagtgttgatttttaagcctttgaatgtttgactgtttaaaatttaagtgcatataaaaattgtagaaaagggtcattattaataaaatattcaaaatatggtaaawtttgcaagatgatttaatatatgcaaattgacaagtgatgtgaatagtacatttgaatagagaaaatatgtacataaatgaatggtatttcagaatctaagcaaattgatgactacattatgtacttgtccc

SEQ ID NO: 353010 - DNA, 439 bp, Homo sapiens
aagtttatgctaaatttaaatgaaatgaaataacaaagtagtttgaaatgaacattccattgattatttttaaaattttatttattaacaaagtagcttatactaactgcccactgtctatcccaatagttacagcaataacatatagttaacatttgtaattaaatatttcatttcatacaaatagtattttaaaattcaagtgttgatttttaagcctttgaatgtttgactgtttaaaatttaagtgcatataaaaattgtagaaaagggtcattattaataaaatattcaaaatatggtaaaatttgcawgatgatttaatatatgcaaattgacaagtgatgtgaatagtacatttgaatagagaaaatatgtacataaatgaatggtatttcagaatctaagcaaattgatgactacattatgtacttgtccc

SEQ ID NO: 353011 - DNA, 537 bp, Homo sapiens
caacctttttgctaatgcctaactaaagtgacctttgctccagttcccattaagttccttatctccatctgagacctcctcagcctggacttcattgtgtgtctctatcagtagcttggtcacaacaatgtaacaagactctagtaagttcaaaacttgccctcatcttcctgtcttcttctgatctctccaaacccttccaatctctgcccactatccagtttcaaagccactttcacattttcctgtatgtttacaacaatatcatattcctctaccaattttctatattagtcctttcttacattgctctaaagaaatacctgagactgggtaatttataaagaaaagcagtttaattggctyatggttctgcacgttatacagaaagcatgatgcatctgctggacttctgcgggggcctcagtaagctaacaatcatggcagaaggtgaagggggagccagcacttcacatggctggaagcaggaagaagagtgagaggtggggaggtgctatacacttttaacaaccagac

SEQ ID NO: 353012 - DNA, 537 bp, Homo sapiens
caacctttttgctaatgcctaactaaagtgacctttgctccagttcccattaagttccttatctccatctgagacctcctcagcctggacttcattgtgtgtctctatcagtagcttggtcacaacaatgtaacaagactctagtaagttcaaaacttgccctcatcttcctgtcttcttctgatctctccaaacccttccaatctctgcccactatccagtttcaaagccactttcacattttcctgtatgtttacaacaatatcatattcctctaccaattttctatattagtcctttcttacattgctctaaagaaatacctgagactgggtaatttataaagaaaagcagtttaattggcttatggttctgcacgttatacagaaagcatgatgcatctgctggrcttctgcgggggcctcagtaagctaacaatcatggcagaaggtgaagggggagccagcacttcacatggctggaagcaggaagaagagtgagaggtggggaggtgctatacacttttaacaaccagac

SEQ ID NO: 353013 - DNA, 246 bp, Homo sapiens
tatacagaaagcatgatgcatctgctggacttctgcgggggcctcagtaagctaacaatcatggcagaaggtgaagggggagccagcacttcacatggctggaagcaggaagaagagtgagaggtggggaggtgctatacacttttaacaaccagactcacaataactcactcactgtcacaagaacagcrccaaggagatggtgctaaaccatttaagagaaaccgcccgatgatccaattgcct

SEQ ID NO: 353014 - DNA, 190 bp, Homo sapiens
tgtccttaacttgacccagagctaattgtaatatcattagcattgcagttttggtgcccccatgaattttgcttaggcacttatgactaataatcaagatggagtcactrctgccaaacctaggtatgcacagacagaacactcccagcagggaattttaccccttccattaaggcaggacccacaaaag

SEQ ID NO: 353015 - DNA, 337 bp, Homo sapiens
ggtggcaggtgcctgtagccccagctactcaggaggctgaggcaggagattggtaggaacccaggaggtggagcttgcattgagccgagatcatgccactgcactccagcctgggctacagagcaagactccatctcaaaaaaaaaaagaaaaagaaaaagaaaagaaaaaaccttggagaaataagagattctataaaaaatttccccaatttcactagagagattgacatataaatttagaaaattcagataayctatgtaagatgctatgtaagacaaccattgcagagacacaaagtaatcagattcttgaaggtcaatgcaaaagaaaaaaa

SEQ ID NO: 353016 - DNA, 446 bp, Homo sapiens
atgctataagttgcatttaattgactggcttcatctctggatgatttcaggtggccaaggctcagctcagctctcctgggatgtgtgctctaacactggagggattgggacctggcccacagctttkttatatgccccctcaagatgaagtacctgctgcactgacagggccacagcattctcagtccactggcagcaacagtccaatgggggatgccaacaaaagtgcttcattggagcatttgctgaggggtccatgcttacgcacatgtgcaccagctgcagcaggggtgcagtgtggcatgttatactcatactcaccctggcagtggcaggttgtcagggtttatacacacacaccagtggggcccatgcagttgcagtgaggactctgcatatgtgcacactggcgaaacagtgattggagactgtgcacagtgcatgcc

SEQ ID NO: 353017 - DNA, 385 bp, Homo sapiens
tccatgcttacgcacatgtgcaccagctgcagcaggggtgcagtgtggcatgttatactcatactcaccctggcagtggcaggttgtcagggtttatacacacacaccagtggggcccatgcagttgcagtgaggactctgcatatgtgcacactggcgaaacagtgattggagactgtgcacagtgcatgccggcaatgcagtgaggggggactgtaagtaggtgtgcactgttggaggtatatttgcagaagctctccaatgagagcagagtagagtctgctgctatggtgatggccactgagaagcaacctcrttgggcatgcaaagctgccctccaagagggtatggcctggcggggaccccaggagagtccagtcgacag

SEQ ID NO: 353018 - DNA, 484 bp, Homo sapiens
tcacactggcatatcccatgggcaagacagcccttctctgtgcaggtctgacaatcaataatgacctaagtcactcagaggcgtgtggtaagccttaggaaatgggtgtccctggctgtgcttcactggaaccwttcttatgtcaaactatctgggctctacacatactggaatcctgtctttgctacttctccaagcaactctccttgctaactcgaatgtccatggggactgtgaagtctcctaaagctaggattctggagctctttggaaagagtaagccactccatcatatttaactcaccccctccctcacctttcagggccaggaatgagtcctggtgctccacaaccccatgctgggttcccagctttctgatcctttagcccagtgtctccatcctctctccttccactctcaatgctttccttttgaagatctgctcagagtgtgctggttttcttgatagtcagctctttcagt

SEQ ID NO: 353019 - DNA, 484 bp, Homo sapiens
tcacactggcatatcccatgggcaagacagcccttctctgtgcaggtctgacaatcaataatgacctaagtcactcagaggcgtgtggtaagccttaggaaatgggtgtccctggctgtgcttcactggaacctttcttatgtcaaactatctgggctctacacatactggaatcctgtctttgctacttctccaagcaactctccttgctarctcgaatgtccatggggactgtgaagtctcctaaagctaggattctggagctctttggaaagagtaagccactccatcatatttaactcaccccctccctcacctttcagggccaggaatgagtcctggtgctccacaaccccatgctgggttcccagctttctgatcctttagcccagtgtctccatcctctctccttccactctcaatgctttccttttgaagatctgctcagagtgtgctggttttcttgatagtcagctctttcagt

SEQ ID NO: 353020 - DNA, 484 bp, Homo sapiens
tcacactggcatatcccatgggcaagacagcccttctctgtgcaggtctgacaatcaataatgacctaagtcactcagaggcgtgtggtaagccttaggaaatgggtgtccctggctgtgcttcactggaacctttcttatgtcaaactatctgggctctacacatactggaatcctgtctttgctacttctccaagcaactctccttgctaactcgaatgtccatggggaytgtgaagtctcctaaagctaggattctggagctctttggaaagagtaagccactccatcatatttaactcaccccctccctcacctttcagggccaggaatgagtcctggtgctccacaaccccatgctgggttcccagctttctgatcctttagcccagtgtctccatcctctctccttccactctcaatgctttccttttgaagatctgctcagagtgtgctggttttcttgatagtcagctctttcagt

SEQ ID NO: 353021 - DNA, 515 bp, Homo sapiens
tctgatcctttagcccagtgtctccatcctctctccttccactctcaatgctttccttttgaagatctgctcagagtgtgctggttttcttgatagtcagctctttcagtggaggatcttcctggctctgtcttgatggccattttggttcttctgtcttttagggtttccttggtgagtatcaggtgttcataaattaaggatttatatattgggtttaawaatcaagattgtaaatcaagatatctttagtgtgatgaaaggaagtaaattataaaacgtatttaggttactatgttgctcttaataagtagtacggctgccacattttaaagtgttttttttttcccctatggttgttttaaggatttctttttctctgtcactctctgtcattccagctctcattttctctctttctctcacatcagatttattgttaagtgttaattcagtggttattttttccttgaaatttactgtgtttcttgaatggacacgtgtatctttcatca

SEQ ID NO: 353022 - DNA, 515 bp, Homo sapiens
taaaaataatgttaacttcagttaactgttcaggcaaattattttcttttttgataaaatgtatttgtgttgctacacactgacatggagctgcagattttctcattcaagttattaaaatgccaaccacctttgtaatgctagtagtcactgccaaatcaattttcattatatcggggggaaaatacaaatcttcttaaaaactgatataactgaaactgtaygtacattgtattatatcacaaaatacatgtaagtataatgaagaaaaatttgttaagaaagtttaccaaagcattctagttaagattacatttaggtggataagaaatttttcatttccaaaaaattacaaaacaacggtaaattgagttggtatttcacaatatttgaattgcaatagtatgaagcgtgtatctaaatgcatgctatttatgaggcaatagttatgacaaaggcatagtaacataattgatttccctttgcattctgagtttgagaataattaggtaaat

SEQ ID NO: 353023 - DNA, 515 bp, Homo sapiens
taaaaataatgttaacttcagttaactgttcaggcaaattattttcttttttgataaaatgtatttgtgttgctacacactgacatggagctgcagattttctcattcaagttattaaaatgccaaccacctttgtaatgctagtagtcactgccaaatcaattttcattatatcggggggaaaatacaaatcttcttaaaaactgatataactgaaactgtatgtacattgtattatatcacaaaatacatgtaagtataatgaagaaaaatttgttaagaaagtttaccaaagcattctagttaagattacatttaggtggataaraaatttttcatttccaaaaaattacaaaacaacggtaaattgagttggtatttcacaatatttgaattgcaatagtatgaagcgtgtatctaaatgcatgctatttatgaggcaatagttatgacaaaggcatagtaacataattgatttccctttgcattctgagtttgagaataattaggtaaat

SEQ ID NO: 353024 - DNA, 515 bp, Homo sapiens
taaaaataatgttaacttcagttaactgttcaggcaaattattttcttttttgataaaatgtatttgtgttgctacacactgacatggagctgcagattttctcattcaagttattaaaatgccaaccacctttgtaatgctagtagtcactgccaaatcaattttcattatatcggggggaaaatacaaatcttcttaaaaactgatataactgaaactgtatgtacattgtattatatcacaaaatacatgtaagtataatgaagaaaaatttgttaagaaagtttaccaaagcattctagttaagattacatttaggtggataagaaatttttcatttccaaaaaattacaaaacaacggtaaattgagttggtatttcacaatatttgaattgcaatagtatgaagcgtgtatctaaatgcatgctatttatgaggcaatagttaygacaaaggcatagtaacataattgatttccctttgcattctgagtttgagaataattaggtaaat

SEQ ID NO: 353025 - DNA, 469 bp, Homo sapiens
tttacatttaacatcaatgtcaataatagagtcagaattgatatcaaacttgagaaatatttttaccaaaagtaggtctttcataattaatatgaattgatttctgccaaactatcatatttagccatgtggtcagtaatataatgtaaattatatgtagatatatatttttaaagttgaggacacctaaataaaacatgtaaattattttaattacttgacaatctattatatacaaagtatttaagtatattttaaacatatttaatttaactaattttttgagtgatttgagcaaaattctgttttagttcatgtatagacatgcttatatttgagttactgaaaatgcaaacatttaagtagtctactcttagcatattaatatgtcctgtattcattacaacattaattgcaytaaattcagctactatgaataaataatctatcacatatacattttaaaggt

SEQ ID NO: 353026 - DNA, 553 bp, Homo sapiens
gtggtctaacttgaaacaagcttacagttgtgcaaagtataatgattcaaaagcaaggatacagaagaagaacaaaggcagtcaatcatactacaacaagttcacaactcargcttacatatgactcttgctatgcagcccagatagctgttatctaggcttgttccagtgctttgcatgggcttatctcataacatttgctatggcatctaggggactgcaatctaggcctgctcaggtgtctcatgatcttcactgtgctgcttagatgaataacagaatcaaaagagaaaggaaaatttgtttttcttttccctatgttgagggagccctgggagactctccagagcacattctttgagccccagcttcttagataatgctatcgagactttgcctgggtctgggctttgcctgttactgcctttgggatgagtcagcctaatacagaaagattgtttctttctctttttaattttacttttctttctttaatttccagcctcaagggtgatgggagaagatgtaagaaaagttatagggaaaaatgcaa

SEQ ID NO: 353027 - DNA, 553 bp, Homo sapiens
gtggtctaacttgaaacaagcttacagttgtgcaaagtataatgattcaaaagcaaggatacagaagaagaacaaaggcagtcaatcatactacaacaagttcacaactcaggcttacatatgactcttgctatgcagcccagatagctgttatctaggcttgttccagtgctttgcatgggcttatctcataacatttgctatggcatctaggggactgcaatctargcctgctcaggtgtctcatgatcttcactgtgctgcttagatgaataacagaatcaaaagagaaaggaaaatttgtttttcttttccctatgttgagggagccctgggagactctccagagcacattctttgagccccagcttcttagataatgctatcgagactttgcctgggtctgggctttgcctgttactgcctttgggatgagtcagcctaatacagaaagattgtttctttctctttttaattttacttttctttctttaatttccagcctcaagggtgatgggagaagatgtaagaaaagttatagggaaaaatgcaa

SEQ ID NO: 353028 - DNA, 501 bp, Homo sapiens
ggccctgggcctgtccccagaaaacattttttctccctaggcctctgggtctgtgatgggaggggctgctgtgaagacctaggacatggcctagagacatttttcccattgtcttcatgattaggatttggcttcttgttacttatgmacatttctgcagctggcttgaatttcttctcagaaaatgttttgtttttttttctattgcattgtcagactgcaaattatataaatatatatataatttaaataatatgagccaataaatacataactaattaatatttaaattattaaagataaatattaattttaactattttatcaaaattgtaaatatggaaatgtatgtaacatacaattattgataaataagttgggggttttacttatgattctctcaaaacctgaataaaaatatcctttcttttttgagtcctggattttcttcagtttgaacaaatattggaattattaactctgcaccaaagctaaataact

SEQ ID NO: 353029 - DNA, 501 bp, Homo sapiens
ggccctgggcctgtccccagaaaacattttttctccctaggcctctgggtctgtgatgggaggggctgctgtgaagacctaggacatggcctagagacatttttcccattgtcttcatgattaggatttggcttcttgttacttatgaacatttctgcagctggcttgaatttcttctcagaaaatgttttgtttttttttctattgcattgtcagactgcaaattatataaatatatatataatttaaataatatgagccaataaatacataactaattaatatttaaattattaaagataaatattaattttaactattttatcaaaattgtaaatatggaaatgtatgtaacatacaattattgataaataagttgggggttttacttatgattytctcaaaacctgaataaaaatatcctttcttttttgagtcctggattttcttcagtttgaacaaatattggaattattaactctgcaccaaagctaaataact

SEQ ID NO: 353030 - DNA, 350 bp, Homo sapiens
tgaccactcccagccttaattccttattatgaagacaygtaattcatataacaaaagcagtaaaaatgtctagaatcctatgtactttccagaatgctgtcaagagctaagctgccatggagttgaaatagctaattaaaacaataagccaaaatgacagtaacagtcaaatctttactaactgagatagtttaagcaagaaactaaagaggaaagatcgctagctcctccaatgttccattttgtcccatgaaacagctccaggccaaggtcatgtagatcagcacaaatgcagatgtgggaattttctcagcaaggatcttttgaccaaggagccatgaacaaaaagc

SEQ ID NO: 353031 - DNA, 353 bp, Homo sapiens
tcagcaaggatcttttgaccaaggagccatgaacaaaaagctcctttcatcttatggacctgggtscttgggacagaaagaggaggaagggctaagaatgggaaaatactgagttctgattcagaatagagaataatgatttcaatgtttcccctttctcctctcccttatccctctctccctatcataaggagttctctgcaaaggttttctattgagggtccctaataaggatagctcagatgggggtgcctgagacttgaatggcagacatgcacaggaggatggttggctagcggggaatgagtcctagactgcagctcccattagatattgtaatgcactggctgttt

SEQ ID NO: 353032 - DNA, 531 bp, Homo sapiens
cacgggatcccagcctcaggcctgcccggacggtgttggttggggtgagtctccccaaaagtcgtgccgccatccgtgatctcgaggacaggtcggcctgcgtgcccctgggctgctctctcacccgagggtctttctcgtcgtgagcagaaccccgcagcctcaggggttgcctggtggtgtgtgtttcaatgcctctgctgtatgacgctgtgtgtgtgtctctgtgtgtgwgtgtgtgtgtgtgtgtctgtgtgtgtgtctcccattctctcttctctctctgtctctcagtctctgtgtgtttctttccctctctctgtgggtttgtgtgtgtatgcccgtgtgcgtgtgtgtctttggccgaatgtgccctgtgcgccacaaagcggtttgtcgcatggcagcctgtctttggtgagcctctttctgcttctctgcctgggtcatgaggccggctgtcaatcgttttcgccgcggcggatccgctttgggtgtctgaaagcctggcccacgtgaggagatgcgtcg

SEQ ID NO: 353033 - DNA, 531 bp, Homo sapiens
cacgggatcccagcctcaggcctgcccggacggtgttggttggggtgagtctccccaaaagtcgtgccgccatccgtgatctcgaggacaggtcggcctgcgtgcccctgggctgctctctcacccgagggtctttctcgtcgtgagcagaaccccgcagcctcaggggttgcctggtggtgtgtgtttcaatgcctctgctgtatgacgctgtgtgtgtgtctctgtgtgtgtgtgtgtgtgtgtgtgtctgtgtgtgtgtctcccaktctctcttctctctctgtctctcagtctctgtgtgtttctttccctctctctgtgggtttgtgtgtgtatgcccgtgtgcgtgtgtgtctttggccgaatgtgccctgtgcgccacaaagcggtttgtcgcatggcagcctgtctttggtgagcctctttctgcttctctgcctgggtcatgaggccggctgtcaatcgttttcgccgcggcggatccgctttgggtgtctgaaagcctggcccacgtgaggagatgcgtcg

SEQ ID NO: 353034 - DNA, 531 bp, Homo sapiens
cacgggatcccagcctcaggcctgcccggacggtgttggttggggtgagtctccccaaaagtcgtgccgccatccgtgatctcgaggacaggtcggcctgcgtgcccctgggctgctctctcacccgagggtctttctcgtcgtgagcagaaccccgcagcctcaggggttgcctggtggtgtgtgtttcaatgcctctgctgtatgacgctgtgtgtgtgtctctgtgtgtgtgtgtgtgtgtgtgtgtctgtgtgtgtgtctcccattctctcttctctctctgtctctcagtctctgtgtgtttctttccctctctctgtgggtttgtgtgtgtatgcccgtgtgcgtgtgtgtctttggccgaatgtgccctgtgcgccacaaagcggtttgtcgcatggcrgcctgtctttggtgagcctctttctgcttctctgcctgggtcatgaggccggctgtcaatcgttttcgccgcggcggatccgctttgggtgtctgaaagcctggcccacgtgaggagatgcgtcg

SEQ ID NO: 353035 - DNA, 531 bp, Homo sapiens
cacgggatcccagcctcaggcctgcccggacggtgttggttggggtgagtctccccaaaagtcgtgccgccatccgtgatctcgaggacaggtcggcctgcgtgcccctgggctgctctctcacccgagggtctttctcgtcgtgagcagaaccccgcagcctcaggggttgcctggtggtgtgtgtttcaatgcctctgctgtatgacgctgtgtgtgtgtctctgtgtgtgtgtgtgtgtgtgtgtgtctgtgtgtgtgtctcccattctctcttctctctctgtctctcagtctctgtgtgtttctttccctctctctgtgggtttgtgtgtgtatgcccgtgtgcgtgtgtgtctttggccgaatgtgccctgtgcgccacaaagcggtttgtcgcatggcagcctgtctttggtgagcctctttctgcktctctgcctgggtcatgaggccggctgtcaatcgttttcgccgcggcggatccgctttgggtgtctgaaagcctggcccacgtgaggagatgcgtcg

SEQ ID NO: 353036 - DNA, 616 bp, Homo sapiens
tggctgcttttaagactttgtctttagttttgtcaacaacctacattggggaaaggacacaatctccaatacatgcttctggaaaaattggatatccatatgcagaagaatgaaactaaactcctatcactcaccttatacaaaaataaactcaaaatggattaaaaatttaaatgtaagacatgaaaaattagactaccatacactgttgktggtaagttaaattatttcacttattatgaaaaactgtatggtggtttctcaaaacaaaaatagagacaccatatgatctagtgatcccactactaggtgtttatccaaaggaaaggaaatcattacacttaagaggcatctgcacctccatatttattgcagctgtcttcacaataaccaagatatggaattaagctaaatatccatcaatggatggatagataaaaaatgtggtatatacatataccaaatttgtatatacattcatatatatatatatatatatgaataatattctgccataaaaagaatgaaattctgtcatttgcagaatcatggataagactagcgaacattatgttaagtggaataagtcagactcagaaaaattaatactgtctgt

SEQ ID NO: 353037 - DNA, 610 bp, Homo sapiens
ttttcatttacattggttttcctctataggtgatgtttcacctataggtgactgtttctatctggctgcttttaagactttgtctttagttttgtcaacaacctacattggggaaaggacacaatctccaatacatgcttctggaaaaattggatatccatatgcagaagaatgaaactaaactcctatcactcaccttatacaaaaataaactcaaaatggattaaaaatttaaatgtaagacatgaaaaattagactaccatacactgttgttggtaagttaaattatttcacttattatgaaaaactgtatggtggtttctcaaaacaaaaatagagacaccatatgatctagtgatcccactactaggtgtttatccaaaggaaaggaaatcattacacttaagaggyatctgcacctccatatttattgcagctgtcttcacaataaccaagatatggaattaagctaaatatccatcaatggatggatagataaaaaatgtggtatatacatataccaaatttgtatatacattcatatatatatatatatatatgaataatattctgccataaaaagaatgaaattctgtcatttgcagaatc

SEQ ID NO: 353038 - DNA, 547 bp, Homo sapiens
gcccttgtcacccaagtagtgtacattgtacccaatatgtagtgttttatccctcacccacctcctactctcccccttagtggtctccaatgtccattataccactctgtatgcatacccatggcttagctaycacttaaaagtgagaatatatgatatttggttttccattcctgagttacttcacttagaataatggcctccagctccagttggagttgctgcaaatgacattatttcattctttttagggctgagtagtatgtcatggtgtatgtttaccacatttctttatctactcattggttgaggagcacttaggttggttctgtatctttgtaattgtgaattgtactgcaataaacatatacatgcaggtgtatttttgatacaatgactttttttgagtagttaaccagtagtgggattgatggactgaatgctagatctacttttagttatttcaaaaatctccataatgctttacataaaggatgtactaatttacattcccaccagcaatgtataagcatgcccttttcaccac

SEQ ID NO: 353039 - DNA, 563 bp, Homo sapiens
tcttctaaaacttttactattctccataatcctcaaagatatctagagcaacttaaaaatctctttcctaaactttcttattgttttggaatgagttctactccaatactagggcccagggctcatagtgccycttcgttcatcttgagatttaattaaaagcaatgttgagtcttctcttttggatctaaagatctatttgatgagaaagactgaagaaaaataaggataagggtatttcctccatgttttcatggcacaaaatctttgtttgctaactgtgataagcagaataatgcccccccaccccccacaagactgtccctgtcctattctccatgtcaggaaggatatgctatgttatataagaatatatgatgttacaatgcaagaaagtattaaggttgcacatgacattaagcttactaaacagcggaacttaaaataagagatcatacttgattatctggggggggcaatttaatcacaagaatcctttaaatgtggaagagtgtggtagaaaatatttaaagatactacactgctaattgtactggaggaaa

SEQ ID NO: 353040 - DNA, 547 bp, Homo sapiens
gcccttgtcacccaagtagtgtacattgtacccaatatgtagtgttttatccctcacccacctcctactctcccccttagtggtctccaatgtccattataccactctgtatgcatacccatggcttagctatcacttaaaagtgagaatatatgatatttggttttccattcctgagttacttcacttagaataatggcctccagctccagttggagttgctgcaaatgacattatttcattctttttagggctgagtagtatgtcatggtgtatgtttaccacatttctttatcyactcattggttgaggagcacttaggttggttctgtatctttgtaattgtgaattgtactgcaataaacatatacatgcaggtgtatttttgatacaatgactttttttgagtagttaaccagtagtgggattgatggactgaatgctagatctacttttagttatttcaaaaatctccataatgctttacataaaggatgtactaatttacattcccaccagcaatgtataagcatgcccttttcaccac

SEQ ID NO: 353041 - DNA, 556 bp, Homo sapiens
ttccacaaagttatttaagttaaaagatagcacctttgaattcttcctatgtggcatgtgctaggtcctcactcagtaagctaggacttagggtccattactgtactctgtggcattaggagtgctggagtagttaaccacwggcaagatgaaaggatcgttctagtcaatgagagaacgaggtcgtggatggagcatccagcactttgtcaggttacccatggtgtaaccatggcactttggaagaggccactaaggcattatgctcacaggcctataatgccccatccatgtggaaaagcagactgacagtttaatgcccacctctcaccctttccagggtctcagatgttctctacctattggataagaattaggctgagttggtatagcaacccggtctgtctgttttagtcccaagctacttctgcagacatccattgcccttgttgcttgactcaaacctttctgtctcaatcatccactccagtacaaagttggtatatctcataacatcatccacccaaatggaaggatcagaggcatccagcatcat

SEQ ID NO: 353042 - DNA, 556 bp, Homo sapiens
ttccacaaagttatttaagttaaaagatagcacctttgaattcttcctatgtggcatgtgctaggtcctcactcagtaagctaggacttagggtccattactgtactctgtggcattaggagtgctggagtagttaaccactggcaagatgaaaggatcgttctagtcaatgagagaacgaggtcgtggatggagcatccagcactttgtcaggttacccatggtgtaaccatggcactttggaagaggccactaaggcattatgctcacaggcctataatgccccatccatgtggaaaagcagactgacagtttaatgcccacctctcaccctttccagggtctcagatgttctctacctattgrataagaattaggctgagttggtatagcaacccggtctgtctgttttagtcccaagctacttctgcagacatccattgcccttgttgcttgactcaaacctttctgtctcaatcatccactccagtacaaagttggtatatctcataacatcatccacccaaatggaaggatcagaggcatccagcatcat

SEQ ID NO: 353043 - DNA, 422 bp, Homo sapiens
gtaaaatcccatgggctatgtaagaggatggcataaattcctctcaagtgtggctatagttgcctcagcacccatatgattgacatatatttgtctttttcagacaacaagctgtttttcttagtccttgtcctcacatggatatcctctaacagtccaatccttccattgccaytgtcctgatcagatggctaggcttttggcaatggcccataagtcactgaaaatatagcaagatatgcgatagaggtagcctgcatggccatcaccactgcatttagtttggcccattgggtagaatgcccatgtccagtctcagtcaaaagatagccaaccactggctgaatggtggtccagtgcatgtcgtctggcagagctatcagtaaaccatgcctgtcaggcctctgagcccaagctaagcc

SEQ ID NO: 353044 - DNA, 422 bp, Homo sapiens
gtaaaatcccatgggctatgtaagaggatggcataaattcctctcaagtgtggctatagttgcctcagcacccatatgattgacatatatttgtctttttcagacaacaagctgtttttcttagtccttgtcctcacatggatatcctctaacagtccaatccttccattgccattgtcctgatcagatggctaggcttttggcaatggcccataagtcactgaaaatatagcaagatatgcgayagaggtagcctgcatggccatcaccactgcatttagtttggcccattgggtagaatgcccatgtccagtctcagtcaaaagatagccaaccactggctgaatggtggtccagtgcatgtcgtctggcagagctatcagtaaaccatgcctgtcaggcctctgagcccaagctaagcc

SEQ ID NO: 353045 - DNA, 422 bp, Homo sapiens
gtaaaatcccatgggctatgtaagaggatggcataaattcctctcaagtgtggctatagttgcctcagcacccatatgattgacatatatttgtctttttcagacaacaagctgtttttcttagtccttgtcctcacatggatatcctctaacagtccaatccttccattgccattgtcctgatcagatggctaggcttttggcaatggcccataagtcactgaaaatatagcaagatatgcgatagaggtagcctgcatggccatcaccactgcatttagtttggcccattgggtagaatgcccatgtccagtctcagtcaaaagatagccaaccastggctgaatggtggtccagtgcatgtcgtctggcagagctatcagtaaaccatgcctgtcaggcctctgagcccaagctaagcc

SEQ ID NO: 353046 - DNA, 391 bp, Homo sapiens
tcccacattattctggatatcacacctgatccccatggctgtatctctctgatccacctgacattcactccatttccyatatttccttctttcctgttcctcaccctgatcacacttggtttatcaatggcagttccaccaggcctaattgccactcaccagcaaaggcagactatgctatagtatcttccacatctatcattgaggctaccgctctgccccactcccctacctctcagcaagccaaattcattgccttaactcgagcgtcactcttgcaaagggactacacatcaatatttaaactgactctaaatatgcctttcatatcctacgccaccataccattatatgggcagaaagaggtttcctcactgcgcaagggtcctcc

SEQ ID NO: 353047 - DNA, 391 bp, Homo sapiens
tcccacattattctggatatcacacctgatccccatggctgtatctctctgatccacctgacattcactccatttcctatatttccttctttcctgttcctcaccctgatcacacttggtttatcaatggcagttccaccaggcctaattgccactcaccagcaaaggcagactatgctatagtatcttccacatctatcattgaggctaccgctctgccccactcccctacctctcagcaagccaaattcattgccttaactcgagcgtcactcttgcaaagggactacacatcaatatttaaactgactctaaatatgccttycatatcctacgccaccataccattatatgggcagaaagaggtttcctcactgcgcaagggtcctcc

SEQ ID NO: 353048 - DNA, 549 bp, Homo sapiens
gttatatacctcagagccaatgtgaaacattgacttaaagctttgagggrcatcctgcttccagaggaaagagcaacaggcccaggctagtccagtcagcccctccttatctcaccataatgtattcccagcacaatctacagtaattattaagacctacaaggaagaaagggaagagaactgggtcaatccaaggccacatggagaactgtcctgcactggccaattattttggctgtagtttcaataccaacttaatgtttagagcttttgcattgtgatttcagactctttgattaatatggtgctgctgggaattccactgctccctgttagtgctgcctatggcagtggaagcagtttctccaggttaggctaccaggtgtctgaggtatgtggtgaggggtgtggtagaatcccccaaccaatgtcccctggctactctggggtcattgggaagagagtcttaggcctgcagggacaaagcagcttcttaggccaggccactttctctactaggtccctcttcctgattctattttcccacct

SEQ ID NO: 353049 - DNA, 549 bp, Homo sapiens
gttatatacctcagagccaatgtgaaacattgacttaaagctttgagggacatcctgcttccagaggaaagagcaacaggcccaggctagtccagtcagcccctccttatctcaccataatgtattcccagcayaatctacagtaattattaagacctacaaggaagaaagggaagagaactgggtcaatccaaggccacatggagaactgtcctgcactggccaattattttggctgtagtttcaataccaacttaatgtttagagcttttgcattgtgatttcagactctttgattaatatggtgctgctgggaattccactgctccctgttagtgctgcctatggcagtggaagcagtttctccaggttaggctaccaggtgtctgaggtatgtggtgaggggtgtggtagaatcccccaaccaatgtcccctggctactctggggtcattgggaagagagtcttaggcctgcagggacaaagcagcttcttaggccaggccactttctctactaggtccctcttcctgattctattttcccacct

SEQ ID NO: 353050 - DNA, 549 bp, Homo sapiens
gttatatacctcagagccaatgtgaaacattgacttaaagctttgagggacatcctgcttccagaggaaagagcaacaggcccaggctagtccagtcagcccctccttatctcaccataatgtattcccagcacaatctacagtaattattaagacctacaaggaagaaagggaagagaactgggtcaatccaaggccacatggagaactgtcctgcactggccaattrttttggctgtagtttcaataccaacttaatgtttagagcttttgcattgtgatttcagactctttgattaatatggtgctgctgggaattccactgctccctgttagtgctgcctatggcagtggaagcagtttctccaggttaggctaccaggtgtctgaggtatgtggtgaggggtgtggtagaatcccccaaccaatgtcccctggctactctggggtcattgggaagagagtcttaggcctgcagggacaaagcagcttcttaggccaggccactttctctactaggtccctcttcctgattctattttcccacct

SEQ ID NO: 353051 - DNA, 549 bp, Homo sapiens
gttatatacctcagagccaatgtgaaacattgacttaaagctttgagggacatcctgcttccagaggaaagagcaacaggcccaggctagtccagtcagcccctccttatctcaccataatgtattcccagcacaatctacagtaattattaagacctacaaggaagaaagggaagagaactgggtcaatccaaggccacatggagaactgtcctgcactggccaattattttggctgtagtttcaataccaacttaatgtttagagcttttgcattgtgatttcagactctttgattaatatggtgctgctgggaattccactgctccctgttagtgctgcctatggcagtggaagcagtttctccaggttaggctaccaggtgtctgaggtatgtggtgaggggtgtggtagaatcccccaaccaatgtcccctggctactctggggtcattgggaagagmgtcttaggcctgcagggacaaagcagcttcttaggccaggccactttctctactaggtccctcttcctgattctattttcccacct

SEQ ID NO: 353052 - DNA, 655 bp, Homo sapiens
caaatcaaattccaaataattaaatatgtagaatatagcttgtttacaacaataaaaaataatgttctctgtcagagaaaattaagaaaagcaatttaaactcaactgttatagaaagaaagattactatctatttagcagtgcttaaaaaggaggtcatagagaattaattccaatataaacctgacatgaacagcaatgcaaaaaatttggactcaatgtaaaatattatttgatggtgtgaataaataatgaaataaatgttcataagataaattgttgaaataatttgaaatcatttttgaataattattgaaataattaaataaattgttcatgaaaaattactcatcttgaggaagacaatccccattttactacaatttcattattttatattggcaagagaagaaatattttgaaaaacattaataaagttkacttaaacaggagtatgatcctctttcagatgcaaaatagaagataggggatggagcaagtctaccttccttaaaaaggtagctgaagtcatcaggaattgtttgtgtcatgctacagacctatactgaagaataataaatgaaacagacttatgaactcatcagatatatttacactaagcatactgattagaaagttctcctcatgtaatttc

SEQ ID NO: 353053 - DNA, 509 bp, Homo sapiens
ttagaaagttctcctcatgtaatttcttcttcctgaacgatctcaaaaaatataatttcaggtctagataattgaaataaaagtgcatccctgaaacaaattatttagctcttactttttataaatactctaattgctaaacttatcaggatcatgacctactttgtatagacaaattaaattctaattctccagatcacaatatataggctttaagtcaccataatttttccccatttgcctcatttctgcctttctttgaggtctctaccttttgtaactagtttttaatttgtaaaatatttacttaatattagctgatttataatkaattagtttagactagaatggcatttgaatacttgttgaaaataatatcacttgtagacctagaatactttggtagctacttcattttctctgtctctttctgaaaagttagccagcttgctttaggcagacagtaagggaagggtcccccagagaacctcctatctgctccacaagtg

SEQ ID NO: 353054 - DNA, 430 bp, Homo sapiens
tccaatggccacaggtacacatgtgagacaaatgggagagtggcaactcccaacctccctcccctcccggctggggcacatagcccaagggccccacttggctaggtggccagcatttcctgctcactcttccctctccccatgcacccacagtgtctttcctcccctggctgagccagaaaggaggagacagcaattaaaatgttctctccctattggaggaactcatttgcataagaataaaaggtttctcctccaggcatcttccccaccctgcacttaagctgttttattttatttttcttttctccactttgtaaggagttaacttttatgagaggttttttgttkgtttttgttttttttttcttattaggccaggaccccaattcccaagatagccttttctctcccttgtttaaggaagacc

SEQ ID NO: 353055 - DNA, 481 bp, Homo sapiens
aaaaaaaaaaaaaatagttcttaccagtcagacttctggcctccttctccctgtgcaaaccagttgaataaatgataaaatccctgtttaaatcactgtttatatactctctgaagttctgataaatagaaaaaaaggatttatgaggctagtcttaagctgtagccaatgtagtgtgctttgtgtgtcyttctgtatagttctgtcataaagaggggtaccttaggatagaatgcaggcctaggaccccaaaagtttgctgatcaaaccagcctggcaaactggtcagtaacaaacgttgctgcagttcttcatcttgttttttgtcctcaggagcttgaccttgtaaccacttgataatactttcttttggcctctgccattttacaatggtggcctgggtttaatcctggcttagggaatgagtatattttggccaatatctgtgtgacttctaccatttgctgattctcttcccctc

SEQ ID NO: 353056 - DNA, 481 bp, Homo sapiens
aaaaaaaaaaaaaatagttcttaccagtcagacttctggcctccttctccctgtgcaaaccagttgaataaatgataaaatccctgtttaaatcactgtttatatactctctgaagttctgataaatagaaaaaaaggatttatgaggctagtcttaagctgtagccaatgtagtgtgctttgtgtgtccttctgtatagttctgtcataaagaggggtaccttaggatagaatgcaggcctaggaccccaaaagtttgctgatcaaaccagcctggcaaactggtcagtaacaaacsttgctgcagttcttcatcttgttttttgtcctcaggagcttgaccttgtaaccacttgataatactttcttttggcctctgccattttacaatggtggcctgggtttaatcctggcttagggaatgagtatattttggccaatatctgtgtgacttctaccatttgctgattctcttcccctc

SEQ ID NO: 353057 - DNA, 481 bp, Homo sapiens
aaaaaaaaaaaaaatagttcttaccagtcagacttctggcctccttctccctgtgcaaaccagttgaataaatgataaaatccctgtttaaatcactgtttatatactctctgaagttctgataaatagaaaaaaaggatttatgaggctagtcttaagctgtagccaatgtagtgtgctttgtgtgtccttctgtatagttctgtcataaagaggggtaccttaggatagaatgcaggcctaggaccccaaaagtttgctgatcaaaccagcctggcaaactggtcagtaacaaacgttgctgcagttcttcatcttgttttttgtcctyaggagcttgaccttgtaaccacttgataatactttcttttggcctctgccattttacaatggtggcctgggtttaatcctggcttagggaatgagtatattttggccaatatctgtgtgacttctaccatttgctgattctcttcccctc

SEQ ID NO: 353058 - DNA, 577 bp, Homo sapiens
aatgtgtttttggtaattctrctaatttatgctgtttaaaacatcctggctgaatgatttcaaataaattttataacatctatttccattttttttcactcagtacatatgaatccactgtttaatccaaatttaaagtaacaatcattaaagtaaattaaaatggagtccaggcctgaagaatttctgagcagacaaaaccagttaggcatcataagtgatctaaaccttgtttgatctacagatataagggaaacttgagctattcttatcaatttctatattaaagaaaaacagaacttaagttcaaccaatcagaagtagccaacacacataatcatataactgaagactttccagtgggatagacctaataacgtacaactttggtaccaaataaggtacaaataactgtacaactataaatagtcaaatattatctttagttttcttctgtgcctgtcctctaaaagcctccccctgtgctccctcagtggcgctcttaaggctcttttatggtttggagctgcctgagtcataaatcattgtgtaaataacatatttaaaattttattgt

SEQ ID NO: 353059 - DNA, 577 bp, Homo sapiens
aatgtgtttttggtaattctactaatttatgctgtttaaaacatcctggctgaatgatttcaaataaattttataacatctatttccattttttttcactcagtacatatgaatccactgtttaatccaaatttaaagtaacaatcattaaagtaaattaaaatggagtccaggcctgaagaatttctgagcagacaaaaccagttaggcatcataagtgatctaaaccttgtttgatctacagatataagggaaacttgagcyattcttatcaatttctatattaaagaaaaacagaacttaagttcaaccaatcagaagtagccaacacacataatcatataactgaagactttccagtgggatagacctaataacgtacaactttggtaccaaataaggtacaaataactgtacaactataaatagtcaaatattatctttagttttcttctgtgcctgtcctctaaaagcctccccctgtgctccctcagtggcgctcttaaggctcttttatggtttggagctgcctgagtcataaatcattgtgtaaataacatatttaaaattttattgt

SEQ ID NO: 353060 - DNA, 611 bp, Homo sapiens
gttttttcaaaatgtgtttttggtaattctactaatttatgctgtttaaaacatcctggctgaatgatttcaaataaattttataacatctatttccattttttttcactcagtacatatgaatccactgtttaatccaaatttaaagtaacaatcattaaagtaaattaaaatggagtccaggcctgaagaatttctgagcagacaaaaccagttaggcatcataagtgatctaaaccttgtttgatctacagatataagggaaacttgagctattcttatcaatttctatattaaagaaaaacagaacttaagttcaaccaatcagaagtagccaacacacataatcatayaactgaagactttccagtgggatagacctaataacgtacaactttggtaccaaataaggtacaaataactgtacaactataaatagtcaaatattatctttagttttcttctgtgcctgtcctctaaaagcctccccctgtgctccctcagtggcgctcttaaggctcttttatggtttggagctgcctgagtcataaatcattgtgtaaataacatatttaaaattttattgtgccttagtttatcttttaacacag

SEQ ID NO: 353061 - DNA, 577 bp, Homo sapiens
aatgtgtttttggtaattctactaatttatgctgtttaaaacatcctggctgaatgatttcaaataaattttataacatctatttccattttttttcactcagtacatatgaatccactgtttaatccaaatttaaagtaacaatcattaaagtaaattaaaatggagtccaggcctgaagaatttctgagcagacaaaaccagttaggcatcataagtgatctaaaccttgtttgatctacagatataagggaaacttgagctattcttatcaatttctatattaaagaaaaacagaacttaagttcaaccaatcagaagtagccaacacacataatcatataactgaagactttccagtgggatagacctaataacgtacaactttggtaccaaataaggtacaaataactgtacaactataaatagtcaaatattatctttagttttcttctgtgcctgtcctctaaaagcctccscctgtgctccctcagtggcgctcttaaggctcttttatggtttggagctgcctgagtcataaatcattgtgtaaataacatatttaaaattttattgt

SEQ ID NO: 353062 - DNA, 611 bp, Homo sapiens
gttttttcaaaatgtgtttttggtaattctactaatttatgctgtttaaaacatcctggctgaatgatttcaaataaattttataacatctatttccattttttttcactcagtacatatgaatccactgtttaatccaaatttaaagtaacaatcattaaagtaaattaaaatggagtccaggcctgaagaatttctgagcagacaaaaccagttaggcatcataagtgatctaaaccttgtttgatctacagatataagggaaacttgagctattcttatcaatttctatattaaagaaaaacagaacttaagttcaaccaatcagaagtagccaacacacataatcatataactgaagactttccagtgggatagacctaataacgtacaactttggtaccaaataaggtacaaataactgtacaactataaatagtcaaatattatctttagttttcttctgtgcctgtcctctaaaagcctccccctgtgmtccctcagtggcgctcttaaggctcttttatggtttggagctgcctgagtcataaatcattgtgtaaataacatatttaaaattttattgtgccttagtttatcttttaacacag

SEQ ID NO: 353063 - DNA, 577 bp, Homo sapiens
aatgtgtttttggtaattctactaatttatgctgtttaaaacatcctggctgaatgatttcaaataaattttataacatctatttccattttttttcactcagtacatatgaatccactgtttaatccaaatttaaagtaacaatcattaaagtaaattaaaatggagtccaggcctgaagaatttctgagcagacaaaaccagttaggcatcataagtgatctaaaccttgtttgatctacagatataagggaaacttgagctattcttatcaatttctatattaaagaaaaacagaacttaagttcaaccaatcagaagtagccaacacacataatcatataactgaagactttccagtgggatagacctaataacgtacaactttggtaccaaataaggtacaaataactgtacaactataaatagtcaaatattatctttagttttcttctgtgcctgtcctctaaaagcctccccctgtgctccstcagtggcgctcttaaggctcttttatggtttggagctgcctgagtcataaatcattgtgtaaataacatatttaaaattttattgt

SEQ ID NO: 353064 - DNA, 611 bp, Homo sapiens
gttttttcaaaatgtgtttttggtaattctactaatttatgctgtttaaaacatcctggctgaatgatttcaaataaattttataacatctatttccattttttttcactcagtacatatgaatccactgtttaatccaaatttaaagtaacaatcattaaagtaaattaaaatggagtccaggcctgaagaatttctgagcagacaaaaccagttaggcatcataagtgatctaaaccttgtttgatctacagatataagggaaacttgagctattcttatcaatttctatattaaagaaaaacagaacttaagttcaaccaatcagaagtagccaacacacataatcatataactgaagactttccagtgggatagacctaataacgtacaactttggtaccaaataaggtacaaataactgtacaactataaatagtcaaatattatctttagttttcttctgtgcctgtcctctaaaagcctccccctgtgctccctcagtggygctcttaaggctcttttatggtttggagctgcctgagtcataaatcattgtgtaaataacatatttaaaattttattgtgccttagtttatcttttaacacag

SEQ ID NO: 353065 - DNA, 487 bp, Homo sapiens
ccattacaatcctgaaaccatcttctgctcccctgtccgtggaaatattgtcttccacaaaaccagtccctgttgccacaaaggttggggactacrtagaactcaatgaaatgagaagtagtttctgattcaactaatgtctgttaagtgattctctctataggtccaagtattatgagcaacctcacacaatcacattcatgagatttctattactctgtgtgttggacttcaaggaaggaatggaatgccatcattaggcaccaaatatttccactattgattaacattgagatttttagtaaatatttaggagtactgggggatgaaggagagacaacactatttattcttgtactagaatactcatttctaatgcctataattaaatcaataggagagttattgagaaaatgtgggcattttgagatagttgaagagtaagtattccatatgtatgtcagttgaaaattatttttgctatttg

SEQ ID NO: 353066 - DNA, 487 bp, Homo sapiens
ccattacaatcctgaaaccatcttctgctcccctgtccgtggaaatattgtcttccacaaaaccagtccctgttgccacaaaggttggggactacgtagaactcaatgaaatgagaagtagtttctgattcaactaatgtctgttaagtgattctctctataggtccaagtattatgagcaacctcacacaatcacattcatgagatttctattactctgtgtgttggacttcaaggaaggaatggaatgccatcattaggcaccaaatayttccactattgattaacattgagatttttagtaaatatttaggagtactgggggatgaaggagagacaacactatttattcttgtactagaatactcatttctaatgcctataattaaatcaataggagagttattgagaaaatgtgggcattttgagatagttgaagagtaagtattccatatgtatgtcagttgaaaattatttttgctatttg

SEQ ID NO: 353067 - DNA, 487 bp, Homo sapiens
ccattacaatcctgaaaccatcttctgctcccctgtccgtggaaatattgtcttccacaaaaccagtccctgttgccacaaaggttggggactacgtagaactcaatgaaatgagaagtagtttctgattcaactaatgtctgttaagtgattctctctataggtccaagtattatgagcaacctcacacaatcacattcatgagatttctattactctgtgtgttggacttcaaggaaggaatggaatgccatcattaggcaccaaatatttccactattgattarcattgagatttttagtaaatatttaggagtactgggggatgaaggagagacaacactatttattcttgtactagaatactcatttctaatgcctataattaaatcaataggagagttattgagaaaatgtgggcattttgagatagttgaagagtaagtattccatatgtatgtcagttgaaaattatttttgctatttg

SEQ ID NO: 353068 - DNA, 487 bp, Homo sapiens
ccattacaatcctgaaaccatcttctgctcccctgtccgtggaaatattgtcttccacaaaaccagtccctgttgccacaaaggttggggactacgtagaactcaatgaaatgagaagtagtttctgattcaactaatgtctgttaagtgattctctctataggtccaagtattatgagcaacctcacacaatcacattcatgagatttctattactctgtgtgttggacttcaaggaaggaatggaatgccatcattaggcaccaaatatttccactattgattaacattgagatttttagtaaatatttaggagtactgggggatgaaggagagacaacactatttattcttgtactagaatactcatttctaatgcctataattaaatcaataggaragttattgagaaaatgtgggcattttgagatagttgaagagtaagtattccatatgtatgtcagttgaaaattatttttgctatttg

SEQ ID NO: 353069 - DNA, 559 bp, Homo sapiens
attaactttttaaaatgtttgtattttcytttttttttagactccacttatgagtgagatcatgctgtacttgtctttctgtgtctggcttatttcacttaccacagtgtcctctagattcatctatattgtcataaatggcaagattttactttttatggctaaagagtacttcattgtatacagatagtgcattttctttttgcattcatctgttgccagacacttaggcttattctgtatcttggctatcatacatagtgcgcaataaaaatgactaggtgcatcgcaattagctttaaaaagatggaacggcattgtaaggacagaccatgaatctaagcccttaggctgaatacttaggttgaataaaattgttggaagaagtggctatttgatgtatgtaatgaaagggattcttacatggcaggtattattaggagaaaaaaaaaagagaaagaaagttgaaggagaggggaaaactgccacagcaggttaagcaacttgctttgaaataattgggattagtaagtgtgcagagatagaactggtgatgaaa

SEQ ID NO: 353070 - DNA, 559 bp, Homo sapiens
attaactttttaaaatgtttgtattttcctttttttttagactccacttatgagtgagatcatgctgtacttgtctttctgtgtctggcttatttcacttaccacrgtgtcctctagattcatctatattgtcataaatggcaagattttactttttatggctaaagagtacttcattgtatacagatagtgcattttctttttgcattcatctgttgccagacacttaggcttattctgtatcttggctatcatacatagtgcgcaataaaaatgactaggtgcatcgcaattagctttaaaaagatggaacggcattgtaaggacagaccatgaatctaagcccttaggctgaatacttaggttgaataaaattgttggaagaagtggctatttgatgtatgtaatgaaagggattcttacatggcaggtattattaggagaaaaaaaaaagagaaagaaagttgaaggagaggggaaaactgccacagcaggttaagcaacttgctttgaaataattgggattagtaagtgtgcagagatagaactggtgatgaaa

SEQ ID NO: 353071 - DNA, 559 bp, Homo sapiens
attaactttttaaaatgtttgtattttcctttttttttagactccacttatgagtgagatcatgctgtacttgtctttctgtgtctggcttatttcacttaccacartgtcctctagattcatctatattgtcataaatggcaagattttactttttatggctaaagagtacttcattgtatacagatagtgcattttctttttgcattcatctgttgccagacacttaggcttattctgtatcttggctatcatacatagtgcgcaataaaaatgactaggtgcatcgcaattagctttaaaaagatggaacggcattgtaaggacagaccatgaatctaagcccttaggctgaatacttaggttgaataaaattgttggaagaagtggctatttgatgtatgtaatgaaagggattcttacatggcaggtattattaggagaaaaaaaaaagagaaagaaagttgaaggagaggggaaaactgccacagcaggttaagcaacttgctttgaaataattgggattagtaagtgtgcagagatagaactggtgatgaaa

SEQ ID NO: 353072 - DNA, 559 bp, Homo sapiens
attaactttttaaaatgtttgtattttcctttttttttagactccacttatgagtgagatcatgctgtacttgtctttctgtgtctggcttatttcacttaccacagtgtcctctagattcatcyatattgtcataaatggcaagattttactttttatggctaaagagtacttcattgtatacagatagtgcattttctttttgcattcatctgttgccagacacttaggcttattctgtatcttggctatcatacatagtgcgcaataaaaatgactaggtgcatcgcaattagctttaaaaagatggaacggcattgtaaggacagaccatgaatctaagcccttaggctgaatacttaggttgaataaaattgttggaagaagtggctatttgatgtatgtaatgaaagggattcttacatggcaggtattattaggagaaaaaaaaaagagaaagaaagttgaaggagaggggaaaactgccacagcaggttaagcaacttgctttgaaataattgggattagtaagtgtgcagagatagaactggtgatgaaa

SEQ ID NO: 353073 - DNA, 624 bp, Homo sapiens
acaggggttgggggcgtggttacaacaatgttagaaacactgaaagagcaaaagaggcctgctactccagatgatgagcaaatgaaggaagccacttccatccttaactgtgaaaaatgagtaggggaaggtggtgcattctgggtcccatgattccagactgaccattggccctatttgagtgcagctgctgttaggcagaaactctggactccaaactctcagtaaaacttctgaagacactgctgttgctattgcagctgtcagcaccattgattcagctgagaagcagtccataatatcacactgacacccaagctgttggttgtgtttttttgaaccagattgaaattaatatctattgtatggttcaatttctatgaagttcaatgtcaagcaaatgtaatttataaagataaaagtaagaacagtggttgcctatagtaatgattggaggttcacaatagagactcctggattctagtaatactcaattcatattcatgtaagttgtgatgacattagtattttacrttctaaaaatgtttaatgctatatgctcaagatctgtgtctttcacatgtgcatatcatatttcatatttcaattaataaatcagtaaaa

SEQ ID NO: 353074 - DNA, 533 bp, Homo sapiens
cgttatcgtccaaaaattagttacattgcctcatcaaagtgcaaagaggctggtaaatgtactttaatttgctaaatgccttgcaagatatagggatgtatattgaggagacaaagaatggaagtgagaattacttgttattttgacttccaactatcggagaacattcccaaagaaatattatactaaatttctgcctgaataattatttcagcatctctttcatggtctttgcttaagggcagtgcttccagctgaggytgcatgcagtcttatattccatagactaactgtctagggtaattcagacttataacctaagtttatgttacaacttttctaacttatgttcctttgatggagtttatcctcattgccccaccccccaaatggtttactaataaagtatagtctaaaacaggaacattattctttttatattctttaatctccattgaaataaacacaatttgtagaattattaactaatagaaattaattgaaaagaagcatctttcttttatatgaacaat

SEQ ID NO: 353075 - DNA, 533 bp, Homo sapiens
cgttatcgtccaaaaattagttacattgcctcatcaaagtgcaaagaggctggtaaatgtactttaatttgctaaatgccttgcaagatatagggatgtatattgaggagacaaagaatggaagtgagaattacttgttattttgacttccaactatcggagaacattcccaaagaaatattatactaaatttctgcctgaataattatttcagcatctctttcatggtctttgcttaagggcagtgcttccagctgaggctgcatgcagtcttatattccatagactaamtgtctagggtaattcagacttataacctaagtttatgttacaacttttctaacttatgttcctttgatggagtttatcctcattgccccaccccccaaatggtttactaataaagtatagtctaaaacaggaacattattctttttatattctttaatctccattgaaataaacacaatttgtagaattattaactaatagaaattaattgaaaagaagcatctttcttttatatgaacaat

SEQ ID NO: 353076 - DNA, 558 bp, Homo sapiens
cagtatatttaaccactgcctaccagagtagtacatagagaagcaaacctaatctataagcaacaatgagagcatgctacagataacttttaatattgtaaatatatatgatacagatgataaaatctttatgaaataatctataggagaggtgaaatgggtctctgccaggagaatgcaaaggcagtaaaaaattaaaaaccaaaatattgagrattattttgaggaaagtgttagtagaatttaataatacatttaatagaaacataagattaaaaatgcaaagatgaattcaaagttgcttacattcaaaaataactcattaaatgtacagtattttaagcacacttttgatctatgaagagtataaatatgaataagacatagttctttaggctagacatagagaatatttttttgtatagaaataaaatctagagtatgtaatattaggggaaagaaaatgtctcatagatgtcaataaaccttgttccctctattttttttttttactggtttcatttcctgtaataattgtggtaagagtaatgctgaaac

SEQ ID NO: 353077 - DNA, 558 bp, Homo sapiens
cagtatatttaaccactgcctaccagagtagtacatagagaagcaaacctaatctataagcaacaatgagagcatgctacagataacttttaatattgtaaatatatatgatacagatgataaaatctttatgaaataatctataggagaggtgaaatgggtctctgccaggagaatgcaaaggcagtaaaaaattaaaaaccaaaatattgaggattattttgaggaaagtgttagtagaatttaataatacatttaatagaaacataagattaaaaatgcaaagatgaattcaaagttgcttacattcaaaaataactcattaaatgtacagtattttaagcacacttttgatctatgaagagtataaatatgaataagacatagttctttaggctagacatagagaatatttttttgtatagaaataaaatctagagtatgtaatattaggggaaagaaaatgyctcatagatgtcaataaaccttgttccctctattttttttttttactggtttcatttcctgtaataattgtggtaagagtaatgctgaaac

SEQ ID NO: 353078 - DNA, 410 bp, Homo sapiens
tgggttacctccaactcaaccacttcagagctactacagtggtaatgcatgttgaagaaaagagtcaaactctgtgaaatatttgaagagatttattctgaggcaaatatgagtgacctcggcctgtcacacagcccaggagatcctaagaacatgtgccaaggttgttggrctacagcttggatttatacatgtgagggagacataagacatcaatcagtacacctaagatacacattggtaaaattgggaaaggtgagacaactcaaagcaggtgggggtggggtgggtgaaggcttccaggttaaaggtgaattcaaagattttctgactggcatttgacaactggctaaaataatttatctaaagaccggaatcaatagacaggagtgtatgggttaagataaggt

SEQ ID NO: 353079 - DNA, 550 bp, Homo sapiens
attctctacaaaatggagattttccccacagaaacagccttgtaggtccatttcaaaatatgtcaaagaaatgtatttttgtggtgaaatactttgatttctttcaaggcctgctatctgtcatgttgatatcttattgctacgaagagtctgttttgtcattcttaagtctctactttaatgttaacactgttcagctatgcaygaattccgaaaggatgaaagtaaataacgaggcatgttcaaccacccatttccgtcatggcctccattactgtttcaggtttagtttaaaatgcccttggccaagataaagagcccatttagttggttaacggacattgaatttcatttttggcttacatgcaggtgccatgctctccttaggttgctccctgccaatgctgagcaaggaagatattatagggcttttcattcttgtcccacatggactcatctaaaggtgaaagttcactttggtgctctttcagtgtggctgacaatttctcagatctgcactcttctctgaggctcctcctttccaattatc

SEQ ID NO: 353080 - DNA, 550 bp, Homo sapiens
attctctacaaaatggagattttccccacagaaacagccttgtaggtccatttcaaaatatgtcaaagaaatgtatttttgtggtgaaatactttgatttctttcaaggcctgctatctgtcatgttgatatcttattgctacgaagagtctgttttgtcattcttaagtctctactttaatgttaacactgttcagctatgcacgaattccgaaaggatgaaagtaaataacgaggcatgttcaaccacccatttccrtcatggcctccattactgtttcaggtttagtttaaaatgcccttggccaagataaagagcccatttagttggttaacggacattgaatttcatttttggcttacatgcaggtgccatgctctccttaggttgctccctgccaatgctgagcaaggaagatattatagggcttttcattcttgtcccacatggactcatctaaaggtgaaagttcactttggtgctctttcagtgtggctgacaatttctcagatctgcactcttctctgaggctcctcctttccaattatc

SEQ ID NO: 353081 - DNA, 550 bp, Homo sapiens
attctctacaaaatggagattttccccacagaaacagccttgtaggtccatttcaaaatatgtcaaagaaatgtatttttgtggtgaaatactttgatttctttcaaggcctgctatctgtcatgttgatatcttattgctacgaagagtctgttttgtcattcttaagtctctactttaatgttaacactgttcagctatgcacgaattccgaaaggatgaaagtaaataacgaggcatgttcaaccacccatttccgtcatggcctccattactgtttcaggtttagtttaaaatgcccttggccaagataaagagcccatttagttggttaacggacattgaatttyatttttggcttacatgcaggtgccatgctctccttaggttgctccctgccaatgctgagcaaggaagatattatagggcttttcattcttgtcccacatggactcatctaaaggtgaaagttcactttggtgctctttcagtgtggctgacaatttctcagatctgcactcttctctgaggctcctcctttccaattatc

SEQ ID NO: 353082 - DNA, 572 bp, Homo sapiens
caggtttagtttaaaatgcccttggccaagataaagagcccatttagttggttaacggacattgaatttcatttttggcttacatgcaggtgccatgctctccttaggttgctccctgccaatgctgagcaaggaagatattatagggcttttcattcttgtcccacatggactcatctaaaggtsaaagttcactttggtgctctttcagtgtggctgacaatttctcagatctgcactcttctctgaggctcctcctttccaattatctttcatgctctctcttcttttgaggtgccggcttgcatcatgatctggaggctcttgcagcctcttgctctatcttctctttattcttcaaaggcgttttctctggttactctcttatacgtgtaattccatcttggtgtctgattcttgggaaacccaaactggcttataatttttcttactttcagtaaaaccttctttgctgatgcatcattcattaattcattaaatgtattgtgttttgtatgggaaaacaatgatgccaaagtgtctatagctatatagtctgatatgtgctataa

SEQ ID NO: 353083 - DNA, 574 bp, Homo sapiens
ctgaggctcctcctttccaattatctttcatgctctctcttcttttgaggtgccggcttgcatcatgatctggaggctcttgcagcctcttgctctatcttctctttattcttcaaaggcgttttctctggttactctcttatacgtgtaattccatcttggtgtctgattcttgggaaacccaaactggcttataatttttcttactttcagtaaaaccttctttgctgatgcatcattcattaattcattaaatgtattgtgttttgtatgggaaaacaatgatgccaaagtgtctatagctatatagtctgatatgtgctataataagaatttggaaaaagtattattggttcacaaaggcagaaatttaggaggttagatacatttaaagtaaaatttgattaaaaagtgtraacttaaatagattaagataacatggggtgtttgtaaaatatattagtaaaatacaatgacatacccaaagtcctgttaaatcaaattaaatatggcctgagaaaaacgccatacttctatatttcagtccttgtgaatgaactgcaacctaactcaa

SEQ ID NO: 353084 - DNA, 548 bp, Homo sapiens
ggattaattgaaaagtggatatgaaggcatgactgcaagctacaaattgagcctatttttagtaacttgctctagctgagatgttatatgttcagatttgttgacaygaagctttattgagaagcattacttattcccaataactcaaggaggagcctgttttgggaggaaaaaccacatcaagtatgttttgttgaatcaagaggattttatttttagaaaagtactaatgattttttctgaaaatgtgactattttgaaatctaagaaaaatcaaatatttgatacttaacgtaatttgcaacttgacataaaactactcagtttagttggtcataatatactcattcctaacttattccactttacaaaaaaagtaaaagaaaagcataaataaataaataaggaaagagaaacaaacaaacaaaaaacattggaaactgatgaggtaacaatttatagaatcaaggattaatttccaccaattatggcatgaataaaactaatcaactaaaatatattttaaaaaacaagaagatagtaggaaa

SEQ ID NO: 353085 - DNA, 600 bp, Homo sapiens
acagtaattaggcaggcactctttgcctgttggacattaccattttctttaatgtttgtatgaaacgatgccaatttatctttaagcaatttatctttaagttgctaaagtgatgcaaacggctgtcatgtaacaatcaccaagagaggacccattctagttcacaaactgccctgatgctttttataaaaaacaatccacttcaggataatgtgttgttcctggtttctatgtctctttaacttctttaaatcagaagcattccatagtccttcttcaaccttcatagcatcctaaacattttttgaaggtaatattccaatggattctatttttagaatgtctcccaatttygatttgtctggtgttttctcataatgaggtgtcaagacatgcattattggcaataaaatcaccaacatgatgctatgctcttcttatcatatttcttcaggttatatatgaaattaatttttcccatcagcggtgattttaattgtgatcatttgaaaggtaatgtcttccagatttctctattgcagaggtactcctcattttctttatattaatataacatgacataaaatgatattttttaca

SEQ ID NO: 353086 - DNA, 600 bp, Homo sapiens
acagtaattaggcaggcactctttgcctgttggacattaccattttctttaatgtttgtatgaaacgatgccaatttatctttaagcaatttatctttaagttgctaaagtgatgcaaacggctgtcatgtaacaatcaccaagagaggacccattctagttcacaaactgccctgatgctttttataaaaaacaatccacttcaggataatgtgttgttcctggtttctatgtctctttaacttctttaaatcagaagcattccatagtccttcttcaaccttcatagcatcctaaacattttttgaaggtaatattccaatggattctatttttagaatgtctcccaattttgatttgtctggtgttttctcataatgaggtgtcaagacatgcattattggcaataaaatcaccaacatgatgctatgctcttcttatcatatttcttcaggttatatatgaaattaatttttcccatcagyggtgattttaattgtgatcatttgaaaggtaatgtcttccagatttctctattgcagaggtactcctcattttctttatattaatataacatgacataaaatgatattttttaca

SEQ ID NO: 353087 - DNA, 600 bp, Homo sapiens
acagtaattaggcaggcactctttgcctgttggacattaccattttctttaatgtttgtatgaaacgatgccaatttatctttaagcaatttatctttaagttgctaaagtgatgcaaacggctgtcatgtaacaatcaccaagagaggacccattctagttcacaaactgccctgatgctttttataaaaaacaatccacttcaggataatgtgttgttcctggtttctatgtctctttaacttctttaaatcagaagcattccatagtccttcttcaaccttcatagcatcctaaacattttttgaaggtaatattccaatggattctatttttagaatgtctcccaattttgatttgtctggtgttttctcataatgaggtgtcaagacatgcattattggcaataaaatcaccaacatgatgctatgctcttcttatcatatttcttcaggttatatatgaaattaatttttcccatcagcggtgattttaattktgatcatttgaaaggtaatgtcttccagatttctctattgcagaggtactcctcattttctttatattaatataacatgacataaaatgatattttttaca

SEQ ID NO: 353088 - DNA, 541 bp, Homo sapiens
tgtgtttgtaaaatatatcattactaattggcgtttatcttgggagttcaagatggtttccatattcaatcaacccatcaatgtggactayggtcacttgaaaagaccagcaaatcctctgcacaaaaggccactagaaattcattaaagcagccttccatcattctcgaaattgaccaaagcattcaactacctgagaaatatttatgtttggaaagctattgaaatgcaattaaaaatatcaggaaacctgtttttaccttttgtcctaatcttgctaaatccttcttaattttaggagacactgcttctccttccactgttcttttactttctccttcccctttgtttttgcctcccccttcctctcccttttctacattccttctctctcctaaatgttgtataaatttctacatatgtaatcatattatttacaaataggaacagttttacttatttctttccagtctgcatttattttattcttcctttttttccttacacactggatagaactctaagtattatgttgaaaaag

SEQ ID NO: 353089 - DNA, 541 bp, Homo sapiens
tgtgtttgtaaaatatatcattactaattggcgtttatcttgggagttcaagatggtttccatattcaatcaacccatcaatgtggactacggtcacttgaaaagaccagcaaatcctctgcacaaaaggccactagaaattcattaaagcagccttccatcattctcgaaattgaccaaagcattcaactacctgagaaatatttatgtttggaaagctattgaaatgcaattaaaaatatcaggaaacctgtttttaccttttgtcctaatcttgctaaatccttcttaattttaggagacactgcttctccttccactgttcttttactttctccttcccctttgtttttgcctcccccttcctctcccttttctacattccttctctctcctaaatgytgtataaatttctacatatgtaatcatattatttacaaataggaacagttttacttatttctttccagtctgcatttattttattcttcctttttttccttacacactggatagaactctaagtattatgttgaaaaag

SEQ ID NO: 353090 - DNA, 611 bp, Homo sapiens
aagtgtcatgcttgcttcataaaatgaattgagaaggatttcttcctcttctgtttctcgaaaattgtagagaactcttgttttttgttgttgtttgtttgttgttttgttttttcttatttttatcctcatactgagaaccaaacagtctggagtgtaaaacatggttcctcattccagttaaatctagtatacaatgacaacaaccctcttgggttaagcattggcctacaaacagaaaaaaaccttcagggagatagatgctgatctaggmattgtgagaaaagctgaattcatttttaatcatgaatggcttttaaggaaagaagatttattaactaaaataaatagattagagggaattctcatctatgagagaggaagggatgggattcaacctggaaaaaataatgaagttttagtgaacttggtaaggtagactcaacaattaatgatggataatgctaggacccaacactggtaatgagtttgtattatgactcaatagcatcactttatcactttaacacagatggaggcctaaataaccatagggtaatggttcttcttagaggcagaaggacacatttatataatcttagggaccccat

SEQ ID NO: 353091 - DNA, 611 bp, Homo sapiens
aagtgtcatgcttgcttcataaaatgaattgagaaggatttcttcctcttctgtttctcgaaaattgtagagaactcttgttttttgttgttgtttgtttgttgttttgttttttcttatttttatcctcatactgagaaccaaacagtctggagtgtaaaacatggttcctcattccagttaaatctagtatacaatgacaacaaccctcttgggttaagcattggcctacaaacagaaaaaaaccttcagggagatagatgctgatctaggaattgtgagaaaagctgaattcatttttaatcatgaatggcttttaaggaaagaagatttattaactaaaataaatagattagagggaattctcayctatgagagaggaagggatgggattcaacctggaaaaaataatgaagttttagtgaacttggtaaggtagactcaacaattaatgatggataatgctaggacccaacactggtaatgagtttgtattatgactcaatagcatcactttatcactttaacacagatggaggcctaaataaccatagggtaatggttcttcttagaggcagaaggacacatttatataatcttagggaccccat

SEQ ID NO: 353092 - DNA, 611 bp, Homo sapiens
aagtgtcatgcttgcttcataaaatgaattgagaaggatttcttcctcttctgtttctcgaaaattgtagagaactcttgttttttgttgttgtttgtttgttgttttgttttttcttatttttatcctcatactgagaaccaaacagtctggagtgtaaaacatggttcctcattccagttaaatctagtatacaatgacaacaaccctcttgggttaagcattggcctacaaacagaaaaaaaccttcagggagatagatgctgatctaggaattgtgagaaaagctgaattcatttttaatcatgaatggcttttaaggaaagaagatttattaactaaaataaatagattagagggaattctcatctatgagagaggaagggatgggattcaacctggaaaaartaatgaagttttagtgaacttggtaaggtagactcaacaattaatgatggataatgctaggacccaacactggtaatgagtttgtattatgactcaatagcatcactttatcactttaacacagatggaggcctaaataaccatagggtaatggttcttcttagaggcagaaggacacatttatataatcttagggaccccat

SEQ ID NO: 353093 - DNA, 584 bp, Homo sapiens
tttagtgaacttggtaaggtagactcaacaattaatgatggataatgctaggacccaacactggtaatgagtttgtattatgactcaatagcatcactttatcactttaacacagatggaggcctaaataaccatagggtaatggttcttcttagakgcagaaggacacatttatataatcttagggaccccatctctgaggtcactcataacttatattaattcattgttattgccattgccccaagaatagataaggataagacatcctgtagtacaggtagcagagatataaactattcttattcttgtgtcttgtctataggaagggagtgtatcctggtgtaagacagcatatagtagagaccattgtcaattagggcctgtgaactaagacagggtgactgtctaagtccacaacccattagaaacccagaaataatcaaatcatggtgagtagtaataacacttatttataatactatacggtataaagacaagaaccaattatgttgagtagctgtaacaaatagctctatcattcgtaataactttttctgtaataaaactgaattgtaacatga

SEQ ID NO: 353094 - DNA, 584 bp, Homo sapiens
tttagtgaacttggtaaggtagactcaacaattaatgatggataatgctaggacccaacactggtaatgagtttgtattatgactcaatagcatcactttatcactttaacacagatggaggcctaaataaccatagggtaatggttcttcttagaggcagaaggacacatttatataatcttagggaccccatctctgaggtcactcataayttatattaattcattgttattgccattgccccaagaatagataaggataagacatcctgtagtacaggtagcagagatataaactattcttattcttgtgtcttgtctataggaagggagtgtatcctggtgtaagacagcatatagtagagaccattgtcaattagggcctgtgaactaagacagggtgactgtctaagtccacaacccattagaaacccagaaataatcaaatcatggtgagtagtaataacacttatttataatactatacggtataaagacaagaaccaattatgttgagtagctgtaacaaatagctctatcattcgtaataactttttctgtaataaaactgaattgtaacatga

SEQ ID NO: 353095 - DNA, 568 bp, Homo sapiens
ggagtttatgtaactgtaaggtacataaaacaatacaaatgaaaaggctaaaataaatcagaaaatgaagggaagaaaacaaatatccatattaagtatacataatatctcaaatattctttaagatgtcttaaatagattttaatatttaatcctartgacaggataatctgatttattacagatgatataattgaggctaatacaaatctgttgactttaaattttcaaagtcttcctgaattatttgactgtgtaatattttggtaaacataaataagtggatactaatgcattgaaacagaaacagaatactgttcaagcaatagaaaaaaatgaaacaatagaaaagatcgaatttgtagtatgactacaatttaagatttaataaagacaaaaatagaaaccaatatgtagttaggaggatagaaaaaagtacagtggaccctccatatccataggttctgcatgtgtggattcaaccacccatggatcaaaaatatttggaaaaacatttatgaaaaagtgaacacatatggaattctgccttgtcattatcccctaaaga

SEQ ID NO: 353096 - DNA, 568 bp, Homo sapiens
ggagtttatgtaactgtaaggtacataaaacaatacaaatgaaaaggctaaaataaatcagaaaatgaagggaagaaaacaaatatccatattaagtatacataatatctcaaatattctttaagatgtcttaaatagattttaatatttaatcctaatgacaggataatctgatttattacagatgatataattgaggctaatacaaatctgttgactttaaattttcaaagtcttcctgaattatttgactgtrtaatattttggtaaacataaataagtggatactaatgcattgaaacagaaacagaatactgttcaagcaatagaaaaaaatgaaacaatagaaaagatcgaatttgtagtatgactacaatttaagatttaataaagacaaaaatagaaaccaatatgtagttaggaggatagaaaaaagtacagtggaccctccatatccataggttctgcatgtgtggattcaaccacccatggatcaaaaatatttggaaaaacatttatgaaaaagtgaacacatatggaattctgccttgtcattatcccctaaaga

SEQ ID NO: 353097 - DNA, 568 bp, Homo sapiens
ggagtttatgtaactgtaaggtacataaaacaatacaaatgaaaaggctaaaataaatcagaaaatgaagggaagaaaacaaatatccatattaagtatacataatatctcaaatattctttaagatgtcttaaatagattttaatatttaatcctaatgacaggataatctgatttattacagatgatataattgaggctaatacaaatctgttgactttaaattttcaaagtcttcctgaattatttgactgtgtaatattttggtaaacataaataagtggatactaatgcattgaaacagaaacagaatactgttcaagmaatagaaaaaaatgaaacaatagaaaagatcgaatttgtagtatgactacaatttaagatttaataaagacaaaaatagaaaccaatatgtagttaggaggatagaaaaaagtacagtggaccctccatatccataggttctgcatgtgtggattcaaccacccatggatcaaaaatatttggaaaaacatttatgaaaaagtgaacacatatggaattctgccttgtcattatcccctaaaga

SEQ ID NO: 353098 - DNA, 359 bp, Homo sapiens
tcttaaaacttctctctggctcattctggtctgatcacaccagctttcttatggcttcttttatctgccaagaattatgctctggtctaattgacctccccaaatttgtatattaaaattctcaccaccaaggtgataatattaaaaaatgggcaatttkgtaggtgactggatcatgggagtggagcccttatgaaaggtgccagagagacccctccctcttccaccatgtgaggttagactgagaaatacatctctgtggtttatgagctgctcagtctatggcattttgttatagcagcccatgctaatgaatacagatgaccgtgtgtctgcagaccttcctaggaaattattga

SEQ ID NO: 353099 - DNA, 359 bp, Homo sapiens
tcttaaaacttctctctggctcattctggtctgatcacaccagctttcttatggcttcttttatctgccaagaattatgctctggtctaattgacctccccaaatttgtatattaaaattctcaccaccaaggtgataatattaaaaaatgggcaattttgtaggtgactggatcatgggagtggagcccttatgaaaggtgccagagagacccctccctcttccaccatgtgaggttagactgagaaatacatctctgtggtttatragctgctcagtctatggcattttgttatagcagcccatgctaatgaatacagatgaccgtgtgtctgcagaccttcctaggaaattattga

SEQ ID NO: 353100 - DNA, 469 bp, Homo sapiens
ctcagcactgaacaaaatctaaagaatttcattgtcagccatcctccattgtcatttataagaaagattcctaaggcagaagtaaaattttatgagatgtatatgtgtgtctgcagaaaaaaactggcaatgtattatactgcatatcaagtgatatactgttatttgaaagtaggctgtgatgagttaagtatttatattttaaaacttaaagtagaagtatttatattttaaaccttaaaacagaagtatttatattttaaaccttaaagcagaacctaaaaaagaagtacattagtaaaccaatagtagaaatracacaaaataatgaagtacatatttaactaatctacaaaatgtaaaaaaaggataaataattgaacaaggagcatataagataaatagaaaacatagcaagaaggtatatttaaacctaagcttattcataatcacattacattacatgtaa

SEQ ID NO: 353101 - DNA, 469 bp, Homo sapiens
ctcagcactgaacaaaatctaaagaatttcattgtcagccatcctccattgtcatttataagaaagattcctaaggcagaagtaaaattttatgagatgtatatgtgtgtctgcagaaaaaaactggcaatgtattatactgcatatcaagtgatatactgttatttgaaagtaggctgtgatgagttaagtatttatattttaaaacttaaagtagaagtatttatattttaaaccttaaaacagaagtatttatattttaaaccttaaagcagaacctaaaaaagaagtacattagtaaaccaatagtagaaatgacayaaaataatgaagtacatatttaactaatctacaaaatgtaaaaaaaggataaataattgaacaaggagcatataagataaatagaaaacatagcaagaaggtatatttaaacctaagcttattcataatcacattacattacatgtaa

SEQ ID NO: 353102 - DNA, 469 bp, Homo sapiens
ctcagcactgaacaaaatctaaagaatttcattgtcagccatcctccattgtcatttataagaaagattcctaaggcagaagtaaaattttatgagatgtatatgtgtgtctgcagaaaaaaactggcaatgtattatactgcatatcaagtgatatactgttatttgaaagtaggctgtgatgagttaagtatttatattttaaaacttaaagtagaagtatttatattttaaaccttaaaacagaagtatttatattttaaaccttaaagcagaacctaaaaaagaagtacattagtaaaccaatagtagaaatgacacaaaataatgaagtacatatttaactaatctacaaaatgtaaaaaaaggataaawaattgaacaaggagcatataagataaatagaaaacatagcaagaaggtatatttaaacctaagcttattcataatcacattacattacatgtaa

SEQ ID NO: 353103 - DNA, 467 bp, Homo sapiens
tttttcacacattaacaaacaattctgcatttaaaatactcaagccaaaaacttacagaattgaaaagaaaaatatacaaatccacaatatatttaaagatttgaaaactattttctgatatyattaaacaagtaaataaaaaattttaaagaaaatatctacaaatttaatgacattataacctaacaagttctaggatgcatagaatattatactcatcacagcaaaaacttattttattttccaagtgcactgacattcatcacatgttaggcaacaaataataaagtttcaacaaatttaacaggattagatcatggagagtatgttctctgacccaatagaattaaatttaaaataaaaaaccaaaactacaatgaaatccccaaatatttagatataataaacttctaatgatgccttatagcaaatagtaaatcaaaagataaattagaaagtattttgg

SEQ ID NO: 353104 - DNA, 633 bp, Homo sapiens
aatttccttcttttctgtcatttayaaatgacttatttttatcctgttaatatatatcttaattatatatatcttacggcttatttgcatgtcagagatttttttgtgggtattttgatgttatgctattgaatatctagattttattggctacctttgaacaatgttgtggcaggcagttcagtaacttcaggatgagtatttgtctgttgttgttttaaatcttctctttaaactttgtggagttagtctagagccatctgtaatttggagctaaatgagcactgtcactagggcatgaacctccagtggtctttactgaatatcctggaggtaaagaggggattcccttctctgattagaatttggaatataaagagaaaagagaaaaatagaaagctatgcataaacacgtgcattaaaatgaattttatgtgggctttttcatgaaaatgttcctaaggtatttttttttaattgtggtaaaatacacataacataaaatgtactctgttaaccattttaagtgtacagtttagtggtactaaatatagtcataacatttggcagccgtccctaccatccatctccataattcgtttcatcttgtaaaactgaaactctataacaatt

SEQ ID NO: 353105 - DNA, 397 bp, Homo sapiens
ttcaactctgttagctgagtagatacatcatgaaaaagtttctgacattgcttctatstagcttttattggaagatatttcctttttcaccgtagtcctgagagcgctccaaatgtccacttccagatactacaaaaagagtgtttcaaacctgctctatgaaagggactgttcaacactgtgacttcaattgaaacatcccaatgaagcttctgagaatgcttctgtctagagtttatatgaagacaatcccgtttccaacgaaatcctcaaagctatccaaatatcctcttgcagattttacaaaaagagtgtttcaaaactgctctttcaaaagaaagcttcaacactgttagttgagggcgcacatcacaaataagattctgagaatgcttct

SEQ ID NO: 353106 - DNA, 397 bp, Homo sapiens
ttcaactctgttagctgagtagatacatcatgaaaaagtttctgacattgcttctatgtagcttttattggaagatayttcctttttcaccgtagtcctgagagcgctccaaatgtccacttccagatactacaaaaagagtgtttcaaacctgctctatgaaagggactgttcaacactgtgacttcaattgaaacatcccaatgaagcttctgagaatgcttctgtctagagtttatatgaagacaatcccgtttccaacgaaatcctcaaagctatccaaatatcctcttgcagattttacaaaaagagtgtttcaaaactgctctttcaaaagaaagcttcaacactgttagttgagggcgcacatcacaaataagattctgagaatgcttct

SEQ ID NO: 353107 - DNA, 397 bp, Homo sapiens
ttcaactctgttagctgagtagatacatcatgaaaaagtttctgacattgcttctatgtagcttttattggaagatatttcctttttcaccgtagtcctgagagcgctccaaatgtccacttccagatactacaaaamgagtgtttcaaacctgctctatgaaagggactgttcaacactgtgacttcaattgaaacatcccaatgaagcttctgagaatgcttctgtctagagtttatatgaagacaatcccgtttccaacgaaatcctcaaagctatccaaatatcctcttgcagattttacaaaaagagtgtttcaaaactgctctttcaaaagaaagcttcaacactgttagttgagggcgcacatcacaaataagattctgagaatgcttct

SEQ ID NO: 353108 - DNA, 193 bp, Homo sapiens
ctgctgtctgctttttatatgtaatcccgtttccaacgaaatcctcaaagctagacaaatatccacttgcagattccacaaaaagagtgtttcaaaactgctctctcaaaagaaaggttcaacgctgttagctgagtagatacatcatgaaaaaktttctgacattgcttctatctagcttttattggaagat

SEQ ID NO: 353109 - DNA, 414 bp, Homo sapiens
tatttcctttttcaccataggcctgaaagcgctccaaatgtccacatccagatactacaaaaagagtgtttcaaacctgctctatgaaagggaatgttcaacactgtgacttcaattgaaacatcccaatgaagcttctgagaatgcttctgtctagagtttatatgaagacaatcccgtttccaaygaaatcctcaaagctatccaaatatcctcttgcagattttacaaaaagagtgtttcaaaactgctctatcaaaagaaagcttcaacactgttagttgagggcgaacatcacaaataagattctcagaatgcttctgtctagttttcaggggaagatatttcctttttcaccataggcctgaaagcgctccaaatgtcctcatccagatactacaaaaagagtgtttc

SEQ ID NO: 353110 - DNA, 600 bp, Homo sapiens
tgctgttcttctgatagtgaataagtctcacaagatctgatggttttataaagaggagtttccctgcacaagctctcttgtcttgtctgctgccatgtgagacgtgcctttcascttgcgccatgattgtgaggcctacccagccatgtggaactgtgcatgtattaaacctctttcttctagaaattacccagtcttgggcatgtctttaccggtggtgtgaaaatggactaatacagtagcacacctcatagggctgaacaaaatggggaagatgagtggggagcaggagagagaaaaggggtctgtgggactctagcttttattgggcccagaacattacccaaataagttttccacggggcactagtcggtggggtgagtgccagcaggcacatttcttgactcccgctgcaaccgagcaggtcactctggcgtgtgggggctgtccatgtgcgctgtgaggtctgtggggtgagtcaggtaggttgtatccaacggttccatagctggtagtcaccaggagggaggcaactgtgtagggtcaatatctgggccagccacactgaggaactgtgagggttagaactggaaattgtc

SEQ ID NO: 353111 - DNA, 600 bp, Homo sapiens
tgctgttcttctgatagtgaataagtctcacaagatctgatggttttataaagaggagtttccctgcacaagctctcttgtcttgtctgctgccatgtgagacgtgcctttcaccttgcgccatgattgtgaggcctacccagccatgtggaactgtgcrtgtattaaacctctttcttctagaaattacccagtcttgggcatgtctttaccggtggtgtgaaaatggactaatacagtagcacacctcatagggctgaacaaaatggggaagatgagtggggagcaggagagagaaaaggggtctgtgggactctagcttttattgggcccagaacattacccaaataagttttccacggggcactagtcggtggggtgagtgccagcaggcacatttcttgactcccgctgcaaccgagcaggtcactctggcgtgtgggggctgtccatgtgcgctgtgaggtctgtggggtgagtcaggtaggttgtatccaacggttccatagctggtagtcaccaggagggaggcaactgtgtagggtcaatatctgggccagccacactgaggaactgtgagggttagaactggaaattgtc

SEQ ID NO: 353112 - DNA, 600 bp, Homo sapiens
tgctgttcttctgatagtgaataagtctcacaagatctgatggttttataaagaggagtttccctgcacaagctctcttgtcttgtctgctgccatgtgagacgtgcctttcaccttgcgccatgattgtgaggcctacccagccatgtggaactgtgcatgtattaaacctctttcttctagaaattacccagtcttgggcatgtctttaccggtggtgtgaaaatggactaatacagtagcacacctcatagggctgaacaaaatggggaagatgagtggggagcrggagagagaaaaggggtctgtgggactctagcttttattgggcccagaacattacccaaataagttttccacggggcactagtcggtggggtgagtgccagcaggcacatttcttgactcccgctgcaaccgagcaggtcactctggcgtgtgggggctgtccatgtgcgctgtgaggtctgtggggtgagtcaggtaggttgtatccaacggttccatagctggtagtcaccaggagggaggcaactgtgtagggtcaatatctgggccagccacactgaggaactgtgagggttagaactggaaattgtc

SEQ ID NO: 353113 - DNA, 564 bp, Homo sapiens
tctgtctagtttttatgcgaagatattccctttttcaccacaggcctcaaagcgatcaaaatgtctacttccagattccacaaaaagagtgtttcaaacctgctctatgaaagggaatgttcaactctttgacttgaatgctaacaccccaaagatgtttctgagaatgcttctatctagattttataagaagatattcgcgtttccaacgaaatcctcaaaactttccaatatccacaggtagattctaaaaaaagagtgtttcaatactgctttatgaaaagaaacgttcagctctgttagttgagcacacacaccacaaactagattatgagaatgcttctctctagtttttattcgaagatattccttttttcacygcaggcctcaatgcgatccaaatgtccacgtccagtttccacaaaaagagttttgcaaacctgctccatgatagggaatgttcaactccttgacttgaatgcaaaaatcccaaagatgtttctgagaatgcttctgtctagattttatacgaagatattcacgtttctaacgaaatcctcaaag

SEQ ID NO: 353114 - DNA, 541 bp, Homo sapiens
tagttcagtaaacacatcacaaactagtttctgagaatccttccgcgtagtttttaatggaagatatttcctttttcaccacaggccaccactggctccacatgtccagttccacaaactacaaaatcagttttttcaaacctgcttcttgaaagggaatgtttaactctgtgacttgaatgcaaacatcgccgagatgtttctgagaatgcttctgtctagattttgtatgaagatatttccttttccaatgaaatcctcaaagctatscaaatatccacttgcagattcaacaaaaagagtctttcaatgctgctctatcaaaagaaaggttcaactcttttatttgtgtacacacatcacaaactattttctgagaatggttctgtctagtttttttgggaagatatttcctttttcaccgtagaccaaaaatggctcaacatgtccggttgcagataatacaaaatcagtgtttcaaacctgctgtatgaaagggaatgttcacctctgtgacttgaatgcaaacatcacagagatg

SEQ ID NO: 353115 - DNA, 418 bp, Homo sapiens
cacccacacacaagtgcaatattgtcaaataaacgatgttcagctacactagcaatcacacmtgtgttttctccacagaaaagattaaaaatcacaataatatttattgtacatgtggaggtaaagatactcaaaatattaccctaaaatgtatttttttttgagatggagttttgcttttattgcccaggctagagtgcaatggcacaatcttggctcactgcaacctcagcctcccagggtcaagtaattctcctagctcagcctcccaagtagctgagattacaggcatgcgccaccacaatgggctaatttttgtatttagtagagacggggtttcaccatgttggtcagtctggtctccaactcctgacttcaggtgatctacccacttcaggctcccaaactgctgggatta

SEQ ID NO: 353116 - DNA, 536 bp, Homo sapiens
attaagtcacaagggttctgccctcatgaatggactaatgccattatcaagggagtgagtttgtaataaaagtgagtttggccccctcttgtgccatgggatgatggtgcagcaagaaggcccctgccagatgccagcctctcaaaccttggacttcccagactctagaactgtaagaaataaatctctgttcttcataaattacccagtctcaggtgttctgttatagcagcaaaaacaaactgagacaccaccgaaccatccattctatctgtgcatccattgtgaaacagtataatggtggataaataatcagactgtaaagctagactgtctggtttaaaatcttttctcatgtgagaggcagacagataaacagacactgaggcaacagggcaagttcagggtgctgtggrtgcagagaagaggggcctgacacccagttggagcctcagaggaggctgctggagggggacccattgtcaccattattatcaccagggggatttctttgacccatggtggggccatgatca

SEQ ID NO: 353117 - DNA, 563 bp, Homo sapiens
gatggatgggtaatcaattttccctttcctttatggtttgatagggtttctgtcacttgtaatcaaagaatgctggtgattacgttgctcaaaccagcaactcaagtgtcttctttggcttagccctctccttcacctccttatccaatcaaagccaaatttcttaaactctaccttctagtgagctctcagctctgctcacttctccccatccttgcagccttctggatcagggcagctctctctctgggttgtggcttgccccctccaatctctcactttagccagagtaatcttcagagcacacaaatctgacctggttatatcatgtctataaaaccttcaatggctccccattaccctcaagataaatctagctttttaaaaaagccttgarctttgaaatcattttagatttatagaagagttacgaagatattacagaatatcttcgtatatctttacccacttcccctgatgttaacttcttacataaccatggtatggctgggaaaaccaagaaatgaacactggtacaacattattaactaaattacagatgt

SEQ ID NO: 353118 - DNA, 535 bp, Homo sapiens
ccactagtggtgctagagcaattggacgtccatagtccaacaacaaaaacaacaacaaaaaacttggctaaaacctctcacaccttatacgaaaaatttaaaacgaatcaagcatgggcacagtggctcacacctgtaatcccagcactttgggaggccaaggcaggaggattgtttaagkccaggagttcaagaccagcctgagcaacatggtgagactctgtctcaaaataaaaaaaaaaattacccaggcatgcagagagccaaagcccgtgagacgtgaccaactcaacattccactggaggctatatgatcaaacagcaaagtgttcatcacgaatgcaagatgtgagcaaactcacactgccctgccaccaaaaagtttgctgagggacgctactccctggctccttgaagttatctattgagaaatctagcacctattgttcaaaggatgcagtctcacaagcctgctgtgaaccaaacaccaaacggctaactgacaattacccgacaatcatccccgctttctcac

SEQ ID NO: 353119 - DNA, 597 bp, Homo sapiens
ccaaaataacccacattttagaatagggcaactgaggccaagagaggtaaaggtatgttttaggcaaaacagcaaatatatagcataaatgagatttgaacccaagcagtttaactccagagcccataccctcaactcccatgccacactacttctctacattagggttaatgtctattgtatgccttctaaataaagagggagtagttacaggggaaggaagactgaagattgggaagcatctaaaatagctctgagctgataaagaagattaacttttgcttttaataaagtaaaatgcgaagcaatttaaagacattggggtaaaagattaaactgggatgtgttcactttcactttttactgcaagttttgactaagaattctgagatttaggcactagtaatctcattactctccagttagactttttacttattttttccactgctgttacccaacagcctacagggtgtgtgtgtgtgtgtgcacgcacgtgtgagtatgcacacaaaattatttttgcaattatatatatctatttgtaacaaacttccatagcaaattcyctatttaaaatacacacacacacacaag

SEQ ID NO: 353120 - DNA, 601 bp, Homo sapiens
aaactacaaaactcttagaataaaacataggagtaaatatttgtgaccttggattaggcatagtattcctagacgcaacaagaaaagcacaagtgacaaaagaagaaatagataaattacgtttcttcaaaatcaaaacctttttttcctgccaaaaatataatcaataatgtgaaaatgcaacccacagaataggagaaaatgtttaccagtcatatatctgataaggaacttgtatccacaatagataaagatcttcaactcaacaactaaaacaaagaaacaaatggaaaaatgsgcaaaggatttgaatagacatctcttcaaagacacacaaatggccaatatgtgcatgaaaacatgctcaataacatcagtcattaggggaatgcaaagcagaaacaaaattagatacaacttaatacccactagaatggccaaaatcaaaacaacagacaatcacacgtggtagtgaggatgtgaagaaattggaagcctcatacactgctggtgagattgtaaatctcacagcactttgtgagtggtgcagccactttggaagacagtttggaattttcttgaaatgttaaacatgaagtta

SEQ ID NO: 353121 - DNA, 398 bp, Homo sapiens
ctacttttgtaaaatattattgaagtataatatacctgagagaaagtgtgccatcttaaaggtacaagtgggtgaattatcacaatgtaaataaacctctgtaactagcaccaagataaaaaaaaactagtagttatttaaacctaggtttgataatattaccaatgactttaaagttcatgtctgataattctaatacctgaagcacttgtgggtttgtttcttttttctgttttttattttgctcatagttttcagtcacttgatcatatatcctggsattcctggtaacatatacatacttctcatttttaaaaattgtacagctctagcataaagagtcttacaatgggaacttatcccccatctataactttttttacactttgttttctttt

SEQ ID NO: 353122 - DNA, 621 bp, Homo sapiens
tggccgattggaaattaaaaaaaaaaagttccttcaccacaaagagttgagaagcactgctctagagtgtctcaataacgtttttggtcaggtggcatagtttcccttcttgtattacctttgtcttcctcagagttggcctttaagccaaggacctggctgccttccaggcagtcatttcctcatagtttaatagctatagccagtgaactgaaagtgcatttcctgccaccatactgtaaaattattattaatgtaataggagratgcacttctggttttggcactgatatttgggatactgcatagggctggtagcttaaaagagtgggcaatattttggagtatggattaatggagatagaaccactaggaatacttcctgttaaaatatgctatatttgccatttagagataatttaataatatgatattttaaatgaaaataggaaaatcttttcttttgtggggccatgaagctttgctcaaaggaagttttaaggaggtgggtcttagctcattttaagagctaagtactaatggaatagtttctaactactgatggaatagttttatcaggtaaatgctcaaagactgatttacaaactatcattggttctc

SEQ ID NO: 353123 - DNA, 398 bp, Homo sapiens
ctacttttgtaaaatattattgaagtataatatacctgagagaaagtgtgccatcttaaaggtacaagtgggtgaattatcacaatgtaaataaacctctgtaactagcaccaagataaaaaaaaactagtagttatttaaacctaggtttgataatattaccaatgactttaaagttcatgtctgataattctaatacctgaagcacttgtgggtttgtttcttttttctgttttttattttgctcatagttttcagtcacttgatcatatatcctggcattcctggtaacatatacatacttctmatttttaaaaattgtacagctctagcataaagagtcttacaatgggaacttatcccccatctataactttttttacactttgttttctttt

SEQ ID NO: 353124 - DNA, 398 bp, Homo sapiens
ctacttttgtaaaatattattgaagtataatatacctgagagaaagtgtgccatcttaaaggtacaagtgggtgaattatcacaatgtaaataaacctctgtaactagcaccaagataaaaaaaaactagtagttatttaaacctaggtttgataatattaccaatgactttaaagttcatgtctgataattctaatacctgaagcacttgtgggtttgtttcttttttctgttttttattttgctcatagttttcagtcacttgatcatatatcctggcattcctggtaacatatacatacttctcatttttaaaaattgtacagctctagcataaagagtcytacaatgggaacttatcccccatctataactttttttacactttgttttctttt

SEQ ID NO: 353125 - DNA, 279 bp, Homo sapiens
attttattccttttttgtttttcaagttatcaacacttatttacatatttgataaatttgttggaaatttgaattgttttatgttccaggaggagtatatttgcctcatttcargaactatttgtacatttgtttgttgaggattatttggtgtttaaaatttaccccccaaaatatactgaattgcacaaaaggaaaggttctcgataactttctggtttgctcaaaaactctcaggtctttacatttctaaggcatttttatatgtatattttaccc

SEQ ID NO: 353126 - DNA, 279 bp, Homo sapiens
attttattccttttttgtttttcaagttatcaacacttatttacatatttgataaatttgttggaaatttgaattgttttatgttccaggaggagtatatttgcctcatttcaggaactatttgtacatttgtttgttgaggattatttggtgtttaaaatttaccccccaaaatatactgaattgcacaaaaggaaaggttctcgataactttctggtttgctcaaaaactctcargtctttacatttctaaggcatttttatatgtatattttaccc

SEQ ID NO: 353127 - DNA, 305 bp, Homo sapiens
atagataatgtgtcagagtttgggctcagccgcggtagctgctgttgacccagagggaccactgggatcctcacatctcagggcagcacatcgtttgcagcaatggttgcttctatgcaaccttttatgaaattaggtgaggcccttgcttagaattttttaaaagcttaatatgagtttatatctctttaaatatcagtttctaatgtttttttaaaggcctatgtttacaacaaatttgrgagatacctagatgcactactaactagtgttcttttgtggtgctttagaaattctggcttact

SEQ ID NO: 353128 - DNA, 279 bp, Homo sapiens
attttattccttttttgtttttcaagttatcaacacttatttacatatttgataaatttgttggaaatttgaattgttttatgttccaggaggagtatatttgcctcatttcaggaactatttgtacatttgtttgttgaggattatttggtgtttaaaatttaccccccaaaatatactgaattgcacaaaaggaaaggttctcgataactttctggtttgctcaaaaactctcaggtctttacatttctaargcatttttatatgtatattttaccc

SEQ ID NO: 353129 - DNA, 305 bp, Homo sapiens
atagataatgtgtcagagtttgggctcagccgcggtagctgctgttgacccagagggaccactgggatcctcacatctcagggcagcacatcgtttgcagcaatggttgcttctatgcaaccttttatgaaattaggtgaggcccttgcttagaattttttaaaagcttaatatgagtttatatctctttaaatatcagtttctaatgtttttttaaaggcctatgtttacaacaaatttgagagatacctakatgcactactaactagtgttcttttgtggtgctttagaaattctggcttact

SEQ ID NO: 353130 - DNA, 398 bp, Homo sapiens
ctacttttgtaaaatattattgaagtataatatacctgagagaaagtgtgccatcttaaaggtacaagtgggtgaattatcacaatgtaaataaacctctgtaactagcaccaagataaaaaaaaactagtagttatttaaacctaggtttgataatattaccaatgactttaaagttcatgtctgataattctaatacctgaagcacttgtgggtttgtttcttttttctgttttttattttgctcatagttttcagtcacttgatcatatatcctggcattcctggtaacatatacatacttctcatttttaaaaattgtacagctctagcataaagagtcttacaatgggwacttatcccccatctataactttttttacactttgttttctttt

SEQ ID NO: 353131 - DNA, 568 bp, Homo sapiens
gaggcttgaatagttaaacaaagcgactggraagttcgaactgggcagagcccactgtagctcagcaaggcctactgcctatatagactccacctctgtgggcagggcatagctgaacaaaaggcagcagaaacttgtgcagacttaaatgtccctgtctgacaactctgaagagagcagtggttctcacagtatggcgtttgagctctgaaacagaccgcctcctcaagtgggtccctgacacctgtgtagcctaactaggagacacctcccagtaggggctgacagacacttcatacaggcagttgcccctctgggacgaagcttccagaggaaggatcaggtagcaagatctgctgttctgcaatatttgctgttctgcagcctccactggtgatacccaggcaaacaggttctggagtggacctccagcaaactccaacagaccggcagctgagggacctgactgtcagaaggaaaactaacaaacagaaagaaataacatcagcatcaacaaaaaggacatccacaccaaaaccccatccaccaacatcaaagaccaaaggta

SEQ ID NO: 353132 - DNA, 568 bp, Homo sapiens
gaggcttgaatagttaaacaaagcgactgggaagttcgaactgggcagagcccactgtagctcagcaaggcctactgcctatatagactccacctctgtgggcagggcatagctgaacaaaaggcagcagaaacttgtgcagacttaaatgtccctgtctgacaactctgaagagagcagtggttctcacagtatggcgtttgagctctgaaacagaccgcctcctcaagtgggtccctgacacctgtgtagcctaactaggagacacctcccagtaggggctgacagacacttcatacaggcagktgcccctctgggacgaagcttccagaggaaggatcaggtagcaagatctgctgttctgcaatatttgctgttctgcagcctccactggtgatacccaggcaaacaggttctggagtggacctccagcaaactccaacagaccggcagctgagggacctgactgtcagaaggaaaactaacaaacagaaagaaataacatcagcatcaacaaaaaggacatccacaccaaaaccccatccaccaacatcaaagaccaaaggta

SEQ ID NO: 353133 - DNA, 490 bp, Homo sapiens
atgtttcatggaactttttggtgaaggcacttgggcctacaaatttctttatgggaagwttttcatgactgattcaatatatttaatctatgtaagttttttttctacttttggagtgaattttgatttttttccctagaaattcatatctcaccaagtatggtggcttatgcttgtaatcccagcactttgggaggctcaggtgggaggaccacttgactacagtagttcaagaccagcctgggcaatatagtgagactccatctctacaaaaaaaataaaaattagcttggtgtggtggcgggtgcctgtagtgtgagctacttgggatgctgaggtgggaggatcatttgagcctggaaggtcgagactgcagtgagctgtgattgtgccactgcactccagcctgggtgacagaatgagacgttgtctaaaaaaaaaaaaaagatttttcatctatgctttaaagtctgttggcataaaggtattc

SEQ ID NO: 353134 - DNA, 490 bp, Homo sapiens
atgtttcatggaactttttggtgaaggcacttgggcctacaaatttctttatgggaagattttcatgactgattcaatatatttaatctatgtaagttttttttctrcttttggagtgaattttgatttttttccctagaaattcatatctcaccaagtatggtggcttatgcttgtaatcccagcactttgggaggctcaggtgggaggaccacttgactacagtagttcaagaccagcctgggcaatatagtgagactccatctctacaaaaaaaataaaaattagcttggtgtggtggcgggtgcctgtagtgtgagctacttgggatgctgaggtgggaggatcatttgagcctggaaggtcgagactgcagtgagctgtgattgtgccactgcactccagcctgggtgacagaatgagacgttgtctaaaaaaaaaaaaaagatttttcatctatgctttaaagtctgttggcataaaggtattc

SEQ ID NO: 353135 - DNA, 490 bp, Homo sapiens
atgtttcatggaactttttggtgaaggcacttgggcctacaaatttctttatgggaagattttcatgactgattcaatatatttaatctatgtaagttttttttctacttttkgagtgaattttgatttttttccctagaaattcatatctcaccaagtatggtggcttatgcttgtaatcccagcactttgggaggctcaggtgggaggaccacttgactacagtagttcaagaccagcctgggcaatatagtgagactccatctctacaaaaaaaataaaaattagcttggtgtggtggcgggtgcctgtagtgtgagctacttgggatgctgaggtgggaggatcatttgagcctggaaggtcgagactgcagtgagctgtgattgtgccactgcactccagcctgggtgacagaatgagacgttgtctaaaaaaaaaaaaaagatttttcatctatgctttaaagtctgttggcataaaggtattc

SEQ ID NO: 353136 - DNA, 580 bp, Homo sapiens
ggcattcctggtaacatatacatacttctcatttttaaaaattgtacagctctagcataaagagtcttacaatgggaacttatcccccatctataactttttttacactttgttttctttttactctttctagactttattattttactttttggataagtaatatagttacaagtttctaagataaaaaattatgaaagagtgttagtgaaaagtctcattcttgcaatgccagcaccctcttcctgtcctacaggtaaccaccatgattaatttctggtatatcattccagagatagtttartcctcatatatacaagcaaattatgtatactgcattcctgtgtctgttctgtactttgcttttttcacctaacattatattttggtgagttttctgtttagtacataatacattttctcatattttaaacaactgtattctgttgtatgaatttatcataatgtattgaatcattccactgctgatggacatccagtttgtttccagacgtttgctattgtgataggctgaataaaagatgtccacaggccgggagcggtggctcaagcctgtaat

SEQ ID NO: 353137 - DNA, 490 bp, Homo sapiens
atgtttcatggaactttttggtgaaggcacttgggcctacaaatttctttatgggaagattttcatgactgattcaatatatttaatctatgtaagttttttttctacttttggagtgaattttgatttttttccctagaaattcatatctcaccaagtatggtggcttatgcttgtaatcccagcacwttgggaggctcaggtgggaggaccacttgactacagtagttcaagaccagcctgggcaatatagtgagactccatctctacaaaaaaaataaaaattagcttggtgtggtggcgggtgcctgtagtgtgagctacttgggatgctgaggtgggaggatcatttgagcctggaaggtcgagactgcagtgagctgtgattgtgccactgcactccagcctgggtgacagaatgagacgttgtctaaaaaaaaaaaaaagatttttcatctatgctttaaagtctgttggcataaaggtattc

SEQ ID NO: 353138 - DNA, 537 bp, Homo sapiens
aaataataaagatcagaacagaaataaattaatctgaaatgaacaaaacaatacaaaaggtcaatgaaacaaaagttggttttcaaaaaaggtaaacaaaattcacaaacttttagccagrctaaataagaaaaaagagagaggcccaaataaataaaatcagagatgaaacacaaagacatagcaactgataccacagaaattcaaaggatcactagcagctactatgagcaactatatgccaataaattggaaaatttagaataaatggataaattcctagatatatacaacctaccaagattgaatcatgaagaaatccaaaacctgaacagaccaataacaagtaactagaagaatctgtaataaaaagtctcccagtaaagaaaagtttgggacccattggcttcactgctgaattctaccaaacattcaaagaactaataccaatcctactcaaactattttaaaaaataaagagggaatacttctaaactcattctatgatgccagtgttactctgatatcaaaactaga

SEQ ID NO: 353139 - DNA, 580 bp, Homo sapiens
ggcattcctggtaacatatacatacttctcatttttaaaaattgtacagctctagcataaagagtcttacaatgggaacttatcccccatctataactttttttacactttgttttctttttactctttctagactttattattttactttttggataagtaatatagttacaagtttctaagataaaaaattatgaaagagtgttagtgaaaagtctcattcttgcaatgccagcaccctcttcctgtcctacaggtaaccaccatgattaatttctggtatatcattccagagatagtttaatcctcatatatacaagcaaattatgtatactgcattcctgtgtctgttctgtactttgcttttttcacctaacattatattttggtgagttttctgtttagtacataatacattttctcatattttaaacaactgtattctgttgtatgaatttatcataatktattgaatcattccactgctgatggacatccagtttgtttccagacgtttgctattgtgataggctgaataaaagatgtccacaggccgggagcggtggctcaagcctgtaat

SEQ ID NO: 353140 - DNA, 504 bp, Homo sapiens
taattttttttttaagtttttttttttaatttaaattaacatattcaggctagtgcatgtacttcsgttctctactgaagtaattcaccctaaattgaaactagcattgctagtttagtgtattactcctctctaggcagcctctctctctctctgtatatattttgtttgtttgtttgttttgttttgttttgttttttgagacagagtttcactcttgtcgcccaggctggagtgcaatggcacaagctaggctcactgcaacctccacctcctgggttcaagctattcttctgcctcagcctcccaagtagctgggaccacagaatgtgtgtgaccacacctggctaatttttttatttttttgaactggagtctcactttgctccccaggctagtcttgccactatcctagtttttcttctgtattattagacggggtctcagtgtcccttgaacttcaaggaattaacattgagtgtagtattagtaaaacttatcttc

SEQ ID NO: 353141 - DNA, 504 bp, Homo sapiens
taattttttttttaagtttttttttttaatttaaattaacatattcaggctagtgcatgtacttccgttctctactgaagtaattcaccctaaattgaaactagcattgctagtttagtgtattactcctctctaggcagcctctctctctctctgtatatattttgtttgtttgtttgttttgttttgttttgttttttgagacagagtttcactcttgtcgcccaggctggagtgcaatggcacaagctaggctcactgcaacctccacctcctgggttcaagctattcttctgcctcagcctcccaagtagctgggaccacagaatgtgtgtgaccacacctggctaatttttttatttttttgaactggagtctcactttgctcyccaggctagtcttgccactatcctagtttttcttctgtattattagacggggtctcagtgtcccttgaacttcaaggaattaacattgagtgtagtattagtaaaacttatcttc

SEQ ID NO: 353142 - DNA, 504 bp, Homo sapiens
taattttttttttaagtttttttttttaatttaaattaacatattcaggctagtgcatgtacttccgttctctactgaagtaattcaccctaaattgaaactagcattgctagtttagtgtattactcctctctaggcagcctctctctctctctgtatatattttgtttgtttgtttgttttgttttgttttgttttttgagacagagtttcactcttgtcgcccaggctggagtgcaatggcacaagctaggctcactgcaacctccacctcctgggttcaagctattcttctgcctcagcctcccaagtagctgggaccacagaatgtgtgtgaccacacctggctaatttttttatttttttgaactggagtctcactttgctccccaggctagtcttgccactatcctagtttttcttctgtattattagacggggyctcagtgtcccttgaacttcaaggaattaacattgagtgtagtattagtaaaacttatcttc

SEQ ID NO: 353143 - DNA, 533 bp, Homo sapiens
ccttttaaaatcattctatatctttgtattttaaatatgacttataaatagcatggaatgggattttaacaatttatccatctttaaytggattacttagtccatttgcatgtatttgtattctgacatacttggattctgtatagatggtgagtggtgtgtatgtacatgcatgtgtgtttgtgtcattttgtcactttctatttatcctacttatgtttcttttttcctttcttgccttcttttcaattggtgggatttttttcttctctagtcattttaagttagtctttgtttatattcttttagtaactgtcatgctaatttaaatgtgcatatttaagttatgaaagttgaaaatttatcctcctcctgggtgataggataacttaagaatactttcattgcattaaactcctcttgagttatgctacaacagtatattttcaactttttgttttgacataattgcagattcacaggtgcttttaagaaataatataaagaaatccaatatagtcttcactcagttt

SEQ ID NO: 353144 - DNA, 295 bp, Homo sapiens
ggaaaaaataacaccaacattacagatttttttttaaatcttagggacagagtctcactatgttgcccaggctggagtcagtggctattcacagtcacgttccagttatcctcccacctcagcctcttgagtagmtgggcctagaggatacagaaacttttaagagaacaaaaataaagggaactcctgagctcaagcacttctcccacctcggcctcccaaagtgctgggattacaggcatgaaccactgtgtcccgcttagtgtgctgtttttaaaaatgacttttgggctcg

SEQ ID NO: 353145 - DNA, 520 bp, Homo sapiens
atctgtaggatctatagtgataactgttcactccttatattctaacttgtgcctaattagttaggcacaactcttactaattagttatctattgctgcataagaaattacctgaaacttaatgtcttcaaacaacaacaagtatttattatctgtgataggcagacttctaagatgtttcccatgatctcgatgtcctggtgttatactctgtatgatctcttccttttttagtgtggatgggatcactgcccaaacttttggatgaaatcgagtgagtgtgagwaggatctgtgacttgtttctaactgacataatattgcaaatgtgatgggttgttactcctgtgatatgtgtgtgtgtgtgtgtgcacacagaagaaaggagagagaagaggagaggaggaggagagagacatacattaggatatgagatagacatattgctggcatgcacacaagattctccttgctgatttgatgaagtgtgtgaccatattgaggaagcccaacagcaggtgg

SEQ ID NO: 353146 - DNA, 520 bp, Homo sapiens
atctgtaggatctatagtgataactgttcactccttatattctaacttgtgcctaattagttaggcacaactcttactaattagttatctattgctgcataagaaattacctgaaacttaatgtcttcaaacaacaacaagtatttattatctgtgataggcagacttctaagatgtttcccatgatctcgatgtcctggtgttatactctgtatgatctcttccttttttagtgtggatgggatcactgcccaaacttttggatgaaatcgagtgagtgtgagaaggatctgtgacttgtttctaactgacataatattgcaaatgtgatgggttgttactcctgtgatatgtgtgtgtgtgtgtgtgcrcacagaagaaaggagagagaagaggagaggaggaggagagagacatacattaggatatgagatagacatattgctggcatgcacacaagattctccttgctgatttgatgaagtgtgtgaccatattgaggaagcccaacagcaggtgg

SEQ ID NO: 353147 - DNA, 581 bp, Homo sapiens
caagtatttattatctgtgataggcagacttctaagatgtttcccatgatctcgatgtcctggtgttatactctgtatgatctcttccttttttagtgtggatgggatcactgcccaaacttttggatgaaatcgagtgagtgtgagaaggatctgtgacttgtttctaactgacataatattgcaaatgtgatgggttgttactcctgtgatatgtgtgtgtgtgtgtgtgcacacagaagaaaggagagagaagaggagaggaggaggagagagacatacattaggatatgagatagacatattgctggcatgcacacaagattctccttgctgatttgatgaagtgtgtgaccatattgaggaagcccaacagcaggtggtgtctaggacctgagggtggcctccagccaatacccaataaaaaacatagctacacaatcatacagacataagaaaatgaattttgtcaacaacctcaatgagcttgaacctagctcagctgacrccttgcctgcaaccttgtgaaaccctatgcagtgaacccagttgagttgtgaccaaattcctgacccacagaa

SEQ ID NO: 353148 - DNA, 232 bp, Homo sapiens
taacacaggttagccatatttaatatgagagagaactgcacaaggcatggatagcrgaagtgaaaatcactgggggccattttggaggctggctgccacagagattagcaactggaatactgttttcaaagaaacagctttggctttttatattttctctattatgtctttggtttttttttttttcattgatttcagcttttatccttattatttccatcattttaatttc

SEQ ID NO: 353149 - DNA, 232 bp, Homo sapiens
taacacaggttagccatatttaatatgagagagaactgcacaaggcatggatagcggaagtgaaaatcacygggggccattttggaggctggctgccacagagattagcaactggaatactgttttcaaagaaacagctttggctttttatattttctctattatgtctttggtttttttttttttcattgatttcagcttttatccttattatttccatcattttaatttc

SEQ ID NO: 353150 - DNA, 477 bp, Homo sapiens
atgattcacaaaagactatgaacagaacatgtaactaatcgatgcaaatcaaataggatttgttaaaatcagtcacatccaatacatctgaagtgttcttgtataaaatacaacgtgaagaaaagaagactttatcagtgtcttaaaaagtggatttsttcatagacaatctgacaagttaccactaaaagtgtttcttgtgacagaaaaagcaacattatttttcttgagtctttttagtgcaagactttccactcaataaaatagcagagcatctgaaactgagaaaatatttttgattacaaacagcttgtgaaacttaatactgttttttttttttttgcattatcggaggctttttctgaacttacaaccaacttgcccactcagcatgcagttcagatgtgagagacgcttctctgtacaggagccggtactgtcttcaatcctatgcgtgcaggtgtctaccacaggcaa

SEQ ID NO: 353151 - DNA, 555 bp, Homo sapiens
ataggatttgttaaaatcagtcacatccaatacatctgaagtgttcttgtataaaatacaacgtgaagaaaagaagactttatcagtgtcttaaaaagtggatttgttcatagacaatctgacaagttaccaytaaaagtgtttcttgtgacagaaaaagcaacattatttttcttgagtctttttagtgcaagactttccactcaataaaatagcagagcatctgaaactgagaaaatatttttgattacaaacagcttgtgaaacttaatactgttttttttttttttgcattatcggaggctttttctgaacttacaaccaacttgcccactcagcatgcagttcagatgtgagagacgcttctctgtacaggagccggtactgtcttcaatcctatgcgtgcaggtgtctaccacaggcaaatagtttactccacattttctaataatgtgatcttcctattagcaaaaagctgtaaccagtccctgtagactgaagggactcaagtgacaagatggggatttcctcctcatggtttttattttgatgttt

SEQ ID NO: 353152 - DNA, 555 bp, Homo sapiens
ataggatttgttaaaatcagtcacatccaatacatctgaagtgttcttgtataaaatacaacgtgaagaaaagaagactttatcagtgtcttaaaaagtggatttgttcatagacaatctgacaagttaccactaaaagtgtttcttgtgacagaaaaagcaacattatttttcttgartctttttagtgcaagactttccactcaataaaatagcagagcatctgaaactgagaaaatatttttgattacaaacagcttgtgaaacttaatactgttttttttttttttgcattatcggaggctttttctgaacttacaaccaacttgcccactcagcatgcagttcagatgtgagagacgcttctctgtacaggagccggtactgtcttcaatcctatgcgtgcaggtgtctaccacaggcaaatagtttactccacattttctaataatgtgatcttcctattagcaaaaagctgtaaccagtccctgtagactgaagggactcaagtgacaagatggggatttcctcctcatggtttttattttgatgttt

SEQ ID NO: 353153 - DNA, 555 bp, Homo sapiens
ataggatttgttaaaatcagtcacatccaatacatctgaagtgttcttgtataaaatacaacgtgaagaaaagaagactttatcagtgtcttaaaaagtggatttgttcatagacaatctgacaagttaccactaaaagtgtttcttgtgacagaaaaagcaacattatttttcttgagtctttttagtgcaagactttccactcaataaaatagcagagcatctgaaactgagaaaatatttttgattacaaacagcttgtgaaacttaatactgttttttttttttttgcattatcggaggctttttctgaacttacaaccaacttgcccactcagcatgcagttcagatgtgagagacgcttctctgtacaggagccggtactgtcttcaatcctatgmgtgcaggtgtctaccacaggcaaatagtttactccacattttctaataatgtgatcttcctattagcaaaaagctgtaaccagtccctgtagactgaagggactcaagtgacaagatggggatttcctcctcatggtttttattttgatgttt

SEQ ID NO: 353154 - DNA, 555 bp, Homo sapiens
ataggatttgttaaaatcagtcacatccaatacatctgaagtgttcttgtataaaatacaacgtgaagaaaagaagactttatcagtgtcttaaaaagtggatttgttcatagacaatctgacaagttaccactaaaagtgtttcttgtgacagaaaaagcaacattatttttcttgagtctttttagtgcaagactttccactcaataaaatagcagagcatctgaaactgagaaaatatttttgattacaaacagcttgtgaaacttaatactgttttttttttttttgcattatcggaggctttttctgaacttacaaccaacttgcccactcagcatgcagttcagatgtgagagacgcttctctgtacaggagccggtactgtcttcaatcctatgcgtgcaggtgtctaccacaggcaaayagtttactccacattttctaataatgtgatcttcctattagcaaaaagctgtaaccagtccctgtagactgaagggactcaagtgacaagatggggatttcctcctcatggtttttattttgatgttt

SEQ ID NO: 353155 - DNA, 451 bp, Homo sapiens
atgtttaggctaggcagcatggatgggtataggaatccgtcaatctgggttgctgtgtaccagctctgggactgggggcaagttgtagcagccctgagcctcctgcttcacctgtatcaggggaggctgagacccaccttgcaggggtcttgtgaagattaaatgcaatgctgtgtgaatggtgcctaccttcgtgcctggtctgtcaagaccaggcagtttacacaaaaacacttgatattgactatgaaacaagatccrgaagagaacaaatataaatacagatggatcagctaaatgaaggactgccgagtaaaaacacaaagaggatgtttgtgagtggagggggatggatctccttctccacccagcagtgaatatcatgggaatctctctctacctgaatctacctcttataattcttaaattaagaaccattagaactcttcta

SEQ ID NO: 353156 - DNA, 451 bp, Homo sapiens
atgtttaggctaggcagcatggatgggtataggaatccgtcaatctgggttgctgtgtaccagctctgggactgggggcaagttgtagcagccctgagcctcctgcttcacctgtatcaggggaggctgagacccaccttgcaggggtcttgtgaagattaaatgcaatgctgtgtgaatggtgcctaccttcgtgcctggtctgtcaagaccaggcagtttacacaaaaacacttgatattgactatgaaacaagatccagaagagaacaaatataaatacagatggatcagctaaatgaaggactgycgagtaaaaacacaaagaggatgtttgtgagtggagggggatggatctccttctccacccagcagtgaatatcatgggaatctctctctacctgaatctacctcttataattcttaaattaagaaccattagaactcttcta

SEQ ID NO: 353157 - DNA, 496 bp, Homo sapiens
gatttgtgaaaaggaagattggtccaaagcaatgtttgttaaccaaattttcattatcaaagaggaaaaactaaacattccctaacagaaatgaaaaaggaataaaatttttgttagatgatgttgagctttgaaatgccaccaaggacactttcaatatcaaatcttctcatccacccaactccagaaaactagtttttgctcaggtactggctcagtggaaaatgtgtggtctgaagctgtagtctcctagtttgtgagtctccttattttcactgcctgaaggtttgagtcaccgtggaargggaggaggggtggtggagatcagaagtgaggtctgtgaactctggagttgacttaggtgcagagaggatgaggtagaactgctggcagggaggccccatctgatccaagagtgagctcggcaggcagaaagcacttggcaaagcccagggaatggttgggagagactgatagacccagcactcctattcct

SEQ ID NO: 353158 - DNA, 496 bp, Homo sapiens
gatttgtgaaaaggaagattggtccaaagcaatgtttgttaaccaaattttcattatcaaagaggaaaaactaaacattccctaacagaaatgaaaaaggaataaaatttttgttagatgatgttgagctttgaaatgccaccaaggacactttcaatatcaaatcttctcatccacccaactccagaaaactagtttttgctcaggtactggctcagtggaaaatgtgtggtctgaagctgtagtctcctagtttgtgagtctccttattttcactgcctgaaggtttgagtcaccgtggaaggggaggaggggtggtggagatcagaagtgaggtctgtgaactcyggagttgacttaggtgcagagaggatgaggtagaactgctggcagggaggccccatctgatccaagagtgagctcggcaggcagaaagcacttggcaaagcccagggaatggttgggagagactgatagacccagcactcctattcct

SEQ ID NO: 353159 - DNA, 496 bp, Homo sapiens
gatttgtgaaaaggaagattggtccaaagcaatgtttgttaaccaaattttcattatcaaagaggaaaaactaaacattccctaacagaaatgaaaaaggaataaaatttttgttagatgatgttgagctttgaaatgccaccaaggacactttcaatatcaaatcttctcatccacccaactccagaaaactagtttttgctcaggtactggctcagtggaaaatgtgtggtctgaagctgtagtctcctagtttgtgagtctccttattttcactgcctgaaggtttgagtcaccgtggaaggggaggaggggtggtggagatcagaagtgaggtctgtgaactctrgagttgacttaggtgcagagaggatgaggtagaactgctggcagggaggccccatctgatccaagagtgagctcggcaggcagaaagcacttggcaaagcccagggaatggttgggagagactgatagacccagcactcctattcct

SEQ ID NO: 353160 - DNA, 350 bp, Homo sapiens
gttacaaccagttcaaaagggaacccaaagggacggacacatctattactcagaatattgaaataaactggaaattgatgcataagtggctttgccacatggagaaggattggctttccaaggcaggttgatttgcatrtttataaacaagaatcatttgcattatcagttcttttcaacttcacataccataaaacaggtgaaaggctagactagaaaaccttaaaggcgctgggtgcagtggctcactcctgttatcccagcactttgggaggttgaggtagacagatctcttgaccccaggagttcaagaccagcctgagcaacatagaccctctctctacaaaaaa

SEQ ID NO: 353161 - DNA, 377 bp, Homo sapiens
tcagttcttttcaacttcacataccataaaacaggtgaaaggctagactagaaaaccttaaaggsgctgggtgcagtggctcactcctgttatcccagcactttgggaggttgaggtagacagatctcttgaccccaggagttcaagaccagcctgagcaacatagaccctctctctacaaaaaaagtttccaaaaattagctgagcatgatggcatgagcctgtagtcccagctactcaggaggctgaggtgggagaatcccttgagccagggaagtggaggttgctgtgagccaggatcatacccttgcattccagtctgggtgatggagggagatcctatctcaaaagtctgaaggagtgtgatctaaacaatg

SEQ ID NO: 353162 - DNA, 350 bp, Homo sapiens
gttacaaccagttcaaaagggaacccaaagggacggacacatctattactcagaatattgaaataaactggaaattgatgcataagtggctttgccacatggagaaggattggctttccaaggcaggttgatttgcatatttataaacaagaatcatttgcattatcagttcttttcaacttcacataccataaaacaggtgaaaggctagactagaaaaccttaaaggcgctgggtgcagtggctcackcctgttatcccagcactttgggaggttgaggtagacagatctcttgaccccaggagttcaagaccagcctgagcaacatagaccctctctctacaaaaaa

SEQ ID NO: 353163 - DNA, 377 bp, Homo sapiens
tcagttcttttcaacttcacataccataaaacaggtgaaaggctagactagaaaaccttaaaggcgctgggtgcagtggctcactcctgttatcccagcactttgggaggttgaggtagacagatctcttgaccccaggagttcaagaccagcctgagcaacatagaccctctctctacaaaaaaagtttccaaaaattasctgagcatgatggcatgagcctgtagtcccagctactcaggaggctgaggtgggagaatcccttgagccagggaagtggaggttgctgtgagccaggatcatacccttgcattccagtctgggtgatggagggagatcctatctcaaaagtctgaaggagtgtgatctaaacaatg

SEQ ID NO: 353164 - DNA, 622 bp, Homo sapiens
tttaatcatggcatgttttacattttttagtatggttcaaataagaagataaagaagtgctttattaaatacatatatttttgtatttaaaaataactttcaaataaatacttaaaaatcaytggcaaaaatgaatgatgaattaggaatgtatattataatttcaaaataaggaagacataagaggcccattttataaatggtacagaattttatttttaacaaataagtagccagatgtatgactcctaggggggtagaagtggccctctctggaaattcataacatccaggatggatacgatgggattggatatggatatcctgttctggggcgctggagttcaagaaatgtgtttcttgtggttacagattattctgggagtgctagatcctcaaataatctatttcctcagatgctccaagtcagaaagcccctttcctccattctggcttctacaaaagaagctcctcctagtgggcaaccctcccccttggctttccatgggtaatgcctttcagaagacacgtccttttttgaccttctcccttcaaccaggaccagccttgggaatgagatctacgagttccattgaaaccctgggctagttcagtactaagg

SEQ ID NO: 353165 - DNA, 622 bp, Homo sapiens
tttaatcatggcatgttttacattttttagtatggttcaaataagaagataaagaagtgctttattaaatacatatatttttgtatttaaaaataactttcaaataaatacttaaaaatcactggcaaaaatgaatgatgaattaggaatgtatattataatttcaaaataaggaagacataagaggcccattttataaatggtacagaattttatttttaacaaataagtagccagatgtatgactcctaggggggtagaagtggccctctctggaaattcataacatccaggatggatacgatgggattggatatggatatcctgttctggggcgctggagttcaagaaatgtgtttcttgtggttacagattattctgggagtrctagatcctcaaataatctatttcctcagatgctccaagtcagaaagcccctttcctccattctggcttctacaaaagaagctcctcctagtgggcaaccctcccccttggctttccatgggtaatgcctttcagaagacacgtccttttttgaccttctcccttcaaccaggaccagccttgggaatgagatctacgagttccattgaaaccctgggctagttcagtactaagg

SEQ ID NO: 353166 - DNA, 452 bp, Homo sapiens
aatgctgtgtcatcaaactgaaactttaaggaagcagatccccaaacagaccagtttttcctgaaaacatgagattccagtctacttraatcagtggaagaaggaagtgccctctgctttaaccattaaaaaaagtaactgaagtagcttgatgttaaccaatcaggtttttctattctgtttccttgttgctacctcataaaacctgtggttctgctattgcccagtgggaactctcattctgttttgtagagtggaaggtgcccagattcatgaatcatgaataaaagccaattaaatctataaatttgttgtagtcctctgataatataaaacctaatttgttgtaatttagtcttttgacaaacctaatatacaaagacatatgtttaactgtttcttcaggtctttatttccttacaaaggctcctagttatatcaagttacttcca

SEQ ID NO: 353167 - DNA, 452 bp, Homo sapiens
aatgctgtgtcatcaaactgaaactttaaggaagcagatccccaaacagaccagtttttcctgaaaacatgagattccagtctacttaaatcagtggaagaaggaagtgccctctgctttaaccattaaaaaaagtaactgaagtagcttgatgttaaccamtcaggtttttctattctgtttccttgttgctacctcataaaacctgtggttctgctattgcccagtgggaactctcattctgttttgtagagtggaaggtgcccagattcatgaatcatgaataaaagccaattaaatctataaatttgttgtagtcctctgataatataaaacctaatttgttgtaatttagtcttttgacaaacctaatatacaaagacatatgtttaactgtttcttcaggtctttatttccttacaaaggctcctagttatatcaagttacttcca

SEQ ID NO: 353168 - DNA, 579 bp, Homo sapiens
agattcatgaatcatgaataaaagccaattaaatctataaatttgttgtagtcctctgataatataaaacctaatttgttgtaatttagtcttttgacaaacctaatatamaaagacatatgtttaactgtttcttcaggtctttatttccttacaaaggctcctagttatatcaagttacttccagaaaagtcaattttttctgtgtcatataaaacttatgttaagtaaatgtgtatgcttttctcttgttaatctgtcttttgttaaaagatccccagccaagaaattagaagggtggaggaaaaatatttttcctcccttatatatgattccacttatatgagatatctagatcagtaaaattcatagaaacaaagtaggatagtcaggctcagtggctcattcctgtaatcccaacatcttggaaggataaggcaggaggatcacttcagcccaagagttcaagaccaggctagacaacatagggagacctcatctctactttaaaaagaaaagtcaggtgtggtggaacatacctgtagtcccaactactggggaggctgaggtgggttggat

SEQ ID NO: 353169 - DNA, 452 bp, Homo sapiens
aatgctgtgtcatcaaactgaaactttaaggaagcagatccccaaacagaccagtttttcctgaaaacatgagattccagtctacttaaatcagtggaagaaggaagtgccctctgctttaaccattaaaaaaagtaactgaagtagcttgatgttaaccaatcaggtttttctattctgtttccttgttgctacctcataaaacctgtggttctgctattgcccagtgggaactctcattctgttttgtagagtggaaggtgcccagattcatgaatcatgaataaaagccaattaaatctataaatttgttgtagtcctctgataatataaaacctaatttgttgtaatttagtcttttgacaaacctaatatacaaagacataygtttaactgtttcttcaggtctttatttccttacaaaggctcctagttatatcaagttacttcca

SEQ ID NO: 353170 - DNA, 579 bp, Homo sapiens
agattcatgaatcatgaataaaagccaattaaatctataaatttgttgtagtcctctgataatataaaacctaatttgttgtaatttagtcttttgacaaacctaatatacaaagacatatgtttaactgtttcttcaggtctttatttccttacaaaggctcctagttatatcaagttacttccagaaaagtcaattttttctgtgtcatataaaacttatgttaagtaaatgtgtatgcttttctcttgttaatctgtcttttgttamaagatccccagccaagaaattagaagggtggaggaaaaatatttttcctcccttatatatgattccacttatatgagatatctagatcagtaaaattcatagaaacaaagtaggatagtcaggctcagtggctcattcctgtaatcccaacatcttggaaggataaggcaggaggatcacttcagcccaagagttcaagaccaggctagacaacatagggagacctcatctctactttaaaaagaaaagtcaggtgtggtggaacatacctgtagtcccaactactggggaggctgaggtgggttggat

SEQ ID NO: 353171 - DNA, 514 bp, Homo sapiens
tatttttcctcccttatatatgattccacttatatgagatatctagatcagtaaaattcatagaaacaaagtaggatagtcaggctcagtggctcattcctgtaatcccaacatcttggaaggataaggcaggargatcacttcagcccaagagttcaagaccaggctagacaacatagggagacctcatctctactttaaaaagaaaagtcaggtgtggtggaacatacctgtagtcccaactactggggaggctgaggtgggttggatcactcgaatctgggagttcaagctttcagtgaactatgatcatgccactgtactccaacctgggcgacagagagaccctgtcagaaaaaagaaaaaaaaaaaggtagtttggtggttgccagaggctggggtagagaggcatgagggcttattgcttactgggtacagagtttcactcgggatgatgaaaatgttctggagatggatggtggtgatggttgtacaacaacatgaatgcacttaa

SEQ ID NO: 353172 - DNA, 579 bp, Homo sapiens
agattcatgaatcatgaataaaagccaattaaatctataaatttgttgtagtcctctgataatataaaacctaatttgttgtaatttagtcttttgacaaacctaatatacaaagacatatgtttaactgtttcttcaggtctttatttccttacaaaggctcctagttatatcaagttacttccagaaaagtcaattttttctgtgtcatataaaacttatgttaagtaaatgtgtatgcttttctcttgttaatctgtcttttgttaaaagatccccagccaagaaattagaagggtggaggaaaaatatttttcctcccttatatatgattccacttatatgagatatctagatcagtaaaattcatagaaacaaagtaggatagtcaggctcagtggctcattcctgtaatcccaacatcttggaaggataaggcaggaggatcacttcagcccaagagttcaagaccaggctagacaacatagrgagacctcatctctactttaaaaagaaaagtcaggtgtggtggaacatacctgtagtcccaactactggggaggctgaggtgggttggat

SEQ ID NO: 353173 - DNA, 514 bp, Homo sapiens
tatttttcctcccttatatatgattccacttatatgagatatctagatcagtaaaattcatagaaacaaagtaggatagtcaggctcagtggctcattcctgtaatcccaacatcttggaaggataaggcaggaggatcacttcagcccaagagttcaagaccaggctagacaacatagggagacctcatctctactttaaaaagaaaagtcaggtgtggtggaacatacctgtagtcccaactactggggaggctgaggtgggttggatcactcgaatctgggagttcaagctttcagtgaactatgatcatgccactgtactccaacctgggcgacagagagaccctgtcagaaaaaagaaaaaaaaaaaggtagtttggtggttgccagaggctggggtagagaggmatgagggcttattgcttactgggtacagagtttcactcgggatgatgaaaatgttctggagatggatggtggtgatggttgtacaacaacatgaatgcacttaa

SEQ ID NO: 353174 - DNA, 575 bp, Homo sapiens
attcagtgcttactacacgtgtgtgccttttcaatgcatttatgtctcccagtataataaaggcaggcattattattacctgcacctgacaggtaaggttcttaaagcacaaagtgtatcactaatttgcccacattcacacttcaggtaagctgtggagtcaagattcaaactttctcaggtgggactctagtgtatgctgctccctaaactcacwcaggctcctccataatggcatctctatggttttctaggctgcataacaagttgtcacaaacttagtggcttaaaacaatatccatttattatttcaggatttctgtgggtcacaggaatgaacacagcttagcttcattccctaacttagggtcttaccagactacaatccatacgtcagccagggctgcagtgtcatcagaggctcaactggagaaggatctgctttccagctgttattactggcagatgtgtccctctgcggttgtagtaccaaggtctctgttttcttgctagctgtcatccagggaccaccctcagctccaaaaggccaccctaagtcactactgcatgacatt

SEQ ID NO: 353175 - DNA, 537 bp, Homo sapiens
gaaatgaaatgtttgggtaataatgtttgttttgtttcagcatgatatattattccactgattattgatctctagcatttatgtgagaaggcaaccactattattattcctctatgcatgcgttgactttgttttgttgctctcaggatttcctctttttctttgtcttccaacagtttccctatgatgtatccaggtatgaaactctttgtttttatcgtgcctggagttccttgaactttttggatctgtagacttaattttttaactgaatttgggagttttcaagacattaattttttttttttagatgaagtcttgctgtgtcacccaggctggagtgcagtggcctgatytcgactcactgtaaactctgcctcccatgtgcaagcgattctcatgcctaagcctcccaagtagctgagattacaggtgcccaccaccatgcctggctaatttttgtatttttagaagaaacaagtttttgccatgttggtcaggctggtcttaaactcccgacctcaggtgatctgccca

SEQ ID NO: 353176 - DNA, 537 bp, Homo sapiens
gaaatgaaatgtttgggtaataatgtttgttttgtttcagcatgatatattattccactgattattgatctctagcatttatgtgagaaggcaaccactattattattcctctatgcatgcgttgactttgttttgttgctctcaggatttcctctttttctttgtcttccaacagtttccctatgatgtatccaggtatgaaactctttgtttttatcgtgcctggagttccttgaactttttggatctgtagacttaattttttaactgaatttgggagttttcaagacattaattttttttttttagatgaagtcttgctgtgtcacccaggctggagtgcagtggcctgatctygactcactgtaaactctgcctcccatgtgcaagcgattctcatgcctaagcctcccaagtagctgagattacaggtgcccaccaccatgcctggctaatttttgtatttttagaagaaacaagtttttgccatgttggtcaggctggtcttaaactcccgacctcaggtgatctgccca

SEQ ID NO: 353177 - DNA, 453 bp, Homo sapiens
acatttggtccattcagagccagttgatattgaccgctttttgtccttagtgtgagtttcatcttccagttttgtaggatgtcttgtaatttttttgttacatttgaaggttttagatactrtattgtagcaattctgggcctcagagctattctcttaagtttttctttttctttttgcaggttgacctttcaattttgcatctctagtatttctttcagtgtcccttgttttacaatgacttgatttgtgaatgaggtcttcactcttaaatgaggctttgctgcatatacaattcttgattgaaggcaagttaggaagaatatcttgtgcctttggttgtttttaaaaactcgttatctgtcttcaacagtctagttgtcctcgaacatgtgtagagttagaattcctatttatctagtttccagttgctgtgaacctgaatctgagggc

SEQ ID NO: 353178 - DNA, 514 bp, Homo sapiens
tcttcactcttaaatgaggctttgctgcatatacaattcttgattgaaggcaagttaggaagaatatcttgtgcctttggttgtttttaaaaactcgttatctgtcttcaacagtctagttgtcctcgaacatgtgtagagttagaattcctatttatctagtttccagttgctgtgaacctgaatctgaggrcagatctttcaccaaccctggaaaattctgtcattgtttttttgttattttttttcaaatactgttctcttttatctgctgtttttttctattcttggaactctaaattcattaggcctgcccttttaactttcttatcttcctttatttgttctattgctttctcttttggctgcattctggaatttgcttagatcgactatttatctattcatcttccagcaaaatattactatactaattcaatataaagaaatctagagggaagctggccaagatggctgacttgaagacactagtgtgtgctgctgacatggagac

SEQ ID NO: 353179 - DNA, 514 bp, Homo sapiens
tcttcactcttaaatgaggctttgctgcatatacaattcttgattgaaggcaagttaggaagaatatcttgtgcctttggttgtttttaaaaactcgttatctgtcttcaacagtctagttgtcctcgaacatgtgtagagttagaattcctatttatctagtttccagttgctgtgaacctgaatctgagggcagatctttcaccaaccctggaaaattctgtcattgtttttttgttwttttttttcaaatactgttctcttttatctgctgtttttttctattcttggaactctaaattcattaggcctgcccttttaactttcttatcttcctttatttgttctattgctttctcttttggctgcattctggaatttgcttagatcgactatttatctattcatcttccagcaaaatattactatactaattcaatataaagaaatctagagggaagctggccaagatggctgacttgaagacactagtgtgtgctgctgacatggagac

SEQ ID NO: 353180 - DNA, 493 bp, Homo sapiens
gcttatacaattttctccttcactttgggaatagaactaatttatttctttattttatttttgaatgtcttgcttctattccttgatcttctacacttgctagaaccttgagtacaatgttgaaaaggagtaaaggttgtagacattcttgtctgttctcaatcttagggagaaagcattattaagtataatgttagctgaagaattttttaaagatggcattaataagacatctgatagattaaggcatccctaaggttaagaaatttgctgagagttttttaacagaattagtcaytggattttgtcttatgattgaaatggtttttctttttcagtctgtgaatatgatgaattacatgaattgatttttgaatgttgaaccagctttgcattcctggaataaatgtcatttgaccttgttttattattctctttctatcttgatagatttgacttgcttaaactttgtggagggtttttgcatctatat

SEQ ID NO: 353181 - DNA, 484 bp, Homo sapiens
aaaagttgaaagcttttcttccaaggtcaggaaccaaacaagaatgcccactctcccacttcttttaaacttagtgctggaagtgctagctggagcaactaggcaagaaaaagaaataaaaggcatccaaatataaaaggaagaagtgaaattgtctgtttgctgatgacatgatcttatatatggaaaaccttaaagaatccaccaaaaaagttgttrgaactgataaacaaattcagtaaagttgcaggatacaaaattacatacaaaaaatcagtagcatgtctgtacactaacagcaaactacccaaaaagcaaattaagaaacaatccaatttacaacagcattaaaaaatacttaggaataaatttaaccaaggaaatgaaagatctgtgtacataaaagtataaaacattgatgaaagaaatagaagaaaacacaaaaaaatggaaagctgttctgagttcatgaattagaaggatt

SEQ ID NO: 353182 - DNA, 575 bp, Homo sapiens
aaactcggcctccctgcgggataagaagccggtgttcggcatgtggctccagagtccagtgagaccctctcgcccagtcacctccaggaggagtaaactggtggcgaccaagccaagcagagggagcgacgctgtgcagaaaaggaacctggcatagcaggtcaccatggctcagcgcagtcccggagcttccaagcgcasgcatgagcctcgcgccaggtgcagcagaggcaggtccatgtcctgtgcagctgctggtgtctgcaccatgtgtttacatatcagccggggaaagggattccaccttcaaggggagtggggaggggggacattctgacgaactccttacttgcatcacttcatttacccacctgatgactccaggagggccttgttattatgaccattacacaggcaagaaaacggagggtgctaacaccggagctgttcgctgccttgctccatgtggtgtggctccagggagggtcagcgaggatctgtccatgcccccggctcactgctttgtcctttgtccgatgtgtgtggaccacgcgcagggtggaggtgggcctgag

SEQ ID NO: 353183 - DNA, 575 bp, Homo sapiens
aaactcggcctccctgcgggataagaagccggtgttcggcatgtggctccagagtccagtgagaccctctcgcccagtcacctccaggaggagtaaactggtggcgaccaagccaagcagagggagcgacgctgtgcagaaaaggaacctggcatagcaggtcaccatggctcagcgcagtcccggagcttccaagcgcacscatgagcctcgcgccaggtgcagcagaggcaggtccatgtcctgtgcagctgctggtgtctgcaccatgtgtttacatatcagccggggaaagggattccaccttcaaggggagtggggaggggggacattctgacgaactccttacttgcatcacttcatttacccacctgatgactccaggagggccttgttattatgaccattacacaggcaagaaaacggagggtgctaacaccggagctgttcgctgccttgctccatgtggtgtggctccagggagggtcagcgaggatctgtccatgcccccggctcactgctttgtcctttgtccgatgtgtgtggaccacgcgcagggtggaggtgggcctgag

SEQ ID NO: 353184 - DNA, 575 bp, Homo sapiens
aaactcggcctccctgcgggataagaagccggtgttcggcatgtggctccagagtccagtgagaccctctcgcccagtcacctccaggaggagtaaactggtggcgaccaagccaagcagagggagcgacgctgtgcagaaaaggaacctggcatagcaggtcaccatggctcagcgcagtcccggagcttccaagcgcacgcatgagcctcgcgccaggtgcagcagaggcaggtccatgtcctgtgcagctgctggtgtctgcaccatgtgtttacatatcagccrgggaaagggattccaccttcaaggggagtggggaggggggacattctgacgaactccttacttgcatcacttcatttacccacctgatgactccaggagggccttgttattatgaccattacacaggcaagaaaacggagggtgctaacaccggagctgttcgctgccttgctccatgtggtgtggctccagggagggtcagcgaggatctgtccatgcccccggctcactgctttgtcctttgtccgatgtgtgtggaccacgcgcagggtggaggtgggcctgag

SEQ ID NO: 353185 - DNA, 588 bp, Homo sapiens
tctctttcaatattgacacatccagaggcttcgttgaaaatgtgcatgcttgactgactccagcagcgaggactgaaatctgaaaagcattctcactctgacggacagcatcatgactatccaacacacagtctaacagacttctaatcttgcggcacttacctccagcttaagtcgggtttttttgttgttgtttgtttgtttgtttgtttgtttttgagacgcagtctcgctcttggtccccakgctggagtgcgatggcaccatctcagctcactgcaacttctgcctcccggggtcaagcgattctcctgcctcagccccctgagtagctgggattacaggcacctgccaccatgcccagctaatttttgtatatttagtagagacggggttttacgatgttggccaggctggtatagaactcctgacctcagctgatccgcctgcctcagcctcccaaagttctgggattacaggcatgagccaccgcaccaggcctgttttcacacatttttggagcaaagatagttcacagagagcatctgctgctatgactggattctgcaacatagtcaaaagtgtgcg

SEQ ID NO: 353186 - DNA, 588 bp, Homo sapiens
tctctttcaatattgacacatccagaggcttcgttgaaaatgtgcatgcttgactgactccagcagcgaggactgaaatctgaaaagcattctcactctgacggacagcatcatgactatccaacacacagtctaacagacttctaatcttgcggcacttacctccagcttaagtcgggtttttttgttgttgtttgtttgtttgtttgtttgtttttgagacgcagtctcgctcttggtccccaggctggagtgcgatggcaccatctcagctcactgcaacttctgcctcccggggtcaagcgattctcctgcctcagccccctgagtagctgggattacaggcacctgccascatgcccagctaatttttgtatatttagtagagacggggttttacgatgttggccaggctggtatagaactcctgacctcagctgatccgcctgcctcagcctcccaaagttctgggattacaggcatgagccaccgcaccaggcctgttttcacacatttttggagcaaagatagttcacagagagcatctgctgctatgactggattctgcaacatagtcaaaagtgtgcg

SEQ ID NO: 353187 - DNA, 588 bp, Homo sapiens
tctctttcaatattgacacatccagaggcttcgttgaaaatgtgcatgcttgactgactccagcagcgaggactgaaatctgaaaagcattctcactctgacggacagcatcatgactatccaacacacagtctaacagacttctaatcttgcggcacttacctccagcttaagtcgggtttttttgttgttgtttgtttgtttgtttgtttgtttttgagacgcagtctcgctcttggtccccaggctggagtgcgatggcaccatctcagctcactgcaacttctgcctcccggggtcaagcgattctcctgcctcagccccctgagtagctgggattacaggcacctgccaccatgcccagctaatttttgtatatttagyagagacggggttttacgatgttggccaggctggtatagaactcctgacctcagctgatccgcctgcctcagcctcccaaagttctgggattacaggcatgagccaccgcaccaggcctgttttcacacatttttggagcaaagatagttcacagagagcatctgctgctatgactggattctgcaacatagtcaaaagtgtgcg

SEQ ID NO: 353188 - DNA, 586 bp, Homo sapiens
ctgcctgcattgtttccttcacagggcagctgtgatattccactgaagagggaatgaaagtagcacagttctatataaacacaaatataaacatgcttctcagaaatctctgtactgatcatactatgttccagggtcagccacctataactagtctttagccaaaagatgaactcaaacacacacagggcagatatgtgacattggatggatgaaggcaggctctgtaagtgcattgttagttcacaatgggtaatttgaagagtctacacttctctaaaactgtatgtaatcacaaatagtggccggaaaaacctggagagagataagaggatgcaatccacacttatttttccaattaaattatrttacctacagaaaatgagcagtgtactacacaacaaagattactcagctaagtcattatataaataattgtaatttacaaataattgttctcaatgtatgtttgttatccgaaaaaacactgtctctggtaatgaggtgagatttatttcttggttattgcattctagcttctatacacacagtcttatttaatctttacagtagccaagcggagcaa

SEQ ID NO: 353189 - DNA, 586 bp, Homo sapiens
ctgcctgcattgtttccttcacagggcagctgtgatattccactgaagagggaatgaaagtagcacagttctatataaacacaaatataaacatgcttctcagaaatctctgtactgatcatactatgttccagggtcagccacctataactagtctttagccaaaagatgaactcaaacacacacagggcagatatgtgacattggatggatgaaggcaggctctgtaagtgcattgttagttcacaatgggtaatttgaagagtctacacttctctaaaactgtatgtaatcacaaatagtggccggaaaaacctggagagagataagaggatgcaatccacacttatttttccaattaaattatattacctacagaaaatgagcagtgtactacacaacaaagattactcagctaagtcattatataaataattgtaatttacaaatarttgttctcaatgtatgtttgttatccgaaaaaacactgtctctggtaatgaggtgagatttatttcttggttattgcattctagcttctatacacacagtcttatttaatctttacagtagccaagcggagcaa

SEQ ID NO: 353190 - DNA, 650 bp, Homo sapiens
aataactacacattagttataattctgtgcagttttaatttataacactagatggcacctgttatataattcagttttaaattgtagttcaaactacctaaaacgttttttatttttgtgcttaatagtagtacttctatgctttaaacaaacaaaaaatatgtttttctgttattttgaagacaaaattatttttgcttggttgcattcttggacagacagctctggcatccgatgaagtgatcttagttgtctgctcatttatttatctgcttttagcaagaaatcacataacttttatttctaagagacagttgttaggcagttgttgcaaatagatgatgtagctgtacattttaaatgtatgctctggaatgagtcactttttttccctgagcctcagtgtcctcatttgccaaataaagatgcttcctaactgattcctgatgactttttgaaagtgaattaggataattgcatcttaaggtactttagacactatgartttatatataggcaagatattcattcattcataaactattgcctacactttgaaattttcattttttgaagttgacttacagaggttcatgtctgagttactgaccttcttaaagcctcatcttcagccctctctgcaattacac

SEQ ID NO: 353191 - DNA, 441 bp, Homo sapiens
cagaaaaatacaggaagacacacagagcacaccagattcactacagcttaagaccagcctcagaattccttttgtattaattaaaactttatagaggagataaacagtgacatttacctttcatttaaccakttggcacaaattgagagaggccagtgtctgactactaagaaattcttgcccttttgccggcatgccagatttctgggctctttctccctgaccagccctggtgaccctagtcaactgtaatgcaaacaaacacattcccatgaattaagaatattcacaaatagcttcaaattttggagaaattaggcagagtgagaattactactcaaattctatttacaaaagtataatcaagacacttaaagtatcaggaagcctaaactccaaagaagttagtttaagattaaaaagctggtgtgctccattaat

SEQ ID NO: 353192 - DNA, 441 bp, Homo sapiens
cagaaaaatacaggaagacacacagagcacaccagattcactacagcttaagaccagcctcagaattccttttgtattaattaaaactttatagaggagataaacagtgacatttacctttcatttaaccatttggcacaaattgagagaggccagtgtctgactactaagaaattcttgcccttttgccggcatgccagatttctgggctctttctccctgaccagccctggtgaccctagtcaactgtaatgcaaacaaacacattcccatgaattaagaatattcacaaatagcttcaaattttggagaaattaggcagagtgagaattactactcaaattctatttacaaaastataatcaagacacttaaagtatcaggaagcctaaactccaaagaagttagtttaagattaaaaagctggtgtgctccattaat

SEQ ID NO: 353193 - DNA, 528 bp, Homo sapiens
atgtatgtgaaaaccacatcatcacaagataatagtcctttgctctggagggcaactagtttaaagtcagtaaacatgaagtttcagatgatttaagggttccctatccactgtttctatattgagtgtctttctgtgttaggacttagaccaagaaagggaaaggactcactgaatgacgtatggtcagttgataggtctggcaagagggatacaggtttgatgactcccatcttctgtctatctgaccgattttattatttgctcttatgtagtgtttcttcttcctggggctcaataagaaattcctttatgcatgtcacactagaaagaaaataagagagcagaaagtatgtggaataaaagaaatgatgagataggaccaacattcacttcttgctgctacatttccagatgctctctgtttaaaatttatttcacagcrcacaggtattttctctttgaacctacaagaatgtaaccccaagattcaattcaaaaagacaaaaaggcaggagcacaaggttc

SEQ ID NO: 353194 - DNA, 558 bp, Homo sapiens
aaaactaataaggggctggctcattacctcaaggagtataaagaggccatacacgatatgaatttcagcaatgaggacatgataagagaatttgacaatatggctaaggtgcaggatgagaagagaaaaagcaaacagaaattgggggcgtttttgtggatgcaaagaaatttacaggaycccttctaccctagaggtccaagggaattcaggggtggctgcagggccccacgaagggacattgaagacattccttatgtgtagtgtccctggcaggcatttaccaggccatgtgctttaacgttacggtaatactttactttaggcatccctcctgttgctagcagccttttgacctatctgcaatgcagtgttctcagtaggaaatgttcatctgttacatggaaaaaatgttgatggtgcattgtaaaattaaaaaacacaacttgcagaaccaaatatatggcatcagtacatttttgtaaaactacaaagatacttacctagtaatatagtatagaaaacaattctgaaagctgtgtccactaaaagattaac

SEQ ID NO: 353195 - DNA, 592 bp, Homo sapiens
atcttacagactatagtatttccatcttataagatggagatcctaagactcaggaaagttgagcaatttagctgaagtcagacaatttagccaaagctaaacttcaaaactggaatgttacacaagtcatattcctatttcaattgctaaatatgggttgattttccctgtttacagattgccactgttgcaatgttttcatctcactcaattgaagtccagaaatgtgaaagaggtccaggaattcaaacactcttaaggccctatttcagaytgctaaacacagattaagtgtaagtaatacactccaatactaaaaatgaagaaataagatgtttgcttttttaactttttggataaacatatgaaaaatttattttgagcctttaaaaagtaggtagaacattccatcacattggttcaaagatcagtttctcagaacttcgctggttgttggttaatgacatatggcccaacaggaatattaatatatagataatagctcacaagcagaatgtgaaatattaaggtattattgcaaaagactttgctactttccagaagtatattaacaggataacatgaagtccaa

SEQ ID NO: 353196 - DNA, 592 bp, Homo sapiens
atcttacagactatagtatttccatcttataagatggagatcctaagactcaggaaagttgagcaatttagctgaagtcagacaatttagccaaagctaaacttcaaaactggaatgttacacaagtcatattcctatttcaattgctaaatatgggttgattttccctgtttacagattgccactgttgcaatgttttcatctcactcaattgaagtccagaaatgtgaaagaggtccaggaattcaaacactcttaaggccctatttcagattgctaaacacagattaagtgtaagtaatamactccaatactaaaaatgaagaaataagatgtttgcttttttaactttttggataaacatatgaaaaatttattttgagcctttaaaaagtaggtagaacattccatcacattggttcaaagatcagtttctcagaacttcgctggttgttggttaatgacatatggcccaacaggaatattaatatatagataatagctcacaagcagaatgtgaaatattaaggtattattgcaaaagactttgctactttccagaagtatattaacaggataacatgaagtccaa

SEQ ID NO: 353197 - DNA, 592 bp, Homo sapiens
atcttacagactatagtatttccatcttataagatggagatcctaagactcaggaaagttgagcaatttagctgaagtcagacaatttagccaaagctaaacttcaaaactggaatgttacacaagtcatattcctatttcaattgctaaatatgggttgattttccctgtttacagattgccactgttgcaatgttttcatctcactcaattgaagtccagaaatgtgaaagaggtccaggaattcaaacactcttaaggccctatttcagattgctaaacacagattaagtgtaagtaatacactccaatactaaaaatgaagaaataagatgtttgcttttttaactttttggataaacatatgaaaaatttattttgagcctttaaaaagtaggtagaacattccatcacattggttcaaagatcagtttctcagaacttcgctggttgttggttaatgacatatggcccaacaggaatattaatatatagataayagctcacaagcagaatgtgaaatattaaggtattattgcaaaagactttgctactttccagaagtatattaacaggataacatgaagtccaa

SEQ ID NO: 353198 - DNA, 598 bp, Homo sapiens
cacaaaactatttattcatctaatatgaatgcatactgtttgtcaggcacaattctaggcatttggaatacatcagtaggcaatatagataataaataaccctgccctagtgtgggagaaacggatattaaacaacaaacgtaagcaaatgataygggttgttagatgataagtgcaatggaaaaaagaaaacagagcaggagaaagggaagggggtggggctggttttaaataggctggtcaggcagctttattgagaagatgacatttgtgcaaagacttgaagtagatagaggagttagccttgaggatatctggtggaagggtgttctaggcagggatcagtttttgcatatgccttgagggcggaagcatgtctggcatgtttgagtaatggcatggaggtcagtctggctggaatgatgttacggggcctggggcaagagtgtagtaggatatgaggtcagagaggtaacgaggtggaggcagatcttcttgggccctagaagtattgcaaagattggttttcactatggggaaccattgaaaagctttgaacagaggaatgatgtgatctcacttatgttttaaaaaaatc

SEQ ID NO: 353199 - DNA, 598 bp, Homo sapiens
cacaaaactatttattcatctaatatgaatgcatactgtttgtcaggcacaattctaggcatttggaatacatcagtaggcaatatagataataaataaccctgccctagtgtgggagaaacggatattaaacaacaaacgtaagcaaatgatacgggttgttagatgataagtgcaatggaaaaaagaaaacagagcaggagaaagggaagggggtggggctggttttaaataggctggtcaggcagctttattgagaagatgacatttgtgcaaagacttgaagtagatagaggagttagccttgaggatatctggtggaagggtgttctaggcagggatcagtttttgcatatgccttgagggcggaagcatgtctggcatgtttgagkaatggcatggaggtcagtctggctggaatgatgttacggggcctggggcaagagtgtagtaggatatgaggtcagagaggtaacgaggtggaggcagatcttcttgggccctagaagtattgcaaagattggttttcactatggggaaccattgaaaagctttgaacagaggaatgatgtgatctcacttatgttttaaaaaaatc

SEQ ID NO: 353200 - DNA, 564 bp, Homo sapiens
aaagaaactgtggtatatatatgtgatggaatactactcagctataaaaagtattgaattaatggcatttgcagtgacctggatgagactgggaactattattttaagtgaagtaaactcgggaatggaaaaccaaacatcatatgttctcactgatatgtgggagctacgctatgaggatgcaaaggcgtaagaataatacagtgaactcgggaacttgggggaaaggatgggagaggggcgagggataaaaatctacaaatagggtgcagtgtatactgcccgggtgatgggtgcaccaaaatctcacaaatcaccactaaagaacttactcatgtaaccagataccacctgtaccccaataacatctggaaaaaaaaaaaagaaatcataagctgaacttgtggcagcctgacaaacttgcctaaaccagttcatacaaaacttgatacactgcttcttgattctataccattagacatgtccgaagtactccaacaaaascttaaagaaaaaaacactaagcttcaagcacagctctttctggtgtatataaaacgcttc

SEQ ID NO: 353201 - DNA, 618 bp, Homo sapiens
atgaagccaatcactctgtggtctctgagtttgtgttcctgggactctctgactcgcggaagatccagctcctcctcttcctctttttctcagtgttctatgtrtcaagcctgatgggaaatctcctcattgtgctaactgtgacctctgaccctcgtttacagtcccccatgtacttcctgctggccaacctttccatcatcaatttggtattttgttcctccacagctcccaagatgatttatgaccttttcaggaagcacaagaccatctcttttgggggctgtgtagttcagatcttctttatccatgcagttgggggaactgagatggtgctgctcatagccatggcttttgaccgatatgtggccatatgtaagcctctccactacctgaccatcatgaacccacaaaggtgcattttgtttttagtcatttcctggattataggtattattcactcagtgattcagttggcttttgttgtagacctgctgttctgtggccctaatgaattagatagtttcttttgtgatcttcctcgatttatcaaactggcttgcatagagacctacacattgggattcatggttactgccaatagtggatttatttctc

SEQ ID NO: 353202 - DNA, 581 bp, Homo sapiens
caggacacagccgggcacggtggctcatcacctgtaatcccagcactttgggaggccgaggtggacagatcagttgagtgcaggagttcgagaccagcctggccaacatggtgaaacctcatctctattaaaaatacaaaaattagccagatgtggtggtgcatgaatgtaaatccagctactcgggaggctgaggctacagaatcgcttaaacctaggaggtggaggttgcagtgaaccgagattgtgccatggcaatccagcctgggtgacagagtgagaatctgtctcaaaaaaaaaaaaaaaaakgcatgatacctgttcataatagctaagaaatatatttttgaaccttgaaaactgagggaaaaactgacatttcctggatgggtaaataaaggaactggttcagaacgtagtctcagatcttttccagctcattgagtttattgattgagaataatgaacatctttttaagaaaattttaaaatgtagtgatcataaatctattctaagaagttgcccaattccgatcccatgcaattccagttaggtgaatttaaatttaaatgattccatc

SEQ ID NO: 353203 - DNA, 528 bp, Homo sapiens
taggtatatattcaaaagagaagacatcagcatattaaacagatttctgcagaactttaaaattaagcgtgcacgcacacacacacacacacacacacacacggttctacttgtctatgtttgyttttacgttcgctatgttatatggtgtcatagccaagatattattgtaaatagactgtgataaagattttcccctatgtgtttttccagaattttacagtttaaggttttacatttaagtcttcagtacattttgactctagttttgtgttttgtgtaagataaggcccacttttatctgttcacatgtgatcttcaggtttttccagcatcatttgttagactattcttacctccatggtgattcttggcgccattgtcaaaggccagctgactgtatatgtgtaagtttatttctgggctttattctactcattagtctatatgcctgttcttatgtctctgataaactattttaattattgtagctttgtggtatgttagaaaatcagaaagcatgacgca

SEQ ID NO: 353204 - DNA, 528 bp, Homo sapiens
taggtatatattcaaaagagaagacatcagcatattaaacagatttctgcagaactttaaaattaagcgtgcacgcacacacacacacacacacacacacacggttctacttgtctatgtttgcttttacgttcgctatgttatatggtgtcatagccaagatattattgtaaatagactgtgataaagattttcccctatgtgtttttccagaattttacagtttaaggttttacatttaagtcttcagtacattttgactctagttttgtgttttgtgtaagataaggcccacttttatctgttcacatgtgatyttcaggtttttccagcatcatttgttagactattcttacctccatggtgattcttggcgccattgtcaaaggccagctgactgtatatgtgtaagtttatttctgggctttattctactcattagtctatatgcctgttcttatgtctctgataaactattttaattattgtagctttgtggtatgttagaaaatcagaaagcatgacgca

SEQ ID NO: 353205 - DNA, 548 bp, Homo sapiens
attttctcatacataaaaagagtaagatcccagtagtttaaaatatgaaaagttttctctttctgtctctctctttctttttcaaaggaaaatttatctagtagtctactctatattcatggaaatgccagtcttttctgttttaaggggatgaaggggtactccagcctccactgccaggctctcccctactaatccatactccatccaccaactgaggacagtgaaacgttttcagggactactagaacaccaaagaatgttgtctgcacgctactccacaacaaattgcttaacgtatcttttctctccaatgctgtcagcttttaaaaaaatagacatatggagaaaaataatgaaaaagaaatctctccagctcactgaacttcatgctccaattaccaccagatatggtgctgcctaattattaaaagcacacatttatgcataaatgcmcctattcagtatgtatcattgattataagaactaagggcaacattctgtgtttttctgtagacatgtagtcttatttgtttactgaggtttg

SEQ ID NO: 353206 - DNA, 595 bp, Homo sapiens
ttacactaaacagaagtaaggcatatcttgaaatatttcaaaaaaattaaggcatattttaaaatatgccttacttctgtataacatgttcaccttttgaaacataaattattattcgacattaaaaattttcaataatcgagcagactcatttaaacataaagcctttaccctgacacactcggttcattgatgaaccaaatctttcccatctctaaaccttagtggytgatgtccacaacacactgaactctattcgactactctctagcatactggtgcatttattcacatgaaagttgaactgcttgtttccatagatatgacataatttgtgctttttattttaattatgcaattaaataaaattattatgcaagaaataagttaaagaaataaagtgggaatttctgtgaatgcatggaaggattattaaaagcaaatcattaaaatgattgatttttattatagaagtttgatacgaagttttagagggattttagcaatttagaaatattttgcattcagattgtttttcaagtgtcttttaattcttacttcagttaaacggttccacatagtggagaaggtgggc

SEQ ID NO: 353207 - DNA, 595 bp, Homo sapiens
ttacactaaacagaagtaaggcatatcttgaaatatttcaaaaaaattaaggcatattttaaaatatgccttacttctgtataacatgttcaccttttgaaacataaattattattcgacattaaaaattttcaataatcgagcagactcatttaaacataaagcctttaccctgacacactcggttcattgatgaaccaaatctttcccatctctaaaccttagtggctgatgtccacaacacactgaactctattcgactactctctagcatactggtgcatttattcacatgaragttgaactgcttgtttccatagatatgacataatttgtgctttttattttaattatgcaattaaataaaattattatgcaagaaataagttaaagaaataaagtgggaatttctgtgaatgcatggaaggattattaaaagcaaatcattaaaatgattgatttttattatagaagtttgatacgaagttttagagggattttagcaatttagaaatattttgcattcagattgtttttcaagtgtcttttaattcttacttcagttaaacggttccacatagtggagaaggtgggc

SEQ ID NO: 353208 - DNA, 595 bp, Homo sapiens
ttacactaaacagaagtaaggcatatcttgaaatatttcaaaaaaattaaggcatattttaaaatatgccttacttctgtataacatgttcaccttttgaaacataaattattattcgacattaaaaattttcaataatcgagcagactcatttaaacataaagcctttaccctgacacactcggttcattgatgaaccaaatctttcccatctctaaaccttagtggctgatgtccacaacacactgaactctattcgactactctctagcatactggtgcatttattcacatgaaagttgaactgcttgtttccatagatatgacataatttgtgctttttattttaattatgcaattaaataaaattattatgcaagaaataagttaaagaaataaagtgggaatttctgtgaatgcatggaaggattattaaaagcaaatcattaaaatgattgatttttattatagaagtttgatacgaagttttagagggattttagcaatttagaaatattttgcattcagattgtttttcaagtgtcttttaattcttacttcagttaaamggttccacatagtggagaaggtgggc

SEQ ID NO: 353209 - DNA, 607 bp, Homo sapiens
ctagtgtaaaactagaattctttttatgtttgatattgatctacatggtacagaaaagcctctctgtaatagaagataggtgtctatctgaagagattgattggcttcgatacctaaaattagtgacttttcatagatatttcaaggcaacagctctcactgagttaacacctatgctatcctatatcaggtctattctacaygctttctcaaatttcatctttgtatctttggagagcagtggtaagcacaatataaagtaaagtagttgttcagttattctttgaagaatttactcaaaattattagttaggtatcctggctaaaggcaatctaggtaccccatcctcaacttactcatgaactcattggctaaaagaagctatagcctcttagtgtgtaagaaattggtgggttcttgatctcactgacttcaagaatgaagctgtggacccttgcggtgagtgtcacagttctcaaagatggtgtgtccggcgtttgttccttctgatgtttggatgtgttcagagtttctgccttctggtgggttcgtggtctcgctggcctcagtagtgaaactgcagaccttcacggtgagtgttacagc

SEQ ID NO: 353210 - DNA, 607 bp, Homo sapiens
ctagtgtaaaactagaattctttttatgtttgatattgatctacatggtacagaaaagcctctctgtaatagaagataggtgtctatctgaagagattgattggcttcgatacctaaaattagtgacttttcatagatatttcaaggcaacagctctcactgagttaacacctatgctatcctatatcaggtctattctacatgctttctcaaatttcatctttgtatctttggagagcagtggtaagcacaatataaagtaaagtagttgttcagttattctttgaagaatttactcaaaattattagttaggtatcctggctaaaggcaatctaggtaccccatcctcaacttactcatgaactcattggctaaaagaagctatagcctcttagtgtgtaagaaattggtgggttcttgatctcactgacttcaagaatgaagctgtggacccttgcggtgagtgtcacagttctcaaagatggtgtgtccggcgtttgttccttctgatgttyggatgtgttcagagtttctgccttctggtgggttcgtggtctcgctggcctcagtagtgaaactgcagaccttcacggtgagtgttacagc

SEQ ID NO: 353211 - DNA, 604 bp, Homo sapiens
gataagctttctcctccttcaccatctgccataattggaagctttcggagtctcccccaaagcagatgctactatattttctgtacagcctccagaactgttagccaattaaacctgttttcttataaattacctagtctcaggtatttcttacagctgcataagaacagcctaatattatcaaggacgtgatgaaaagggaactcttgggtactgtatatggaaatgtaaaatagtgcagagactattaaaaacactatagagattcctcaaaaagttaaaattggaactaccatatgatccagcaatcccacttctgggtatatattcaaaaaaatkgaattcagggtcttgaagaaataccctcatttccatattcattgcagcaatattcacagtagccaaggcttggaaacagtttaaatgaccatcaacagatgatgtaattttaaaaatgtggtacatagaaacaatggaatatttagcctatagaaaagagaaaaagcctgtcatttgtgaagacatggatgaatcttcaggacattattctaagggaaataattaagacacagaagaaaaaataccattttatacaattatatga

SEQ ID NO: 353212 - DNA, 648 bp, Homo sapiens
gaaaatataggtagaagtctgtttaatggtataaaataaagccaatggtttctattttaccaatagtatcacatctcatttctgaagtgttttccygaggggagataaagtgtatcatgatacctaataatgtctgaataatatgaaagacttggagacatgggtgtgaatattgctccttaaagtctcatggggaattaggggagcatcggcaagtttcccatggccctctgggagaaatacagtgttttgataaaggagagagggcacaaagaagtctggactcagaagaaggacaatagaatgcacgaaccttgtgagtaaagtgagggttgaggctgaagcaaagaacctgaacaaaactgcagagagctgataagcaaacacacaggagaaagatattaatacactaaacctagatcagaaggggtatgcatgagaattctaagaggctatagttaaacatgaagtgattgaattccttaaactctaagggggactgaagatccaagctaatttcaatcaaagctatttgatcattcattttgtaaacaaaaactatgaactggtcacactagcaacataaaattcttctaaaattatatttttgttgcaaatgagaagaaattatagagaaccaaagtcaaa

SEQ ID NO: 353213 - DNA, 648 bp, Homo sapiens
gaaaatataggtagaagtctgtttaatggtataaaataaagccaatggtttctattttaccaatagtatcacatctcatttctgaagtgttttcctgaggggagataaagtgtatcatgatacctaataatgtctgaataatatgaaagacttggagacatgggtgtgaatattgctccttaaagtctcatggggaattaggggagcatcggcaagtttcccatggccctctgggagaaatacagtgttttgataaaggagagagggcacaaagaagtctggactcagaagaaggacaatagaatgcacgaaccttgtgagtaaagtgagggttgaggctgaagcaaagaacctgaacaaaactgcagagagctgataagcaaacacacaggagaaagatattaatacactaaacctagatcagaaggggtatgcatgagaattctaagaggctatakttaaacatgaagtgattgaattccttaaactctaagggggactgaagatccaagctaatttcaatcaaagctatttgatcattcattttgtaaacaaaaactatgaactggtcacactagcaacataaaattcttctaaaattatatttttgttgcaaatgagaagaaattatagagaaccaaagtcaaa

SEQ ID NO: 353214 - DNA, 541 bp, Homo sapiens
aatgatatactggataaagaaaatgtggcacatatacaccatggaatactrtgcacccacaaacaaaaaagaatgaaatcatgtcctttgcagggacatggatgaagctggaagccatcattctcagcaaactgacacaggaacagaaaaccaaacactgcatgttctcactcataagtgggagttgaacaatgagaacacatggacatagggaggggaacatcacacactggggcctgttgggggtggaggtcaaggggaaggagagcattaggacaaatacggaatgcatgcggggcttaaaacctagatgaagatttgataagtgcagcaaactgccatagcacatgcatgcctgtgtaacaaactgcacattctgcacgtgtatcccggaacttaaaagtaaaatttaaaaaaagaggaagaaatactgaaatagcattgtataaacttacattttgaattaaattcaaacatacaaggaagtgatttgtatggtatgctaaatatatttagaaaaattgattcatgaaaatcataa

SEQ ID NO: 353215 - DNA, 490 bp, Homo sapiens
tttctagtgttgtcagtgatgttgatgttccccactattattgtattgctgtcactctattttcttaggtctagttgtatttgttttctgaatctgagtgctcaagtgttgggtccatatatatttaggataattaaatcttcctattgtattgaacactttatmattatataatgtccttctgcatgtgattgtttgtgtgtgtgtgcctgtgtgtgtgcatgtgtttactgttgttggtttaaagtctgttttatctgatataagaatagttattcagcttgattgtgttttccattggcttgatatatctttgcccacctctttactttctctctgtagccatctttaaccattagattcatctcttgtaggtagcagactgttgggtcttatttttttaattcacttttccagtttacatcttttaagtacagcatttaggcaatttatgttcaaggttaacattgacatgtgaggtttgttcttg

SEQ ID NO: 353216 - DNA, 490 bp, Homo sapiens
tttctagtgttgtcagtgatgttgatgttccccactattattgtattgctgtcactctattttcttaggtctagttgtatttgttttctgaatctgagtgctcaagtgttgggtccatatatatttaggataattaaatcttcctattgtattgaacactttataattatataatgtccttctgcrtgtgattgtttgtgtgtgtgtgcctgtgtgtgtgcatgtgtttactgttgttggtttaaagtctgttttatctgatataagaatagttattcagcttgattgtgttttccattggcttgatatatctttgcccacctctttactttctctctgtagccatctttaaccattagattcatctcttgtaggtagcagactgttgggtcttatttttttaattcacttttccagtttacatcttttaagtacagcatttaggcaatttatgttcaaggttaacattgacatgtgaggtttgttcttg

SEQ ID NO: 353217 - DNA, 490 bp, Homo sapiens
tttctagtgttgtcagtgatgttgatgttccccactattattgtattgctgtcactctattttcttaggtctagttgtatttgttttctgaatctgagtgctcaagtgttgggtccatatatatttaggataattaaatcttcctattgtattgaacactttataattatataatgtccttctgcatgtgattgtttgtgtgtgtgtgcctgtgtgtgtgcatgtgtttactgttgttggtttaaagtctgttttatctgatataagaatagttattcagcttgattgtgttttccattggcttgatatatctttgcccacctctttrctttctctctgtagccatctttaaccattagattcatctcttgtaggtagcagactgttgggtcttatttttttaattcacttttccagtttacatcttttaagtacagcatttaggcaatttatgttcaaggttaacattgacatgtgaggtttgttcttg

SEQ ID NO: 353218 - DNA, 528 bp, Homo sapiens
aaataattactatacatatagtagtatagaacaaaaactggtaaagtagaaaaagatttctattaatttcgataagaaatatgaacaatttcaaattgttattctattattattattattattattattattattattattatttttgaggtggagtctcgctctgtggcccaggctggagtgcagtggcgtgacctcggctcactgcaagctccgactcccgggttcatgccattctcctrcctcagcctctggagtagctgggactacaggcgcccgccaccacgccaggctaatttttttgcatttttactagagacggcgtttcaccgtgttagccaggatggtatggtctccatctcctgacctcgtgatccgcccgcctcggcctcacaaagtgctgggattacagatgtgagccaccgcgccaggcctattcatttattttttgcccaagattcaaatagtcacaggtatgatttatctcctacttcggtttttgttcctgcactacgtttagtcatgccc

SEQ ID NO: 353219 - DNA, 528 bp, Homo sapiens
aaataattactatacatatagtagtatagaacaaaaactggtaaagtagaaaaagatttctattaatttcgataagaaatatgaacaatttcaaattgttattctattattattattattattattattattattattattatttttgaggtggagtctcgctctgtggcccaggctggagtgcagtggcgtgacctcggctcactgcaagctccgactcccgggttcatgccattctcctgcctcagcctctggagtagctgggactacaggcgcccgccaccacgccaggctaatttttttgcatttttactagagacggcgtttcaccgtgttagccaggatkgtatggtctccatctcctgacctcgtgatccgcccgcctcggcctcacaaagtgctgggattacagatgtgagccaccgcgccaggcctattcatttattttttgcccaagattcaaatagtcacaggtatgatttatctcctacttcggtttttgttcctgcactacgtttagtcatgccc

SEQ ID NO: 353220 - DNA, 528 bp, Homo sapiens
aaataattactatacatatagtagtatagaacaaaaactggtaaagtagaaaaagatttctattaatttcgataagaaatatgaacaatttcaaattgttattctattattattattattattattattattattattattatttttgaggtggagtctcgctctgtggcccaggctggagtgcagtggcgtgacctcggctcactgcaagctccgactcccgggttcatgccattctcctgcctcagcctctggagtagctgggactacaggcgcccgccaccacgccaggctaatttttttgcatttttactagagacggcgtttcaccgtgttagccaggatgktatggtctccatctcctgacctcgtgatccgcccgcctcggcctcacaaagtgctgggattacagatgtgagccaccgcgccaggcctattcatttattttttgcccaagattcaaatagtcacaggtatgatttatctcctacttcggtttttgttcctgcactacgtttagtcatgccc

SEQ ID NO: 353221 - DNA, 579 bp, Homo sapiens
tgcattttcattgtcaaagttgattgaagtattatgtaaatgaactcaaaggagtagtgaaggcaaaagagacatatctatgagattaaaatgtctctaagtctacacacacagaaaataacaatgtttgagtacatatacatatatatgctgaattaggagagctgaacttttaagtcttgttttaaagttgtatctgtatgtaaatttagcatgttctttcctctccctggacctgtttcttcagtctgtaatagggcagatctgtatgataccttcctatttagttagrcacaaaataagaacatatgggcttgtgaaaccaaaaggaaaagctctttaattaggcattacattcatcaacacatatattaaatctaatcactttagcaattggaaagcaattagggatatttaaatgaatagtttatttaatggtgctctaacagagaaaacaggttttcttttcatcacttgtgttccagaaccttttctctatttcttttgatatgtgttatctttgttttgctactgtacttatttatattttacagtaaacaaatttattatatttcaaaa

SEQ ID NO: 353222 - DNA, 581 bp, Homo sapiens
acatgtaacaatatgtatacaggcatttatatactcaaatctagaaacctsactctaggaatttataattataactcaataaaagcccaacaatttaatctggagatgaattctctatgattaaaaattttataaaatgcaattaaaacgtacttgtactatattatgaaaatgatacattaatacaaacagccattatattgtcattaaatgtttaattattatgaagtcaaagcagaacagtgagaggaagcgtgggcttttaaaatgctatctaaaatcataaataaatttatatgaatataatgattatgcttacataaatgtacatccctgtgtgtaggcttgactcaccttatccttctaaatataggggtaaaattgtatctaaattctgggtttgttgtgagaattaaatgtgatgatacgtacaacatactcagagtagtatctgactcatagcaagccttcaacagatgctacctattactgttattattatagtgaactgatttaagtcagtttgatcttcacaggatttaggtcctttgtggtagatattatgggtttcttataatgac

SEQ ID NO: 353223 - DNA, 581 bp, Homo sapiens
acatgtaacaatatgtatacaggcatttatatactcaaatctagaaacctgactctaggaatttataattataactcaataaaagcccaacaatttaatctggagatgaattctctatgattaaaaattttwtaaaatgcaattaaaacgtacttgtactatattatgaaaatgatacattaatacaaacagccattatattgtcattaaatgtttaattattatgaagtcaaagcagaacagtgagaggaagcgtgggcttttaaaatgctatctaaaatcataaataaatttatatgaatataatgattatgcttacataaatgtacatccctgtgtgtaggcttgactcaccttatccttctaaatataggggtaaaattgtatctaaattctgggtttgttgtgagaattaaatgtgatgatacgtacaacatactcagagtagtatctgactcatagcaagccttcaacagatgctacctattactgttattattatagtgaactgatttaagtcagtttgatcttcacaggatttaggtcctttgtggtagatattatgggtttcttataatgac

SEQ ID NO: 353224 - DNA, 581 bp, Homo sapiens
acatgtaacaatatgtatacaggcatttatatactcaaatctagaaacctgactctaggaatttataattataactcaataaaagcccaacaatttaatctggagatgaattctctatgattaaaaattttatwaaatgcaattaaaacgtacttgtactatattatgaaaatgatacattaatacaaacagccattatattgtcattaaatgtttaattattatgaagtcaaagcagaacagtgagaggaagcgtgggcttttaaaatgctatctaaaatcataaataaatttatatgaatataatgattatgcttacataaatgtacatccctgtgtgtaggcttgactcaccttatccttctaaatataggggtaaaattgtatctaaattctgggtttgttgtgagaattaaatgtgatgatacgtacaacatactcagagtagtatctgactcatagcaagccttcaacagatgctacctattactgttattattatagtgaactgatttaagtcagtttgatcttcacaggatttaggtcctttgtggtagatattatgggtttcttataatgac

SEQ ID NO: 353225 - DNA, 581 bp, Homo sapiens
acatgtaacaatatgtatacaggcatttatatactcaaatctagaaacctgactctaggaatttataattataactcaataaaagcccaacaatttaatctggagatgaattctctatgattaaaaattttataaaatgcaattaaaacgtacttgtactatattatgaaaatgatacattaatacaaacagccattatattgtcattaaatgtttaattattatgaagtcraagcagaacagtgagaggaagcgtgggcttttaaaatgctatctaaaatcataaataaatttatatgaatataatgattatgcttacataaatgtacatccctgtgtgtaggcttgactcaccttatccttctaaatataggggtaaaattgtatctaaattctgggtttgttgtgagaattaaatgtgatgatacgtacaacatactcagagtagtatctgactcatagcaagccttcaacagatgctacctattactgttattattatagtgaactgatttaagtcagtttgatcttcacaggatttaggtcctttgtggtagatattatgggtttcttataatgac

SEQ ID NO: 353226 - DNA, 528 bp, Homo sapiens
cagccctgcataaacgcaatatttggaatcaggatagagaaagcaatataagtacctgacgaagatgctgcttgtgctgctatagacccagacacaaagatttctttataattagcataaaatccccaggacaccagcccccctcaatacctactttcacacaaaatatacaagagtcagaagatcatccataggtagcacagaatgaggttaagttagagaaaagaagtctgggyagggtgagttccatgctgttttcttctgtatacctacacactagactcaccacttatgtttcaagagggacctggggattgattatcatgttagaactcagtgttgttttcaaaatttggggtcatctacataatattgtaaaatgtgttcattctaattctacagaacaaattcaattattcatatagtgctttctggtgattttatatgctattgagtcaaatattcccttctggtggttttagtgataaatacttaagtttctatctatctccttttgggagtgatatt

SEQ ID NO: 353227 - DNA, 515 bp, Homo sapiens
gagctgtggtttcttgctctcatttcctgactggcaagatgaaaatagaaaaattgatcaagtcagaagcggtgatggggtgtggagactcagggagacacacattactctcattcgcaccagccaatgagaaaytctagtgtcccagccatctgccgttcttatatggcttttatgattgggaataattataacaatgatgcacttagcactttgtgataacttagtgctgctgcctataattgagcgtgtaatgtgctgcgcaacactggcactctgttgacattatatttacttaaattcatacattaaataattttttttctggaaacagggtctggctctgtcaccccaggttggagtgcagtggcatgacctcagctcactgcaacctccacctcttggtttcaagcaatcctcccacctcagcctcccaggtagctgggactatgggagcatgccaccacaccctgctattttttttttttttttttttttggagagacagggcttca

SEQ ID NO: 353228 - DNA, 589 bp, Homo sapiens
tgaaacttgtcctgtgtgtcgatgactgatggtcatcagtaatgtgacccagcacctccaccaggaggacagttctctctcagcagaaatcagttgttttatattatttattctacggagattttattttcagtggaggacattgtgaaaatgcatgtcgatgtcttttataaaatgtgatttttaaaatttataacctacagatttggatgattatgttaggatttttactaacacaatactcacgtaggctataaagtcaaattatcttaactcaagaacatgttgattaggaaaattattttgaatggatttttgttgccagtccagtgtgtttaatgttcatttatgaatgcatctgcatttttatatctgatctataattgagtattttcattctaaatcagctgaattctgagcaatgacgactcaatttgctgaatgcttttgcaagcacaatccatatttttaaaagccaggaatggtatcctgataaattcaaaccagccagtctgctgtgttaatacrtaactaactctcagactctgtgatttgactgcagaataatacttggatttcaagcatcaca

SEQ ID NO: 353229 - DNA, 380 bp, Homo sapiens
acaagaaagaaaacgaatactttaatggaagggaatagcagtaataaatcttgaaaagttgaaaagcttgctgaaaattgtagaaaactcactcaaacaaaataaagttttcaacaattacatcaacagagtgcatttaagctcaaggaaaaatcgtagatctatgcacattcatgatgagaatgacctctgaggtcacactgtgcatattttagctactgaagactgtggtctgctttgcttcacaatttattttacccttctggtttaccatgttaggtggtayaaatagacagaaaagaatggccttcagagatcacaatacctggcttagcaccactaaggctgactctgtaaagagcccacataaattgtcaaca

SEQ ID NO: 353230 - DNA, 596 bp, Homo sapiens
ttgtaataacatacaatcacagtattgttgtgcaatttggctatttgtagtattttggttttcttttaatgagactgggcattttactttgtatccatgagttacattctgaataagtttcctagagccatcttactaggtcaaactatttaaatgtctttgtagctattgcttcacattacctcattgctttttgaagtgtttctatcaatttatgatgctaggagtactttctttaaaactttgatagcagtaggcattacaattattattttggttgtttagttaatataaaatattgccttgttagttttcatatgtattttttatctctcaaattggtaaacatttcagacagtgtttrctatttgtattttctttttattaattgcctctcatatgtataacttcaaaattcagcaccaaataaagaagaataggcatttcccctatttggtaatcttccattacttttaataataaaagaaaaacaaaacatctattttgggggcatttctattaggagagatactaaatatattaagataaatgatacctcctgatgtgatgatgtggtgtatgactgacgaccaaaa

SEQ ID NO: 353231 - DNA, 517 bp, Homo sapiens
ctcatagtgtcaagcagaataaatacattactctgaatgatccacatctgtatatcataccctttctttgagtgtcagtgagatctttgaatatgagggagtatcacttttgtgattatgttacrtggcaaaatcgaattttgcaaatggaattaaggtctctaattagagctaatcaaaaatgaaattacctagttacgcttatctagctaagtaagcttttaaaacaaagtctggtggtcggagtaactctcccttgctggccctgcagaaacagcctccataaattccatagcttcaaggaaatgaatttttctaaaaacctcatgagcttaaaagggaacctgaatttcagatgagtagccctgattgacacctttattttagttttgtgagaccttgagcagataactctactatgcccagacttctgatctatggacaatgtgggataataaatgagcattgtctaaaacatcttcgtttgtgtaatttgttataaaactatgtaatacaa

SEQ ID NO: 353232 - DNA, 649 bp, Homo sapiens
gcattaactatatcttgcttctttatcaagcttgcccctctgtgccttctaaatgggggcgtttagcccatttatattcaaagttaatatttatattgtggatttgatcatgttattgtgttgttagctattatttatgcaaacttgtttgtgtggttgctttgtagtgtcagtggtctgtgtacttaagtgtgtttttgtagtggctggtaacagtcttttctttccatatgtagtgctccttttaggacctcttgttaggcaagaatcgtggtaaaaaattccctcggcacttgcttctctaaaacggattctgtttctcattcacttacaaagcttagtttggctggatacaaaattcttggttggaatttcttcctttcagaatgctgaatataggcccccgtctcctctggcttgtagagtttctactgaaaggtctgctrttagcctgatggggtcctctttgtaggtgacctgtcctttctttctagtttcctttagcatttttttcttacattttgaccttggggaatctgatgattatgtgtctcggggatggtcttttgtagtatcttgtatgagttctccgaatttcctggatttgaattttgtcctctctagtgaggttgaggaagattttgtgggt

SEQ ID NO: 353233 - DNA, 562 bp, Homo sapiens
agttcccggaaacataaaacctcccaagattgaaccatgaagaaattgaatacttgaagacatcaataataatttccaaaattgaatcagtaataaaaaagctaccaggccgggcacagtggctcacgcctgtaatcccagcactttgggaggctgaggmgggcggatcacaaggtcaggagatccagaccacagtgaaacaccgtctctactaaaaatacaaaaaattagctgatcacgctggcaggcacctgtagtcccagctactcgggaggctaaggcaggagaatggcgtaaacccagaaggcaaagcttgcagtgagcccagatcacgcaactgcactccagcctgggtgacagagcgagactccacctcaaaaaaaaaaaacaaaaaaacaaaaaaacaaaaaaactaccaaccaaaaaagtcttggagtagacaaattcacagccaaattctactagatgtataatggaaacctggtaccaatcctcctgaaactatgccaaaaagctgaggagagactttttcctaattcattctataaggccagaatcattc

SEQ ID NO: 353234 - DNA, 562 bp, Homo sapiens
agttcccggaaacataaaacctcccaagattgaaccatgaagaaattgaatacttgaagacatcaataataatttccaaaattgaatcagtaataaaaaagctaccaggccgggcacagtggctcacgcctgtaatcccagcactttgggaggctgaggagggcggatcacaaggtcaggagatccagaccacagtgaaacaccgtctctactaaaaatacaaaaaattagctgatcrcgctggcaggcacctgtagtcccagctactcgggaggctaaggcaggagaatggcgtaaacccagaaggcaaagcttgcagtgagcccagatcacgcaactgcactccagcctgggtgacagagcgagactccacctcaaaaaaaaaaaacaaaaaaacaaaaaaacaaaaaaactaccaaccaaaaaagtcttggagtagacaaattcacagccaaattctactagatgtataatggaaacctggtaccaatcctcctgaaactatgccaaaaagctgaggagagactttttcctaattcattctataaggccagaatcattc

SEQ ID NO: 353235 - DNA, 562 bp, Homo sapiens
agttcccggaaacataaaacctcccaagattgaaccatgaagaaattgaatacttgaagacatcaataataatttccaaaattgaatcagtaataaaaaagctaccaggccgggcacagtggctcacgcctgtaatcccagcactttgggaggctgaggagggcggatcacaaggtcaggagatccagaccacagtgaaacaccgtctctactaaaaatacaaaaaattagctgatcacgctggcaggcacctgtagtcccagctactcgggaggctaaggcaggagaatggcgtaaacccagaaggcaaagcttgcagtgagcccagatcacgcaactgcactccagcctgggtgacagagcgagactccmcctcaaaaaaaaaaaacaaaaaaacaaaaaaacaaaaaaactaccaaccaaaaaagtcttggagtagacaaattcacagccaaattctactagatgtataatggaaacctggtaccaatcctcctgaaactatgccaaaaagctgaggagagactttttcctaattcattctataaggccagaatcattc

SEQ ID NO: 353236 - DNA, 628 bp, Homo sapiens
tgacattttcaagtgctccaaattaactttcagatatgtcttgattaagtatcttgataaattatttgtttctctgtaatggatttaacaaaatgctagctattctgttcacttaggaatgactgtgatggttaatactgagtggcaacctgaatggattgaaggatgcaaagtattgttcctgggtgtgtctgtgagggtgttgccaaacgaggttaacattttgagtcagtgggctggaaaagcagacccacccccaacctgggtgggcaccatctaatcagctgccagcacagctagaataaagcagggagaagaaagtgggaagacttgacttgcagagtcttccagcctttagctctctcccgtgctgggtgcttcytgcccttgaacatcagactccaacttcttcagcttttggactcttggacttacactagtggtttgccaggggctcttgagcttcagtcacagactgaaggctgcatagctgacttccctacttttgagattttgggacttgggctggcttccctgctcctcagcttgcggatggcctattgtgggacttcaccttgtgatcctccttaattaactccctttcatatgtacatctatcctattagtt

SEQ ID NO: 353237 - DNA, 628 bp, Homo sapiens
tgacattttcaagtgctccaaattaactttcagatatgtcttgattaagtatcttgataaattatttgtttctctgtaatggatttaacaaaatgctagctattctgttcacttaggaatgactgtgatggttaatactgagtggcaacctgaatggattgaaggatgcaaagtattgttcctgggtgtgtctgtgagggtgttgccaaacgaggttaacattttgagtcagtgggctggaaaagcagacccacccccaacctgggtgggcaccatctaatcagctgccagcacagctagaataaagcagggagaagaaagtgggaagacttgacttgcagagtcttccagcctttagctctctcccgtgctgggtgcttcctgcccttgaacatcagactccaacttcttcagcttttggactcttggacttacactagtggtttgccaggggctcttgagcttcagtcacagactgaaggctgcatagctgacttccctacttttgagattttgggacttgggctggcttccctgctcctcagcttgcggatggcctattgtgggacttcaccttgtgatcctccttaatwaactccctttcatatgtacatctatcctattagtt

SEQ ID NO: 353238 - DNA, 553 bp, Homo sapiens
tcaagagatctgatggttctataagaggaaacccccttcacttggctcttattctctcttgtctgccaccatgtaagaagtgcctttcaccttccaccttctgccatgattgtgaggcaccctcagccatgtggaactgtgagttcatgaaacctctttttgttaataaattacccagtctcagttgtgtctttatcagcagcgtgaaaacggactaatacaacttttccaggttgaggaagctctttactgttcttactttttttgaaagttttaatcatgaaagtgtgctcaatttttacaaacatttcattttttctcttaagatggcaatttgattttgtccttcattctattgatatgatatgttacattgattgatatttaactgtaaaaccaaatatataccaatatataataatatttattctctaaacaagtgggcagggataaaatcagctttaaaataacagattcttcttattatgaaatttaaagtctcagaagtatggggtatgattattctgttakgcagggtgtaatgtaacaaatt

SEQ ID NO: 353239 - DNA, 546 bp, Homo sapiens
actactgagctggagatgtcagaatatgtgagcacattgtgccatctgaataaataaataaataaataaaatctagtrtacaggttgcagaagtagacaggaaaagcaaacttgaaattcacattgtgtcaaggttactattgcaggcatcagggtagttagaactttttctttgtctcagaccaagatagtcagaacattaacatttccattatctcagccctagtcacaataattaataatttgtgactgtagaaagggattttactgtgtttatacatctaatgaatttatgctatctaataggtcatatgtataaatataatggtgtgataagattaccggtttgttaattaagtcattaccaatgaaatcctgagtgtagagtggtgtgtgtgtgtgtgtgtgtgtgtgtgtgtgttggagagtcagtactgaaaccaacactgaactttaccatgatatcaatacataaaaaattcatattttgtgttctcattttctttctcttaaaataagcagtctctaggagaaaaaactctaaag

SEQ ID NO: 353240 - DNA, 612 bp, Homo sapiens
aggacataggactgtgtatagtacattttaaatactctccagttactatattcatcatcatcattataccacaatgcttaattctacctatatcacatccaccacactctggactttctgctattaattaattattcatacatttgtgctacatgtcttaagctactttttagcatcctttaagtcaggaaataaattattatatgtgtttgttacagggagggtataagtgattggacaataaattggatcaggaatctggtcactatgaaaagaagtctcagtgaaactacaagttattctataatgagagagagaggaagggaagggaaggggaaaacatgaaggaaggaaggaaaagagggaggatggagggagagaggaagaaagcacaggcacatatacttacatatatacaacgaaaagaagtggtgaccacacactttgcatttattttccttggcaaaacagattgtttcatgactactgagctggagatgtcagaatatgtgagcacattgtgccatctgaataaataaataaataaataaaatctagtgtacaggtygcagaagtagacaggaaaagcaaacttgaaattcacattgtgtc

SEQ ID NO: 353241 - DNA, 608 bp, Homo sapiens
aaaaaaaacaaaaacaaaaacaaaaaaacaaaaaaaaactgaggtaagagtttttcagaaaaagggaagagtaagtagaaggcttaagatggaagactcttgtatacctgagaaagaaatagaatgtcagtgtggatgtcttggcaaggagctacttcagaaaagagataaaggaagagaggaaggcggagcttagatcatggagcacacagtgatataatgtttcacatgagacactttatacaaatatcaaaaggaaattaaaatagaaaagatccagtaatcacactccttgttaccccccaggagttgaaaacatgtttacacaaagatctgaacaaggatgtttatattgcagcagcttcattcataattgcagaaacttgaatacaaccaagatatctctcagtaggtgaatagatagataaagtgtggtaaatctagacaaggaaatattatttagtactaaaaagaaaagagctatcaagccatgaaaagacatgaggtaaacttaaacgtatatttaagtgaaaagaagtcaayctgaaaaggctgcataccgtatgattccaactatatgacattctggaaaagacaaacctgcagag

SEQ ID NO: 353242 - DNA, 636 bp, Homo sapiens
caaccaggcctgagacctcacaagacccaactgggtaagcctggaagtggatcctccactcatcaagccttgagatgatttcaatcaacaccttgattgtaaacttgggagacactgtgattcaaattcagatgtcacacctgaattcttaaactatagaaacaatgagataaaaaaaaaaaaaaacttgtattaagctacggagctttggagtaattttctaggaagcaatagatagctaatagatttcactggttttatagaattatggtttgaggattcttagacactatccccatgtaaggtaacatgtttaaatggaataaagtttcaatttagatcttgcctraaaactttcaatagcaagaagacacaaacacacatacacatacacacacacacatatgcactcatacacaataactatatggccttgttgtttaaatttgatgaaattttagatcttaaactcatgagaactccaccaaaaactttgtgtgaaagtagtcttgaggcagatgcaacaatttgtaacagacatctcagctaattttatggtcaaattaggtaatatcaattctccagtgcattgctgtgcatagaacatcctgaggtgatcaaaatatattatggtat

SEQ ID NO: 353243 - DNA, 602 bp, Homo sapiens
agcattgcatacgtaattctggctctgattactgccagcattttttttcaaatacatacgtagatttttttaatcttgccaagaaaatgggtaaataatgaagctcttagataattacaaaatacaaaacacattgaaatgtcaaagagagtgtctataaataatgaaattcactactgtccctagctcaaatgataatggttttttctaaacacattttcctggcctatagttactgggcacaataaaaggtgtgaaaacattttggcatccttaacaccatttataaactatttctttctaagaaaataatacaaattgtctgaatatctaagtatttattcgactttctgttrtgtttttgtgtactttccaaaatatgtaagtcagccaggtagaaacaaacctctacctagattaaaacgaaaattttagttggtcagtatctgctgtttctgaatgccacatcatccagttgttactctttaattattatataagaatataacactaacattatttaaagattttatttttaggtatagcagtatagtgtagtctagtattagagatgtgcaaatcatgtttaaagttaacagaaa

SEQ ID NO: 353244 - DNA, 602 bp, Homo sapiens
agcattgcatacgtaattctggctctgattactgccagcattttttttcaaatacatacgtagatttttttaatcttgccaagaaaatgggtaaataatgaagctcttagataattacaaaatacaaaacacattgaaatgtcaaagagagtgtctataaataatgaaattcactactgtccctagctcaaatgataatggttttttctaaacacattttcctggcctatagttactgggcacaataaaaggtgtgaaaacattttggcatccttaacaccatttataaactatttctttctaagaaaataatacaaattgtctgaatatctaagtatttattcgactttctgttgtgtttttgtgtactttccaaaatatgtaagtcagccaggtagaaacaaacctctacctagattaaaacgaaaattttasttggtcagtatctgctgtttctgaatgccacatcatccagttgttactctttaattattatataagaatataacactaacattatttaaagattttatttttaggtatagcagtatagtgtagtctagtattagagatgtgcaaatcatgtttaaagttaacagaaa

SEQ ID NO: 353245 - DNA, 631 bp, Homo sapiens
gaaacaaatgtgggagttgaaaaaaatgacaatgctgtgaaatttcaaatgtaaagctagtgccacactgcctgccaaaaagcagttatgtcattttgctaagatgtagccagggaaaccttgtaaagagagatgggtttttggtgttttaaatcagctctaactaagataaatgtccatgattccacactgaaaggatgtccatcgctaaactctccagttgactctatgctgaggttaaaaaaaaacccggccagacacaatggctcacgcttgtaatcccagcactttgggaggccaagacgggtggatcacgargtcaggagttcgagaccagtctagccaacacagtgaaaccccgtttctactaaaaatacaaaaattagctgggcatggtggcaggcgcttgtaatctcagctactcaggaggctgaggcaggagcatcccttgaatccgggaggcgaaggttgcagtgagccgagattgcaccactgcactccagcctgggtgacagagtgtgactctgtctcaaaaaataaaagaaaataaaaataaaaataataaaaacaccactgacaataaatttattaccttcctctgttgtattagatacaaacattctgcaaaaga

SEQ ID NO: 353246 - DNA, 619 bp, Homo sapiens
tttgagtcacatcaccaggtaagccacaaagtgatagctagggtaagaaaaatctagatgattagtgcaggatagtaaggattacaactagttgtagcgcccagatcaactgcaaccrcagaagctataggtcctcccactaagcttccttttccaagtttcctctcaggaaaagaagcccataggaattatagaggagctactcccaaacctgcatggagaagtgaatctgtgcagtttaagacagggaactgcagtgagaatgaaaatgcagcacttaggtttcctgctgcaggggacacagttgtgtgttggcctctgctgctgccttctggatccaccactctgtggccacacttcctgctggctactctcagctcggactgggcatggtagggtactgaggcagtcctgttctgctgagacatgagactacgtgaagccataactttggcttgagggttccctgttggcctggaaaaatctctgtcagaactctgctgcagttcaaatctctctccactgaatccttccctccctccttcctatgttatagtatgaaagccttccttacctcttcctgcttccttcttgaaaaggtctcttgcacttctgatcc

SEQ ID NO: 353247 - DNA, 648 bp, Homo sapiens
tggtagcataatactgatctgtaacttatcatagaaaatgtttgcaactttgaaatgccatttttttgtaaataaaaaagtaacatctttragttcagtcactactttaagtacttttccatgaaaaaataagggaatcctatgttaaagatattttaatgatcactccccatttcattaccaaatattgtaaatagtctaccatgttttaagggtcgtattttaaagtttaactgtcgtgtagaactttgcacattcctgggttcagcttctttgctgtaataatgagcctatgaaaaatttagtgataaaatattataagaggttctagctctataaccttgtcatgatattctgtttttttattcatgtgaaagcaatttcttcattggcaatgacacatcttttccacaaaatattattttaattaaaggtatcatttatttcttatgttttctgttacctctttcctttagcagtccacaaaaaaagtggtttttattacctttcatagtttctttacaggctattgactatcatagctataacatattagaaacatttgcatatacttccatctaaccctatagtaagcatttgtccaaaattggataatttattttaatacatgctttttccattttaagc

SEQ ID NO: 353248 - DNA, 581 bp, Homo sapiens
ttgcttcccctgggagaaagggcaaagggggattttaagggctcttagggtcttagggcagataggtggagactagggcagggattcctggggaaaggggggttcttccaggaggggctggagtttgtggagtttgggtgtttttgttttgttttgttttttgagacagagtctcactctgtccyccagggtggagtacagtgtcatgatttcagctcactgcaacctccacctcccaggttcacaggttcaagcaattctcctgccttagtctcctgagtagctgggattacaggaatgtgccacaatgcctggctaatttttgtaatttttttttcagtagagatggggtttcatcatgttggccaggctggtcttgaactcctgacctcaagtgatctacccacctgagcctcccgaagtgctgggattataggtgtgagccactgtgcccagccaagtctgtgcagttatatcatttcttgtgcactcaacactttttgtgcccagcaaggtgatagtggcaggaggcagacaaatccctaggcagataggggtgggtccctggtgaatccccgcct

SEQ ID NO: 353249 - DNA, 542 bp, Homo sapiens
acccagtatatagtattttgttacggcaacccaagctgacttagacatatagctactttatctggtaacttagcactgatcctggaacagagaatctagaatgttacttctatacctgaatgcctcttgctgctcttacagagcatcacaaactgtttcctgaaccctgaaatgtgagcctcattacatgttccttctctgcctatacmtgggtccagactccatttctgaaatcatttcttcagttattttccctagtttttctatttctagggaaagggcacctagacactatgcacattccagtgtcttcttcataatgctagctggaacacaaatgtacctcattatggtatggtcagaaggcactgaaataatattgcccaccattgttttttcctggtatttgatttccattactcagaaagtgtcatggtgctgtggccagtgaagacatttcaggttagacttcaaatatagagtgacccgcactgaaaggaaatttaaatacctgcatcaccactatggctcacatatacaca

SEQ ID NO: 353250 - DNA, 530 bp, Homo sapiens
tgagaggtcacaagcccagggcagtgaggccacctcagtcttctcatgtggagagtctccttcctctggcatccttgtaggactgaaatttgatcttactaataaagtttatggtttcccttacagttccttaaatacttatttgaatatgtatttttcattcccctctagactctgaaaacttgaaggaaagaggctatatcggatttattatttaattctcacagactttggcactttagggacatctgaaaaactttgttgaatgaataaattgttttattccatggatggggacaagaaagtctctattttgtttacttcattcatttaacaaatagtgtttgaacctgtagcaggakaaaggcacttggttagatctgggtggcagggaacaaaaaggagccaggtcaaactttcacaaaaactagatttaaatgagaaaagtaaacatttaccgaatactcacatcaataactgtttaacatcaaactttggtaaatactgcaaagaaaaatgaaagagtgagg

SEQ ID NO: 353251 - DNA, 633 bp, Homo sapiens
acttttaaaattctcctcaggaagaccaaagcattgctagacaaaaaataagaatgaaatcattttttccaaataactcttcagcaaaattatgaaaggctctgtgtgacaagaactctatttcaaggacaagaactgaaagccatcaaggcagcttggccaggtagaaaatgacatcaccttataaaatccctttgatatccacaggctggttttcaaataatgattacatgcttaggttagcttctcaatagctaaaagaatcatttattgtatactttttctccaggaaaaagggttctaagtattttgcttaagagttttgtttactttggttctttaaactaaggaaccatagtgcagatcccaaccccatgaaacatastaagacaagcttcaccattcctaagaagctgccttgccacaaagtggccatgtggtgtctgtccgtctgggttctgtgcaggttcaatcgcttcatttaaaacataataaaactatggagaattgaacttggtgaccctgtttcacagttttccaaagcacaaaaaaagaattgaatcgagggcattgaaaagtgagtccaaacttttatgggttttctttcccccagacctcagacaacagcattgt

SEQ ID NO: 353252 - DNA, 390 bp, Homo sapiens
atttctgtcacagaggaggcatatctatttcttctagaaaataaattgaatcactaatcatcatttcgctatgttctaaaattcctgaaaatgtaacagagagagtcagtctggttacattacattgattatatcatttcrttgaatctagaaactacacaaataattatgatcaggcctagaaattgctaaatatatattttattttattgacagacatgtatatattcttctgtcacagaccatatgcatttagagatatattttgttcatatatattctcttcataacccaaaaaactagaataacactattaaatcttcttattatgaatgaagacagacattgtgctttccaaagcagctacggcctcagaaatattcaacttac

SEQ ID NO: 353253 - DNA, 481 bp, Homo sapiens
tgaatgtgaaattaaaaaaaaaaaggaaaacagaaaactcatagtaggtagcagttctgaaatcccactgggcaaacgtgctggccttgrggatagaggaaactactttgattaagagtctttgattaggggtctgcaacttgaattaactttccagagaatattctccagggttacaggcaccagcctctttcttccttgttctttgccctccgttgccaaatctaaaaaaagttataaaatattcctttcttgggctgagcagcttttttgactatcttatcctcagaaagttgagtgtaggcaagactttttaagctataaaaagccacacactcttctatttttggcaatactcctggcattaaaactttttaaaattttaacttttctcttttttaatgtccatttgatctgttctcctctatatactaatagactcactctctattcttttacaaatctgtctctctctctctct

SEQ ID NO: 353254 - DNA, 524 bp, Homo sapiens
taatattttaatttttatttttgccgagataggttctcactatgttccccaggctggtcccaaactcctggcctcaagcgatcctcccacctcggcctcccaaagctctgggattacaagtgtgagccacggcacccagmtagagctaccatggcttaaacaactcacagtctatatcatgaactgagtcaggattttcaggactcttgcaaaagcaaattgctgacctgagacctaacgaaacaaaattcatcgtataggactgaggaagaaaatcctattgttatttcattggaaaattactgcaataatttttaaatgtgaattgcaattgtgtgtaaggatgccctatttattacttaagctctttctaattctcaatttagtagactatacatctgtaaactaaaatgaaatattttaatcgtatctgattctcactggcctctcagaatgcagaaacagatacttttacttgagttttcttacttttcaaagcaatgttataaagttacgttcctaga

SEQ ID NO: 353255 - DNA, 553 bp, Homo sapiens
aaatcattctaccaaaaagacacatgtgtgtaggtatattcactgcagcactattcacaatagcaaagacagggtgcccataaacagtgaattggataaagaaaatgtggtatatatacgccatgtggtacatataaccatggaatacaatacagccataacaaatgaaatcatatcctctgtaacaacatggatggagctggaggccatcatcctaagtgaattaatccaggaacagaaaaccaaataccacatgttctcatttataagtgggagctaaacactgggtacacatgaacataaagatggaaataacagacactagtgtgggaggcggggagagggggagaaggacaagggctgaaaaactacctgttgggtactatgcttacgccctgggtgacargaccatttgtactccaaacttcagcatcacacaatatacccatgtaacaaacctgcacgtgtactcctgaatctaaaataaaagccgaaattataataaataaataaatatccacaaacttaaaaaaattgtaatcaagaaaaacac

SEQ ID NO: 353256 - DNA, 623 bp, Homo sapiens
ctatggtcaggacagagaagggcagagagtagctttaaaagggcacagctggctgggcatggtggctcatgcctgtaattccagcactttgggaggccaaggcaggtggaccacttgaagtcaggagttcgagaccagcctggccaacatggtgaaaccctgtctctacaaaaaattagccaggtgtggtggtgggtgactgtaatcccagctacttgtgaggctgaggcaggagaattgcttgaacctgggaggcggaggttgcagtgagttgaaatcatgccactgccctccagcctgggcgacagagtgaaactccatctcaaaaataaaaataaaataaaatatttttttgaaaaagggcacagctgtatttgttttcttttttaaaatgtttgcatatacaaccccattataagagtatttaaatttgtctgtcaatccatacattaaagttaaatttattctctttcttattttcaaataaaagtaaatgttctaatattttcttttcatattccaatggattacctaaggttycctagagtgtgcttaatttactttgaggatcattattctaagtgatatttctgccatcagaatgacattttcaaattagccag

SEQ ID NO: 353257 - DNA, 383 bp, Homo sapiens
gcagccttgtgagaccctgagcagagaactcagctaattagaaacatctggcctgacacaaaatccaccatctcccctgactccacgttttatatgggagtgccaaagggctgttttatgtgagatcatgcaaatgctctgtcagtgaatayaaagtgtcttccaagttttccccttcttgctttggtccactttaatggcatctcaccctaggcccaagatgcttattatgttatatgaacacatataagccacatttaccagtgttatctcctaatgctggtgttgataccaatcaaagtgatcaaaattggcattgtgtgaatgacacaatgaagagtgtgtagctggaggccccacctgattcccaaaggagtgcaacc

SEQ ID NO: 353258 - DNA, 559 bp, Homo sapiens
aagtaagagtttaaaaattatcaaatggggatgaataggcagagcacagaggatttttagggcagtgaaactactctgcatgatactataatggtgatgacataccattacatatttttccaaacccatagaatgcacaacactgagtgaattctaacataaactatgcactttgggtgataatgatgtgtcattgtaggttcatcagttgtaacaagtgtaccactctggtgggggatgttgataatgggggaggctacttatgagtggggtcaaggagtatatgggaaatctctataccttctgctcaattttgctgtgaatctaaaactgctttaaagtaattaccaaacatgcctgtagccctttcaaataagtattctctcaggtggtatgcaaaaattagcagaatccaataattttcctttgtgggcttattttcatagttgaaaaatatacatgcaaatatttgtgttgttagtaatttgtttccactaattcacctcaaatgcractgaatatttttcatttttaagcttttacatctgctaggattggt

SEQ ID NO: 353259 - DNA, 497 bp, Homo sapiens
taataaaattatttacttgttttgtttatgatttatttaactggccttgttccagaaagtttagcagttggctaaaacattttctgaaggaaaaattctatgtttacttagaaagtgaggaaactgagacataagattccttaatgagacatattaaaattcctggaaagaaggttaccttgtttatagtaaattatataaataaataatttttaacatattttgggaggctgatataaaactakcagaggcctagaaagaattatcttggaggctcaacacgtagtgtcatggtgtacaggaaaatcaaactttttttctctgtactcacactcaacacagaacacttcaatttggacactagatgtgtgaggctttttttttaatttcacatatcaagtagttctctaattatttgcagacaccaattgatgtcatataatttcattcaattctgacattatctacctgaagttagcgtagaccccacaggttaa

SEQ ID NO: 353260 - DNA, 588 bp, Homo sapiens
aggcaacaaaatagataaaatgaaataacaataaattctcaatccaaaaaaagataaaaaatattgatggatttattagacacaaatagtcagatggtagactttaatcaaaccttaatagttaataataatgtcatatattttacaatagctaaaagaagggatttcacatcttctcatcacaaagaaatgataaatatttgagtgatggatttgctaattagcctgatttaatcattccacaatgtatacatacatcaaaacttgacaytgtgtcccagaaatatgtgctattattatgaaaacaaaaaacccagccatatgaataataagattatatttaagtggtctaaacataccaaccgaaagacagagtttgtcagattggataataagaaaaggaagacccaaccataggccaaaccaggaaatccactttgaatatgaagacaaaaataggtgaaaattgaaagagtaagaaaagatatatcacactaacgttaatcaaaataagtccagagtgtctgtattaatatcagaaaaagtagatttcagaactaagaatattctttagggtgaatcagaaac

SEQ ID NO: 353261 - DNA, 588 bp, Homo sapiens
aggcaacaaaatagataaaatgaaataacaataaattctcaatccaaaaaaagataaaaaatattgatggatttattagacacaaatagtcagatggtagactttaatcaaaccttaatagttaataataatgtcatatattttacaatagctaaaagaagggatttcacatcttctcatcacaaagaaatgataaatatttgagtgatggatttgctaattagcctgatttaatcattccacaatgtatacatacatcaaaacttgacactgtgtcccagaaatatgtgctattattatgaaaacaaaaaacccagccatatgaataataagattatatttaagtggtctaaacataccaaccgaaagacagagtttgtcagattggataataagraaaggaagacccaaccataggccaaaccaggaaatccactttgaatatgaagacaaaaataggtgaaaattgaaagagtaagaaaagatatatcacactaacgttaatcaaaataagtccagagtgtctgtattaatatcagaaaaagtagatttcagaactaagaatattctttagggtgaatcagaaac

SEQ ID NO: 353262 - DNA, 218 bp, Homo sapiens
gtgagggttgacatttcacatttagcatgttgtttaacaacttttcacaagccractctgactttcaggaagtgaaatgaaaatggcagaatttatctgaagatccacaatctagaaatggaaccactgctcttttgacaggtgccatctcagtggcatcactggaaagtccagattgcctgacacactggtaaccaatgactaggggtcaggtccca

SEQ ID NO: 353263 - DNA, 218 bp, Homo sapiens
gtgagggttgacatttcacatttagcatgttgtttaacaacttttcacaagccgacyctgactttcaggaagtgaaatgaaaatggcagaatttatctgaagatccacaatctagaaatggaaccactgctcttttgacaggtgccatctcagtggcatcactggaaagtccagattgcctgacacactggtaaccaatgactaggggtcaggtccca

SEQ ID NO: 353264 - DNA, 218 bp, Homo sapiens
gtgagggttgacatttcacatttagcatgttgtttaacaacttttcacaagccgactctgactttcaggaagtgaaatgaaaatggcagaatttatctgaagatccayaatctagaaatggaaccactgctcttttgacaggtgccatctcagtggcatcactggaaagtccagattgcctgacacactggtaaccaatgactaggggtcaggtccca

SEQ ID NO: 353265 - DNA, 218 bp, Homo sapiens
gtgagggttgacatttcacatttagcatgttgtttaacaacttttcacaagccgactctgactttcaggaagtgaaatgaaaatggcagaatttatctgaagatccacaatctagaaatggaaccactgctcttttgacaggtgccatctcagtggcatcactggaaagtccagattgccwgacacactggtaaccaatgactaggggtcaggtccca

SEQ ID NO: 353266 - DNA, 510 bp, Homo sapiens
acagaaaagaaataaagtgttttctttttataactgattgactattgttgaggtactttttccctgtcaataggtagataggtaggtaagaagggaggtaggtaagacagttatttcatagctaaaagcatggcttctggggccaaactgtctaggctcaactctcagcattgccatgcaatagctgagtgaatatgggcaatatacttaaactttcttggggaattaacaggacccaccttaaatggttattgtaaagattaaacgaattagataaaaacagcacttaattcaacaaatggtcctgggacaactaaatatccacatgtaaaagaatcaagttagactccctcctcgcacataaaaattaactcaaaatggatcrgagacctaaaggtaggtggtaaaattataaatcacttagaaatagtaaatctttgtaatgtgggatacgcaaagttttcacaaatatgactgaaagcacaagcaacaaaagaaaaaataaattgt

SEQ ID NO: 353267 - DNA, 510 bp, Homo sapiens
acagaaaagaaataaagtgttttctttttataactgattgactattgttgaggtactttttccctgtcaataggtagataggtaggtaagaagggaggtaggtaagacagttatttcatagctaaaagcatggcttctggggccaaactgtctaggctcaactctcagcattgccatgcaatagctgagtgaatatgggcaatatacttaaactttcttggggaattaacaggacccaccttaaatggttattgtaaagattaaacgaattagataaaaacagcacttaattcaacaaatggtcctgggacaactaaatatccacatgtaaaagaatcaagttagactccctcctcgcacataaaaattaactcaaaatggatcagagacctaaaggtaggtggtaaaattataaatcacttagaaatagtaaatctttgtaatgtgggatamgcaaagttttcacaaatatgactgaaagcacaagcaacaaaagaaaaaataaattgt

SEQ ID NO: 353268 - DNA, 613 bp, Homo sapiens
cttaaatttaacaataaaattgaaggcagcttcatgcttataaagtaaaaaaagaaacattaatcataccatagagaattgatgtttaaactgatgctttaatagactccaagaaactagtcactcacaaagagtcacatttaaccccaattttcatgtcaataaatatttgctggctgaaataaatcttatttactgtgtgtgtatctgctgtttgtgcaggccctcctctactccaccaaaaaaaaaaaaaaaaaaaaagcaaaaagaagtagtagatttcaatctcatcactccatcatttggcaatataatacaaaaatctagaagccaatttccaattttcatacactttcagtgcagtgcatttgggaactagctatctaatattcagaacatatttagaaagcatctactatcggcaggcacaagccctgatgtcagggataccgtagtatacagaataaactccctgtcctcaggaaccttatttctataagagaaaggtggctaaaaaattaataaataaaataatttaggacagtaataagcgataagttccaytggaaacaaaacccagtaatgtataaaaagcaatcatgaaggctggggg

SEQ ID NO: 353269 - DNA, 553 bp, Homo sapiens
atcgttttaaactggcattacttgttgctttgtagcttcttcaaataagcctctgtcgtctatctcacatgatttttttcatatccttctccctatgtgcagtgtggtatctgtgcttagacccactgctcaatcggaaggtattttaacgtcttgactgtctgaggctcctaaaatacatgaagaggagttatacaggctcttttaactttttcttcaatgtttatgcaaatttcaagtagcaatatttgagagatgaagtctgagtttacgccctaggatcttggctgtggttggctgctgttgattctggcacatggcctctggaagagsgtcagtaaaatgaacaaagcaaagttttctaaaatgactgcctgcattattaccaaaaataggagaattgagggcagacaaggagacatcagggatttgcaataattctcatagcgccctgcaatttcaaacaaaactttctctaaattttgtattccattttttgggatcaagccatgaaaaaaaatccaaacaaacagaagaagtgcggaacgttcaa

SEQ ID NO: 353270 - DNA, 553 bp, Homo sapiens
agaatcttaatgttgaagtgcagccattactacctggtattctttagtgtctctgaattacttttccttatctgtagcatctaattatttacaatactctttagagctgtagactatgaatagaaaaagatgaaaagcatttaaaaactcaatcacaggacttactggggaggccaaacrtttctgcttttaattcccaaactgtcccttttaatactttcccaccaggttttcctagaattgggacttctcctagaatttcttcatggtgtcttgatcctagaacttcacttctaaccctctgtactttttgtgacattgtctcttctagtttttgccatttttctatgatagacttttcagaggctattttttcaacttaaaaaattactgtaaagttaattacatgacatatagtaactggaaaaatttgtgttttttttctctttttaatgatccttacagtattggacaggatgagatacttgttaagaacttgaccacattctgatctctcccttgctctgtgagacagtaactgtgtagtactgag

SEQ ID NO: 353271 - DNA, 620 bp, Homo sapiens
tgagggatgtaccgagttatgggggcggttggactattgatgacagcagttactagcactccttacagacctttgttctcagtagcatgtagctgagctatttaccatcccagcccctatcctattgtaaagagaaaaacagaaggaaaattttgtgtcatagggcttctgtttctactgatattagatgtataaattcagattagtcttttctgtgttacacaaattaaagaagtgaatggagcaggaatctagtaggagttaactaatgtttattagcatccaaatactgtgctaattacaatgttttatctgtgtaatctttgcaataactgtattagagatagagtttaaatatccttttttcagatgatgatgcgtattcaaaagggttaaataagttgcccaagacccrtagtggttgggttagggtttgaatctaggcttgtgaactccaaatctttgctcaaatctgtagtcttttttctatataaaattgattttgtaaattatcttgttttattttaagaacttggggtgttttttaatagactgaaaatttcattatcctgagatttggtgatttactccatgtgttttccctttttaagaacctagct

SEQ ID NO: 353272 - DNA, 505 bp, Homo sapiens
atgatctggccctatactgtttttgttaatcacagattcctggttgtaagttgaagacattatcttgttctttgttaagggatgtaggagcctttgccttagtctccattgttgctatagtggtgacctgcaacctagccagatgtgggctcatgtttagcttcctttagtgtgatctttttcaggcagtgcataccagtcctttttccatctcctagtacattgggtggactttcyttgtcttcttccacaaatccccatcctttaagtatgggtgcctcaggctgagcacagcttgctccagtctcattattcttggccttgcccttcacatccatacttcaccagagattttcaacatctttcatgtcttctctgtaccctatgttgcttgccctaacattttcaaaaattagactttttattttcagatacttgtagttttgtgcagttataagaattaatatagaaagatttcctgtaccctttatcaagggtctcccag

SEQ ID NO: 353273 - DNA, 488 bp, Homo sapiens
agattaataaattcagtccttccttccttccttccttccttccttccttccttccgtccttcttcccttcttcccttcctttaatgtattttctctttcacagttcagtctctttattgtgacatgtttcttcagtcacttgtctctggtggggccttagccatcttgggggattctaaggaagaggagataccttacaacacaccacagtaactaaagtagaacgcagagctgtcatttcctatcctcggagttcatcattgttctctgaccttggttgaatgactccttgttggtcgtgaggacatgctgctcctttytggggggatgtggaattattttctcaggcagcagcatctcacaggtttggatggttctgttttacttattagatgaatgattatggtcacaactatggttagtggacagagatgtactatgttccagatcaaaggaaaatgtattagtggaagattaaccaatgtgtg

SEQ ID NO: 353274 - DNA, 643 bp, Homo sapiens
ttggcaagttaaagtctataatgctagctaacattattgcgtattagggtctgttctcaagtagtttaacatgtatttactttagtcctcatgtgagagagagactatatggaagctaagagaagttaaataattcactcaagatcccatcactctgtagctaacctgagatatactcgtggaaaatgtactgtcaccttgagtctcagtttgcctgtcaataaaatgggacagaattacctgttttaagttkgtagttcaaatggaaccttctgaaaaggaagtgtggaacaggtcgaaagtatacaaaagggggacttttcagatcaggaatatgattaaaacactgctttatgtaatttctaaatttaaagacagtagcattaggtaggcctgagtacctcatatcattctagaacactaaatctgcatatagttacatgagtgtacatgggccaggtttggtgaatactgcatttctgagaaatggcctttaacatgaaagctcaatgtaataactgtggatgaaatagaagaagagggcagtgaaggtggggatagaggatattgtctattaaagtgtgcttcagtagagagaactaatttgaaacttctcctttctttttactaatggaacaggagc

SEQ ID NO: 353275 - DNA, 643 bp, Homo sapiens
ttggcaagttaaagtctataatgctagctaacattattgcgtattagggtctgttctcaagtagtttaacatgtatttactttagtcctcatgtgagagagagactatatggaagctaagagaagttaaataattcactcaagatcccatcactctgtagctaacctgagatatactcgtggaaaatgtactgtcaccttgagtctcagtttgcctgtcaataaaatgggacagaattacctgttttaagtttgtagttcaaatggaaccttctgaaaaggaagtgtggaacaggtcgaaagtatacaaaarggggacttttcagatcaggaatatgattaaaacactgctttatgtaatttctaaatttaaagacagtagcattaggtaggcctgagtacctcatatcattctagaacactaaatctgcatatagttacatgagtgtacatgggccaggtttggtgaatactgcatttctgagaaatggcctttaacatgaaagctcaatgtaataactgtggatgaaatagaagaagagggcagtgaaggtggggatagaggatattgtctattaaagtgtgcttcagtagagagaactaatttgaaacttctcctttctttttactaatggaacaggagc

SEQ ID NO: 353276 - DNA, 607 bp, Homo sapiens
gcacagataataactatggacactcagacaaaggaacaagtactgtgggacaaaagagtaaaatcagaggacttttggtgcactgcttagatcctaaatctttgaatattagtggtgccttagaagacggataggtaggagaagggtgagaggaagggagctgaggagactagaagggactgttatttcctggaataatcattaccaatttcttcatcacattttcttaatgacacagtttcaaacgttttcttcatcttgattgctgtcttctgtgtatatgctggtttgtgtgaggttttactaaaccagtatgtggattaatctagtttcacgagtgacaggtaagtgatttagaaagatccgttcctttagcacgatgttaatcttgaatcgtttggaggtagaatgcctagagtgagggtgaargagaggacctggggacaggaagagagggcagctggagcaattatgctccttccctcagaccgttttggcctggactctgactcttggacttctaccagacagagaggcggtaggcttgtggccatgttttgcgaggaaaatcagaatctaagaatctctaaggcaagagcaagaatgg

SEQ ID NO: 353277 - DNA, 626 bp, Homo sapiens
ttcgggtatatacctgggaagggaggcagaaaattttggtcattctgattattatgactactmttaagcatagaagcaccactaaaaaggtgaagaaacctggaaataaccctatactgaggaatacgccaaaccattgaatcctggagaaaagaaaacaaaaggcccacataactgtcttcagattcttgaagggctacgtgtaagagaagcagaaggcttgttcttttttgttctagagggtagagataacctggaaattgtagagagacaaagtttgttcttttcaaagttaagacataatttatgtatcataaaatttacccttttaaagtgtttaatttagtagactttagtatttccagagttatgagaccaccaccattatctaatttcgaaacatttttatcaccctgaaagaaattctctactgcttagtagtcactgtctatttccctttctttacagctcctggcaacactaatctactttctatctctacggttttgcatattctggacatttcatataaatggaattatataatatgtggccttttgtgtgtggcttctttcacttagcatgttttcaaggttcatgcatgttgtagcatgtatcagaatgtc

SEQ ID NO: 353278 - DNA, 626 bp, Homo sapiens
ttcgggtatatacctgggaagggaggcagaaaattttggtcattctgattattatgactactcttaagcatagaagcaccactaaaaaggtgaagaaacctggaaataaccctatactgaggaatacgccaaaccattgaatcctggaraaaagaaaacaaaaggcccacataactgtcttcagattcttgaagggctacgtgtaagagaagcagaaggcttgttcttttttgttctagagggtagagataacctggaaattgtagagagacaaagtttgttcttttcaaagttaagacataatttatgtatcataaaatttacccttttaaagtgtttaatttagtagactttagtatttccagagttatgagaccaccaccattatctaatttcgaaacatttttatcaccctgaaagaaattctctactgcttagtagtcactgtctatttccctttctttacagctcctggcaacactaatctactttctatctctacggttttgcatattctggacatttcatataaatggaattatataatatgtggccttttgtgtgtggcttctttcacttagcatgttttcaaggttcatgcatgttgtagcatgtatcagaatgtc

SEQ ID NO: 353279 - DNA, 564 bp, Homo sapiens
ttagattggactgtcctcaatgtactttcttttttttctttctttcccacatctctttatttctctgattttgtttaaacttcataaagagctctctgatctttcctttccaaacaatgaaggtttatcctttgtaaactacctctgtactccacaggctgatgatatrtgatatccctatatcattaaagtaaagcctaagcacatctgtggcttttgtgtctactctgttgttgctgagcttatgaactattagaaataattccctcttgcattttcacacatggggaatgtgatgttctcttgggtattatgctaatcatattttggcaggtttctctgaagcagatgcagaaatgatcataccactttccagggtgtattattttagctcctttgacttgggccctaagtctgttttacctgatgttcctgaaagatgttcctgatgtccctcactgttctttcatgctggatgttcttgcctatgctgcctcctcagctatcaccctctcttcccctttttaatgtagaactcattcttaatgatttgtcaaaggcacc

SEQ ID NO: 353280 - DNA, 564 bp, Homo sapiens
ttagattggactgtcctcaatgtactttcttttttttctttctttcccacatctctttatttctctgattttgtttaaacttcataaagagctctctgatctttcctttccaaacaatgaaggtttatcctttgtaaactacctctgtactccacaggctgatgatatatgatatccctatatcattaaagtaaagcctaagcacatctgtggcttttgtgtctactctgttgttgctgagcttatgaactattagaaataattccctcttgcattttcacacatggggaatgtgatgttctcttgggtattatgctaatcatattttggcaggtttctctgragcagatgcagaaatgatcataccactttccagggtgtattattttagctcctttgacttgggccctaagtctgttttacctgatgttcctgaaagatgttcctgatgtccctcactgttctttcatgctggatgttcttgcctatgctgcctcctcagctatcaccctctcttcccctttttaatgtagaactcattcttaatgatttgtcaaaggcacc

SEQ ID NO: 353281 - DNA, 564 bp, Homo sapiens
ttagattggactgtcctcaatgtactttcttttttttctttctttcccacatctctttatttctctgattttgtttaaacttcataaagagctctctgatctttcctttccaaacaatgaaggtttatcctttgtaaactacctctgtactccacaggctgatgatatatgatatccctatatcattaaagtaaagcctaagcacatctgtggcttttgtgtctactctgttgttgctgagcttatgaactattagaaataattccctcttgcattttcacacatggggaatgtgatgttctcttgggtattatgctaatcatattttggcaggtttctctgaagcagatgcagaaatgatcataccactttccagggtgtattattttagctcctttgacttgggccctaagtctgttttacctgatgttcctgaaagatgttcctgatgtccytcactgttctttcatgctggatgttcttgcctatgctgcctcctcagctatcaccctctcttcccctttttaatgtagaactcattcttaatgatttgtcaaaggcacc

SEQ ID NO: 353282 - DNA, 447 bp, Homo sapiens
tccctttgcaaaataatttttgagttaaaattttcaattaaaaaactgtatacttgaggtagaaaagataaagatagaagatatatgtgaattaggttgtatctctccttaagagggaatactgttttttatctaaggagaactaacaaccctccctttcattgtctgggttggtataagtaaaaatccttgtttgaagttattaagccttcccacccatatgatgattagtttggttcataagctagagttagggcttggtaaaggctccyttttttttttttttttaaagtctttccaccttaactagcaagtaagctagaaatgacagagcagtagaagggggaatctaccagagtgtcctacaggaccttgttgaatgctactgctgcatgcaagggttgtggatttggtgtgggccttctgcagtatcacccaaatttgagc

SEQ ID NO: 353283 - DNA, 594 bp, Homo sapiens
cagaaatcactgaaggctttattgaaggaaattatatttctccaagtatttggtactcagtccattcaagcagatgaatcactaaagaagcctgaaaaagactatgaaaatttactcaaatttcaaaaatgtatcatattactcatatttcatattaytcatacagaaatatgagtcttacaaatagaccaatgagccagaaaatgatgagccattgaagcccacccctacagaatctatgggatctactaggtccttgagtaagaactagggtctttgcccctagtctggtgctcttgatgaagatattctttggaaaatttaaagacatagttttagattgttggggaaaatgcggccctggcctacaactgctaaacttgagaggtctggtggtgtagtagaaggtcaatgatcatcctcccctaactcgatctctctgatgagtaagactaaatacagttgactagggtgtcagggaggtagcgaagcccttgtagctcaactataaggaatagaaactgtgactctaactttatattagccaatgttacaactaactgaattcaccaaccacagacaagaaagcagaag

SEQ ID NO: 353284 - DNA, 548 bp, Homo sapiens
gatcttgctattgcctgccttgcaacttcaaagccactctgcctctcgtttactctgctccagcctcaccagctttttctatgccttgaaattccagagttcattcctgcctcaggatttcagcctttgtataccctcagcccttcaccgggctggctccttcaaatcaattttgtctttcttcagaagatactttttcagaaaggcctttctctatcctagcttatatcatttcttcttatctaggtaattagctgagatgagtttgttaggttacttgtttgtagtctcttyttccccagcaaggggaagagctctatggggactaggacccagaacaatttctaacgcaagaaagatattcaacaaatattgttgaataggtctaattccagttctcagacccaccataccatgctacggctttgaactcatgccactctcattagttatctctaagacagtacggctatagtggaatgtaaagccacagttatctggatataaaccatttctctacctgttccctgttctgtaactgcacaagt

SEQ ID NO: 353285 - DNA, 539 bp, Homo sapiens
aataaacttgaaaggcaatctaggccacaaggactgcaattcctgggcaagtcctggtgtggtgctgggtttggagccagtggactttggggagtacacaacctagtgagacacgagccagggcgaccaaggcagtgcttgaactccactccccacactgtcccccacaaccccaggcggtgcagcttgcagtttggggagaggctccttccctccttttgagaagaaagggaagagtaaagaggactttgtcttgcaacttggataccagctcaaccacagtaggacaggccaccaagcaggctcctattccaggccctagttcctggaccacatttctagayacactctgagccagaagagaacccactgccttgaagggaaggacccagtcctggcaggatgcatcatctgctgactaaaggactccttggccctgaataatcagcagtgttagctaggcagtacttgccaagggccttgggtgagacttggcttcaggcatgacctaacacctcatacattcccagctgtggtag

SEQ ID NO: 353286 - DNA, 619 bp, Homo sapiens
gttctggtgaggcttcaggaaacttataatcatggcggaaggccaagggaagcaggcataaagagagagagagagagaggaggaaggtgctacacacttttaaacaaccagatcttgtgagaactcttatcatgagaacagtactagggggatggtgctaaaccattagaaactgcccccatgatccaatcacctcccaccaggccccacctccaacattggggattacagtctgacatgagatttgagcggggacacatatccgaaccatatcagttgagaactgctagcctgtctgatacttaggttcttcagccatatctaaactattttagatacagggaaaggtagaataggaatttgttatagttcagggctatactaarcattcatagagcaagagtgtgattaaaccctcgcttctgattcattgagaggcttctaatgagcaaacacagattcaaacagattgaggatggtagtttttttaatgacataaaactgctgcccatgaggctttttggctgacatcatgaaactaattttgcttaatggctatggagggctacaaattcaaatgtgcagaaaatgcagtaaattgctggcctgtcagattctt

SEQ ID NO: 353287 - DNA, 524 bp, Homo sapiens
acattggccaggttgctctcaaacacctgacctcaggtgacccgcccacctcagcctcccaaagtgctgggattacaggcgtgagccccgtgcccggcctgttttgatatacttttaatttcaagaaataccaacattaatcaaaggcaatagaaagtccaggagaatttcttaattcttgacattctatagatatctaaagaacagcttggacrtaaaaatttaggaggtaaatgatcaagttagggttctattgaaataattaaatttccatactcagattcaaccatattgaccatgtctttttctgtttgttttttacaattcaggtatctgcccaaactggaacttatgctgtagacatttctttgtggtttatctaaaaaccaaaggtgagataatttatgaattcatttgccttttaatatatattttataatgagaaagaattgtttttgaaaaaatttaaggcaatatcaaatatcttttcctctgagtgttttaataggaaagttataaaacta

SEQ ID NO: 353288 - DNA, 587 bp, Homo sapiens
actataatctagttaatttatgtctttggatatttctatatctttggaaaatattatatagtgtttagtacatatatatataggttattaattttcacaaatggccttggtctgtacatcccattttattctttttttttttcatttagccctatatttaaacaatctatttttgttgctatatgcaattctggttcattacttctgactgctatacagtattatatcatgtacacactcttatccatgtatactgtgtatttgtcttatttatacatttttctgatggcacttgggtgtattcaactccatgtgccrttaataatgttgcagtgataatcttcattttattttatagaggtatataatcaagaatgtgattgatctgttgttggatgtccattattaagttcaccaggtattgccagattgctctgtaggatgactagatagtttttactgctttgagcagtgcatgaggattcacagactctatatttcatgtgggcaacaagcaacaagcaactgaagagctgcttttatagacatgattagcaaacggccaaattatttatgtgtgaataata

SEQ ID NO: 353289 - DNA, 577 bp, Homo sapiens
gctgccaggaggtgaattgtagatagaatctttcattctggtttcagtttctggaagtagctattgagctcaaggcaaatcatatatttaaagatatatacatgatttaaggataatctggcatttatctctgctctctttttgaagacttcattatcatggttgcctgacccaacacaacatatttggaggaggagaggggacacttttattgtaccccatcacrtggctgagtcatttggctctccattcactggaacagacgactatgacaccaccattgggtttcccaccaaggacagagttccaaagcaacagtggcttccatggttgctcacccagcctgcctgagtcatcagctaggtccacagagtagagaagtgggtagtgcccccgcctaacatctggaaaaattcccaaaagttgtgacttcatgaccactgagtcagcagcaactcttttcttgccaagaatagcacattgttcttttccttttcaggtaatccctccccggaaagagaagatcacagattttgtcatattaaatacattgtagaaattcatggtagcaggggca

SEQ ID NO: 353290 - DNA, 577 bp, Homo sapiens
gctgccaggaggtgaattgtagatagaatctttcattctggtttcagtttctggaagtagctattgagctcaaggcaaatcatatatttaaagatatatacatgatttaaggataatctggcatttatctctgctctctttttgaagacttcattatcatggttgcctgacccaacacaacatatttggaggaggagaggggacacttttattgtaccccatcacgtggctgagtcatttggctctccattcactggaacagacgactatgacaccaccattgggtttcccaccaaggacagagttccaaagcarcagtggcttccatggttgctcacccagcctgcctgagtcatcagctaggtccacagagtagagaagtgggtagtgcccccgcctaacatctggaaaaattcccaaaagttgtgacttcatgaccactgagtcagcagcaactcttttcttgccaagaatagcacattgttcttttccttttcaggtaatccctccccggaaagagaagatcacagattttgtcatattaaatacattgtagaaattcatggtagcaggggca

SEQ ID NO: 353291 - DNA, 617 bp, Homo sapiens
caacaatttagcactgatccccatcacctttgaatattctaagaccacagggtagataaactcagctcaaactaaatggaatagaagtttctgtggtaggccgaatcccatctgttagaatctacatataccttgcatccttgcgtaccttgacaatccagcaagtttgctttgtgtccagatctagagaaaagagaggaagagcagcgtagctggaatattttcttacatccaatcgagaaaaaatccaaggcattggaatctatgcaamcttcttcttggtccgtgcatttacatccagctgtagatgagcaatagggatccctcattacagactggaatcacatactaacgcttcactagttactatacctaaagacttgagaataattaaacattcatcgtggaccttcctatgagttagaaaatatataagaaagatgtgattagttcagggaaagagaggacaggtatacataattttacaatgcagagcagcagatgccatatgggagaaataaacataaaataataatagggattcaaaggaaaaaaatcacatacaaaaaagcttaatgtaggaggtggaatttgacctaaaaggcagaaaataccag

SEQ ID NO: 353292 - DNA, 447 bp, Homo sapiens
tgaagctcctctgtatgatatcacagtggtagatatagtgaagctcctctgtgtgatgtcacagtagtagatatagtgaagctcccatgtatgatatcacagtggtacgtatagtgaagttcttctgtgtgatatcacagtggtagatttagtgaagctcccctgtatgatatcacagwggtagatatagtgaagttcctctgtgtgatatcacagtggtagatatagtgaagttccccatatgatatcacagtgatagatatcgtgaagctcccctgtatgataccacagtggtagatatagtgaagatcctctgtgtgacatcacagtggtaggtatagtgaagatcccctgtaggatatcacagtggtagatatagtgaagctgctctgtgtgatatcacagtggtacatacagtgaagctcctctgtgtgatatcacagtggt

SEQ ID NO: 353293 - DNA, 447 bp, Homo sapiens
tgaagctcctctgtatgatatcacagtggtagatatagtgaagctcctctgtgtgatgtcacagtagtagatatagtgaagctcccatgtatgatatcacagtggtacgtatagtgaagttcttctgtgtgatatcacagtggtagatttagtgaagctcccctgtatgatatcacagtggtagatatagtgaagttcctctgtgtgatatcacagtggtagatatagtgaagttccccatatgatatcacagtgatagatatcgtgaagctcccctgtatgatwccacagtggtagatatagtgaagatcctctgtgtgacatcacagtggtaggtatagtgaagatcccctgtaggatatcacagtggtagatatagtgaagctgctctgtgtgatatcacagtggtacatacagtgaagctcctctgtgtgatatcacagtggt

SEQ ID NO: 353294 - DNA, 513 bp, Homo sapiens
gatgcaaccctgctacccctcattcctttttggattatcctaactgtgtttataactggcttgctcttctgaacataatgtcatcattgcgtatgacatcactataaattattggaaaggtccagggccctttatttgtgaccatttagagagtattggcattttattttagagccattttgtcaagcccatcaaataaattaacatatacatttcatttggaggaaacaacatgtttgcacctcaatacrgacagaaaaagggaatgaggactgagaaagagagaaagaggaagaccattttgcagtttatcaagatgtaataacaccccttataatcctcttaatctgagaaggctggagtgagaaaatgcattagaggaaaagtattagcttagcagacacagataatgtacaggcagatctttactgtaggctgaagtcagtggtcacgcatgttaagatcctgtttgggcagggaactgtgagtggtgcacttactttgttcagcgca

SEQ ID NO: 353295 - DNA, 579 bp, Homo sapiens
cttttgctatctcacatggtttgaagccaggcttcagaaagcaaggggatataaaccatgctcaaaattggaggtggaggggagaaaacaaatctaattaatagaaaaagccctggcaagctcatacgtaaagtggtaggagagactagaacactttgttaggctggaatgtgaagacatcttaattttcctaagagcactaatgaagctgcatagccaagggtggacatataaatgatttattctggtaagmttgatcatgactgcattaatcatttgaatacttaatgatttacacacttgaagaaaggaaggctgggaggtctcagaacactgttagattcttctccaattttttatcattatttgttatttccatttttaagtgaaggaaaaagttaagttactcttttattttcgaagataatgtgtttggtatattgcaatgtttttacattatgaagatgttcataacaagttaacaaacaccaagagataaaattttctttcactttatgcacttaaaacaaaattagagttttattttgcagtttcatttgaagaggaattaaaattcaa

SEQ ID NO: 353296 - DNA, 579 bp, Homo sapiens
cttttgctatctcacatggtttgaagccaggcttcagaaagcaaggggatataaaccatgctcaaaattggaggtggaggggagaaaacaaatctaattaatagaaaaagccctggcaagctcatacgtaaagtggtaggagagactagaacactttgttaggctggaatgtgaagacatcttaattttcctaagagcactaatgaagctgcatagccaagggtggacatataaatgatttattctggtaagcttgatcatgactgcattaatcatttgaatacttaatgatttacacacttgragaaaggaaggctgggaggtctcagaacactgttagattcttctccaattttttatcattatttgttatttccatttttaagtgaaggaaaaagttaagttactcttttattttcgaagataatgtgtttggtatattgcaatgtttttacattatgaagatgttcataacaagttaacaaacaccaagagataaaattttctttcactttatgcacttaaaacaaaattagagttttattttgcagtttcatttgaagaggaattaaaattcaa

SEQ ID NO: 353297 - DNA, 493 bp, Homo sapiens
aggtctcagaacactgttagattcttctccaattttttatcattatttgttatttccatttttaagtgaaggaaaaagttaagttactcttttattttcgaagataatgtgkttggtatattgcaatgtttttacattatgaagatgttcataacaagttaacaaacaccaagagataaaattttctttcactttatgcacttaaaacaaaattagagttttattttgcagtttcatttgaagaggaattaaaattcaagaataagctcagcatgttgctatagatggagagaggactgaggatcaatcagctgaatttcatgagtccatggtgccaaagatggttcattactacatgcattcagatgtcctcccatagacacacacgtactaagagcaaaagaacttatttatttacttttaaaaggcctctgttcaaatgaagttttgaatttcaaaaggaaggaaaaagcaaagctgtttcgtattgaca

SEQ ID NO: 353298 - DNA, 560 bp, Homo sapiens
ggtaaagaccaaggtagacacagccaaatttctttgcagactttctcagctgagatttctctagagtcgggctggcaaacttgtcctgtaaacaacaagatagcaagtattttaggttttggaggccatataatctctatcacaactattcaaacttacctttgcagtgtgaaagtagtcatacataatatgtaagcaaatgagcccagggttccaataaaccaggtrgtgggctggattgagcctgtagatttgctcttctcaccccactgtagaaatgaagcactaatgacataagacacccattgaatgtaataaattaacctatctcctatgcatctagcatggtatctaagtctgtatcatactttagagagttgatgaaacagtcacacaagtcattttcagcaggctttaattctcccgtagaacttcagttgagaaaggcatggatgccagtttcatcttaaatatggtaccttttgtgatgtgggtgagcaatggatgatctgtttttgtgtcatttccaatgggaggaacagatccagtcccacggagaa

SEQ ID NO: 353299 - DNA, 560 bp, Homo sapiens
ggtaaagaccaaggtagacacagccaaatttctttgcagactttctcagctgagatttctctagagtcgggctggcaaacttgtcctgtaaacaacaagatagcaagtattttaggttttggaggccatataatctctatcacaactattcaaacttacctttgcagtgtgaaagtagtcatacataatatgtaagcaaatgagcccagggttccaataaaccaggtggtgggctggattgagcctgtagatttgctcttctcaccccactgtagaaatgaagcactaatgacataagacacccattgaatgtaataaattaacctatctcctatgcatctagcatggtatctaagtctgtatcatactttagagagttgatraaacagtcacacaagtcattttcagcaggctttaattctcccgtagaacttcagttgagaaaggcatggatgccagtttcatcttaaatatggtaccttttgtgatgtgggtgagcaatggatgatctgtttttgtgtcatttccaatgggaggaacagatccagtcccacggagaa

SEQ ID NO: 353300 - DNA, 560 bp, Homo sapiens
ggtaaagaccaaggtagacacagccaaatttctttgcagactttctcagctgagatttctctagagtcgggctggcaaacttgtcctgtaaacaacaagatagcaagtattttaggttttggaggccatataatctctatcacaactattcaaacttacctttgcagtgtgaaagtagtcatacataatatgtaagcaaatgagcccagggttccaataaaccaggtggtgggctggattgagcctgtagatttgctcttctcaccccactgtagaaatgaagcactaatgacataagacacccattgaatgtaataaattaacctatctcctatgcatctagcatggtatctaagtctgtatcatactttagagagttgatgaaacagtcacacaagtcattttcagcaggctttaattctcccgtagaacttcagttgagaaaggcatggatgccagtttcatcttaaatakggtaccttttgtgatgtgggtgagcaatggatgatctgtttttgtgtcatttccaatgggaggaacagatccagtcccacggagaa

SEQ ID NO: 353301 - DNA, 570 bp, Homo sapiens
aaattttctaccattattcatttaaaaaaatttccattcttcaattttgtctttcttacctttgaacttctatgatatggatattaggcctcctcttatcttttctccttgtcttgaactgctgttatgggttgaattgctgsaccttaatccagcatgactagtgttcttgtaaaaagaagaaatttggacacagacacacacacaaggagagcaccatgtgaacatggaaacagaggtcagagtggtgcatttacaagtcaaggaatgccagaggtttccagcaaaccaccagaagctaggagaaaggcatggaacaagattctccctcacagccctcagatgaaggcaatcctgccaacactttgatcttgggcttttagcatccagaactgatacaataaatttctgttgtttaagccacccagttactgcagtgctaggaagctaataaaacagtgtttacattcttcatttaattttctgtttcgctgtgatccagaagaattagccctcttagctcattaatttgttctacaactgttctcagccatttatattttcattttc

SEQ ID NO: 353302 - DNA, 570 bp, Homo sapiens
aaattttctaccattattcatttaaaaaaatttccattcttcaattttgtctttcttacctttgaacttctatgatatggatattaggcctcctcttatcttttctccttgtcttgaactgctgttatgggttgaattgctgcaccttaatccagcatgactagtgttcttgtaaaaagaagaaatttggacacagacacacacacaaggagagcaccatgtgaacatggaaacagaggtcagagtggtgcatttacaagtcaaggaatgccagaggtttccagcaaaccaccagaagctaggagaaaggcatggaacaagattctccctcacagccctcagatgaaggcaatcctgccaacactttgatcttgggcttttagcatccagaactgatacaataaatttctgttgtttaagccacccagttactgcagtgctaggaagctaataaaacagtgtttacattcttcatttaattttctgtttcrctgtgatccagaagaattagccctcttagctcattaatttgttctacaactgttctcagccatttatattttcattttc

SEQ ID NO: 353303 - DNA, 629 bp, Homo sapiens
ggggctaatgactccactagtctaccacctgctcatcagggagaaggagtgacctcttagatggtcatttattggtgcttggacaaatcttcccaagagttcatctctagggtcccttagagtcctctttatttcctaccacagaacttggggcatccctgcaacagttaccaccttttgcagaagttctctaatatacagatttggggcattgtttttgattttaaattcactctcatttgtgttctatacacagatatttctcttaatttccagtcccctgagggtatctctattgtagataaaacaacaacaaaagattttctgtcatctctcggattaggggcagacctgcctgtgtactcagcccagtcaccctcttggttcaatccttcattataattctctactgtacatcagacaataagaggttaaacataacgctgatgtcataatgggtgtattcgtttcctttggctactgtaacaaatgrccacaaacatggtggcttgaaatagtagaaatttattttctcacagttttgatggccagagtctgaaatccaatctgcaaagtctaggggagaacccctcctttcctctcccagcttctggtggctccaggagttc

SEQ ID NO: 353304 - DNA, 561 bp, Homo sapiens
ttaagctctctcctcaaatgtcaccttatcartgaggttttccctaagcatcctttagaaaataacactcccctcttccaccccacccatttctgattcttctttcttgatgtgtttctacatggcatttagcagcctctgacattagttcgtagatttattgttattgcttgttcctccctgcccctctaaactagaatgtaagctccatgagggagagacttttatctattttgttcattactgtatcctcagtgactgctataatgtctaacatgcagcaagtactcaatacaaatattattgaataaatacataaatccctttagttttaagccgtttatttatttttgtaaatacaaaaattattgaagttcataagtttagctttggcctcaacattcagctaaaatgtgccattcaaactatggctttggtttcatattttggaagacaaagtcaccacatgtctacttcagtgtcttttctagagtccttgaactgacggcttctggtttactagcttgctgagagatgcctggacctcaaacagccaacaac

SEQ ID NO: 353305 - DNA, 561 bp, Homo sapiens
ttaagctctctcctcaaatgtcaccttatcagtgaggttttccctaagcatcctttagaaaataacactcccctcttccaccccacccatttctgattcttctttcttgatgtgtttctacatggcatttagcagcctctgacattagttcgtagatttattgttattgyttgttcctccctgcccctctaaactagaatgtaagctccatgagggagagacttttatctattttgttcattactgtatcctcagtgactgctataatgtctaacatgcagcaagtactcaatacaaatattattgaataaatacataaatccctttagttttaagccgtttatttatttttgtaaatacaaaaattattgaagttcataagtttagctttggcctcaacattcagctaaaatgtgccattcaaactatggctttggtttcatattttggaagacaaagtcaccacatgtctacttcagtgtcttttctagagtccttgaactgacggcttctggtttactagcttgctgagagatgcctggacctcaaacagccaacaac

SEQ ID NO: 353306 - DNA, 561 bp, Homo sapiens
ttaagctctctcctcaaatgtcaccttatcagtgaggttttccctaagcatcctttagaaaataacactcccctcttccaccccacccatttctgattcttctttcttgatgtgtttctacatggcatttagcagcctctgacattagttcgtagatttattgttattgcttgttcctccctgcccctctaaactagaatgtaagctccatgagggagagacttttatctattttgttcattactgtatcctcagtgactgctataatgtctaacatgcagcaagtactcaatacaaatattattgaataaatacatraatccctttagttttaagccgtttatttatttttgtaaatacaaaaattattgaagttcataagtttagctttggcctcaacattcagctaaaatgtgccattcaaactatggctttggtttcatattttggaagacaaagtcaccacatgtctacttcagtgtcttttctagagtccttgaactgacggcttctggtttactagcttgctgagagatgcctggacctcaaacagccaacaac

SEQ ID NO: 353307 - DNA, 435 bp, Homo sapiens
gattcactctactcattataaatgtgttgtttcaattttttaaactgtactattayacatagcatatgaacattcttatgtcatgcatccttaatgtataaatgaaagagtttttctagtgtgtatatgggggtagtatggggaagcagtgtgggcagtgatagagagtgaggttggaagtcaagttttattttttcctcacaggaatatccaattatcacaactatcttctccttattcttatgagtatcatatctaaaatataccaagtgctcatttatcaatcaacctgcatctagtctttctactctgtcccattggcttatttgtttcttggggcatcaatacaatagtgagtcttttaatccatgagcatagtatatcgctccatttacttaggtctcttctaatgtcttttaatgaaattttataagt

SEQ ID NO: 353308 - DNA, 466 bp, Homo sapiens
gatattcgaagcatggctcagtctattggctgcctcttcaagataggcccacatgcctgtggtaagttgccagaatcacatttttagatttctatttttttgtagatcttggcccagtaactccacactctctttttagctttrtgatacttcaaagaaaatgatttttatagtttgcccagatattttcatttccttcagcaagagagttggcacaaattacccagtctgccaccactgggatgaagtccccagatcttctttgtattttttattttcaagattttttcagtttatctcttcttctttttcttctttttgaaaatctcttttgcatcatgcttcacttactttttgcttttttttttcctgtttgcttcaaatttctctcagtttctctggtggtcttttcttttcccctctcttggtattttattacaaattgaggcatattttatgaccaaga

SEQ ID NO: 353309 - DNA, 591 bp, Homo sapiens
gttgactttaacttagagagactgtcctagatagtctgaatgggtccactgtratcacaagggtccgtaaaagtggaagaaaaggagagaggagggcagaataatgtgaggtgagaaggactcgacccaccattgctggctttgaagatagaggaagggggccatgagtcaagaagctggaaaacgcaagggatggattctcctctagagcctgagaaatgaatgcagtcctgccaacactttgattttagcccaatgagacctaacctgcagaattttgagcagacttctaacctacagaattgtaagataatacatttctgttgttttaagccactaagtttgtggtgatttgttatggtggcaataggaaattaatacaaatttctctgcagtgagataaagctctattaaatgcaagttgagtcatagaattatagagctgagtgggatctcagaggtcttcaggccaatcttaattccccatacatgaatctcttttaccatatacttgataaatggctttccaagctgcataatcatgtcaacaatgacagctgccaatgtccagaggtgattcattctaatgaa

SEQ ID NO: 353310 - DNA, 346 bp, Homo sapiens
aatggacatttgggttggttccatgattttgcaattgtgaattttgctgctataaacatacacgtgcaagtatcttttttgaataatgacttcttttcctctgggtagacacccagcagtgggattgctggatcaaatggtagttctacttttagttctttaagggatctccacactgttttccatagcggctgtactagtttacattcccaccagcagtgtagaatgttccatgttcaccacatccattccaacatctactgttttttgattttttgattatagtaattctygcaggagtaaggtggtatcacattgaggttttcatttgcatttccctaattat

SEQ ID NO: 353311 - DNA, 346 bp, Homo sapiens
aatggacatttgggttggttccatgattttgcaattgtgaattttgctgctataaacatacacgtgcaagtatcttttttgaataatgacttcttttcctctgggtagacacccagcagtgggattgctggatcaaatggtagttctacttttagttctttaagggatctccacactgttttccatagcggctgtactagtttacattcccaccagcagtgtagaatgttccatgttcaccacatccattccaacatctactgttttttgattttttgattatagtaattcttgcaggagtaaggtggtatcrcattgaggttttcatttgcatttccctaattat

SEQ ID NO: 353312 - DNA, 530 bp, Homo sapiens
ttatgtactttatataaatgtaacttaccattagttgttaataccttgttaagaattgtttagtcatattggcttggaaggtaataaaaacagagaattttgatgaggccaactcatgaagaaaggttctgaacttaggagatttcattggatctcctsctaagcagatcagaggagaaaggtctttgatcactggttgatcaatatgctgacaatggtgggttaagtggaaggtggaggatgggagagtgaagtgtgtagatattaagacaaatacaatatggtttcttactttaatgagctcaccatccagtaggagagctagacattaaaaaaatattaaaaattttgtttaaagtagataatttcaatgtaatatgatacatgcagaaagaaacacataggcaccacctgctatggaaactaaggagattcccaaaccagtctggagttggataaagtcgtagaagttttgttggagagatgagcctgacccgagtttttgtctgtttctttttcaaagccaggtt

SEQ ID NO: 353313 - DNA, 530 bp, Homo sapiens
ttatgtactttatataaatgtaacttaccattagttgttaataccttgttaagaattgtttagtcatattggcttggaaggtaataaaaacagagaattttgatgaggccaactcatgaagaaaggttctgaacttaggagatttcattggatctcctcctaagcagatcagaggagaaaggtctttgatcactggttgatcaatatgctgacaatggtgggttaagtggaaggtggaggatgggagagtgaagtgtgtagatattaagacaaatacaatatggtttcttactttaatgagctcaccatccagtaggagagctagacattaaaaaaatattaaaaattttgtttaaagtagataatttcaatgtaatatgatacatgcagaaagaaacacataggcaccacctgctatggaaactaaggagattcccaaaccagtctggagttggataaagtcrtagaagttttgttggagagatgagcctgacccgagtttttgtctgtttctttttcaaagccaggtt

SEQ ID NO: 353314 - DNA, 650 bp, Homo sapiens
ctacctattattttgaaatatttcaaccttacagaaaaattgaatgaatagtataagtcatccatatacatgtcttctagaytacccagttttaaacattttgtcatcttagttttatctcactctctcgatgtgtatgtgtatgggtgtgtgtacgtgtagtaccatttgaaaaaaattgcagatgttatacttccaccctaaatatttcctcactgatctttcaataataggagcattctcctacataagcaaaatactattattatactcgaagtatttaactttcacacaatatcatcagatatatagtccatgttcaaacttttctgattggtccaataaagtctttaaatctgtttttctttctgtaattccaggacgcaatcgaaaatgacacattgcattttgttgccacatctttctagtttcctttcatccaaaacagttcttcgtatcaaccccctgagctccccgcctttttggtcttctatcacattggcatttttgaaaagtcagttgttttgtaaaatgttccacaagctggatttgcctgataatttccctatgatttaattcaggttaaacatttctggcaagattttgacagcattatacaagtaatgttgaatacagtacatcacattagg

SEQ ID NO: 353315 - DNA, 650 bp, Homo sapiens
ctacctattattttgaaatatttcaaccttacagaaaaattgaatgaatagtataagtcatccatatacatgtcttctagattacccagttttaaacattttgtcatcttagttttatctcactctctcgatgtgtatgtgtatgggtgtgtgtacgtgtagtaccatttgaaaaaaattgcagatgttatacttccaccytaaatatttcctcactgatctttcaataataggagcattctcctacataagcaaaatactattattatactcgaagtatttaactttcacacaatatcatcagatatatagtccatgttcaaacttttctgattggtccaataaagtctttaaatctgtttttctttctgtaattccaggacgcaatcgaaaatgacacattgcattttgttgccacatctttctagtttcctttcatccaaaacagttcttcgtatcaaccccctgagctccccgcctttttggtcttctatcacattggcatttttgaaaagtcagttgttttgtaaaatgttccacaagctggatttgcctgataatttccctatgatttaattcaggttaaacatttctggcaagattttgacagcattatacaagtaatgttgaatacagtacatcacattagg

SEQ ID NO: 353316 - DNA, 650 bp, Homo sapiens
ctacctattattttgaaatatttcaaccttacagaaaaattgaatgaatagtataagtcatccatatacatgtcttctagattacccagttttaaacattttgtcatcttagttttatctcactctctcgatgtgtatgtgtatgggtgtgtgtacgtgtagtaccatttgaaaaaaattgcagatgttatacttccaccctaaatatttcctcactgatctttcaataataggagcattctcctacataagcawaatactattattatactcgaagtatttaactttcacacaatatcatcagatatatagtccatgttcaaacttttctgattggtccaataaagtctttaaatctgtttttctttctgtaattccaggacgcaatcgaaaatgacacattgcattttgttgccacatctttctagtttcctttcatccaaaacagttcttcgtatcaaccccctgagctccccgcctttttggtcttctatcacattggcatttttgaaaagtcagttgttttgtaaaatgttccacaagctggatttgcctgataatttccctatgatttaattcaggttaaacatttctggcaagattttgacagcattatacaagtaatgttgaatacagtacatcacattagg

SEQ ID NO: 353317 - DNA, 650 bp, Homo sapiens
ctacctattattttgaaatatttcaaccttacagaaaaattgaatgaatagtataagtcatccatatacatgtcttctagattacccagttttaaacattttgtcatcttagttttatctcactctctcgatgtgtatgtgtatgggtgtgtgtacgtgtagtaccatttgaaaaaaattgcagatgttatacttccaccctaaatatttcctcactgatctttcaataataggagcattctcctacataagcaaaatactattattatactcgaagtatttaactttcacacaatatcatcagatatatagtccatgttcaaacttttctgattggtccaataaagtctttaaatctgtttttctttctgtaattccrggacgcaatcgaaaatgacacattgcattttgttgccacatctttctagtttcctttcatccaaaacagttcttcgtatcaaccccctgagctccccgcctttttggtcttctatcacattggcatttttgaaaagtcagttgttttgtaaaatgttccacaagctggatttgcctgataatttccctatgatttaattcaggttaaacatttctggcaagattttgacagcattatacaagtaatgttgaatacagtacatcacattagg

SEQ ID NO: 353318 - DNA, 628 bp, Homo sapiens
cttattcaacatagtattggaagtcatagccaaagcaagtagacaagagaaaaaaattaagggcatccaaattggacaggaggaagtcaaattgtcctgtttgtttgcagatgacatgatctaaatatatagaaaacactgtagactctaccaaaaaactcagaactggtaaatgaatttagtaaagttgtaggatacaaaatcaacatgcaaaaatcagtagtgtttctatatacaattagtgaacgagatagaaaagaagtcaaggaggcaatctcatttacaataactatgagaaaaaaaatacctagagataaatttaaccaaggaggtgaaagatgtctacaagagaaactacaaaacactgatgaaataaacagaagaggatataaaaaatttgaaaaatctcccatgctcatgtattggaatrattactattgttaaccatactactcaaagcaatctacagattcaatgcaatccttattgaaataccaatgacattcttcataaaaatagaaaaaaagtcctaaaatttatatggaaccacaaaagatcccaaatagccaaagcaatcctgagcaaaaagaaaaaagctggaggcatcacagtaccaaacttcaaaata

SEQ ID NO: 353319 - DNA, 628 bp, Homo sapiens
cttattcaacatagtattggaagtcatagccaaagcaagtagacaagagaaaaaaattaagggcatccaaattggacaggaggaagtcaaattgtcctgtttgtttgcagatgacatgatctaaatatatagaaaacactgtagactctaccaaaaaactcagaactggtaaatgaatttagtaaagttgtaggatacaaaatcaacatgcaaaaatcagtagtgtttctatatacaattagtgaacgagatagaaaagaagtcaaggaggcaatctcatttacaataactatgagaaaaaaaatacctagagataaatttaaccaaggaggtgaaagatgtctacaagagaaactacaaaacactgatgaaataaacagaagaggatataaaaaatttgaaaaatctcccatgctcatgtattggaatgattactattgttaaccatactactcaaagcaatctacagattcaatgcaatccttattgaaataccaatgacattcttcataaaaatagaaaaaaartcctaaaatttatatggaaccacaaaagatcccaaatagccaaagcaatcctgagcaaaaagaaaaaagctggaggcatcacagtaccaaacttcaaaata

SEQ ID NO: 353320 - DNA, 555 bp, Homo sapiens
ctcttgtgactatctctaggggctgtattcaagcctgatggatctgagaagatacagggaatcttattaagtgggctagtgagttttctctaccttgtagatagaatggctagaaaacttgtctttaaaacagaagagtctagaagcagagagatttctttacattgtcagatagaatactggtaacttgctggctgctctgcagctaagctcactgaggtaaaggccactgagattacctctctcaccactcttagaattgacactgcctaaggtagcccagcggctggctgaatcctggtgagtagtcaaagaaaaataccaaatcacttaaggagatacagcactcatgagaaaaaaaaaaaaaaaagaaaaaagaargaaaaaactagaagaaaagaagaactgctggaagaaacaaatgaaaacttaaatttaaaatgtaagtaaagatcaataacctaaatgtacatcttaagaattagaaaaaacaaagagcaaactaagtcaaaagatgaaagggtacttcctcaatatgatacagggtattgtgga

SEQ ID NO: 353321 - DNA, 609 bp, Homo sapiens
atattttccccttggaattctccagttttcataattaagaaaaaatcaggcaaatggagaatgttatctgacttaagagctatcaattcagttatacaacctatgggggcattayagccaggattgccttcttctgctataattccaaaaaattagcctttaatagtcatagatttaaaagactgtttctttactatccctttagctgagcaagactgtgaacggtttgcatttacaattcctgcagtaaacaacctgcagccttctaagtgttatcattggaaagtgttgccacagagcatgttaaacagtcccacaatttgccagacatatgtggggcaagcaattgaacctacttgtaaaaaattttcagtgttacattattcactatatggatgatatactttgtgctgcccccactcgagaaatattactccagtgttatgatcacttgcaaaattcaatttctcttgctggtttaattatagctcctgacaaaattcagactactactccttactcctacttgaggaacttagtaaatgacactaccattgtgccacagaaagtaactatacatagggatcaactaaaaacattaaatgactt

SEQ ID NO: 353322 - DNA, 503 bp, Homo sapiens
tggcccactctaggagcttaacataaggatttaaaattaaaagaacaaatatttaaagcatcccaggcacacccrgccttaatgccaggaactggattgtgtaaaggagctgaaaatggataaaaacacttggaagctctgtgatttcaatgacgattgtgcttttaatctgtgttgtttgtcttagtatagtctacagatgtggatcctgactcctgtaagaagtagctcaccatgacaaagctgcctttgcttttatcgatttgcaaataagagaaggggaacatgttgggagcaggccccccaaaatctggctataaactggcctcaaaactggccataaacaaaatctctgcagcactgtaacatgttcataatggccctaacacccaagctggaaggttgtgggtttacaggaatgagggcaaggaacacctggcccacccagggcagaaaactgcttaaaggcattcttaagccacaaacaatagcatgagtgatct

SEQ ID NO: 353323 - DNA, 602 bp, Homo sapiens
agtaaatcttcataaccttggatttagtaatggattcttagatatgtcaccagaagctaagcaacaaaagaaaaaatagaataagtttgtctctaccaaaattaaaaacttttgtgcatcacagaacagtttaagtgaaaatacaacacacagaatgaaagaaaatatttgcaaaccatatatttgatattcatgacastaaaaatgtagaaacagtgtaaatgtccatcaaccaatgaatgtgcaaattttgatatgtatttaaaatgagatgtcattcagtcattaaaaagaataaagtactgatatatgctgcaaggtaggtgagcttcaaaacattaggttaagtgaaagattctggctcaaaagatcacatattgtatgaatccatttatatgaagtatctagaatagataaatccagaggtagaatgcattttggtcattattaggaactgaggggagttttactttgggttgatggaaatgttttgaaactacatagaggtgcttatacaacactgtaaatgtattaattgtctattgttcactatgaaatgcttttacgtgaattttaccttgaaaaattattaaacagacaag

SEQ ID NO: 353324 - DNA, 612 bp, Homo sapiens
cagcactgctgagtcagtaaaaccacctttccccctttctatttttcatgtgtgtagaatatgatcacaattggcggccatggtagagcttaggcattagacaagacctaaaagctgttctctcaagacagtggacaatctttctggaaagagattcacaatgagtattgggatacaaacaataaaaaaatttgaccatcaataacatactaaaaaagcaaaaacgaaagtcagttctactcagaattcaaatgttctaaagctacccacacccagaataaagtactatttacttcagcagttaggaagaccactagactgcctgtcccacatattcacaggaaacactgcatgtaacctagaactaggagttgacytgccttcctctcacccactcctaaaatgtaatgactactgaagacaaaacatacgtaagtataaaaaaaacttaaattattatttcattcatagacactctgaaaaccacagtatcaaacatttttagataaactattagcaagaaaaatcaagatgaatatgtaggacaaccactattcagagatcaccagtggaaaaatggacaaaggatatgaacagtcagttaagaaaacc

SEQ ID NO: 353325 - DNA, 606 bp, Homo sapiens
tgcttaggtgtgcaggctgacattataaagctaggggatagtgcagtgtagtggggaacagcaagagttctggagttagacgaaactaggcagactcttactttgctgtttactgcttgtgtgatrtggtcaagtcttgtacctacattgagttcatttggacctacatcaacatgtttgtatttttttaaactagaatttcccaaatgaaaatcatttagtattcttgaaatgacttgaaactggtttctctgacagtagactcttatcatcaaaatctctaaggttctaactatgattttatgatagcccatgttcatctatagatggttgagggagaagtaagttcaatgagttctgggaacagaaatccaacattttacacaagtcctttctagttctttgttttctttcttttttgatgatataagttctgtttcaacaatactttttcacaatatctaatgtaatacataggaaaaagagatgtggcagggcaatagagtatggtacaaaaaagtagatgtaaaacccttttataaaaaactttttttaaaaaaataaatcatgttcatgaacttcaaggcctctcagagaaatggtgct

SEQ ID NO: 353326 - DNA, 606 bp, Homo sapiens
tgcttaggtgtgcaggctgacattataaagctaggggatagtgcagtgtagtggggaacagcaagagttctggagttagacgaaactaggcagactcttactttgctgtttactgcttgtgtgatgtggtcaagtcttgtacctacattgagttcatttggacctacatcaacatgtttgtwtttttttaaactagaatttcccaaatgaaaatcatttagtattcttgaaatgacttgaaactggtttctctgacagtagactcttatcatcaaaatctctaaggttctaactatgattttatgatagcccatgttcatctatagatggttgagggagaagtaagttcaatgagttctgggaacagaaatccaacattttacacaagtcctttctagttctttgttttctttcttttttgatgatataagttctgtttcaacaatactttttcacaatatctaatgtaatacataggaaaaagagatgtggcagggcaatagagtatggtacaaaaaagtagatgtaaaacccttttataaaaaactttttttaaaaaaataaatcatgttcatgaacttcaaggcctctcagagaaatggtgct

SEQ ID NO: 353327 - DNA, 568 bp, Homo sapiens
tcagcaattttcaagaatataatagttactaaccacagtcactgtgttttacmataaattgcttgaacatactccttctacctaactgaaattttgtcctttgaccaacatttccccaactccacccttctccctcaccctcagcccctgataaacaccactttcttctttatttctatgaatttgacatttttagatcctacatgtaagtgagatcgtgtggtgtttgtctttctgtgcctagcttatttcacataacataatgttgtccaggttcatcaatgttgtcccaaatggcaagatttcctttttgttttttaaggctgcgtagtagtctactgtgctatatataccacattttcttatccattcatctgttcatggacacttgggtggcttccatatcttggttactataaataatgctgcaataaacatgtgactgcagatatctcttcaaaatattgatttcatatcctgtggatatatacccagtagtggcattgctggaacatatggtggttctatttttaatttttggaggaaactccacactgctttccataat

SEQ ID NO: 353328 - DNA, 582 bp, Homo sapiens
ttaaagacagcttgtctctaaaaatcaactgtcttaaacatacttttcggtcgcaatagtacacatattaatattttgaaaaatttttctaatataaatctttggcaattcttaaatgccttcagccactgcacattttgtagctacaaagcagattttataatatctgagtttagaaaaccaacaaaaatttataggccaaatgagtctcctattgttgatacataatgttaggttcaagagataaattgccttaccaacatttttactgggccatcacatttttattagcctcatctactctttgcaatatcacaacagtgttgctgtagtggcaggcaaaatcatccagatgttgccagatcagtcaatcaaatcattcaatcaactaaagcacacacagttatacacatatgtgtatgttaggtcacgtgcagaatacataaaacaataagctcaacatttgccttcaaggaatgtagagtttaattgcatatattagttgtattaaatcttaaagctcttaatgagatgrttaaatattaagcatcatacataataagaatatggaagtttataata

SEQ ID NO: 353329 - DNA, 629 bp, Homo sapiens
gctgaggcaggagaatcacttgagcctgggaggtggaggttgcagtgagctgagatcctgcctttgcactccagcctgtgtgatagagtaagacttcatctcaaaagaatggacaacaataaaatggataatgccaaataaataaaaagtgaaaagattaacttgggtgaaccccaagacaacaaagaaaaaagaaaatgatattttagaaagtgaggataaagtaatgaaagatggactgagacagattaaaatgwggaatacattattgtaaatttaaggccagaataatgcaagtgtcaaaaaaacaacaaaagcaacaataaaacaagcacagggaggggtagagagagggtgaatgaggaaaaagagaaagcaaatgcaaaatgtaaagtaatcagcatgattagaatatctgttcattcccactctctgcaaattctttgtattttgaggaacatcctgacaagattttaatgtaatcaatcacggagtagtctaacccagaaaatatcctagcttcctctaggattcaaagaccttgtaccttcttaggtattctctctccatctaggttaaactaaactgtttcaacaacaaaaactactttgaattttctgcccaaaagg

SEQ ID NO: 353330 - DNA, 328 bp, Homo sapiens
tacttgcctttttactatatataaatctatctttgtccccagtatggtgtcacatttgaataatgtgcatagtaaagatttcatgttgttataaaaatcaagtctgtgagtgctacttgttttatttttggcaaaaatctcttcagcaatttaagaaaatattataatccactgggctgtattgggcataaaagtgccactaacacttctgtagttctctgtataaagttataygttttatgaccagttttgcaacaaataaaatctatctaccagtaagattaacaaggcttaaacttgggcaaagtacaacaataagtttccctgt

SEQ ID NO: 353331 - DNA, 178 bp, Homo sapiens
tatccaatttgtcagtctgtgcactttaattggcaaatttagttcacttacatttaaggttaatatttgtacgggtcaatttgatcctggcatggcaatactagctggttattttgcatattaattgatccactttcttcwtagtgttgttggtctttatattttgctacttttttta

SEQ ID NO: 353332 - DNA, 614 bp, Homo sapiens
aattgagcatgtcctgtgagtcagacactgtgctgggtactttactgtaaggtgctacaaagttactactattccataaagaagaaagccaacaataggttaagtgctccctgtggtaacattgcaagtaagtagcagagctacatagaacctaacttttttttatttcaatcctcttgagttaaaaatacacacagkggggttaccattgagtatatccatccatgttccctcccatccgtctttcatctatattttcattatctgtgctagaagccaaggaatcacttgtaatttttccagcgtttctcatgagtttatttcttttgcgaatctgtttgttgttgttgttgttgttcttgtttgaggcaggatagttcagcttactgttgtgtcatgtaattctctcctgtcaggctccagagtagctgggactacaggcagacaccacaatgcccagaaattttagtatttctgtagagatgtatttttttgtagagaagtgtttcttctttcatgctgttgccttggctggtctcaaattcctggactccaacagactgtctgcctcagccttctgaaatgctgggattacaggcatgagccattacacc

SEQ ID NO: 353333 - DNA, 555 bp, Homo sapiens
tgctctggtgccctggacctaccttttaagtgcttattctgtctctttctaacacctttgtctcctccagattcggggtacacactgggtcttatgtggctggtttccccaacactaacctgggacattccaaatcttggtgcttgtgttgtctctcaaatcaactcaccaagccctcctcagaaaacgcaatgcccttttctgcagccaaagacctcattatgccacacagtgaccttgaaatgcagaggggcagccacaaccccacttgggcctgttctgaacctgagatctctggtttcagtgatctcacagccagttgattgaaagggacagggaagtgtgtggaggaagcactctccacaccactgcactgcagcctggacaacagaatgagaccccatctcaaaaaaaaaaaaaaaaaaacctttaaaaatgcatcctatttttttctgagggtgttccaakatggccaaataggaacagctccagtctgcagctcccagcatgatcaatgcagaagatcagtgatttctgcatttcccactgaggtat

SEQ ID NO: 353334 - DNA, 582 bp, Homo sapiens
tgttctgagttatatatgaaaactaaaaaatgttgatctcatagaagtaaaaagtagaacagaggacaatagagactgtgaagggtagggagaagtggccatagggagagatttgttaaaggatacaaaatcgcagctacataggaggacaatttctagtgttctatagcactgtaggatgactatagtgcacaaaaatatttcaaatagctagaaggagaacagtgaatgttcccaayacaaagaaataataaatatttgggatgatacatatatgaattaccatgatctgataactatatattatacatacagaaacatcactaggtagtccataaatatgtacaattattgcatgtcaattaattttttaaaaattaaaacaagagtgctctaaggcactgtgtagataaggaaattaggctctgggaaggtgtgtggccacgctaaggacaggaaacaaggtgttctgactcacaaatcagactgttaagttttctctggggtgtggaccttctttctcagagggaataaatgagtaaggcaggtgacaagggcaggtgtaggtcacataacatatcc

SEQ ID NO: 353335 - DNA, 535 bp, Homo sapiens
ttctggggaaaagacaatattctttatcttgacaaagctttcagttacatagatatttgtatttattcatttatcacatgtagtacttaacatgtgtgtaactcactgtaaatcaatttaaactaaaaaacatagagctataaacaaatattcaacttcagtcaatgatatgcatgctgaagagtgttaggggtgaagggtacagatatctgcaattaattatactttaaaatgtgtcagggctgggcgtgctggctcacacctgtaatcccagcattttggcatgccgagatgggtggattgcccaaggttaggagtttgagaccatcctggccaacagagtgggaccctgtctcaactaaaaatacaaaaattagccrggcatgctggcacgtgcctgtaatcccagctactcgggagtctgagacaggagaattgcttggacccaggagagggaggttgcagtgagctgagattgcaccactgcactccagcatgggtgacaaagtgagactctgtctctaaataaataaat

SEQ ID NO: 353336 - DNA, 564 bp, Homo sapiens
atttttcattcctactaccaatgcaggagagctccagttgctctgcattctcaccaaaacttggtattatcagggcttttaaaaagttattttagccattcaaatagatgtatatttgtttctcattctgtttttattttgtatttctcttacgactaatattgttgggcatctttygatgtgcttattagttatttgagtatctttttgctgaagtgtctacttaaatgttttgtgcactcctttattaggttgttttctgtgtgttattgccaagtgggaatatttctggattctatattctagtccattattctgtgtctatcttttcacatcactttgaagtgagataaaaattatcagactgtcttgatgactgtagctttctagtaagtcttgaaatcaggtagtgtgagccttctaattttcttttgcaaaattgcactgatgactttaattcctttgctcttccttgtaaatttcacagtcaaactttttgataccaagaaaaaatctgctggggctttttctgacactgcattaaatttatagattaatttgaga

SEQ ID NO: 353337 - DNA, 521 bp, Homo sapiens
tcaacctcactcccatcaaatacttacaggtgtagttgtacaaaattctgggtccaaattcaggggagtttaagacatttcaaakcacgcgaaaccctcttttggcttatctcaagaaagtataccatagtgatcaagaccatggcttgtggagtaaggataatcaccacattacatgatttgtcatatttagtacttttcttaaccttagttccctcagtttcacattgtttaaaatgaggttaaaaatactacatcctgtcttacagggttgttataaaggttaaattaatttatgtttctaaaacattgaaaacaatgcctgctacattgtgaatagtgtataattacttattagttaaataaacttgtagtaaattaatttatcaaatattttccttcttgaattccaggtctcaaatatgacagatcatcactattaaccctcttcatctaaatttctgatgattgaaggcttaatgatcagaaggcttggatcctattagccaataactggatca

SEQ ID NO: 353338 - DNA, 558 bp, Homo sapiens
ctgaaacactttaagaaaagtaaaaattgctttaaaatgaaccagagtatttaagtggctaaagagtgagttcagaaatctaagtccatggaattttgatgtcaaaaaagtaggaagttaaagatttcttagcctcatcaagttatataatcccagctctcctccatctttagctttgcctggttagttcatcatttcttcttagccctccattctaatctgatctccaccttttattcaagactccaycttaagccctttctcctacattaagccatccttgaatttgtcaacttgcataagcctctacctttcttcaactttattggtagcaaaataatttgccaggttttctaaactgctgctccacagactgagcagacagaatatttaatagcacacctcagtttgcttcacttctctttcattgatggcaattcttctcatctttacttaattaccactgtatactttatatgatgcattgtataggttggaagcaccagtcaacctttgacaaactgaacattcatttattcagtcactcattcaacaaaa

SEQ ID NO: 353339 - DNA, 604 bp, Homo sapiens
tttcctagcagtggtaagataagttataatattatcaaactgtcagttttgccacttcaatatatgtatgcctggttgtaacctcacttaataagttaagtccatgtaaaaatagttgatagttaataaattgggcaagagttgcttaaacagattagactatataacaaaattagggttttaaaagaataaagctgctataacagtacgcttcatctcacaggaattaatcagttatggtatctccacaaaacagaatatcacgtattgttgaagagagccgtctcatttccctgcaaggctgccatttgtaggttgaagagtcacttgagtrctggaaagaaaaggctctatttcagaattcttctaatagcaggaatctacagggagcctataactctccattttagcaataggcctctatccccatattctacacacagctttctgcctgtgaacatgcacaagtggtctatcgagactaatataatcgtactttttaaccctgttcctatcagttacttcaaggagcccacaatttccagatcatccctcactccccaggaactgatcctcatgccaccaggaacagggattgcctttg

SEQ ID NO: 353340 - DNA, 423 bp, Homo sapiens
ttgtaactcacctcacacccaaccaattaggtagtaaagaggactcactaaaataccaattaggctaaaagcaggaggtaaagaaatagtcaaatcatatattgcctgagagcgtgggggagggacaatattcgggatataaaccctaggcattcgagacgggagtgggcaaccccctttggctcccctcccattgtatgggagctctgttttcactctactaaatcttgcagctgcacactcttctggtccgtgtttgtyacggctcaagctgagctttcgcttgccgtccaccactgccatttgcagacctgccactgacttccacccctccggatccagcagggtgtccgctgtgctcctgatccagcgaggcgccctttgccgctctggatccagctagaggcttgtcattgttcccac

SEQ ID NO: 353341 - DNA, 423 bp, Homo sapiens
ttgtaactcacctcacacccaaccaattaggtagtaaagaggactcactaaaataccaattaggctaaaagcaggaggtaaagaaatagtcaaatcatatattgcctgagagcgtgggggagggacaatattcgggatataaaccctaggcattcgagacgggagtgggcaaccccctttggctcccctcccattgtatgggagctctgttttcactctactaaatcttgcagctgcacactcttctggtccgtgtttgtcacggctcaagctgagctttcgcttgccgtccaccactgccatttgcagaccygccactgacttccacccctccggatccagcagggtgtccgctgtgctcctgatccagcgaggcgccctttgccgctctggatccagctagaggcttgtcattgttcccac

SEQ ID NO: 353342 - DNA, 408 bp, Homo sapiens
agagactctaaacagcctttatatttatcagacagacacagggaggcagatttagtaaccatagaaagataaacacctgatttgcaaagataacttaattattagcccataatastgatgcaatttaataaaaccaaacaaacagtaataaagaaatctggcacaattatccctgcatctatgtattagtttggtctcatgatagtaatatttagtctctgccatatttatttactaacacactggtgggtgactaataaagatatttgcaaaattaatccaagaaatacaaaatcaaatatcaccaagaaaattgtattcaagaatgtgattattagccatgcagtgaaaattgaaacctaagtcattccttgtgttaaactgcacttaatatccaactatcttttt

SEQ ID NO: 353343 - DNA, 408 bp, Homo sapiens
agagactctaaacagcctttatatttatcagacagacacagggaggcagatttagtaaccatagaaagataaacacctgatttgcaaagataacttaattattagcccataatactgatscaatttaataaaaccaaacaaacagtaataaagaaatctggcacaattatccctgcatctatgtattagtttggtctcatgatagtaatatttagtctctgccatatttatttactaacacactggtgggtgactaataaagatatttgcaaaattaatccaagaaatacaaaatcaaatatcaccaagaaaattgtattcaagaatgtgattattagccatgcagtgaaaattgaaacctaagtcattccttgtgttaaactgcacttaatatccaactatcttttt

SEQ ID NO: 353344 - DNA, 408 bp, Homo sapiens
agagactctaaacagcctttatatttatcagacagacacagggaggcagatttagtaaccatagaaagataaacacctgatttgcaaagataacttaattattagcccataatactgatgcaatttaataaaaccaaacaaacagtaataaagaaatctggcacaattatccctgcatctatgtattagtttggtctcatgatagtaatatttagtctctgccatatttatttactaacacactggtgggtgactaataaagatatttgcaaaattaatccaagaaatacaaaatcaaatatcaccaagaaaattgtattcaagaatgtgattattagccatgcagtgaaaattgaaacctaagtcattccttgtgttaaaytgcacttaatatccaactatcttttt

SEQ ID NO: 353345 - DNA, 575 bp, Homo sapiens
agctgttttaggctattctcacacatttcatttgaaatataattttccttctgaatgtaactttgtaaaacaatataaatgtaaggacaaacagtgaaaaactatagtatgaaggaaatgtaaawtgtgttacctattttaactaggtagtggtagtcctctctccctcacagatattttttttcttgctaggagttatttgtatcataacggcagaatttacaaagctttttagagttagtattagcgtcagtcaacatctgagagcaacaatggagacagtcatattgcattttggttaatgaagctaattattctgccatcagtgagatcttctgaaacacaaatgaaacctactaatgtgttttggttgttctcaagggcacagatccttatttttatgaaatcctcctcatgtggtgatgagacatttattgcacatatgcccagaacatcaattaaatttcaaattagaaaaatgtttaagcaatagcactaaattacaataccaaatattatatttcctatttttaagatgactttctcccatattgtaacatttctgaaatcatggc

SEQ ID NO: 353346 - DNA, 588 bp, Homo sapiens
ttctttactataatgtcattttattttgttactccgttacattgcattgtttcagcatttgaaaatcgatgctatacttcctggagaattttaaatgtgtgagtagatctctgacaaatattgtctaatttgagtctcacaacagctttcactacaattctgctcaatctctgtttataagaagaaattaatattgatatctccatttctcaaatcggaaaactcaggcaaagatggtgtgtacccaagtagtaagtgacagggttggtacctgaaactggaccttttgaccaccaataaatatcatgattttaaaaattatcctacagaagctttctgtgaagaataaattcatgaatggtccatacatggcttgctctgtggttaggacacagtaacaacaaggacccagacttattaattctttggggttcctttgttagcctgcttctccctagccctattgttctaaagtactaccactagccagtagcaatgagggtactgacagagctgtgctcaatgaacaacacarggaagcaaatcctgcagatacactgctttccattgtgtcagtgtgctagtgtt

SEQ ID NO: 353347 - DNA, 578 bp, Homo sapiens
agtaagattgatgttagaaaggcaattctacagctgggcacagtggctcacccctgaaatcccagcgctttgggaggctgagctgggcggattgcctgaggtcaggagtttgagaccagcctgcccaacatggtaaaaccccatctctactaaaaataccaaaaattagccggatgtggtggtaggcacctgtaatcccagctactcgggaggctgaggcaggagaattgcttgaacccgaggcagaggttgcagtgagccgagatcgtgccactgcactcctccagcctgggcaacaacagcaaaataccatctcaaaagaaaaaaaaaaaaggcaattctactacttaagaagagttttgttttaagcctttaaatactctatatagaggtctatcatcacaatttaaatacaaaagagaataatatttagatcaggtcctcagtgagaaaattaacaaagcactaactcataactagtgagaaaactcacagtgataaatgacatcacagagagcaaaaamagggtgtattctatagcagactctccaaagagatgtgcgtgcgtgtgtgtgtgt

SEQ ID NO: 353348 - DNA, 516 bp, Homo sapiens
tgggtataaattgtaaaagtctgttatctcgtagagtcgtcatatttgcttkctttctttcatcttttcatccagttttacttgtatcaacaaataagaactaaagtgtctttgactagacaaaaggtttttaagcagagtcaagtatgcataaggattatgtaaagagcttttacaaaatggggtactgtggtttaattcttggaaattgcaggattatttgcatattttgatcatactgctatactcagagaatctgatacccttttgaataagagaatcatcacgatacttagcttttgttcagtagtctaaaataagtaaataaacaactgactacctaggcatcatacatcactcatgttcatattcgaccctgctttgaaagaaagccaacacagttattccctgaagttcctacaatatctgaggttcatagagcatggaacaagtttatgtccattctaacactgaattacacagagcttatccttcatgtgattataggagcaaaac

SEQ ID NO: 353349 - DNA, 516 bp, Homo sapiens
tgggtataaattgtaaaagtctgttatctcgtagagtcgtcatatttgctttctttctttcatcttttcatccagttttacttgtatcaacaaataagaactaaagtgtctttgactagacaaaaggtttttaagcagagtcaagtatgcataaggattatgtaaagagcttttacaaaatggggtactgtggtttaattcttggaaattgcaggattrtttgcatattttgatcatactgctatactcagagaatctgatacccttttgaataagagaatcatcacgatacttagcttttgttcagtagtctaaaataagtaaataaacaactgactacctaggcatcatacatcactcatgttcatattcgaccctgctttgaaagaaagccaacacagttattccctgaagttcctacaatatctgaggttcatagagcatggaacaagtttatgtccattctaacactgaattacacagagcttatccttcatgtgattataggagcaaaac

SEQ ID NO: 353350 - DNA, 574 bp, Homo sapiens
cttaagatgctttcatgtcagtgcaaattccaaaggacttttcctatttaaaatacatttgtttcaaattaaagacaaaggattattaaaatgaaaattgacaatgccagaagtaaacataatatatctcaaatatctataggtctttgaattcagaccaaccaaggttacacatattatctatgcttgggaaaaatgtatataatttttttaaagtgactattgattcattcaaataaccatttgtttaaaaatatatcacccagctggaaatctgtcactgatcagagaaaagagaagaccgtgactttttttccaktctcttttagtgaatcttccaaatttggtgaaaaggtttttgtgaaggaatgataaagatgagaaaaactttttaaaacgtaaagtgtaagcatacatctatttgaatgactccttcatccagggcaagtgaaagacgtgttaagttttattatacattttcctgctttatgcttacaaaagttcttaggtaagatgatgacaaagatccttcgtttgaaatcatcgtgttggctaccagtgttgcaccaacttg

SEQ ID NO: 353351 - DNA, 594 bp, Homo sapiens
ttgatatctcaaagtccccttgttcttcatgaatgccaaaagataratagcatgaaaacaaagaaacacctactgcaaaaacccatttcatctagtcttgggtttatttcagagttttgcaaactcactaccatcctgcaaggtagcatcttcctgaacaaacttcggcccaccggaaacatccatcctccttttcggcatttccccgtattctgttgtatcagtaacatccggggctcagaagaaaggttgtggtttagagttacaatgaattggaaaaaaaaaaaaaacacttttaagataaattttaaaatatgggaaatgattcttcaacagctactcttcaagttggtcccgtggagaacatattaacaaaatgttagcatatgatacagacttccccactccaccactacaaagctgaaaatgaacaaagaggaatgaagggaatagatttgctgtttctattgatttatataccaatagagtaaattaggctctttttgtatgagataattattctctaacctttggtacaaggagtgttctaaaaggcattagtaaactcttttcttcagtgttgtatggcattat

SEQ ID NO: 353352 - DNA, 594 bp, Homo sapiens
ttgatatctcaaagtccccttgttcttcatgaatgccaaaagatagatagcatgaaaacaaagaaacacctactgcaaaaacccatttcatctagtcttgggtttatttcagagttttgcaaactcactaccatcctgcaaggtagcatyttcctgaacaaacttcggcccaccggaaacatccatcctccttttcggcatttccccgtattctgttgtatcagtaacatccggggctcagaagaaaggttgtggtttagagttacaatgaattggaaaaaaaaaaaaaacacttttaagataaattttaaaatatgggaaatgattcttcaacagctactcttcaagttggtcccgtggagaacatattaacaaaatgttagcatatgatacagacttccccactccaccactacaaagctgaaaatgaacaaagaggaatgaagggaatagatttgctgtttctattgatttatataccaatagagtaaattaggctctttttgtatgagataattattctctaacctttggtacaaggagtgttctaaaaggcattagtaaactcttttcttcagtgttgtatggcattat

SEQ ID NO: 353353 - DNA, 594 bp, Homo sapiens
ttgatatctcaaagtccccttgttcttcatgaatgccaaaagatagatagcatgaaaacaaagaaacacctactgcaaaaacccatttcatctagtcttgggtttatttcagagttttgcaaactcactaccatcctgcaaggtagcatcttcctgaacaaacttcggcccaccggaaacatccatcctccttttcggcatttccccgtattctgttgtatcagtaacatccggggctcagaagaaaggttgtggtttagagttacaatgaattggraaaaaaaaaaaaacacttttaagataaattttaaaatatgggaaatgattcttcaacagctactcttcaagttggtcccgtggagaacatattaacaaaatgttagcatatgatacagacttccccactccaccactacaaagctgaaaatgaacaaagaggaatgaagggaatagatttgctgtttctattgatttatataccaatagagtaaattaggctctttttgtatgagataattattctctaacctttggtacaaggagtgttctaaaaggcattagtaaactcttttcttcagtgttgtatggcattat

SEQ ID NO: 353354 - DNA, 594 bp, Homo sapiens
ttgatatctcaaagtccccttgttcttcatgaatgccaaaagatagatagcatgaaaacaaagaaacacctactgcaaaaacccatttcatctagtcttgggtttatttcagagttttgcaaactcactaccatcctgcaaggtagcatcttcctgaacaaacttcggcccaccggaaacatccatcctccttttcggcatttccccgtattctgttgtatcagtaacatccggggctcagaagaaaggttgtggtttagagttacaatgaattggaaaaaaaaaaaaaacacttttaagataaattttaaaatatgggaaatgattcttcaacagctactcttcaagttggtcccgtgragaacatattaacaaaatgttagcatatgatacagacttccccactccaccactacaaagctgaaaatgaacaaagaggaatgaagggaatagatttgctgtttctattgatttatataccaatagagtaaattaggctctttttgtatgagataattattctctaacctttggtacaaggagtgttctaaaaggcattagtaaactcttttcttcagtgttgtatggcattat

SEQ ID NO: 353355 - DNA, 389 bp, Homo sapiens
cttacataatcaaatatggccatatctgtgcctgggaaaagatacaggaatttgaaaatgaacaggcagacacgtgtggcctggttttaaggccctgggtttcagaaaccaggaagcagagctgaagccccaactctctggcctattattgcctcttcagcatcagaactcaccaagaaattaatgtggttctcaatattgaccagatttttaaaagtcgtttcttagaggatttccaagccctctcttgacactgtccttagcaataagyttcttccatttatcaagtccctgtaatgtgtaaagtacattgtaaaaatttttaatctaatatcccagttagatatccccatacaagatgaagaaattgatcctttaaaaaaaaaatg

SEQ ID NO: 353356 - DNA, 389 bp, Homo sapiens
cttacataatcaaatatggccatatctgtgcctgggaaaagatacaggaatttgaaaatgaacaggcagacacgtgtggcctggttttaaggccctgggtttcagaaaccaggaagcagagctgaagccccaactctctggcctattattgcctcttcagcatcagaactcaccaagaaattaatgtggttctcaatattgaccagatttttaaaagtcgtttcttagaggatttccaagccctctcttgacactgtccttagcaataagcttcttccatttatcaagtscctgtaatgtgtaaagtacattgtaaaaatttttaatctaatatcccagttagatatccccatacaagatgaagaaattgatcctttaaaaaaaaaatg

SEQ ID NO: 353357 - DNA, 389 bp, Homo sapiens
cttacataatcaaatatggccatatctgtgcctgggaaaagatacaggaatttgaaaatgaacaggcagacacgtgtggcctggttttaaggccctgggtttcagaaaccaggaagcagagctgaagccccaactctctggcctattattgcctcttcagcatcagaactcaccaagaaattaatgtggttctcaatattgaccagatttttaaaagtcgtttcttagaggatttccaagccctctcttgacactgtccttagcaataagcttcttccatttatcaagtccctgtaatgtgtaaagtacattgyaaaaatttttaatctaatatcccagttagatatccccatacaagatgaagaaattgatcctttaaaaaaaaaatg

SEQ ID NO: 353358 - DNA, 389 bp, Homo sapiens
cttacataatcaaatatggccatatctgtgcctgggaaaagatacaggaatttgaaaatgaacaggcagacacgtgtggcctggttttaaggccctgggtttcagaaaccaggaagcagagctgaagccccaactctctggcctattattgcctcttcagcatcagaactcaccaagaaattaatgtggttctcaatattgaccagatttttaaaagtcgtttcttagaggatttccaagccctctcttgacactgtccttagcaataagcttcttccatttatcaagtccctgtaatgtgtaaagtacattgtaaaaatttttaatctaatatcccagttagatatccccatacaagatgaakaaattgatcctttaaaaaaaaaatg

SEQ ID NO: 353359 - DNA, 536 bp, Homo sapiens
tgtgaggtgattttttattgtagttttgatttgcatttctctgatgattatgtctgattttaaaagcaatgatttatccataatgccctactggttttccttaaacctagtttcacacttttccccaaaaatgtgtaccacaaagcaaatattttatcttccattctttatcatgttagctggattataaggaagcatgagaaccctcaagtgagtgggtccaaacatccacctccatatagaaaatttatcgctacttttatctttaattggtagtaatgattatttctttggaatcacacttgatgtgtatatttagcaataaatacaaaacaaaagaaaaccacaatttgagtggttgtttrgattgtcaagcactgcaaaagaaattaagaaacactcatgatgggaactctctctccctctagtggttaagtaaagtcaaagaaacttgtgatactcttaaatattttagactaaaaaatgtcaaaagttttgtgatgatttttgtgtaccatgtatcaagttgaatgttg

SEQ ID NO: 353360 - DNA, 592 bp, Homo sapiens
taagaaacactcatgatgggaactctctctccctctagtggttaagtaaagtcaaagaaacttgtgatactcttaaatattttagactaaaaaatgtcaaaagttttgtgatgatttttgtgtaccatgtatcaagttgaaygttgagtaactttcagaaaatgaatgtaatgattctagcagtaaaaagattctggaattctagacttggtgcttcaataaatctgagcttttgattgactccatttggaaattgagaaagattatgtcatataaacaaacttcaatacctttttagtataagattctaaagcaggacaaattgtatcatttgtgaaacaatgaattatgttaaaaagctcatttcaatttttttcaagaagtgtgttaatagttcttattcctacaaattactagtattgacataagaggagatataatcttctctttctttttggtttttaaaatgtgtagtttacctgctttctcctactttatgtagacatcctgattactagtaagatgatgagtgtgaaagtagaagagctatagtatatgtaagacccatttcatcatcgtgatcactaataaa

SEQ ID NO: 353361 - DNA, 572 bp, Homo sapiens
ctttctcctactttatgtagacatcctgattactagtaagatgatgagtgtgaaagtagaagagctatagtatatgtaagacccatttcatcatcgtgatcactaataaattattacttgatagaaaagttcccttaaaatatgaaacaaactgtatctctcttttagatatagttgatggagaactggatctacaatcagaaaacctaagcttggggtccctgaagtacctctagctagctctataatgttgagcaagttccttaaattgaacattgtttttctctttttactggagataattgccattacccaagattggagtgaagactaaacaatttgacagacataaaatyatctttgcccgctgtaaagcatcatgttactatgtggtatcattacttactattgatccccactttggcttgagattatatacatcccatacttgaaatacacatggaaattcacacgcattcttttttttggttcaagtacaaatgtgtaaaaacaacaaatcttgctgtaaacattgccaattaaacttgtattaagagctgaatccagacaca

SEQ ID NO: 353362 - DNA, 572 bp, Homo sapiens
ctttctcctactttatgtagacatcctgattactagtaagatgatgagtgtgaaagtagaagagctatagtatatgtaagacccatttcatcatcgtgatcactaataaattattacttgatagaaaagttcccttaaaatatgaaacaaactgtatctctcttttagatatagttgatggagaactggatctacaatcagaaaacctaagcttggggtccctgaagtacctctagctagctctataatgttgagcaagttccttaaattgaacattgtttttctctttttactggagataattgccattacccaagattggagtgaagactaaacaatttgacagacataaaatcatctttgcccgctgtaaagcatcatgttactatgtggtatcattacttactattgatccccactttggcttgagattatatrcatcccatacttgaaatacacatggaaattcacacgcattcttttttttggttcaagtacaaatgtgtaaaaacaacaaatcttgctgtaaacattgccaattaaacttgtattaagagctgaatccagacaca

SEQ ID NO: 353363 - DNA, 572 bp, Homo sapiens
ctttctcctactttatgtagacatcctgattactagtaagatgatgagtgtgaaagtagaagagctatagtatatgtaagacccatttcatcatcgtgatcactaataaattattacttgatagaaaagttcccttaaaatatgaaacaaactgtatctctcttttagatatagttgatggagaactggatctacaatcagaaaacctaagcttggggtccctgaagtacctctagctagctctataatgttgagcaagttccttaaattgaacattgtttttctctttttactggagataattgccattacccaagattggagtgaagactaaacaatttgacagacataaaatcatctttgcccgctgtaaagcatcatgttactatgtggtatcattacttactattgatccccactttggcttgagattatatacatcccatacttgaaatacacatggaaattcacacgcattcttttttttggttcaagtacaaatgtrtaaaaacaacaaatcttgctgtaaacattgccaattaaacttgtattaagagctgaatccagacaca

SEQ ID NO: 353364 - DNA, 512 bp, Homo sapiens
tcaactacacctcatattgtccccacaaaattaaagaaatatgaatgcttccacttaccttagaggaaatgctgagtaccttcactaatgcccatttttcttaaaaattcacatggcttcacagtcagtttgctataggaatttcaaagtgcttagatttcatgtaagaaattcaacttctttctgcctaggcttgccaaggggagctttgtttgcaaaaacaggggctcctagaacggaagggattttaagctactgcctgacccataagttcctagcatggaacccawggacctctaagggaggacacacgtgagctccaggagatctatgaagtccctgaaattgtacgcatgatttgaatatgtatgtctgtgtggttttctccagatattgcctattatcagagtagggttagagaagggttataatccactgattttttcttgacctgtccttcaacactaccagaaattaagccatccacttcaaagaagcctataaaaatggaa

SEQ ID NO: 353365 - DNA, 557 bp, Homo sapiens
taattctttagaaaaaatgacaaaataaacctttcagtttatgttataagggcctgtttgattcttaagagcaaatatgccagttttttttgtttgtttgtttatgaaacaacatgttcggctgtggtcttttatgtatttcatagtagtagtaagttaaaaataaaaatgaaaaatataaaggaattccaaaattacctgagcaggccgggcactcatgcctgtaatcccaacactttgggaggccaagatgtgtggatcgcttgaggtaaggagtttgagaacagcctgcccaacatggtgaaaccttgtctctactaaaaatataaaaattagccaggcgtggtggctcgyacctgtagacccagctacttgggaggctgaggcaggttcatcaattgaacccaggaggtggagtttgcggtgagctgagttcgctccactgcactccagcctgggcaacagagtgagaccctgtctcaaaaacaatataaataaataaataaataaataaaataattgagcaaataagttgccatcttttagaacttggcccc

SEQ ID NO: 353366 - DNA, 541 bp, Homo sapiens
tatcacattttcttattttcagtcacctattgatggacacttgattacctatctttgctattgtgaacagtgctgcaataaacatactagtgcaggtatttttttttcaatataatgatttcttttccttaggctatatacctagtaatgagaatgctggatccaatggtagttcctagttctttaagaaatctccacactgttttccatacaggtagtattaatttacattcccaccaasagcctgtaaacgttcccttttctctgcattctcaccaacatctgttatttttggacatctaaatcttaatattagtcattatgacttttgtaagatgacatctttttgtggttttaatttgcatttttctgatgatatggtttggatttgtgttcccacccaaatcgcatgttgaaatgtaatctccagttctggaggaggggtctggtaggatgtgattggatcatggggatggactttccccttgctgttctcatgataatgagttctcatgagatctggttgcaaaaatgtttgtgg

SEQ ID NO: 353367 - DNA, 535 bp, Homo sapiens
atatgtatatacaaatatgtatacagacatacacacaaatctataaaatcaaacattgaaacatgtatatacatgtatatatacagacacwcacagaagtatgtatatatatgtgtgtagatagatacagacacacacagaaatatatataggttgatttcacatctttgctattgtgaatagtgctcttataaatatacaaatgtactttttttgatataatggtttcttttctattgggtagttactcagcagtggcattgctaggtcaattagttctttaagaaaattccatgctgtttttgatagaggttgtactaatttacattttcaccaaccacaatgagatactatcttacaccagaccgatgttgtaaaaagtttttctttgtgtaatttttatttgatttcatgggaaagattgatccaaataaccagaaatagaaatgcactagtatcttaggaatattttcactgggtctgtgaggttactcatattttacaggagttttctaaatacatgttggaaatcatc

SEQ ID NO: 353368 - DNA, 535 bp, Homo sapiens
atatgtatatacaaatatgtatacagacatacacacaaatctataaaatcaaacattgaaacatgtatatacatgtatatatacagacactcacagaagtatgtatatatatgtgtgtagatagatacagacacacacagaaatatatataggttgatttcacatctttgctattgtgaatagtgctcttataaatatacaaatgtactttttttgatataatggtttcttttctattgggtagttactcagcagtggcattgctaggtcrattagttctttaagaaaattccatgctgtttttgatagaggttgtactaatttacattttcaccaaccacaatgagatactatcttacaccagaccgatgttgtaaaaagtttttctttgtgtaatttttatttgatttcatgggaaagattgatccaaataaccagaaatagaaatgcactagtatcttaggaatattttcactgggtctgtgaggttactcatattttacaggagttttctaaatacatgttggaaatcatc

SEQ ID NO: 353369 - DNA, 535 bp, Homo sapiens
atatgtatatacaaatatgtatacagacatacacacaaatctataaaatcaaacattgaaacatgtatatacatgtatatatacagacactcacagaagtatgtatatatatgtgtgtagatagatacagacacacacagaaatatatataggttgatttcacatctttgctattgtgaatagtgctcttataaatatacaaatgtactttttttgatataatggtttcttttctattgggtagttactcagcagtggcattgctaggtcaattagttctttaagaaaattccatgctgtttttgatagaggttgtactaatttacattttcaccaaccacaatgagatactatcttacaccagaccratgttgtaaaaagtttttctttgtgtaatttttatttgatttcatgggaaagattgatccaaataaccagaaatagaaatgcactagtatcttaggaatattttcactgggtctgtgaggttactcatattttacaggagttttctaaatacatgttggaaatcatc

SEQ ID NO: 353370 - DNA, 542 bp, Homo sapiens
tcatccatttttaattggcttatttgtgtttttattgttgagttataagagttgtttacatattaaggaaacaagtttcttatcagatgtwtggtttctgaatacttttcccattctgtggtttacactttcacttgctttatggtatattttgcagaaaaaaaaaaccaccaaaaaaagaaaaacacccggttttgctctttataataagtagggtctgtaacaagagctattaggaggaaacagttgtagctgtaaaataagttttaattacataccaagggctttggatttttctctaatttaggagtgtaaatctagaactactaggtaaaccataacatcaggctaccagtgtctagacttccatcttttaatttaacattaaaaattgccataaaaggatacagaaagtaaaaaataaattccaccaccagaaagtaatgaaaaacattcctattattaacagattcagtaggataggattaagaaaaacaaacctagaacacagatacttggccttatgagctgaaacccacctg

SEQ ID NO: 353371 - DNA, 542 bp, Homo sapiens
tcatccatttttaattggcttatttgtgtttttattgttgagttataagagttgtttacatattaaggaaacaagtttcttatcagatgtttggtttctgaatacttttcccattctgtggtttacactttcacttgctttatggtatattttgcagaaaaaaaaaaccaccaaaaaaagaaaaacacccggttttgctctttataataagtagggtctgtaacaagagctattaggargaaacagttgtagctgtaaaataagttttaattacataccaagggctttggatttttctctaatttaggagtgtaaatctagaactactaggtaaaccataacatcaggctaccagtgtctagacttccatcttttaatttaacattaaaaattgccataaaaggatacagaaagtaaaaaataaattccaccaccagaaagtaatgaaaaacattcctattattaacagattcagtaggataggattaagaaaaacaaacctagaacacagatacttggccttatgagctgaaacccacctg

SEQ ID NO: 353372 - DNA, 542 bp, Homo sapiens
tcatccatttttaattggcttatttgtgtttttattgttgagttataagagttgtttacatattaaggaaacaagtttcttatcagatgtttggtttctgaatacttttcccattctgtggtttacactttcacttgctttatggtatattttgcagaaaaaaaaaaccaccaaaaaaagaaaaacacccggttttgctctttataataagtagggtctgtaacaagagctattaggaggaaacagttgtagctgtaaaataagttttaattacataccaagggctttggatttttctctaatttrggagtgtaaatctagaactactaggtaaaccataacatcaggctaccagtgtctagacttccatcttttaatttaacattaaaaattgccataaaaggatacagaaagtaaaaaataaattccaccaccagaaagtaatgaaaaacattcctattattaacagattcagtaggataggattaagaaaaacaaacctagaacacagatacttggccttatgagctgaaacccacctg

SEQ ID NO: 353373 - DNA, 579 bp, Homo sapiens
cttggccttatgagctgaaacccacctgatggccacccaaattatggaggagagttggactaacctgattcattgtctgcctttaacattggactgcagaggcaacataaccaaggaaattaaccacctactgcccttgggcagtcttctgagcaggccagagtcacgccctgcttcctgtgtcctgcctcagctgtgcctattattctttaaatccaataaaaaataaaaatacctactaaatgggtatagcaatatttggttacattggttctgaatacaaaaactgtagagaaaaggagyactgtgggtgggagcagatactggcagcatctgagagccatccacactgggaaagagtgtcatccttgttacatccttgttttgccatgttacagagcatggcaaaacaacattttaagcataggccaggaatcagtaatcaagaatattctacttgtacagagccatgcatgctacatgaagacttgcaggacaccataaattggatcagggcctttacccaacaagctccacatcaggtcaagatcggcaagctgaggcagaactatgacctct

SEQ ID NO: 353374 - DNA, 584 bp, Homo sapiens
tcttagatcagcatggagatgcctgtaagcagtgagtcacagatataaagcaaaaaagcaagccaaattgtaactaattgcrgtgctactataattgtgtgtttcttcattttagcctattataatttgttctattataaatgtcagaagggagagaatgacaaatgaccacatgattttttttaggccagtattcttgaggttaaccctatctgaatacatagaactatgcgtattctcttcctttcttccttctcttctttcttctttccttctttctataaatatttattgatgcctacaatgtgtctggctgtggactagatgtttaaaatactatgtaaaccaaaaagttaaaaaatttcttaccttcgtaaactttatatccttgtagaataagactgtgagcaaacaaaagataattaatgaataaattagctagcactatattatgtattagaaggtagcagatgctaagaaaaaaagatatcaggggaagtgggatcaagagtgaggagtaacttggagagcaactggagggtctagaggagaggagttacattatctcatctataatgtcgaga

SEQ ID NO: 353375 - DNA, 584 bp, Homo sapiens
tcttagatcagcatggagatgcctgtaagcagtgagtcacagatataaagcaaaaaagcaagccaaattgtaactaattgcggtgctactataattgtgtgtttcttcattttagcctattataatttgttctattataaatgtcagaagggagagaatgacaaatgaccacatgattttttttaggccagtattcttgaggttaaccctatctgaatacatagaactatgcgtattctcttcctttcttccttctyttctttcttctttccttctttctataaatatttattgatgcctacaatgtgtctggctgtggactagatgtttaaaatactatgtaaaccaaaaagttaaaaaatttcttaccttcgtaaactttatatccttgtagaataagactgtgagcaaacaaaagataattaatgaataaattagctagcactatattatgtattagaaggtagcagatgctaagaaaaaaagatatcaggggaagtgggatcaagagtgaggagtaacttggagagcaactggagggtctagaggagaggagttacattatctcatctataatgtcgaga

SEQ ID NO: 353376 - DNA, 579 bp, Homo sapiens
tgacagggtctcattcttttatggctgaatagtactccattgtgtatatgttccactttttttttttttatccattcgcctgttgatggacacttgggttgcttccaagtcttggctgttgtgaatactgttgcaataaatatgggagtgcagatatttcttttataaaacttttctttaagaccaatttactttctgtcttacctcttgacaaaaggctttttcatccctatgtggctaagcaatttaaggaagcattttgtaatgaaaggaaaggaacattcccaaaaatccatagactgaaggacctggcctgactgcaagcaaagttctagagcaaatgagggggattctttttaagatggtttgggtaaatatcgtcttttcttgtttcatgaatatggagaacactgagaacaacatttgaagataatgaggtcctaccrccaaactgtgtgatcctcaaaactagaatccctctctccaccaaggagccacatcccacataccagctgaggcctctagatgtggtcaatttacagggattatctatagttaatctaggttagcaggaataag

SEQ ID NO: 353377 - DNA, 598 bp, Homo sapiens
ttaaaaaaatagataactggactcctccccccagagcttctgataacagtagcttcagttgaggcctgagaatttgcatttttaagtttccaggtgattctgatgctattggtgcagatagcacatttgagaaccattgtcttaattctccccttaatatcttcagtgcacwctattttgagaattcaccatgtgccagactctatactaatctgggtatgcattgatgaataaaataggcaaaatccctaagtgtgcaaagcttgtagtctagtggaggaataagaaaataagcctacatataattatctatttgaagttgtcctaagtgggtgcagggtagaaggggagttacttgagtgatcaggaaaacagcttctcagaaggtattaagagcaagaaatgaaagatgagaagtcaacagagggaaaagtggaagaacgtggcattcaaggcagaagagtgacctatgtgagggccctggtgtggaaagtatccagatgtgtttgagaagctatgtgcttatatggcaaaaacacagaaactgagcacaaggatggccaagaggagaggtgagagagaggtgagcagacacaat

SEQ ID NO: 353378 - DNA, 411 bp, Homo sapiens
aaacagctcacacgtttgagcagaccaattattaggcaattctcctaactctgcttccacaagagtctccctatcaattactgaatacccattgtggttttttctcaatcacccgggaggaaccatctgtcrtcctgaagggagttcctcctaggtctgatcggactttgtatggtaattaagattgaaatcccctgttaggaaatctgctgggttaagagaattttcagtggttagtgttaaatcacctttttctaacagaatagccgcatactttaagatttttgagttagtaagctacttttttgttttttttgatttaggatagctctgaactggtgaggtgtgctcacaatgaggtttcctctaaaggttatttttctactttcttctgttagcaagacagttgcc

SEQ ID NO: 353379 - DNA, 411 bp, Homo sapiens
aaacagctcacacgtttgagcagaccaattattaggcaattctcctaactctgcttccacaagagtctccctatcaattactgaatacccattgtggttttttctcaatcacccgggaggaaccatctgtcatcctgaagggagttcctcctaggtctgatcggactttgtatggtaattaagattgaaatcccctgttaggaaatctgctgggttaagagaattttcagtggttagtgttaaatcacstttttctaacagaatagccgcatactttaagatttttgagttagtaagctacttttttgttttttttgatttaggatagctctgaactggtgaggtgtgctcacaatgaggtttcctctaaaggttatttttctactttcttctgttagcaagacagttgcc

SEQ ID NO: 353380 - DNA, 411 bp, Homo sapiens
aaacagctcacacgtttgagcagaccaattattaggcaattctcctaactctgcttccacaagagtctccctatcaattactgaatacccattgtggttttttctcaatcacccgggaggaaccatctgtcatcctgaagggagttcctcctaggtctgatcggactttgtatggtaattaagattgaaatcccctgttaggaaatctgctgggttaagagaattttcagtggttagtgttaaatcacctttttctaacagaatagccgcatactttaagatttttgagttagtaagctacttttttgytttttttgatttaggatagctctgaactggtgaggtgtgctcacaatgaggtttcctctaaaggttatttttctactttcttctgttagcaagacagttgcc

SEQ ID NO: 353381 - DNA, 502 bp, Homo sapiens
tacaggtaaagaaaatatggtttatatacatatgtgtgtgtgtgtgtgtatgtgtgtatatatatatatatatatatrtgtataatgaaatactacttaaccttaaaaaaggagaagatcctgtcatttgcaacaacatggataagactggaggacattaactttagtgaaataagctaagtaaatgtaactattgacactaaaatgtgtgctcgcaaatcctaacttcattttaattcctaatagatatagcttggtgaaccagcacatttcactatgttcataatatctaaaataattctcccatctgcataaaataaaatctgatcatttcttgtgatcatcagactaagaaataaaacatcttggttctgaacataccaaaacacttaatgtttgaaattaaaagcgtatgtttattgtgacactattcacaatagcaaagacttggaaccaatccaaaggtccatcaatgatagactggattaagaaaatgtggcac

SEQ ID NO: 353382 - DNA, 502 bp, Homo sapiens
tacaggtaaagaaaatatggtttatatacatatgtgtgtgtgtgtgtgtatgtgtgtatatatatatatatatatatatgtataatgaaatactacttaaccttaaaaaaggagaagatcctgtcatttgcaacaacatggataagactggaggacattaacttwagtgaaataagctaagtaaatgtaactattgacactaaaatgtgtgctcgcaaatcctaacttcattttaattcctaatagatatagcttggtgaaccagcacatttcactatgttcataatatctaaaataattctcccatctgcataaaataaaatctgatcatttcttgtgatcatcagactaagaaataaaacatcttggttctgaacataccaaaacacttaatgtttgaaattaaaagcgtatgtttattgtgacactattcacaatagcaaagacttggaaccaatccaaaggtccatcaatgatagactggattaagaaaatgtggcac

SEQ ID NO: 353383 - DNA, 502 bp, Homo sapiens
tacaggtaaagaaaatatggtttatatacatatgtgtgtgtgtgtgtgtatgtgtgtatatatatatatatatatatatgtataatgaaatactacttaaccttaaaaaaggagaagatcctgtcatttgcaacaacatggataagactggaggacattaactttagtgaaataagctaagtaaatgtaactattgacactaaaatgtgtgctcgcaaatcctaacttcattttaattcctaatagatatagcttggtgaaccagcacatttcactrtgttcataatatctaaaataattctcccatctgcataaaataaaatctgatcatttcttgtgatcatcagactaagaaataaaacatcttggttctgaacataccaaaacacttaatgtttgaaattaaaagcgtatgtttattgtgacactattcacaatagcaaagacttggaaccaatccaaaggtccatcaatgatagactggattaagaaaatgtggcac

SEQ ID NO: 353384 - DNA, 502 bp, Homo sapiens
tacaggtaaagaaaatatggtttatatacatatgtgtgtgtgtgtgtgtatgtgtgtatatatatatatatatatatatgtataatgaaatactacttaaccttaaaaaaggagaagatcctgtcatttgcaacaacatggataagactggaggacattaactttagtgaaataagctaagtaaatgtaactattgacactaaaatgtgtgctcgcaaatcctaacttcattttaattcctaatagatatagcttggtgaaccagcacatttcactatgttcataatatctaaaataattctcccatctgcataaaataaaatctgatcatttcttgtgatcatcagactaagaaataaaacatcttggttctgaacataccraaacacttaatgtttgaaattaaaagcgtatgtttattgtgacactattcacaatagcaaagacttggaaccaatccaaaggtccatcaatgatagactggattaagaaaatgtggcac

SEQ ID NO: 353385 - DNA, 498 bp, Homo sapiens
gatatgccttatagagcagagtgttccctaaaggctgaacttctctgcttttattatctaaaaagaggacaatatatgyggtgactatatattttctgaaccaaaatgtgagatacaagacatgacaaagtctttctcctcactccaatgtatggctctatctttatgaaagtttgacaaaaatttaaagcaagtggagttatgtctcagttttctcacctagatgacagaagtaataataataatacccagtatagaggggttttacgagagtcaacttagataatacctataaagtgcctggcacatggaaagtatgcaattaatgtgagttaggtattttacgcatttgatatattgtggctcttgaaaagtgcaaagctcatcagaatattccttgacaaccaggacggtgagctcccataaggaaagaagacaccttgagtcatggctcacaggtgcctcaaggttgccatgagagacatgtggatgccactc

SEQ ID NO: 353386 - DNA, 572 bp, Homo sapiens
cagggttatgttcagaataacgggaaaatacatgmacaaggcctggtacattaaatacacaaacatatttcctgttattatttctattcttactataagtatgtataccataatgaatataaacattggagattggcttccggtgctcaaaactgcgcctttgatatctaaccttcctgtacctcagttacctatatacaaaacagagttaatgttattgtatatctcaaagggttgttgcaaggattaaatgagacaatccatataaaacatttacgtcactgccaatagcaagtactcaatacattttatctactattggtcgtaccagactgcaaattcctcagccttgtattatgtactgtgagtcctcagtcataaatttataaatagaagtgtgatagtctttgaaagttcagaagtgaaacctgtaaagaccccattcttaccttaaaatgtgaaattgccttaaagaaagaggtcagggaataaaagttggctcaaatatcatttacagtggacaaggcccactgcagcttagagcaggcatttctatttaaaacctgtaggga

SEQ ID NO: 353387 - DNA, 588 bp, Homo sapiens
atccttgaggtggcactttatcagggtgaatgtgtgagtctggatacgttgaggttcctctccatcctctcttttgtcaacacttactgtcagccacccagcaccctttcttttcctctgaagaagttaccctgcaactggctctctctcattgattgagccctctgcagccacaaccctaatctctgtttttccctagacccccgtcttcaactcaaccatacccatctatctacctttctgcaattctctactctatgaaaaaagaaatgtgatgtttgcaataaagttatatttttccctccgaaacaaaacagtaacattcaattaggtatctcctaagaagtatgtcttaacaaaatagagagattctgttctggagaactagtcttccagcagactgaagagagaactgtgttggaacgtgccagcacattatatcaggkgggggcaccctcctgtcttcctaagcctggggggaggtctgtgttctaaccatctcttccaaaaatgatgccgggtatcatattgtaagggtttctttaatggttagatgtgaagccatttatttgtcacttcctatgtgtt

SEQ ID NO: 353388 - DNA, 588 bp, Homo sapiens
atccttgaggtggcactttatcagggtgaatgtgtgagtctggatacgttgaggttcctctccatcctctcttttgtcaacacttactgtcagccacccagcaccctttcttttcctctgaagaagttaccctgcaactggctctctctcattgattgagccctctgcagccacaaccctaatctctgtttttccctagacccccgtcttcaactcaaccatacccatctatctacctttctgcaattctctactctatgaaaaaagaaatgtgatgtttgcaataaagttatatttttccctccgaaacaaaacagtaacattcaattaggtatctcctaagaagtatgtcttaacaaaatagagagattctgttctggagaactagtcttccagcagactgaagagagaactgtgttggaacgtgccagcacattatatcaggggggggcaccctcctgtcttcctaagcctggkgggaggtctgtgttctaaccatctcttccaaaaatgatgccgggtatcatattgtaagggtttctttaatggttagatgtgaagccatttatttgtcacttcctatgtgtt

SEQ ID NO: 353389 - DNA, 565 bp, Homo sapiens
ctattgtcaatggtatggctatcatgtgtgactgacctgggttcagattcttgctcaaacactaactagttttgagaccatstacaccattaataaaaatattactcatagaaatagctaccatttactggacacgtgttctgtgaacattattgtcctcagtgctttataagcattattttaattcttactatgtcatcatgtgacaagtattattagattcactttaaattcatttttctggtaaagacactgagtatcagaagtctgaaacatatttgaaatcacatacaactggtgaaagtcagagctgaatttttaactcaggtctttttaattccaaagctcgtgctctcaaaaacaattgttttactgaaatctacaagtaatataaactttctgtgacccagtttcctcatctataagacaggatatgcgctgtgtctaataccagtagctggcaggcaatgcgttcgaaattggtaacttttcatttttagtaatagttattgggcatagaaatgagattcactgactgtgataaatatatcagcacactgattaa

SEQ ID NO: 353390 - DNA, 565 bp, Homo sapiens
ctattgtcaatggtatggctatcatgtgtgactgacctgggttcagattcttgctcaaacactaactagttttgagaccatctacaccattaataaaaatattactcatagaaatagctaccatttactggacacgtgttctgtgaacattattgtcctcagtgctttataagcattattttaattcttactatrtcatcatgtgacaagtattattagattcactttaaattcatttttctggtaaagacactgagtatcagaagtctgaaacatatttgaaatcacatacaactggtgaaagtcagagctgaatttttaactcaggtctttttaattccaaagctcgtgctctcaaaaacaattgttttactgaaatctacaagtaatataaactttctgtgacccagtttcctcatctataagacaggatatgcgctgtgtctaataccagtagctggcaggcaatgcgttcgaaattggtaacttttcatttttagtaatagttattgggcatagaaatgagattcactgactgtgataaatatatcagcacactgattaa

SEQ ID NO: 353391 - DNA, 564 bp, Homo sapiens
tggacaggtagatgtaggcaagtgtgtaacatacttaagtcctgggacagtacaattagaatagacaaccagtcaaaatgagcattgatcattatgcccttcttgtatccactgattgttaagccttggctggtgaatggtttaaatgtctggagtgtgcactaaaaaagagtccgaarctcttctgtgttccattttctgcagctgtgtgtagaagatcagcctgcacttgtgtctgtgagcatgaaccagtgcccctcagactggaattcctagcatggatagtaagattttcacatttatttccctgtaacagcctggacgtctgtttttgcttctgtatcttgaaagcttctatttaaattgtgcattttttcccacggagtctcatacattatgtggcacatttatctgggactgttaagatttcccccctaacccattgaggtatttatgggggaagattatgcttctattagtccagaaaatacctaaaaagagagcatattttctcaggttctttatgaacttctgggaaaaaatgcatctttccagattttccta

SEQ ID NO: 353392 - DNA, 564 bp, Homo sapiens
tggacaggtagatgtaggcaagtgtgtaacatacttaagtcctgggacagtacaattagaatagacaaccagtcaaaatgagcattgatcattatgcccttcttgtatccactgattgttaagccttggctggtgaatggtttaaatgtctggagtgtgcactaaaaaagagtccgaagctcttctgtgttccattttctgcagctgtgtgtagaagatcagcctgcacttgtgtctgtgagcatgaaccagtgcccctcagactggaattcytagcatggatagtaagattttcacatttatttccctgtaacagcctggacgtctgtttttgcttctgtatcttgaaagcttctatttaaattgtgcattttttcccacggagtctcatacattatgtggcacatttatctgggactgttaagatttcccccctaacccattgaggtatttatgggggaagattatgcttctattagtccagaaaatacctaaaaagagagcatattttctcaggttctttatgaacttctgggaaaaaatgcatctttccagattttccta

SEQ ID NO: 353393 - DNA, 617 bp, Homo sapiens
cctccatcttgtttcaggtccttgggaacatgacctggaaccacatggcaatactttgttttagtctccaccattttacaatggtggctgtcttcttgtgctaagtcagttcctgggtgaggaccacacaatcagataagccagtttgtcaatctaggtggtgycagctgatccatcaagagcagggtttacaaaatatattaaggactaatcttgagagcagttaagggagggtcagaatcttgtagcctcagctccatgactcctaggccatggtttctaatcttatggctagtttcttggtctgctccccaggcaagaggtaagcctatcttaagaaggggctgttaccatctttgttttagactataaactataaacccagctcctccaaaagttggtttggcctatgcccagggataggcaaggatagcttgggagctggaaacaaaatggagttggttgggtcagatctcttccactgtctcagtaataattttgcaatgatagttttaaaagctgcctatcacccctttgaaaacaccatatacacttgaggttaagtcataacctaattaaggcttgttggtttcacctgtgagattactttttgtaac

SEQ ID NO: 353394 - DNA, 617 bp, Homo sapiens
cctccatcttgtttcaggtccttgggaacatgacctggaaccacatggcaatactttgttttagtctccaccattttacaatggtggctgtcttcttgtgctaagtcagttcctgggtgaggaccacacaatcagataagccagtttgtcaatctaggtggtgccagctgatccatcaagagcagggtttacaaaatatattaaggactaatcttgagagcagttaagggagggtcagaatcttgtagcctcagctccatgactcctaggccatggtttctaatcttatggctagtttcttggtctgytccccaggcaagaggtaagcctatcttaagaaggggctgttaccatctttgttttagactataaactataaacccagctcctccaaaagttggtttggcctatgcccagggataggcaaggatagcttgggagctggaaacaaaatggagttggttgggtcagatctcttccactgtctcagtaataattttgcaatgatagttttaaaagctgcctatcacccctttgaaaacaccatatacacttgaggttaagtcataacctaattaaggcttgttggtttcacctgtgagattactttttgtaac

SEQ ID NO: 353395 - DNA, 567 bp, Homo sapiens
gcttttgtccttctttctgttaatatgatgtatcacattaattgatttgtatatgttgaacaatccatgcatcccagtgactaatcccactgggacctgaaaatcattgtttaatgtatcgttgaattcagcttgcaagtattttgttgcraatttttgcaacaatattattcagagatactggcctgtagttttctgttttttttttaatgtgtctttgattttggtatcacgtaatacttggttgtacaatgagtttggatgtattccctcttctgccattttttggaatactttgagtagtgtttatattagttcttctttaaatgtttggtagaattcagcagtgaatccattgggttcaaggcttttctttacctgaaggtattttattgcagctttgacctcaccacttgttacttgtctgttcaggttttggatttcttcatggtttaatcttagtaggctttatgtgtctaggagtttgtacatttcttctattggaattattggaatattgttgttcacattagccacaaatgatctattaaattttttcagtatcag

SEQ ID NO: 353396 - DNA, 567 bp, Homo sapiens
gcttttgtccttctttctgttaatatgatgtatcacattaattgatttgtatatgttgaacaatccatgcatcccagtgactaatcccactgggacctgaaaatcattgtttaatgtatcgttgaattcagcttgcaagtattttgttgcaaatttttgcaacaatattattcagagatactggcctgtagttttctgttttttttttaatgtgtctttgattttggtatcacgtaatacttggttgtacaatgagtttggatgtattccctcttctgccattttttggaatactttgagtagtgtttatattagttcttctttaaatgtttggtagaattcagcagtgaatccattgggttcaaggcttttctttacctgaaggtattttattgcagctttgacctcaccacttgttacttgtctgttcargttttggatttcttcatggtttaatcttagtaggctttatgtgtctaggagtttgtacatttcttctattggaattattggaatattgttgttcacattagccacaaatgatctattaaattttttcagtatcag

SEQ ID NO: 353397 - DNA, 586 bp, Homo sapiens
aatgacatgatatctgcctgtgtaacttgtacaagctcataaaatgatgcagcttttgtaacgagatatttggcaatttatattcaaaccttaaaatattcatatcctctaacttgggaattccacttttaagtagctatgcaaaagaaagacatggcagaggcatacttattcccaaagttgtttgttgcagcrttatttataatagtttgaatttaagcttcatgaagtccacatacatgcgcacacacacaaacacacgtgtacatgtacagatatatatatctgttgtatttgcagtgacatgtacaggaactggcacctgataaatactcaataaatatttgttaaattgattgaagagcaaacattaagagaaaactgaatgctcaacgagacagcttaagtatattgcagtatatttatataacgaagacaactattatgatacctattaagggttaaaatatgaagaggaatatttataatacaaaatttaaaaagcaaaatataaatctgtaagtatgctataatctcaactataattttttttaaaaaaaacaaattgtagaagactaaatatgga

SEQ ID NO: 353398 - DNA, 594 bp, Homo sapiens
gaacaatgtgtattctgccgctgttggttagaatgttctgtatatgtctctgaggtccatttggcctaaagttcaagttaagtccaaggattcttttttggttttctgacttgatctttctactgctatgagtgaggtccttacctacactactcttactacatttctgtctatctctttcattaggtctagtaacatttgttttatgaatctgcatgccccattgttaagtgcatatatatatatatatatatatatatatatatatatatatatatcggattgttatattgtcttgctgaattaaccaccttattattatgtaatgacctgttggttttttttaccatttttttatttaaattctcttttattttatataagtttagctaytcctgctcacttatgatttccacttgcatgaattatcattttcaactctttcatttatatttgtctttacatgtaatatgaatttcttgttagaagtatataattggataattattaaaattcattccacccgtatatatttttaagtgggcatttaatttatttgtgttcatggttaatattgatatgtggggttttgtt

SEQ ID NO: 353399 - DNA, 566 bp, Homo sapiens
aatgagaaggctttttctcagaatcrtttttcagctctgaggctgatccttggtgtaacctgaggggtgttcccttctgtctaactccctcctttcccatcattttgcttcatttattttcgccttctgtgtttagtttttacactatctctttgccttccacctttattcctctaagggtggggcaattgcattttgcatgactggatgagggcaggggaagaagatcagcccatccctgggcaaccacatagcacagaagcaaggagccgtgtctctagagtcagacaccagtgagttgaatttggcttagcacatttttagctctgagaccctgggcaagtggctgtattagtctgttctcacactgctaagaaagacatagctgaaactgggtatttcataaagcaaagaggtttaattgactcacagttccacatgtctgtggaggcctcaatatcatggcagaaggtgaatgaggagcaaagtcacatcttccatggcagcaggcaagagagcttgtgccaaagaatgctcatttatgaaaccatcaggtctcatgagac

SEQ ID NO: 353400 - DNA, 566 bp, Homo sapiens
aatgagaaggctttttctcagaatcatttttcagctctgaggctgatccttggtgtaacctgaggggtgttcccttctgtctaactccctcctttcccatcattttgcttcatttattttcgccttctgtgtttagtttttacactatctctttgccttccacctttattcctctaagggtggggcaattgcattttgcatgactggatgagggcaggggaagaagatcagcccatccctgggcaaccacatagcacagaagcaaggagccgtgtctctagagtcagacaccagtgagttgaatttggcttagcacatttttagctctgagaycctgggcaagtggctgtattagtctgttctcacactgctaagaaagacatagctgaaactgggtatttcataaagcaaagaggtttaattgactcacagttccacatgtctgtggaggcctcaatatcatggcagaaggtgaatgaggagcaaagtcacatcttccatggcagcaggcaagagagcttgtgccaaagaatgctcatttatgaaaccatcaggtctcatgagac

SEQ ID NO: 353401 - DNA, 401 bp, Homo sapiens
attgaggttagtgatgcaaactacctcagtgctgtaaacagaaacaggcrgggttgcacagggatgctataaagatgtccaccacgcctgtctttcatatgtacaaaagaaaggtacatcagaggaggtaagtatccagagcactcaccacaatgtttgacccatagttagcaattaataaacgttagttatctttattttaacaatttccatggtcaaagttgctgattgtctatatatagatgccagaccaagaagaaagatcgaaaaatatcttaattttctctgtacgtttctttgtgatggtgagaagaaattatttcttccatgccaagcagctggttgggtcaaatatctccagaacattatggttttatttgtgtaattaattaaaacttttt

SEQ ID NO: 353402 - DNA, 593 bp, Homo sapiens
tgctgattgtctatatatagatgccagaccaagaagaaagatcgaaaaatatcttaattttctctgtacgtttctttgtgatggtgagaagaaattatttcttccatgccaagcagctggttgggtcaaatatctccagaacattatggttttatttgtgtaattaattaaaacttttttcaatatcactttcataaatcttgaatatgaagtacctataaattgacttagctctggtttatagattggcaatgtaaaaatgtcatatattctatatccttgtaagtcaaccataattcatttaagatttggagaatgggtaatacaaatggagtagaaagaaaaactataataggaacgtatttagttaaaaaatgtaaaagaaaagtttttaaaaacaaagaaagcatgtttgaaaaaagttgtaaaaattaaggatctaatacacaggtctagatacctgctcaaacacataccttctaagatccactgatgttgaaaacttgattttctcacaaacatagccccaggtgattgggaagagtctgagaattcaacctaattwcctgaatcattttaggatttggaaatga

SEQ ID NO: 353403 - DNA, 623 bp, Homo sapiens
ttatttctgcatgtgtctttggtrcctttctgtctttctgtttctctgcctttgactccttatttaggcacgtagcctctcactctttctttgtctgtctttcccactctgtcagtttctgtctctgtctccctctccattcccatctcctttccaaacatccagaaaacagatctatccaagggattgagaatcagccagagactccagccaggtctatcctaactcgtggaccttccgaaacctggcttgcagtgaccgcacatgaggttttagtcatgctttgatgaagtcgctattgtgggcttgagttgcatgcttttcttccggagaatttctttcagtggagctgcctaatcaggtttaggtgttaattaaataactgctatttgcattcttgttctgtggcaacttggtgttgtattaaattttaatttggcctaagctggataagatgattccttcagtcaacaaagaaggttgtattagcaggttacagatgtaattaggcagagcttgactgaagtgctaacagattcacatacaggaaaggaattagagatgagcacgtgtgcactcattattcattgtagttgctggggtctgtcagtaaccaggacccc

SEQ ID NO: 353404 - DNA, 566 bp, Homo sapiens
tagcttcaagatttccacagagaggttaaagacacaccggttttatattttgtcgcatatgttttgcagatatatttgatcaagaaaacttgctgagccaaacatcaagccattggccaggaatctcccctgtagtgaccccaagtggggtcaagtaggtggaagttactacctrgtttctctaagctgctgatgggcattcgctgcctacaaggagagatagaatggaaggatctttcaaacactttccactcttccccatattggctatcaaccgcttgacataaaaatcatgcattgagctgaactgaatttttattgaatttttcaccaagtactatcttatctgaaatgactttcttcattttcttcagggaacaacagatatttgagttttgaaagcatataccaagatgctagtatgttatcagaggacacaaaaatagagtttaaatgttgggctaggccggctccagagatatctaatgcctagcactgggattgcaaattatcatttaagttgagccaaacatcctaggttttctctcactgaagtttacagctgt

SEQ ID NO: 353405 - DNA, 566 bp, Homo sapiens
tagcttcaagatttccacagagaggttaaagacacaccggttttatattttgtcgcatatgttttgcagatatatttgatcaagaaaacttgctgagccaaacatcaagccattggccaggaatctcccctgtagtgaccccaagtggggtcaagtaggtggaagttactacctagtttctctaagctgctgatgggcattcgctgcctacaaggagagakagaatggaaggatctttcaaacactttccactcttccccatattggctatcaaccgcttgacataaaaatcatgcattgagctgaactgaatttttattgaatttttcaccaagtactatcttatctgaaatgactttcttcattttcttcagggaacaacagatatttgagttttgaaagcatataccaagatgctagtatgttatcagaggacacaaaaatagagtttaaatgttgggctaggccggctccagagatatctaatgcctagcactgggattgcaaattatcatttaagttgagccaaacatcctaggttttctctcactgaagtttacagctgt

SEQ ID NO: 353406 - DNA, 385 bp, Homo sapiens
ctggtctcaaactcctgagcccaagccttccacccacctcggcctcccaaagtgttgggattacaggcgtgagccaccacaccctgcagcttctccttttttctcgggtctcaacttaagcacttcctttcctgggaccatttccctcatcattctgagaacatcccacctcagctcctttttgagtcattatccatcgttatcgtcttcacagaactattgtccrtctgaaataatctcagttgtgtttatttttttaatttacttatgcatctattagctgaggtccccgttagactatcagcatcatgagaacaaagaacaggccagagaaggcacccctggatttttagcacccaggacagtgcctgtggtgttgtcgaat

SEQ ID NO: 353407 - DNA, 643 bp, Homo sapiens
cttacttacttgctgttataaacagactattcattcgtctattcattcagcatgtgtttatgaatctctaaccatgtgtctagttcttttctaagtgttagagatatggtgtaaaatataacaatttatggccatttgaaatttactcttagagataaacattaaattaatatttataaaaactattttcaaactactgtgatatgaaggaaattttggaggtgaaggaaatgcattatatcttggttatggtagtggctaaggtcaaaagccatgaaattattagtgattttcttcctatataaattttacctcaataaagtttatttaaaaaaagataaagtaataaaacatttaggaataagttcaggcaaaatatgcacaatacatacattcagaaatctgtaaaatattagagaaataggaaatatatcatatgtattgattaaaaggtacaataatataaagatttcaattctcccaaagtcgatatatagaatcaatgmaggcatcccccccgccaatttcttgtgtttgttttgttttgttttgttctgttttgttgtgttgtgttgctgagaagtccaccaactaataaatctgaaatttatttggaaggacaaaaagcccaaattaaaaatgc

SEQ ID NO: 353408 - DNA, 386 bp, Homo sapiens
aagtgtgccattgaaagtcctattctctctgcctttcttcgttttttttttttttttccctgatggacacgcactcatagaaaaaaatacttatgtgtaaaatgccatggtacaataatatacatggctcaaatgctgtcaaattataataacatcattgcagtgtgtagtgtattgagtcaraatgttacagcaatgagattgtcacatatgctgtctattgcaccaattcaactctgccattgcagtataaaagtagacatagacaatatgaatgaatgtgaacatgaatgtttttaataaaactttatttgtgacattgaaatttaaattttatgtagttttacatgtcataaaatattattccaatataatttattaaaaaa

SEQ ID NO: 353409 - DNA, 615 bp, Homo sapiens
cttaaacacgtgatgtgctacaaagaaatggctgctgccacttttattttagttcaattgtctttgaactacattttatcagcaatctaaacatatcataaactagaaacagaacagaaatgggaaattgtttctctacctattacatctatatctatttacttaaacagtttatccacacctatattttttctcttgtggtcagggaaacttttgaagggagcaaatactatcacctacaagatggactagggctttgggactcagtcagagtctatgattttagggagcaggaggaaatagaattttacatctatattttatttaygaatatagcatttccacatgcataagccaattcctagacagaaatgtaacattgaaatgcatccatgaatccttttctttaaaaagaaagggaaaaaatttgacaattgctaattggttaattagcgcttaactaaagtgactccaaatttgagcactcccagatgaacagtaggaaaagcaagcaggaaacaaatgtaatgccttgaagtgaaatgcacacggctgttagtcagacaaacagctggcctgttttcttgcccatcctttttgaggagtgatttccta

SEQ ID NO: 353410 - DNA, 547 bp, Homo sapiens
caggttgtacttgactgcagctcagacacagaccaaagcctctagaaaaacatgtgatgcgttcaatcccgtgttcctactgagcatgcatgtgttcagccactttgagattgcctcattccccagggaagctcctggcaacatactcttagtcagaatctcaggtatcctaaaataggccagcaaagatgtctgtgatggcagatgctcttgttttaatgtcagtaaaagatgatggggttgcatagttgcctcacattcccagtgtccttaaatttccctgtggcttcacagctaagcaattgttcttgttgaggcactgagctttggaaggtgtttctgtcataaaagtccaagcatattagagatgtctaatgtttgagaagagctgaaaattatttcataacaataataamtaatgtttattaagcacttacatgccaaacacattttatacatgatcttttggatgaatgattatcctacttcatgaaaaccattaaactgcagtaaaccaggactgagagttttgaaatttagttcattc

SEQ ID NO: 353411 - DNA, 595 bp, Homo sapiens
taacatacagccaagtgcagtggctcacacctgtaataccagcactttaggaggccgaggcaggcagatcctgaggtcaggagttcgagaccagactggccaacatggtgaaaccccacctytactaaaaatacaaacagattagccaggtgtggtggcaggcacctgtaatcccagctgctcaggaggctgaggcaggagaattgtttgaactggagaggcggagattgcagtgagccaagaactcacagaaagaaaaaaagaaataaataacatacaatggagcaagcttttcagtgcaaaccttacaggccaggaaagaatggcatgacatactaaggtaaaagaaaaaaaaaactttaaccttagaatagtatatccaggaaaaatattcttcaagcttaaatgaaaaataaaaactttcccagacaaacaaaaactgatagacttcagcaacaccagacctgtcctacaagaaatgctgaagggagcacttcaatcagaaagaaaaggacattaatgagcaatgagaaatcatctgaaggtaaaaaaaactcactggtaatagtaagtacatagagaaacatagactatt

SEQ ID NO: 353412 - DNA, 622 bp, Homo sapiens
taacagaaaatggagaaaattgtggatttaggtgttatactcctcctccttggataaaaaaccatgtaatatttttcaccttctttttaattagtgaatatatatatatattatttttttaatgtgaggttttaaaaatcttttgtagaacactctttgtaatgcatgaatatcacgagcaggttattttaatattttacaattaggatgagacagcctggacagaggctccttttgatgtgagtcctcctaaccyagttgcagttttctcaaggttgttcaggggccaggcctggatagaaagggagaagaaagggtcccatcagtgctggctgtatcatattgaatttttctttcctttctcttgggctttaatggtaccctaccacagtaggggaaaggtaagagcgaaattatttgtacatgttaagcactgtgagaagctttgcccttaagcactgaatttctcagtctgactaagaagaatgaagaattaaagtgaaagtacatgacttccctcagagttcactgagctccttccctaggacccaaactttactctcattattgagttgctgaaatggtttggttgtgtacactgtaaagaactgtatgaatattg

SEQ ID NO: 353413 - DNA, 654 bp, Homo sapiens
atattcttatgggattatggctattgctactttttaraacatactagtggaaaattacctgaacaaaaactctgtattttttatactacttattatagtaggatgcatctttattaaaaatcatgactcctacagagaaatagtaaaaatagtcatgatctggaatatcattcaaatgaacactgctgggaataagcaaatccaagaagaaccagactttacttcttggtttcactgcccactcacaccttcccaagaagaatgccatctacagttccatattgccttttttttttaaaatttctagagcgttttcattttaatcatgtacacaccccttcccactaaactcttcttctttaggggtgcagacattgaagtgttttaataatcatttacagaatgttttgcatcttctaaagaatatctgaggaattcaacaatttttcttacatttttcatttatctttatttttaacttttatgggtacatggtaagcatataaatttgtggggtacatgagatattttgatataagaatataatgtgcaataatcacattgggaaaatgggatagtcatcacttctagaatctatcatttatttgtgttacaaatgttacaattatactcttgtagttatttttcttttta

SEQ ID NO: 353414 - DNA, 591 bp, Homo sapiens
tatttggtgtgaaagtttgttttgcaaaacaatataaaatttccaaaatctaccagtacttggagaagaaaacctcagaaagcatgctctggtgggctctccctcatctgtcaatggagacatgcatttttgcaattcagtgtcagatctggctcgcatgaaaccccgattgtcttttcttctgatgacaaacataaactgaccacatcagaagggatactgatgaagacagcttttcttgtcaccaagtaatgaacacccacttcagcccttatgagtcgagaatagatgaattcccatctgtcacagattatcagatatttctgcatctgttcaacaaaggtaattattaacaatacaattaaagtaggactgcatctgtggatttsctatctttttcctttgctaatcttccatattttgctttttggtcccaagatgatagaataaacatgctttttggatgcaagagggcatctaatccaatattccttaattaatgtaagcttttaaaaatcattccaatatccttagatggtctttgaatacctaggcagaatgagaaaaaaacctcaccgcacttatttaaaa

SEQ ID NO: 353415 - DNA, 492 bp, Homo sapiens
cttggggactacatgtgtcctctgaatataactaatcctaaaaccttttcccttgtatttgacaagacagagaaaagtaatkgatcttattagaagtaactgtgtgaatccacacaattgttcaaatgttcttgaaacatttgcatttgctgtcagtacttgcagagtttcaccgaaaaaataatcctgagatttagtgaatccagttccctcatttcactaatgagactcagagaagagaactgaggtacccaggaccatacactcacttagtttatggcaaaaatgagaataagaaacagaattttaggtttctattttaggacactttcattatagcacagctgccttcttaattagctataaaataataaaaggtcacttttgaaataaaagttgtaagtaaaagattattataccccagatatttaaatatatctgtaataaatagtgctatgaaataccagtttcataattgagagcatttcagaa

SEQ ID NO: 353416 - DNA, 602 bp, Homo sapiens
gcagctactcctcaaccctttcaaacagaggaacctgcagyggaattgggcccctggctcttgctcctgttttcttcaatgtccagatttatttgttttcaggcttggatgatgatacatatttaagtccttaggtttaaaaaaaaaaccaaaacaaaacaaacaaaaaaaaaaaacaaccacccacagaaatccctctactctgtccttcagaaaggacaacagggtatggggccggagtagggtggagtagaaaaacagcttacactcactgcctttagataagaggtaactgatggtaaaatgccaagcaggcagaaagaggggccgtaagacacttcttgtctaacgttttgccctccctccactgttgtcactctgtgtagaatcctggctggcaaggctggcttggatggatacttatgcttagacctcacacaattgatttgcttagggctaggtgccaggcttctcttccagcccataaacaactaatcaaattaatggatgctgctgctggttctcatcaaatgccattaaaatataactctttcatgaataattctaaacattgactcaaagcaattgattacaagaactat

SEQ ID NO: 353417 - DNA, 602 bp, Homo sapiens
gcagctactcctcaaccctttcaaacagaggaacctgcagtggaattgggcccctggctcttgctcctgttttcttcaatgtccagatttatttgttttcaggcttggatgatgatacatatttaagtccttaggtttaaaaaaaaaaccaaaacaaaacaaacaaamaaaaaaaacaaccacccacagaaatccctctactctgtccttcagaaaggacaacagggtatggggccggagtagggtggagtagaaaaacagcttacactcactgcctttagataagaggtaactgatggtaaaatgccaagcaggcagaaagaggggccgtaagacacttcttgtctaacgttttgccctccctccactgttgtcactctgtgtagaatcctggctggcaaggctggcttggatggatacttatgcttagacctcacacaattgatttgcttagggctaggtgccaggcttctcttccagcccataaacaactaatcaaattaatggatgctgctgctggttctcatcaaatgccattaaaatataactctttcatgaataattctaaacattgactcaaagcaattgattacaagaactat

SEQ ID NO: 353418 - DNA, 602 bp, Homo sapiens
gcagctactcctcaaccctttcaaacagaggaacctgcagtggaattgggcccctggctcttgctcctgttttcttcaatgtccagatttatttgttttcaggcttggatgatgatacatatttaagtccttaggtttaaaaaaaaaaccaaaacaaaacaaacaaaaaaaaaaaacaaccacccacagaaatccctctactctgtccttcagaaaggacaacagggtatggggccggagtagggtggagtagaaaaacagcttacactcactgcctttagataagaggtaactgatggtaaaatgccaagcaggcagaaagaggggccgtaagacacttcttgtctaaygttttgccctccctccactgttgtcactctgtgtagaatcctggctggcaaggctggcttggatggatacttatgcttagacctcacacaattgatttgcttagggctaggtgccaggcttctcttccagcccataaacaactaatcaaattaatggatgctgctgctggttctcatcaaatgccattaaaatataactctttcatgaataattctaaacattgactcaaagcaattgattacaagaactat

SEQ ID NO: 353419 - DNA, 602 bp, Homo sapiens
gcagctactcctcaaccctttcaaacagaggaacctgcagtggaattgggcccctggctcttgctcctgttttcttcaatgtccagatttatttgttttcaggcttggatgatgatacatatttaagtccttaggtttaaaaaaaaaaccaaaacaaaacaaacaaaaaaaaaaaacaaccacccacagaaatccctctactctgtccttcagaaaggacaacagggtatggggccggagtagggtggagtagaaaaacagcttacactcactgcctttagataagaggtaactgatggtaaaatgccaagcaggcagaaagaggggccgtaagacacttcttgtctaacgttttgccctccctccactgttgtcactctgtgtagaatcctggctggcaaggctggcttggatggatacttaygcttagacctcacacaattgatttgcttagggctaggtgccaggcttctcttccagcccataaacaactaatcaaattaatggatgctgctgctggttctcatcaaatgccattaaaatataactctttcatgaataattctaaacattgactcaaagcaattgattacaagaactat

SEQ ID NO: 353420 - DNA, 633 bp, Homo sapiens
cctttaggtcaatggcagaatacatatacaatggtagtagtcccgtgacattataatattatatttttaccatacctcttctatgtttagatatgcaaatacttactattgtgttataattgcctacagtattcagtacagtaacatgctataataatcagttctcacattgctataaagaaatgcctgagaccaggtgatttataaagaaaagaggtgtgattggctcacatttctgcaagctgtacaggaagcctgatgttggcatctgctgggcttctggggaggcctcaggaaacttaaaattatggcagaaggctaaggggaagcaaccacatcttacatggcctgarcagcaacaagagacgggggaagtgctatacttttaaacaaccagatctaataagaactcactattgcaacaaaagcaccaaggcagatggtgttaaaccacgagaaactgcttctatgatccagtccgcctcacaagcccctacctccaacattggggattacaatttgacatgaaatttgcatcggagcatgtctccaaaccatatcattctaccctcttctcctcccaaatctcgtgttcttctcacatttcaaaacactatcatgcattcccaacag

SEQ ID NO: 353421 - DNA, 525 bp, Homo sapiens
gttctttactttggaagggatgctccagcattctccaaaccagcatgctcctaaaatcttcactgacgtagtgagcccctgcatcttctacagcacatgtatcttaccaagacctcgaatgtacttgccatttctagcacatccagtttgaytaacattatagcatcaatagaatgtactattaaaaaattttgtaaaatgtacacatggttcaagtcacttcagcttcaattataacagaggatgagagagttgacacaatgttgcccatcccatgtgaaccataatctgcttctgatccttcttctggtcatgcttcctaataagaatggaaaataatgtatttgccaaatagatgtctgcataccatgtactgaggctgtgtgtcttcctcttggctttcctcagtcttacagctcttaccctatagaccaaggaattaatatagcagttctgccaaccagcgagtatgttcaaattattcactttttagttggaaaaatgaccactgagtggatccatgaa

SEQ ID NO: 353422 - DNA, 594 bp, Homo sapiens
tgtgcatctcagactatttgctttaataytggagataaaatagctttaatggaacaggaatctatgtggcacatagaacaatgaatctcctgcctctagaaagtgtgtactagagagcacattaaaatacattgcagcataggcacactttgcaaccgcaaatcttgtttttaaggaatgaacacagagcaattctcttgtcatcttgatgtacatctaactcacccccaatgcatagctcatatctcctctctggttcccaatcattatctggcttgcctgtcccacctccatgatccttactctcaacagataacattttccctatggtatgaaaagataaaaggtcataataagcagaaaccctcacaaatgttctctctcactgttaaaaaatttttttgtaaaggaaaccataccacagtccacttcctcattccctgtttgttctccacctactgcaaaccagcttctagccacactgcactactagaaaaggttctcattaaaacaatgacgactttccaactggcaaattcaaccaccatcctttgatctcggtggcagtcaacattactcattatctctcttctt

SEQ ID NO: 353423 - DNA, 588 bp, Homo sapiens
aacatattttgccttccacaccattttcctgaaagatgtccttatctcaacatataaccaaatcaaggcctggatcccaaaccacgttgcctacttcctgtaacctgccatccaaattctagcacatttctattccaactgactcaacttactagatatttagcttacaggaagatacttacctcctctgattcacagcmcccttattggtaagcacagaatatgttcctggtgaattcaacttcaatccacctactcccagcttgtctctggtttgtcactgccattccattcattctactctccacggcctctactcaggtcattcttaagttccaacatctgtcagaatcacctaggagcttggaaaaatgcagcttcctggacctcacacccggaaattttgattcctgtagtcagtggtggggcctgataatccacattatgtttcttaagcacaggtcccatgttaggaagtactcctcagctggcagtatcagtatgagagttattttaaaaggtatataattgtcaagttattatcgttgttaagtcacctctgaatcagtggtccctccctatctctct

SEQ ID NO: 353424 - DNA, 537 bp, Homo sapiens
gatttaagtgatctaacatacatattttaaatttttctataatttgattttgccattaattctcaataatgcttccccatctttaaaacaattcaatttattcaaattgcaactatccattagttatcctatgttgcttctttcttctttcttctatattaaattsgatttggatcaatagctctttatatatttcatcagagttccagtaaagccttttgataatttcttatttaattaaaacattaatataattatatagaggagttatacatagattaatattgtaaagttaaagatactgctgagatgagatgaaatggactcacatatttgctttggttgggcatttagttagtctaaaaggcacattagcaatagaaatcaccatgtggagcgtttgtagatttagttttcatgtcagagacaggatctaccttgaaagcatttgaaaagattgctaaggagaccaaacaacaatgtcccatgccctctgactcatgtaaagtgatgatgaatacataaaaggaaacacat

SEQ ID NO: 353425 - DNA, 537 bp, Homo sapiens
gatttaagtgatctaacatacatattttaaatttttctataatttgattttgccattaattctcaataatgcttccccatctttaaaacaattcaatttattcaaattgcaactatccattagttatcctatgttgcttctttcttctttcttctatattaaattggatttggatcaatagctctttayatatttcatcagagttccagtaaagccttttgataatttcttatttaattaaaacattaatataattatatagaggagttatacatagattaatattgtaaagttaaagatactgctgagatgagatgaaatggactcacatatttgctttggttgggcatttagttagtctaaaaggcacattagcaatagaaatcaccatgtggagcgtttgtagatttagttttcatgtcagagacaggatctaccttgaaagcatttgaaaagattgctaaggagaccaaacaacaatgtcccatgccctctgactcatgtaaagtgatgatgaatacataaaaggaaacacat

SEQ ID NO: 353426 - DNA, 537 bp, Homo sapiens
gatttaagtgatctaacatacatattttaaatttttctataatttgattttgccattaattctcaataatgcttccccatctttaaaacaattcaatttattcaaattgcaactatccattagttatcctatgttgcttctttcttctttcttctatattaaattggatttggatcaatagctctttatatatttcatcagagttccagtaaagccttttgataatttcttatttaattaaaacattaatataattatatagaggagttatacatagattaatattgtaaagttaaagatactgctgagatgagatgaaatggactcacatatttgctttggttgggcatttagttagtctaaaaggcacattagcaatagaaatcaccatgtggagcgtttgtagatttagttttcatgtcagagacaggatctaccttgaaagcatttgaaaagattgctaaggagaccaaacaacmatgtcccatgccctctgactcatgtaaagtgatgatgaatacataaaaggaaacacat

SEQ ID NO: 353427 - DNA, 551 bp, Homo sapiens
tagttgttacttttattgtttttgtcattgttttcattctttatccttattactagcagtataagtgcagttttataataccaagacaactaaaaggatggtcctaagtagctattattcacatatctatttttctttttttttttttttttttttaraaacaaggtctcactctgtcacctatgctggactgtaatggcactatcatggctcactgcagcctcaaattcctgggctcaggggatcctcctgcctcagcctcctagagtagccaggaccacaggtgtgtaccacgatgccttgctaattctttaaaaaaatttttagagagacagggttttgccatgttgcccaggctagtctcaaactcctgggctcaagcgattctcctgtcttagccacccaaagtgctgggatcacaggcgtgagctgcctttgcctgacctcacattatctatcttaaagaacacctattgggaagatctttctcagaattcattttatcaaggagagaaaacatctctgtggcacttaataagtgcccagcagtg

SEQ ID NO: 353428 - DNA, 583 bp, Homo sapiens
cccacacatgaatgaaacttaatgaacaactaagacacactaaaggaagacaaatttcttttagtaaagctttctaatcaacttttctctttatggagtctttctaggttatgccctaataataatgatagttctaacagtaatagtgacagtactaggttagcagcagctgtagcaatagtagcagtgtaagcatggaattcagaatcaggtaaatctgactccaagactggatcatctgctcactagttgtgtgaccttgtggaagttaattaatcccctctagccctaatttttttaactaaaaaatragcatgagagtgtctgccttacagaatggttaggaataagtgagatgattaatataatcacctagaatacacctgacatataataataggtccttaacatcagtaatgttcatttcttctattttcccgactcttttttcattcttttttttttttcaattagaatggaaagagcaggatgtctgggagtttccaaaagcattattcatctgctgacattggcatgctgccatccatacctcccaaataaactactcccagcacctaaaata

SEQ ID NO: 353429 - DNA, 608 bp, Homo sapiens
tcaacacccatttatgacagaaactggcaacagactaggcattgaaggaacatacctcaaaataataagagccatcaatgacaaacccacagccaacaccatactgaatggcaaaagctcgaaccatgttcctggrgaactagaacaagacaaggatgcccattcccaccactcctagtcaacataatactgggagtcctagaaagagcaatcagggaagagaaagaaataaaagatatacagataggaaaagaagtcaaactatctctctttgccaatgatgtgattctaaacctagaaaatcttgaagactctgcctaaagcctcctagattgataaatgagtttagtaaggcctcaggatctaaaaataaatgtacaaaaatcagtagcatttctattcaccaacaaagtccaggctgagatcaatgacacaattccacttacaacagccacaaagaaaatgaaatacctaggaatatagctaaccaaggaggtaaaatatctctacaaaggagaactacaaaacactgctgaaagaaatcagagacaatacaaagaaatggaaaaacatttcatgctcatagattgcaagaatcaatattgtaa

SEQ ID NO: 353430 - DNA, 608 bp, Homo sapiens
tcaacacccatttatgacagaaactggcaacagactaggcattgaaggaacatacctcaaaataataagagccatcaatgacaaacccacagccaacaccatactgaatggcaaaagctcgaaccatgttcctggagaactagaacaagacaaggatgcccattcccaccactcctagtcaacataatactgggagtcctagaaagagcaatcagggaagagaaagaaataaaagatatacagataggaaaagaagtcaaactatctctctttgccartgatgtgattctaaacctagaaaatcttgaagactctgcctaaagcctcctagattgataaatgagtttagtaaggcctcaggatctaaaaataaatgtacaaaaatcagtagcatttctattcaccaacaaagtccaggctgagatcaatgacacaattccacttacaacagccacaaagaaaatgaaatacctaggaatatagctaaccaaggaggtaaaatatctctacaaaggagaactacaaaacactgctgaaagaaatcagagacaatacaaagaaatggaaaaacatttcatgctcatagattgcaagaatcaatattgtaa

SEQ ID NO: 353431 - DNA, 385 bp, Homo sapiens
taattaagtgggatttttctcagatattcaaggctggctcaacaattaatgtaatctctcaaatcaacaagccaaataakaaaatttatatgattatatcaatagatacagaaaagtacccattcatgatttaaaacaaaacaaacaaaactctcaggaaactaggtatagagaaagactttctcaactcgatatagaaaattaacaaaaaacccacacctaacattatacttaatagtgagagactagatgctttccccttatgattaggaacaaggcaaggttgcccctttcatgactcctattcaacatcataatataaatcctagcttatgcaatgagacaagaaaaggaaatgaaaggtaaatagattgggaaggaaaaa

SEQ ID NO: 353432 - DNA, 507 bp, Homo sapiens
gacactatgctcctaatgactggaggtggtcaaattctgtctgttatctgaaagaaaacggtcttgatcgtagcttaacatgaccaggcaggtgacttctcaggccacagagagtcaatttttagttggatacctagagtcctgatttcacaatcaccttctccttttcccttttctaccttttcttcagggtccagagtccattctgctttaacattttgtgatcaaagttccatcctaaaaagaatacgttagacctttccactcttcaaaaaagaccagctacaaaataaacaaatgtcttattgctartattgagtgcctcttctggcaaattcctggtgcttgaatatgacaaagtaaaagacattctccattataacagtggggattcaaaggagcaaaggcaagagaaaatcgtttcctgccacaatttaataaataagtagaagaagaagttccctaaagtcatgttcaaccctgatatttccacaattctataattcc

SEQ ID NO: 353433 - DNA, 608 bp, Homo sapiens
gaaatagttcagatgtggatctacttgctgctgacctcaggcacattacttaatttctctttgcctcatatttcttctatgatgattctcagccaatcagacttgtatgtggtgggtgtctggttaatgaaagttgggtttcttcttattgtgtccccatcataaccagtaccaacactataacacatcttggactttgccttagagtagggtttgatatacatgacttgtctcctcctctatggtataaactgcttttcaagaagggcatatgtatatccctgtgggcccagtgtaccttccacagcatatgttcagtgcatgctcacagctaggaattaaattaatttttatttatagaaaaagagtgaactttgcttcaaaaggcaaagtaaaygataattaatgtagacatttctccaaacaagacacacaaatggccaacaggtatatgcaaatatgttcaacatcacttatcatcagggaaatactaatcaaaaccacaatgagatattattttacacctgttaagatgcccataattaaacaaaaaaaaaaaacaagaaaataacaatgttggtgaagatatggaaaagttggaacttttg

SEQ ID NO: 353434 - DNA, 607 bp, Homo sapiens
atgtaccccaggggccactttggagtgatacaggtgaaaggagtgtcttttattactcaaaacaagcccctctcaacctcagctgagttgatgttaataaggtgatattttgaaaagcccctaaagttgggcagctggtttccaggggaaccaacatgattagagggttggaactttcagcctcaccacacccccaacctctggggttgggagaggggcyggagattgtcctcaatcaccagtgaccaatgatttaatcaattgtgcctatgtaacaaggcctctgttaaaatcttaaactatggtgttcagatagtttctgggctggtgagcaggaactcctctacatgctgggagggcggtacatcctcaactccacaggaatggaggctcctgtgcccaggacccttccagacctcatggcttattatctcttcatctggttgtccatttctatcctttaacttattctttttaacacattagcaatagtaagtaaacttttcctgggttcattgagctgttctagcagattatcaaacatgaggagagaacttctgatttgtagccacgtcagagagaagttgtggataacctagatacccac

SEQ ID NO: 353435 - DNA, 607 bp, Homo sapiens
atgtaccccaggggccactttggagtgatacaggtgaaaggagtgtcttttattactcaaaacaagcccctctcaacctcagctgagttgatgttaataaggtgatattttgaaaagcccctaaagttgggcagctggtttccaggggaaccaacatgattagagggttggaactttcagcctcaccacacccccaacctctggggttgggagaggggccggagattgtcctcaatcaccagtgaccaatgatttaatcaattgtgcctatgtaacaaggcctctgttaaaatcttaaactatggtgttcagatagtttctgggctggtgagcaggarctcctctacatgctgggagggcggtacatcctcaactccacaggaatggaggctcctgtgcccaggacccttccagacctcatggcttattatctcttcatctggttgtccatttctatcctttaacttattctttttaacacattagcaatagtaagtaaacttttcctgggttcattgagctgttctagcagattatcaaacatgaggagagaacttctgatttgtagccacgtcagagagaagttgtggataacctagatacccac

SEQ ID NO: 353436 - DNA, 607 bp, Homo sapiens
atgtaccccaggggccactttggagtgatacaggtgaaaggagtgtcttttattactcaaaacaagcccctctcaacctcagctgagttgatgttaataaggtgatattttgaaaagcccctaaagttgggcagctggtttccaggggaaccaacatgattagagggttggaactttcagcctcaccacacccccaacctctggggttgggagaggggccggagattgtcctcaatcaccagtgaccaatgatttaatcaattgtgcctatgtaacaaggcctctgttaaaatcttaaactatggtgttcagatagtttctgggctggtgagcaggaactcctctacatgctgggagggcggtacatcctcaactccacaggaatggaggctcctgtgcccaggacccttccagacctcayggcttattatctcttcatctggttgtccatttctatcctttaacttattctttttaacacattagcaatagtaagtaaacttttcctgggttcattgagctgttctagcagattatcaaacatgaggagagaacttctgatttgtagccacgtcagagagaagttgtggataacctagatacccac

SEQ ID NO: 353437 - DNA, 395 bp, Homo sapiens
cattctttcagagcaaagtctaaagacagctacacaaaaatgaaagctgagtgggaaaacttaattggagatttgattgtgtccaatccctaacttttaatcttatttttcattgaactctgcacatacaacatacatatcaacaaatatatacacatacagatatataaccccgggtttgcttaactacagaatatgaagtaaataagaaccaggcaaccacttcacacttgccactagacacattatttgagtaagttgtgatggacactacgttgttcttatatgttaatcgggtcaaggccatctgatcttgattctaagagtacttagcagaaaaaagttatgtaagagratcagtttgtttattttagccacataatggcaaacgtaag

SEQ ID NO: 353438 - DNA, 556 bp, Homo sapiens
gaaatgcattaatcttcttaatgattgaattgcctctttttaaggctgtacctcctaacactctgaaaatggcaatcaatttcaacrtgaattttgagaaaacaaaccatattcaaaccatagacattggaaaccacttaactaattggtagtacaattctccccttagtttttcttcctttggcaatatgattcctacttcttcccctttctttcttactttcttttgtggttcccatctattctttctcaactgtggctattcaatatacttagtagtagtagtagtagtagtagtagtagtagtagtagtagtagtagtagtattggaattattattactattgtttaattgtatttgctttggggagaagataaagaagaaatcttcaaggatgcccagtgtttggcttagtcttgagtagaccacaaggctcatgggaggaagactctttacagttaaagtcagcctaattcctacaattatatttctgtctaatagatgctttggctagggagatgaaatagcaacaccatactctgtgggtaaatgatg

SEQ ID NO: 353439 - DNA, 618 bp, Homo sapiens
tcaattccaccactccacccctgcttcaaaatgtcatcattttttgtttggatttatagaatagccacctaagtgggctttctgattctgttcttatccctctacagtctaccctatggagcacacgttcctaaaacttttatattcaaatcatgcttcttaatacatcttcaaggtagcttgatgataaaggtcaaaccccttacccacttgtttctctaacatgtttctttttatttttcctttggtttatacacttcagggaaattgattttcattctctttctggaacattctacatttattcctcatgaaggccgttgctcttggctacccttctgcttggattctctgcttccagatctttgaacggttgccttgttgtagtcactcagttctcagtttcaatatccctcccagtttaaattccctcccaggaatgactttcctgactttttggacaaaattgcccaaccttccctagtcactctttcttatagctccttgcttattttttttttcatagcacattttrgtctccaaaattatatttggtaatatgactttgtcctgttcgttacaatagtcttagctctgggacctgtgcctgattaatac

SEQ ID NO: 353440 - DNA, 618 bp, Homo sapiens
tcaattccaccactccacccctgcttcaaaatgtcatcattttttgtttggatttatagaatagccacctaagtgggctttctgattctgttcttatccctctacagtctaccctatggagcacacgttcctaaaacttttatattcaaatcatgcttcttaatacatcttcaaggtagcttgatgataaaggtcaaaccccttacccacttgtttctctaacatgtttctttttatttttcctttggtttatacacttcagggaaattgattttcattctctttctggaacattctacatttattcctcatgaaggccgttgctcttggctacccttctgcttggattctctgcttccagatctttgaacggttgccttgttgtagtcactcagttctcagtttcaatatccctcccagtttaaattccctcccaggaatgactttcctgactttttggacaaaattgcccaaccttccctagtcactctttcttatagctccttgcttattttttttttcatagcacattttagtctccaaaattatatttggtaatatgactttgtcctgttcgttacaatagtcktagctctgggacctgtgcctgattaatac

SEQ ID NO: 353441 - DNA, 652 bp, Homo sapiens
ttattcacataagaataacacgtgaatgtatcctcttttcattgtatcacttaacartagagcctaaacagtaaaatttgcaagttgaaaattattggttgctatgttgatagacacactgaaattggatggatagaaagaaattagaagatgtcataactcttgttaatatcacctttacatttctgtacacattggtgtttataaagcctttcatatttttgctttcatttggattttattttagtgctgacagaggaagaaaaggtattatttcctttttagaaatgagaaagtccaatggaagagctaagaatccaggctggttttctaagagcctgttgctctttgactctctcatactgcctaaagcaactgaaactgtagagacaacacgttcattcaaaaaataactagggaataattaaaaggttttgatgacatggatagacatctggtagatggtactgactttggatttattagtactgaaggaaagtaagggaacttttggaagggaattgaaaaacaaaaaaagttacctaggaagtatgtgttattgctgctgtatccaagtattcaagctagcatctattttcaggtatttttgctacatattttacaaacattatataaattcatccccagaaca

SEQ ID NO: 353442 - DNA, 600 bp, Homo sapiens
aacagtaaaatttgcaagttgaaaattattggttgctatgttgatagacacactgaaattggatggatagaaagaaattagaagatgtcataactcttgttaatatcacctttacatttctgtacacattggtgtttataaagcctttcatatttttgctttcatttggattttattttagtgctgacagaggaagaaaaggtattatttcctttttagaaatgagaaagtccartggaagagctaagaatccaggctggttttctaagagcctgttgctctttgactctctcatactgcctaaagcaactgaaactgtagagacaacacgttcattcaaaaaataactagggaataattaaaaggttttgatgacatggatagacatctggtagatggtactgactttggatttattagtactgaaggaaagtaagggaacttttggaagggaattgaaaaacaaaaaaagttacctaggaagtatgtgttattgctgctgtatccaagtattcaagctagcatctattttcaggtatttttgctacatattttacaaacattatataaattcatccccagaacaaccttaccaggtga

SEQ ID NO: 353443 - DNA, 600 bp, Homo sapiens
aacagtaaaatttgcaagttgaaaattattggttgctatgttgatagacacactgaaattggatggatagaaagaaattagaagatgtcataactcttgttaatatcacctttacatttctgtacacattggtgtttataaagcctttcatatttttgctttcatttggattttattttagtgctgacagaggaagaaaaggtattatttcctttttagaaatgagaaagtccaatggaagagctaagaatccaggctggttttctaagagcctgttgctctttgactctctcatactgcctaaagcaactgaaactgtagagacaacacgttcattcaaaaaataactagggaataattaaaaggttttgatgacatggatagacatctggtagatggtactgactttggatttattagtactgaaggaaagtaagggaacttttggaagggaattgaaaaacaaaaaaagttacctaggaagtatgtgttattgctgctgtatccaagtattcaagctagcatctattttcaggtatttttgctacatatyttacaaacattatataaattcatccccagaacaaccttaccaggtga

SEQ ID NO: 353444 - DNA, 621 bp, Homo sapiens
ggcctgcttccctgtgtgtgtgtctgtgtgtccttttgtctttcttataggactctctcaccagatttaaggcccaccctaatccagtatgacctcatctcaagccttaccttaagaacatccacaaaggacctatttccaaatatggtcaaattctaaggttctgggtggatttgcatttgtatgagacattattcaatccactacaggaggccatagcaataacacaaacaggagataagatctgaggtaaaacagggcagaggtaggcaggaggtcacagtaaaacaaaatcggccgaagtggaggaagaaatgaaattaggaattgaggacaatccgtgtttctagctggagaaaccagttgtatttcagtagcactgatgaacatagaaacgacacgagtaagaatggatttgagagatggattcagatgtgtagagagtgtagatgtgttcagttgtgcacgaagtaaagtgctttgagtgaggctrttctcaaggaaaaagaaaaagcttaaaaatgacttaggtagttgggtgggtggtaatgctattaactgtgattggatgaataatgtagagacttttttggaagaaaataaggttagtattgaaaatct

SEQ ID NO: 353445 - DNA, 463 bp, Homo sapiens
ttattactagttaatgctgttratctctcactgtgcctaatttataaattcaattttatcgtagataggtaggaaaaaagtagtatatatagaatttggtactattcaaggtttcaggcatccgctggaggtcttgaaacataccttctaaggacagggggaataatgtatatgcaaatcacacgggaatattttaaaatgtactttgtgaatagggagaactggggtgcagccctacatactgcatttataatcagttcccacttaatgctgatgttattgtttcaaaaaacaccttttgagtagcaaaagcccagatgacaatttcttatttgcattagcctatttcctcctcagttgaatttcaatttgatttctcaaagggcaaaaggggaagaacttatacacatatgtttcatagtttaaaacctaagtctggtcacatttttactcaatgatatta

SEQ ID NO: 353446 - DNA, 463 bp, Homo sapiens
ttattactagttaatgctgttgatctctcactgtgcctaatttataaattcaattttatcgtagataggtaggaaaaaagtagtatatatagaatttggtactattcaaggtttcaggcatccgctggaggtcttgaaacataccttctaaggacagggggaataatgtatatgcaaatcacacgggaatattttaaaatgtactttgtgaatagggagaactggggtgcagccctacatactgcatttataatcagttcccacttratgctgatgttattgtttcaaaaaacaccttttgagtagcaaaagcccagatgacaatttcttatttgcattagcctatttcctcctcagttgaatttcaatttgatttctcaaagggcaaaaggggaagaacttatacacatatgtttcatagtttaaaacctaagtctggtcacatttttactcaatgatatta

SEQ ID NO: 353447 - DNA, 498 bp, Homo sapiens
tatgaaaagagagatggaattattcagttaattttttttattatatctactgctccctcaaatttactgagcctagactctgggcatagtggctggtagattagcgttagcatcagagaattgcatacaaatcaccatctttaaaataaactattggtatttgtagaatgctcraagcttacagtgggttgcaagtgcattattgaatgtgtactattcaatatataggaatagtaaatattgtcacaattaatgtgatctaaaagatatggtgcccagtctcactttgcatgcattagaaatgaaatttaaatcctgtcatcttactccaaaagcctttctcttcctcttatattacgcagctgcttttgcataaggatgagtccactgattcaaaaaaaagtatatgtgtgtgtatgtgtgaatatatatgtatatgtatgtgtttgtatatttgtgtatatgtctctgtgtatgggggtatttgttgttgttgtc

SEQ ID NO: 353448 - DNA, 582 bp, Homo sapiens
tgtgttctctcttcctctccttaatctctaccacaaaaatcacatattttaagaaaattcaaagaattcctaaaaactcacaggatgtccaatttacctcaagaagacagacagagagagagagagaaagagagagagaaatatagagggtttctttaaatttttaagtaaagttctaagatggaaacattttttatcatgaacatagaaattttacctattgtgaatcaaattgtagcctcagaatccatctaactcaaatcctaaaagtaccaattgctgttaccacagctaggtggataacaaataacttggtggtctgaatagattttggacaaaaattaaatttctgatttcctgcccagtacttagtatattgatatatkgtctatccttgaaaaatacagttgttaacattgaccagatattaaggtaactgtttcctttgtagcctttaatctcatttgcattccaactatacaaaaatgataattggtattactttagctggtagagcaactttatgtgaatttgaaaaaggcaccttttccttaagatatatccttattatctgccataaat

SEQ ID NO: 353449 - DNA, 659 bp, Homo sapiens
tttttgcttaagttagcttgtacttacttcaagaatctcaactattcctcatctgtagttttacattttcaccaatccatctgatctcactctttagcacaatcaataaagtttctattttaacacattccaaattcatatgtgacctaaagcaaatcacttaacatatccttagttagtaaaatggcacactcacttcatagagtatctgtgagaataaagtgaattaatatatataaaatctgaataatagtttctagcacacaaagaaaacaccaaatacacttaaattttacaattatttacattaataatattaactatgatctttctaaaaaaagcatacttagaatcttctttatgtttttagtttaattcatatctccaaaatgaagttttagttagtatttgcaaagcgctagagatagtgttagttacttcactcattcattcaacaagttattgaacatttcatgtttatgcatatttctgtctgtagaaagattactattaggctactatttagaaacaatcttatgctgttcaatttagggttttaattaatgagatttctcttgagttacatcttrtctgcgttaatcatcctttggcttcagagaaaatagaactgatagaaagatgttctttgaagataattc

SEQ ID NO: 353450 - DNA, 434 bp, Homo sapiens
tgcagaatctattcatgaatagagactaaaatttatctgggatctgcatgcaaagcctggctcctataaggctgcctctccccagatgagatgtcatgttctaattaacataaggactccaactcttttctgactagcaatagttgtggtcactcagatcttgcttctggggttttgcataaaaggtgccctcatatgcatctcagttatagtagcttgtggaccagatagattctgcagcatcacttttaatgtggtttctgatgyccagcccttaggtgtttccaagttttatcatctttctacacttgatctcccattaatattgtgaaccccataacagctcagtaaatttcactttagctgaagatagccagtgttgatgtctactgtttgaaatcagaattgatagagtgtataaatgcatcagtgga

SEQ ID NO: 353451 - DNA, 570 bp, Homo sapiens
ttttaagttagcaagaaaccaaatagcaatgcttaaaaaaaaaattccttcttggcagaagtcagtgaaatgtaagtttgcaaagtgaaataaaagaatcaagagtctaagtttttttcttaaatctgaggcaccaaaggaatagaagaggctaattaaaatgagctactttatcagatacacacattattttattaattccagtgcaaactattcaaaaaggagaaaaacaaagctcagatgaacactcttaaaagcagtgtgagcttggttttctgggtaatgtaacccataaagggaagtatagataagcaattcaatttggaaaataatgacccatactatgaactgggccccatgtgacaagctgttgctacaaaatacagcaaaagtctgtcataaaggcttatggaactggaacctctcaaaatgrtagagtacttactgtttacttttgttagctttccccccctagtccataagcctcactgaacaataacatacaccaagaaacttattaagaaatgtaatatttcaaagtagatttaacagctgcctttgcagtgtttg

SEQ ID NO: 353452 - DNA, 572 bp, Homo sapiens
gattgaaacatagaaaaccatgtagaaatgtgattggacaaaaaagatgtgatctaaacccagcgaggcccgtctgttcagattcttcttggcctctctgtgcaggcttccttcctctagggtatgagtcaggaccctctctggaatataagttcttatgacccacaagtagattgagtcctgccttgggcaagtggaaggagaaggtcagagagtgattctgtttcctgcggcctgcacctgagacctaaagtgccccatcattataacaaaggactataaaagggctaatggaagctataagccaggaaaccatgacattcatatatataaaccatatatatgttttcattcatatatataaaccatatatgttttcattcatatatataatgttttcatttatatataaacatatatgttttcatccatatataaatatatatttgttatatatatgttataaaatatcacaggtgacacaaagtaatgtacctgcwattttttctttggtccttaactgctctgaggaactagtgtagccctgattttcctatgggaattgtgtattg

SEQ ID NO: 353453 - DNA, 586 bp, Homo sapiens
gatgcccctacaaatttcagcttcactgacaacacwctctctggtttctcctcttctatctctagacattcattctcattctctgtttgggattcttcttctttcactggccccaggggtccatcctccagccccttctgtctacacagtggatatgtggggaattagttccagaaccaccctcctcactcttcctcccagccaccaccccatggccacccactccccaccctgtaccagaatctgcaactacttaagtcccacagttggccctgcaggaaccctcaaataggaaacgtaggccctccatataagtgggtttcacatcccttgaatactgtattttctactttttacttatatgtaaaaaatccacatgtaagtgaaccggcagttcaaacccatgttgttcaagggtcaattgcctacactttttggatgatcttatccacccccatgcctttaaatcttcacccatatcctaaatttttattgatctacatcaccagtgctggtctgtctctgaattccagatacagttgcctcctaggcagctataaacactcaaactccacatctgaaaaag

SEQ ID NO: 353454 - DNA, 586 bp, Homo sapiens
gatgcccctacaaatttcagcttcactgacaacactctctctggtttctcctcttctatctctagacattcattctcattctctgtttgggattcttcttctttcactggccccaggggtccatcctccagccccttctgtctacacagtggatatgtggggaattagttccagaaccaccctcctcactcttcctcccagccaccaccccayggccacccactccccaccctgtaccagaatctgcaactacttaagtcccacagttggccctgcaggaaccctcaaataggaaacgtaggccctccatataagtgggtttcacatcccttgaatactgtattttctactttttacttatatgtaaaaaatccacatgtaagtgaaccggcagttcaaacccatgttgttcaagggtcaattgcctacactttttggatgatcttatccacccccatgcctttaaatcttcacccatatcctaaatttttattgatctacatcaccagtgctggtctgtctctgaattccagatacagttgcctcctaggcagctataaacactcaaactccacatctgaaaaag

SEQ ID NO: 353455 - DNA, 586 bp, Homo sapiens
gatgcccctacaaatttcagcttcactgacaacactctctctggtttctcctcttctatctctagacattcattctcattctctgtttgggattcttcttctttcactggccccaggggtccatcctccagccccttctgtctacacagtggatatgtggggaattagttccagaaccaccctcctcactcttcctcccagccaccaccccatggccacccaytccccaccctgtaccagaatctgcaactacttaagtcccacagttggccctgcaggaaccctcaaataggaaacgtaggccctccatataagtgggtttcacatcccttgaatactgtattttctactttttacttatatgtaaaaaatccacatgtaagtgaaccggcagttcaaacccatgttgttcaagggtcaattgcctacactttttggatgatcttatccacccccatgcctttaaatcttcacccatatcctaaatttttattgatctacatcaccagtgctggtctgtctctgaattccagatacagttgcctcctaggcagctataaacactcaaactccacatctgaaaaag

SEQ ID NO: 353456 - DNA, 586 bp, Homo sapiens
gatgcccctacaaatttcagcttcactgacaacactctctctggtttctcctcttctatctctagacattcattctcattctctgtttgggattcttcttctttcactggccccaggggtccatcctccagccccttctgtctacacagtggatatgtggggaattagttccagaaccaccctcctcactcttcctcccagccaccaccccatggccacccactccccaccctgtaccagaatctgcaactacttaagtcccacagttggccctgcaggaaccctcaaataggaaacgtaggccctccatataagtgggtttcacatcccttgaatactgtattttctactttttacttatatgtaaaaaatccacatgtaagtgaaccggcagttcaaacccatgttgttcaagggtcaattgcctacactttttggatgatcttatccacccccatgcctttaaatcttcacccatatcctaawtttttattgatctacatcaccagtgctggtctgtctctgaattccagatacagttgcctcctaggcagctataaacactcaaactccacatctgaaaaag

SEQ ID NO: 353457 - DNA, 619 bp, Homo sapiens
gctactcaggaggctgaggcaggagaatggcttgaacccgggagggagagttgcagtgagccgagatcacaccactgcactccagtgtgggcgacagaacgggagagactctgtctcaaacaaacaaaaaagtgaaaggagacccttagcaggtctctggacttctctcctctgcagctctctgttctccagaaccctgccctgcaaactctagctgcttttgtcttcctagactttcaggtcctctcaactcgctggggccactggccccacctgcgacgtctctccctggacagccacctgggaactcattcaagcaataacctgaggcaaatatagagctcaccttgtttgctccccatctcccaggtatcactttttcatcacctgatctccaatgtcttaacaacctttgttctatatattttgcctgattttttttttttcattgattcaattggaaagataaacttggtctcagttacttcatcttggccagaagyagaagtcaattatttctttttggcataaccccaatctaaagaggataaaaaaataaaaaataactgtatccttataggaaagtttctaaggtaggttaaatccacccaggctgccc

SEQ ID NO: 353458 - DNA, 537 bp, Homo sapiens
tgcatgactcacaaagtaggcatggagggctttttaatcaaattaagtcsttttacaataaaagttctttgaattttcctatgactttttgaaatgaaaggatttcttagaaataacctcattaagctgtagtgagactagccaggacgcataatattatttctaatttatagatctggctggggaggaagagaggattcacaatagagttgctatgtttctggcgactcaatggctaaacaaggtttagaaactgcattttttcatttcagataagttactttctagcttaactaaattgttttctttcttttctcttctgaaataaacagaaaaatgccttgttttgtttcttttaatgtctcctacccctttagctctaaagggtcatatgcaaaagattttcacattaaaggaaagatttgagctctgtttgagtataacttagttttcagtctctaagtttcaaattgtggacagacttatgcattctcccctcaaaatgtgtgtgaaggacagttccttcctctaaagatt

SEQ ID NO: 353459 - DNA, 537 bp, Homo sapiens
tgcatgactcacaaagtaggcatggagggctttttaatcaaattaagtcgttttacaataaaagttctttgaattttcctatgactttttgaaatgaaaggatttcttagaaataacctcattaagctgtagtgagactagccaggacgcataatattatttctaatttatagatctggctggggaggaagagaggattcacaatagagttgctatgtttctggcgactcaatggctaaacaaggtttagaaactgcattttttcatttcagataagttactttctagcttaactaaattgttttctttcttttctcttctgaaataaacagaaaaatgccttgttttgtttcttttaatgtctcctacccctttagctctaaagggtcatatgcaaaakattttcacattaaaggaaagatttgagctctgtttgagtataacttagttttcagtctctaagtttcaaattgtggacagacttatgcattctcccctcaaaatgtgtgtgaaggacagttccttcctctaaagatt

SEQ ID NO: 353460 - DNA, 555 bp, Homo sapiens
aacaacagtaacaagagacaggataatgtagtagtttagagcactgtttctcaaagtgtagtctgaggaacacccatatcacaagcatatagggcacatgttaatagcagaaatacctagggccctctatgacaaattaaattcaaatttctgagagtgtggcctgggattctgcattttaacatacttttctagtgcttctacttcacattaaaactcggaaaccccagatcacaagcacagactctggagccatactccctgggtccaaaactctactagatggctattttactatgagtttgtctctctgcatcagtttcttcatctgcaaactggaaatgatgatattaatagtatctacctaccttacaggactgtaaaaatattaagtgagttaatgcataaagcccttagaaatgtgttgggcrcagtttaagtgctatgtatgtcaatgcaaccagtgtagttaagtcaaccatgttccaaattactacctcctatataagcacaagaactcaaaaggaacaaaattaacaagaagttataaggagt

SEQ ID NO: 353461 - DNA, 543 bp, Homo sapiens
ggaccaggtcctaccttgagcttacattctagagatccataaccttcctgccataccttgctgcacagataaagaactttgaaaattaaaaacaaaaaaaaatattattttcaacttggaaatcagagaatgcttcatggagaagcagaagtttggcctgaacttcagagaactttagggctcagagtaggctgggagagtgggtggatggagcagcttgcatcatggcccagaggccgggaagagcaggacctgagaggaagcagtgagtttgattttgttgtcaggtggggtgggtaaaagtgagtaataggaaatcttttggaaatgtatatggaaatcagatggtggtgcacactgaaaagcaggctgaggagtgcrgacttatgtagaccacagagagtcatttaagtttattgaacaaggtagtaataggatcagggataagcttcagaaatattaattgggcaataatgtgtaaaatggattaaaagagggaaggactagagacaaaggaagaatcaggaggttgttaattaaaca

SEQ ID NO: 353462 - DNA, 547 bp, Homo sapiens
cgagggctttcacaacaaacttcgttgcaaggcaaaaccccatctaggcaaagttgtagagtttgggtattttggggcttgggtatttctttcctagccccccttttatatgtgaaacacaaatgttccagctgataagccctgtaagtgatttttcccctcattgatttaaaaaattgtaccctgtctctatatggcacatggtcaagcactttaaagtatataattaattaaagcatttactgaaactgacatgcaggcaaaataaatgcaaatgaagtagggaatctatagaaatagcccaggaacagccatctctgcatagactgactgataggataccctgaatgctaagtaactggggtccttgtagatcagggaggtagcragtccagacatggaggttgccacacttagtatgcagtttctggtttcttcttgcttaaacatgttcctatagaaacttctggtctctcccaaaaagatgggagaatagggatggagaaaacaaaaatgaatgtatagagtgaacagttgtgatatcact

SEQ ID NO: 353463 - DNA, 547 bp, Homo sapiens
cgagggctttcacaacaaacttcgttgcaaggcaaaaccccatctaggcaaagttgtagagtttgggtattttggggcttgggtatttctttcctagccccccttttatatgtgaaacacaaatgttccagctgataagccctgtaagtgatttttcccctcattgatttaaaaaattgtaccctgtctctatatggcacatggtcaagcactttaaagtatataattaattaaagcatttactgaaactgacatgcaggcaaaataaatgcaaatgaagtagggaatctatagaaatagcccaggaacagccatctctgcatagactgactgataggataccctgaatgctaagtaactggggtccttgtagatcagggaggtagcgagtccrgacatggaggttgccacacttagtatgcagtttctggtttcttcttgcttaaacatgttcctatagaaacttctggtctctcccaaaaagatgggagaatagggatggagaaaacaaaaatgaatgtatagagtgaacagttgtgatatcact

SEQ ID NO: 353464 - DNA, 519 bp, Homo sapiens
cagcacagtctttctggaagagaatcatgtgagtcacagagggaatgagaccatctcactgtgttactgaaccatgaccaatggcttgccaatcacaagaatggttctctgtctttgttcaatacaagtttttacctgctttattattctgactcgggcttgtctttaattctttcatctggaaaaatctctgacaagaggaaatattaagctgctcccttagttggtatgaggttaattctaccagactcagactattttgctgtaattgtctgtgcgtgaggcagtgcccattggtatttttgcatctgtacttcaattatttttcagatcttccttcgttacctttcatcaccttcttttatgaaaagtacagatgctagaattcaaaagagctcagccaggtgttggtgaatcgaatcaatgcttttggaatgatcaattcattgctttttggaattttaggttccaactaaaattcttccattgrctattcacatatcctctttcaacctcctt

SEQ ID NO: 353465 - DNA, 630 bp, Homo sapiens
agtcacattttgaggttctagagattaggacttaaacacatgaattttaagggaacacaatttagcccataacaactatggaaccatatctactacataatataccctcaaaaaaagawttttgaatgtcttttgcctcagccaagatgtttcctatatattctgctcagtcaggaatcaaccccaggctctggtgagagggcctaaacagaccctgccacagggcaacagtgttgtttcaatctttactgatcccgtaactgtacaccaaaatgagcctggatggggaagatcctataattgcaaggagggcactcctagtcctatttcaatagttcagaaaactggaactcagagacgtgaagtgacatctcctaggtcacacaaccaatgcatgtcaaaactgggaattacgtgtgagaatttcaagcacctggaattgtcttcccattaggtcggagctaatgaagtttaacagagcttgagctttgaaggaatgagtgtgtactagttctcagagaagacttgcagcatgcaatgagaaaagaggtcattccaggtgagtgaaggaacatgagcaaagcagaatcaggaattgtaaaaggggctctttattttaagctactgtcc

SEQ ID NO: 353466 - DNA, 630 bp, Homo sapiens
agtcacattttgaggttctagagattaggacttaaacacatgaattttaagggaacacaatttagcccataacaactatggaaccatatctactacataatataccctcaaaaaaagatttttgaatgtcttttgcctcagccaagatgtttcctatatattctgctcagtcaggaatcaaccccaggctctggtgagagggcctaaacagaccctgccacagggcaacagtgttgtttcaatctttactgatcccgtaacygtacaccaaaatgagcctggatggggaagatcctataattgcaaggagggcactcctagtcctatttcaatagttcagaaaactggaactcagagacgtgaagtgacatctcctaggtcacacaaccaatgcatgtcaaaactgggaattacgtgtgagaatttcaagcacctggaattgtcttcccattaggtcggagctaatgaagtttaacagagcttgagctttgaaggaatgagtgtgtactagttctcagagaagacttgcagcatgcaatgagaaaagaggtcattccaggtgagtgaaggaacatgagcaaagcagaatcaggaattgtaaaaggggctctttattttaagctactgtcc

SEQ ID NO: 353467 - DNA, 630 bp, Homo sapiens
agtcacattttgaggttctagagattaggacttaaacacatgaattttaagggaacacaatttagcccataacaactatggaaccatatctactacataatataccctcaaaaaaagatttttgaatgtcttttgcctcagccaagatgtttcctatatattctgctcagtcaggaatcaaccccaggctctggtgagagggcctaaacagaccctgccacagggcaacagtgttgtttcaatctttactgatcccgtaactgtacaccaaaatragcctggatggggaagatcctataattgcaaggagggcactcctagtcctatttcaatagttcagaaaactggaactcagagacgtgaagtgacatctcctaggtcacacaaccaatgcatgtcaaaactgggaattacgtgtgagaatttcaagcacctggaattgtcttcccattaggtcggagctaatgaagtttaacagagcttgagctttgaaggaatgagtgtgtactagttctcagagaagacttgcagcatgcaatgagaaaagaggtcattccaggtgagtgaaggaacatgagcaaagcagaatcaggaattgtaaaaggggctctttattttaagctactgtcc

SEQ ID NO: 353468 - DNA, 580 bp, Homo sapiens
aggcagagggagatttgacatagacaaaagaggagaaggcaacatgaccatagaggccaagcttgaaagatgtggccacaagccaaagaatgcagatagccaccagaagctggaggaggcaagaaacaaattctcccttagagcttcatgaaggagtatggctgtgttgacaccttggttttgtcccagtgatctgatttcagactctggcctccacaacaatgagagaatacattcctatgtttttaagtcaccaagtttgtgacctaaaaaaatcattttaagttacatttgttacagcagccatagggaactaatacaaagggcttatgaactgctcttcaattccatgtttaaagtaatcatctgcaatacattcttaaaatgcaccaagttttgtgttagtccrtaaggaaggcagagaagaaataaaggacgtggtttcttccctcaagggctttatggcctcaatggggagacaaggttcatgagacaagggcaggtgacacagggaagtgtatcattaaatgctacattacttttataggctcataagagctgatgaggttcagagaagaag

SEQ ID NO: 353469 - DNA, 574 bp, Homo sapiens
attagatcttcactctgtggttaccagccagtgccatccagggagagcctgaatctggaggagaggctgtgctgccagtgcagccagcacctgtgtttgactatttctactgcttgtttcaagcaaacaggcagtgacgcaagaaaggcaggaaagaggactctctgagcctggcatctggtgaggccaagttttactgagcatgcacattgcttttctaccatcttgaggataaaccacttgcccctcggtcagaagctctcctaactagaagatgtcttattttggaaacaaaagctaagtaatgggttgactccttggtgtttatctctctgaagtcagcttcatatatttgggggctggaagggattaggagacaggactgttggaagctacatcaggaaggtggctctattttctgagatgycctctgacttttttgcagagcatctcacttccctctggacacccccaacttcttgcacctggcatcaccacactgccttgctccctttctcaggatgccacccagacctgaactttccggccactgtatcaagcacaaaaatgatac

SEQ ID NO: 353470 - DNA, 574 bp, Homo sapiens
attagatcttcactctgtggttaccagccagtgccatccagggagagcctgaatctggaggagaggctgtgctgccagtgcagccagcacctgtgtttgactatttctactgcttgtttcaagcaaacaggcagtgacgcaagaaaggcaggaaagaggactctctgagcctggcatctggtgaggccaagttttactgagcatgcacattgcttttctaccatcttgaggataaaccacttgcccctcggtcagaagctctcctaactagaagatgtcttattttggaaacaaaagctaagtaatgggttgactccttggtgtttatctctctgaagtcagcttcatatatttgggggctggaagggattaggagacaggactgttggaagctacatcaggaaggtggctctattttctgagatgccctctgacttttttgcagagcatctcacttccctctggacacccccamcttcttgcacctggcatcaccacactgccttgctccctttctcaggatgccacccagacctgaactttccggccactgtatcaagcacaaaaatgatac

SEQ ID NO: 353471 - DNA, 264 bp, Homo sapiens
aagttcccgcatcagggagagccaggttaggtgggcaaacagcagcctcagcacctggtagtaagctaaacaacactgccctcttttctgaaccccacaaattgtatggacttgcctggggagaagaggccaggttggggaaccaggaataggtccctgccctgcctcagctgccggcgtgaaagcccacatccaagctgtgctcttaccaatggtagggatggtggtgacgatctccccsagtttcagcttgtataggatggt

SEQ ID NO: 353472 - DNA, 612 bp, Homo sapiens
cccaatttaaaccagagacaaactgtcaagggcctcagagaatataaaagcaagaagcctcatgcaaagcatagcaacttcaaagattaaaagagcctcagcccacacagattaaaggagccagtgcaagaactctggccactctgaaagccacaatgtctttttacctccatgtgactgcactagctccccagtaataattcttcatgactaaattggatgaaatgacagacatagaattcagagactggatggcaaggaagatcatcaatattcacaggaaagttaaaacccaatctaagtaatctaaggaatccagtaatacaattcaagaggtgaaagatgaaattagccattttaggaaagaatctaatctttcctaatctaataatagagctgaaaaactcactataagaatttcataattcaattgtaagtyttaacagcataataaaccaagcagaggaaacaattttggagcccaaagactggttctttgaatcaactcagtcagacaaagataaagtaaaaagaatttttaaaattgaacaaaacctataagaaatatgggattgtatacataggcaaaacctacaacagacacattggtgt

SEQ ID NO: 353473 - DNA, 518 bp, Homo sapiens
atgacttccattatctctgattattaaaaaattgcgaggatgctattttatgttactttatttgtaaatttaaacattcgctaatgaattcagcagccacgcttaaytgatatcctctgaaaagtggaaaattttaataattatatgcactgttgtggtgtgattcgaaacatcattttaggaacagttctccggaggtgtttgaaaatttgacttacatgattgactggtgaatcgtttatagcaatgctgcagttgtcatttaaatccactagatggtgcaaggaaacaaattacagtatagtttatctttcggtctttttttgaatggaaaaactggaaacttggtactaaagtcataattcgtatatattgatcaaataaacccatggcatctatctcacttatgagatcattaaggcaatgtgactataaagagatgataacatacacctctaaaataattcagagagaaaattagatgtacattttgacttaaagaggaaggaaatctgaaa

SEQ ID NO: 353474 - DNA, 622 bp, Homo sapiens
aaatacaattgtttacacaaattccttctttctcatgctttctccaaatttaaagcagtgcttctaaaaccatgtatatgaatcactcagagatcttttaaaaacgtagagtatgattttgtaaatctagggtggggcctccttttctgtatttctaacatactttgatatgtgctartgaccacattataagtagcaaggaattagaagggcttaatagtggacatatgttccttatagttggctcccatataatttattcttggaaattatcatgagagtctttgcatgtttgattttcacagaagagaagaagattatcccttaaatcctctttgtgttgtgagagctggaatacaagtactcaatttatgttattaagaggggtcatcactaaaatttacttcaaaatatatacagaaaatgttcatattaattgatattcaaataatctggatcatggctaggtttagacttcttgtcagtattttattacatttaatcttagaaaaggaacactatcatgacatcaaatatttgcaataacactcattatcaccttgtcacctcttttctacttatataatttaactagattatcttacttctgattgatatacac

SEQ ID NO: 353475 - DNA, 622 bp, Homo sapiens
aaatacaattgtttacacaaattccttctttctcatgctttctccaaatttaaagcagtgcttctaaaaccatgtatatgaatcactcagagatcttttaaaaacgtagagtatgattttgtaaatctagggtggggcctccttttctgtatttctaacatactttgatatgtgctagtgaccacattataagtagcaaggaattagaagggcttaatagtggacatatgttccttatagttggctcccatataatttattcttggaaattatcatgagagtctttgcatgtttgattttcacagaagagaagaagattatcccttaaatcctctttgtgttgtgagagctggaatacaagtactcaatttatgttattaagaggggtcatcactaaaatttacttcaaaatatatacagaaaatgttcatattaattgawattcaaataatctggatcatggctaggtttagacttcttgtcagtattttattacatttaatcttagaaaaggaacactatcatgacatcaaatatttgcaataacactcattatcaccttgtcacctcttttctacttatataatttaactagattatcttacttctgattgatatacac

SEQ ID NO: 353476 - DNA, 559 bp, Homo sapiens
tttgccatattatcttctcttttaaacagtactttttcattagactatatatcagaaataagctatggcattttatgcctttttgtcaataatttggtaaaatatatgtatgtgtgtcataactcaactgtaaatactggcatatcttcccaggcatagctagcttgaagtttcaaattcatcctctgctgaaatccagttttcaaaatttgcatttaggaaataattattaaggtttacatgaaattcagagtgccacaattttatattaaattgaggtatcatgctactatcacaatgtctaaaataaatttatgatttgaatctgccctattaaattgaaatcaaggcaatttattgaatgttggtatttatgacaactctagattataatctgctaaagagaaagaaacagtaattccaagctacctrtagttagtaagtagaatattatactaatgtggcaattttaatagtttgcataataaaatatttttaaaagttgatattttaatgtatcagttattcagagccactttgatctataaaagggcttcaa

SEQ ID NO: 353477 - DNA, 559 bp, Homo sapiens
tttgccatattatcttctcttttaaacagtactttttcattagactatatatcagaaataagctatggcattttatgcctttttgtcaataatttggtaaaatatatgtatgtgtgtcataactcaactgtaaatactggcatatcttcccaggcatagctagcttgaagtttcaaattcatcctctgctgaaatccagttttcaaaatttgcatttaggaaataattattaaggtttacatgaaattcagagtgccacaattttatattaaattgaggtatcatgctactatcacaatgtctaaaataaatttatgatttgaatctgccctattaaattgaaatcaaggcaatttattgaatgttggtatttatgacaactctagattataatctgctaaagagaaagaaacagtaattccaagctacctgtarttagtaagtagaatattatactaatgtggcaattttaatagtttgcataataaaatatttttaaaagttgatattttaatgtatcagttattcagagccactttgatctataaaagggcttcaa

SEQ ID NO: 353478 - DNA, 601 bp, Homo sapiens
gagaagttcatggcattttttcatttctcccatctgagagaaraaggaggaaactgaaataatatcttcatttctgataaagaaactaaggtcagatatgttaagtgaattggaggcagagttaggactaagtgttaagacttctaactcctaatatttttttccctctgtaacttactggcttatttttacataatgtctactttttaatattcagtaatgactactttctataatgcattttgaaatagaaccactttagaatcatcttaatatatcataaatcaaaatcttactgccaatgtagaatgtaccagtgactgaagtcctaaaatacaacctatgcactttttgcctatccacaaggtgctaaaacacatacagtgttgctgtacacaatgtgctctttaattcttttatgctggagattcacaaggaacatttttcagatgaccaaccatccattccacaaaaagtacataaacttaatttacgaacataccttgagagagttttaagaatcagattttcacatagaatttctttctgcccaaaagtagtattatttttacaacttttttggccaaattggttctgtgtt

SEQ ID NO: 353479 - DNA, 545 bp, Homo sapiens
cttagcacgatgtcatatatataggagattcttaacacttgatgtgcctacagagtttattgtcccaggatttagatttgaatttcatatgttagtattttcaactattgataaaattgatatttcgtcacgtttttwaagcactctgtcaaagaaaagtgcaaaatttaatcattttagaatagaataaaacttattctatcttatgaatttattgtacatatctctaaatctaagcaacattatgaaatcttggcaatcttaatttttatatcttgaaatattttgctattttatcactataggaactctttcatcattaatcaattattcttagttgtgttttaaaaggcaaaacagaaaaaaaagaagaatgatggaattatctatatccacagaaatgatatggattgagggccaaatttccttattcttattaaactcttatgaattgttcttattcccttgtcatgtaacataagatgtgtcaactttatcatagtacttaagttacaggatatccaagaggagagtaaacatcactc

SEQ ID NO: 353480 - DNA, 545 bp, Homo sapiens
cttagcacgatgtcatatatataggagattcttaacacttgatgtgcctacagagtttattgtcccaggatttagatttgaatttcatatgttagtattttcaactattgataaaattgatatttcgtcacgtttttaaagcactctgtcaaagaaaagtgcaaaatttaatcattttagaatagaataaaacttattctatcttatgaatttattgtacatatctctaaatctaagcaacattatgaaatcttggcaatcttaatttttatatcttgaaatattttgctattttatcactataggaactctttcatcattaatcaattattcttagttgtgttttaaaaggcaaaacagaaaaaaaagaagaatgatggaattatctatatycacagaaatgatatggattgagggccaaatttccttattcttattaaactcttatgaattgttcttattcccttgtcatgtaacataagatgtgtcaactttatcatagtacttaagttacaggatatccaagaggagagtaaacatcactc

SEQ ID NO: 353481 - DNA, 575 bp, Homo sapiens
gtgcttaaaaaaataagataattgggttaagtcaaaagggctttgaaagttctcccaatagccaaagatgaaacaatctgagcaacaaaataagtggcatattatattagtcagggttctctagagggacagaatagggtagatgtttatacatatatatacaggggagtttaataaggagtattgactaacacaatcacaaggtgaggccccacaataaaccatctgcaagctgaggagcaaggaagccagtccgagttccaaagctraagaacttggagtctgatgctcgagagcaggaagcatccagcacaggagaaagatgtaggctgggaggttatgccaatctagtctttttatgttcttctgcctgtttttattctggccgcactggcagctgattagattgtgcccacccagattatgggtgagtctgcctttcccagttcactgactcaaatgtcaatctcctttgccaacaccctcacagacataccttcagtccaataaagttgacactcaatattaaccatcacacatagcattggattataatctaaaacaaaataaatatc

SEQ ID NO: 353482 - DNA, 581 bp, Homo sapiens
aacatattactatagtatctccctaaagttcctgaaaatattgagaaattatttcattggtaatttctccaaagagaacaaagctttcaatttgtgctattctttgcttgaatcttaaggctgaattttctgaacttgttatgagaaccaatgatcaggagacatggagctaaataaaccttctcatggaagcttatactcacaagtctggttttcaaaaggtgataagtccatttccttacaagttcatttttaagccacacagaaaatgactcctttaaactctgagtcaagtcatgacagactaaggtaaygatgtctaatatcagaggcccattttgcaaattgttttcatggaaaaaatatttatgaagacagaaactttcagaagagaagtacattgggaataggagttaaaggttactagaatacttgaaaagtcatatttataactgtattagtccattttcatgctgctgataaagacatacctgagactgggtaatttgcaaaagaaagagatttaattggactcacatttctgtgtggctggggaggcctcacaatcatggcagaaggca

SEQ ID NO: 353483 - DNA, 577 bp, Homo sapiens
accagtcccaatgattcagtcatctctcaccagtcccctcccacaacaggtagaaattatgggggctacaagatgagatttgggtagggacacagagacaaactacatcaacaacaaatcttcctactgggagaagaaatgttagtcagcagaacttttagcattctcaacaagcagccaatgaactatatggcctgacgtgttatgtaatagagtactttatccttaaacagtattttcctattttattttctccatttctaataaacayaaagttgtgttctaagttttatggactttggtgtacttcacaagacaagaattttaatacacatttaaccatgatattactaactttctctcatacatagccaacatttttgaattttttaaaaaagttttattttagcttttaaacaaaagttaatttcttatgtccccaaaaagtatgtctataccattcaaaatgaagaaaataaggcacaatgatgtaattgacatacttatggccacaggaaatacagaggcaatagcatctgtcacctatgcatacttcacacaataaacatacctgatt

SEQ ID NO: 353484 - DNA, 577 bp, Homo sapiens
accagtcccaatgattcagtcatctctcaccagtcccctcccacaacaggtagaaattatgggggctacaagatgagatttgggtagggacacagagacaaactacatcaacaacaaatcttcctactgggagaagaaatgttagtcagcagaacttttagcattctcaacaagcagccaatgaactatatggcctgacgtgttatgtaatagagtactttatccttaaacagtattttcctattttattttctccatttctaataaacacaaagttgtgttctaagttttatggactttggtgtactkcacaagacaagaattttaatacacatttaaccatgatattactaactttctctcatacatagccaacatttttgaattttttaaaaaagttttattttagcttttaaacaaaagttaatttcttatgtccccaaaaagtatgtctataccattcaaaatgaagaaaataaggcacaatgatgtaattgacatacttatggccacaggaaatacagaggcaatagcatctgtcacctatgcatacttcacacaataaacatacctgatt

SEQ ID NO: 353485 - DNA, 618 bp, Homo sapiens
atttggcatattttgattttcgagcccacaggattttaatagatggatatagattgaacaagtacagagaaaccaagattgactcagatgtttagattgtttatctggttgaatggtagtgaatgaaatgggataagaaaaatggggaagaaacagttttgtggaaaaggtgagaggaaatcagcacaaagttmtgttttagatatgtaaaagtatttgagacactcaatagatatccatactggaatgtcatctagactttcaaggcagtgagactttcaagcctggagctcacaatagtgattagagctcaagatctaatttaggaattgcttgtcaaaaaaattggatacttaacctaagttttttaaacacacatatgagagttgactatgtgctcaagtgcatagattaattggaaaaaatacaggccctatttggaactcttttgagtttaaaagacaaagttttgttaaattctagaacagcatgtcagaataagtgtgcatggggaataagagtaagtgtgcatgtgtatatgtgtgtagctaataggaggagctgtttcaccataggatctctaggaaatgttctattttatccaaagttagttaacac

SEQ ID NO: 353486 - DNA, 605 bp, Homo sapiens
atggggaataagagtaagtgtgcatgtgtatatgtgtgtagctaataggaggagctgtttcaccataggatctctaggaaatgttctattttatccaaagttagttaacacaattttatttcaaacatattcacattattctaattttctacttccttatactgtgtcttaagtagtaccaggtattaccacaaattttaaaacatattttacattattatcttatggatataagtgtatttctacattgaggattaattttaaaaatctagctcctttgatgcacattagattttatacggaggtaatatgaatataaatccaacaaacctgtttatataggaaagactaatagcatttcttctaaactttccactgtctcagtagattgaaaaggtgttagagcagtygttaaggataaggaaggaaatctaattaagagaaattttttgacctgtggatatgattaggaattacttcaatcaatccaattaggagccattcctcctagttggacagaatcaaactcagtggaaaaataccttaatattaatacaacattgtacacaaatcttgtcagcatttgaaaaaggaatttataaaaa

SEQ ID NO: 353487 - DNA, 560 bp, Homo sapiens
taagtatactagaaattttaattctgtggaagcacttgtgtcactatggcatatgttcctcccaatacaaggattattaggacagtctccagatggatttaaaagttgttttaacaaaattcaaagccttaaaatgcttaattttaagagcaggtaatagttacatttgtagtgcaacatactaaattgtgtctttagaggcactgattatatattcttaaaagtagataacaactgacaatcatatggcactttatttcttataaagcaactttatttaaattattycatttcattttctctgtcattctgtgaggttattactactgtgacccaaataaattgtatcaatttgactccctctgcattaccataatcattcccttttctccatcttcaatgctgttgtgttagttcatgaatttttgatctctcacctagactagaacaatagtctatgagttatttttctgcccacggtttcataacattccatttcatcttccaattgatgccaaataatctttctaatctatctggaaaaatatttaaaggaccac

SEQ ID NO: 353488 - DNA, 523 bp, Homo sapiens
ggaaatacagcgaaaaggcaggaaaaaaaaggaaaaattacaaatcaaaaaaataactcctggaacttgacatttgctttggagaaagatggtaagagcatctatgtttaagkggaagataatctcactgcactaaactgtgtcaaagacacattccaattgtgtgttgcgtaatgaaagttgtttattaagccaatttatatatgtttgagattttgtttgtgaaacagagacaggctcaccctcccagagaaaagcaatcacaaaataaaatataaaaaatacatagattaaaaccactaattctaccttgcctaagtgtatttcttctatttgttttgtgtatcttttctgtcactaataattaaccttcaaggtatcaagaaaatcatcaccatcatttgccatttgggttcaaaaggaagccttttaaaaataaattggtgttttaataaataattcatagaagtaagaataaagagtggaaacactatcttatttatattagaaactaatataaata

SEQ ID NO: 353489 - DNA, 578 bp, Homo sapiens
ccttaaagaaaacgaatcacatttaaaatttttttaatcttcttgctgaattccttgatttctacatatgactatgtctttgaggagtataaatggaaatagcagatgttagtaaaaacgactatgacttcacaagcatctcaaacaaagctaacaaagttcccaagtccaaaataattgcttatttgtgtgaaaaagactctgaatcacacatgcatcctcctctcatctgtataaactaaaatgatccttcatagcttgctaaacattcaagaagctgccaaattggaaaggaagtggttttgctttaattggcccacgttttgtgggatttttgttatccttaactaaatgcagtggacaattttcatgaaactaacttttttaagtctcaattatgtcactttcaaatttggcaaaacactgtcttgtttcctgtttaattaatgcatatgttcaaattgttcatagaaaagatttatattttccttcctttggtaattaatatatagcacaatctaatgactgyagtagaatattccccaaccttccctatgctgatattgatattagcatag

SEQ ID NO: 353490 - DNA, 619 bp, Homo sapiens
gaacatcatatatcggggcctgtcgggggtagggggctaggggaggsatagcattaggagaaatacctaatgtagataatgggttgaagggtgcagcaaaccaccatgacaagtgtatacctacgtaagaaatctgcatgttctgtactatctatcccagaacttaaagtgcaataaaacaaaacaaaaccctgaacaaactaggcatagaaggaagataacccaaaataataagcaccatctatgacaaacccacagccaatattatagtgaacaggcaaaagctggaagaatttactttaagaactggaagaagacaaggatacccactctcaccacacttattcaacatatttcaggaagttctagccagagcaatcaggcaagagaaagaaataaaagccatccaaataggaagagagaatggcaaactatgtctcttcacagccagtataattctaaatgtagaaaactgtataatctctgcccaaaggctcctttgctgaacaccttcagcaaagtttcagaatagaaaatcattgtacaaaatctgtagcatttctatacaccaataatgtccaagctaagagcaaaataaaaaatgcaatactattcacag

SEQ ID NO: 353491 - DNA, 585 bp, Homo sapiens
ttaaaatataaagatacactaagcatttgtatcctgcaaaaatagaaatttctgatcttttctgtgactagcagccatcagtagtctactatctagcaagtactgaatctttccctttgaggtaaagttggcttttaaaaattgtttggaaaaaaaatctatcagcatggagagaatattgtgaaagcaactgtcagaaaacattcctctaattatgtggcattatttaagaataagatgaatgtatcatctataaaagactatcagtacactaaagaaataaaaagtgaaatttatagtctgtttaaaaattttccaaaaatgtagtttcagtagatatttctttaaatacagcttgagtatccctaatccaaaaatttgaaatacaaaatgctccaaaatacgaaactttttgaacacaaacatgtcatcacaggtggaaaattttacacctgaactcatgtgatagattgcagtcaaacacaatcaaaacttcccatgcaccaaattatttaaaatattgtataaattacctgtagkttatgtgtataaggtatatataaaacataaatgaattttgtgtct

SEQ ID NO: 353492 - DNA, 410 bp, Homo sapiens
aatttttaaaaaaattttaatgaattttctctgatcaattattgctttcatggtaacaaataatttagcattgtatctaaggcattgccaaactcaaagtcatctggatgttctcaggtctgtaatccagttttagttaatttttgtgaaggtatgacgtctgtgctaaatttcttgttttggtcgtagatgtttagttgtccccgcaytattttttctattgtattgtctttgcacctttgtcaaagctcgtgactatatttttatgtctgtttctctattgtgttctatttatgtatttagtttttcaccagtactacactgtcttaattactgtaactttataagaagtttgaaagttgtgtagtgtctattccctaatttgttctcctttttaatactgtgttggt

SEQ ID NO: 353493 - DNA, 410 bp, Homo sapiens
aatttttaaaaaaattttaatgaattttctctgatcaattattgctttcatggtaacaaataatttagcattgtatctaaggcattgccaaactcaaagtcatctggatgttctcaggtctgtaatccagttttagttaatttttgtgaaggtatgacgtctgtgctaaatttcttgttttggtcgtagatgtttagttgtccccgcactattttttctattgtattgtctttgcacctttgtcaaagctcgtgactatatttttatgtctgtttctctattgtgttctatttatgtatttagtttttcacsagtactacactgtcttaattactgtaactttataagaagtttgaaagttgtgtagtgtctattccctaatttgttctcctttttaatactgtgttggt

SEQ ID NO: 353494 - DNA, 592 bp, Homo sapiens
gaccttaatcacaggacatagtaacaccgaggacatcctaagggatgtcctgtacttcagacatattcttccttacctccattgtggagtagtagtcaaattttcccttggtagtcaggakcaattaccttagccaacactgttattctcttctttgcctgttgactcagaggcgtgaggagcacttggtggcaagggttggggagaggccaattgctatttacaaaacatgtcatcctatccatttgattactaaaatactcctctgttgaggccaccttttggtgagtttcacatgggacacatattattatgtcatttgcccattctaacacgtctattcacattcctctttcccaaatgtctttgtcaccaattttccaatcatgtttcttccaagttcctgaccatccaaacaattggcagcccatgaattgcatgcctggccatttctccttcaaagcaaagtgggtagctttgaaggttttcctgagaaaatttccctttaccactgttcttcaggagtgtatcagagaggagctgtggttctgcaactgtcaacttttatgtgctgcctgcacaccttgcagaa

SEQ ID NO: 353495 - DNA, 592 bp, Homo sapiens
gaccttaatcacaggacatagtaacaccgaggacatcctaagggatgtcctgtacttcagacatattcttccttacctccattgtggagtagtagtcaaattttcccttggtagtcaggagcaattaccttagccaacactgttattctcttctttgcctgttgactcagaggcgtgaggagcacttggtggcaagggttggggagaggccaattgstatttacaaaacatgtcatcctatccatttgattactaaaatactcctctgttgaggccaccttttggtgagtttcacatgggacacatattattatgtcatttgcccattctaacacgtctattcacattcctctttcccaaatgtctttgtcaccaattttccaatcatgtttcttccaagttcctgaccatccaaacaattggcagcccatgaattgcatgcctggccatttctccttcaaagcaaagtgggtagctttgaaggttttcctgagaaaatttccctttaccactgttcttcaggagtgtatcagagaggagctgtggttctgcaactgtcaacttttatgtgctgcctgcacaccttgcagaa

SEQ ID NO: 353496 - DNA, 592 bp, Homo sapiens
gaccttaatcacaggacatagtaacaccgaggacatcctaagggatgtcctgtacttcagacatattcttccttacctccattgtggagtagtagtcaaattttcccttggtagtcaggagcaattaccttagccaacactgttattctcttctttgcctgttgactcagaggcgtgaggagcacttggtggcaagggttggggagaggccaattgctatttacaaaacatgtcatcctatccatttgattactaaaatactcctctgttgaggccaccttttggtgagtttcacatgggacacatattattatgtcatttgcccattctaacacgtctattcacattcctctttcccaaatgtctttgtcaccaattttccaatcatgtttcttccaagttcctgaccatccaaacaattggcagcccatgaattgcatgcctggccatttctccttcaaagcaaagtgggyagctttgaaggttttcctgagaaaatttccctttaccactgttcttcaggagtgtatcagagaggagctgtggttctgcaactgtcaacttttatgtgctgcctgcacaccttgcagaa

SEQ ID NO: 353497 - DNA, 521 bp, Homo sapiens
tatatgaagacactcatccaaatgttaacctgggttacctttaggttatgagattgagaatatgtgaggagaggctacagtttacttttaaacctccgtactacttgaacttataagaataaaatgtatgttattttattttaaattttaaatgaaaatagatttggggttaagttgaagttactttatgtaaaacattggtcacttagctttaaaatgtgccatcctaattctaccttaccatttctgctccattattcccacctgttaaatcggaatatagcagaatgggccccgakaatccatattttaacagggcttccctgtttttttatgcacacgaaattagagagtcactactttagagaatagtttcagtacagatctaggagcaaaaataaaattggagtaagaaaacaggtaaataaaagatgcaactattgaggcagaaagtaaagtgctatatggagaaattttgaaggaaatgggaaatagataaggaattgctattatgctggtaa

SEQ ID NO: 353498 - DNA, 578 bp, Homo sapiens
ccatatagttgaggctgtagtgagcagtgatcacaccaatgaactccagtctgggtgacagagtaagaccctgcctcaaaaataaataaataaataaaatcaagatttattagaaaaatcttactttttaacttctagatatgaagggcatttttagctttgattttgcataattagtaraaggagcctgaataagtcaaaggcatagtagtttgagttacactgcaatgtaaacatcagaattgtttttttgcctatctttatttcatttctccaatagacatatttttttacattgtccaccctagctataatatctttaaaccttttcctgcaagtggcaataaatattttttatccctgttaattcaccagaatcagatattctttctctttgcaatatatggagaaattcactgcttttaatgaatcagaactctgctgattctcactggacagctggcattcgtgtttatagccttaaagagaatgtgctaacatcagcatttgatgaataactccatgtgtattgtagttccttcaacagaaattgttcagagatttggagagctagtgat

SEQ ID NO: 353499 - DNA, 578 bp, Homo sapiens
ccatatagttgaggctgtagtgagcagtgatcacaccaatgaactccagtctgggtgacagagtaagaccctgcctcaaaaataaataaataaataaaatcaagatttattagaaaaatcttactttttaacttctagatatgaagggcatttttagctttgattttgcataattagtagaaggagcctgaataagtcaaaggcatagtagtttgagttacactgcaatgtaaacatcagaattgtttttttgcctatctttatttcatttctccaatagacatatttttttacattgtccaccctagctataatatctttaaaccttttcctgcaagtggcaataaatattttttatccctgttaattyaccagaatcagatattctttctctttgcaatatatggagaaattcactgcttttaatgaatcagaactctgctgattctcactggacagctggcattcgtgtttatagccttaaagagaatgtgctaacatcagcatttgatgaataactccatgtgtattgtagttccttcaacagaaattgttcagagatttggagagctagtgat

SEQ ID NO: 353500 - DNA, 460 bp, Homo sapiens
gaaaaaaatcataatttcccaaatcaaaatgaagctcactttctttgaaaaatctacaggaagttccccatagacatttttgcttgcacattgaatttatctgttgaatctgatgggcttgcatgaaagatcattcataatatactagaatctcaygaacggagaagacaacataatccgaccttaatctgatgatatactacctttctcaaaatagcgcagaattggttaaatcgtgaacatttctaggcttaaaaaattattttgtctctgaagactatttgttttgtgaaagttttgttattagaaacaaagttatttgttattgtattgaaaattttccccatttttgaatgtttgttttataaagtaatacataatatgattatgctttattgcacataaaagctttaaatattcaaaagacaagtgtttcaaaatacttaagaattttatgaat

SEQ ID NO: 353501 - DNA, 597 bp, Homo sapiens
ttccttgaacctcaattatctaatacagggattttaatacatgacttgtctatacacattttatttaatttactgaaaatcaataatatgtcaataacagagaaacatatgctacaatttttagttatttaatcatcatgaaaagcatcatgtaataggctttattgcgatttcatgtttgattaagctgagccccaaaaacctcaccaatttatgtagactaatgcaagtagcagaaatcgtactcaaatacaagctgcctctcaaagtcaatgttcttgttttataagtaacttgatttttgttgtgtttgttttaaaacttttgcttacacaattgaaaaaaatcataatttcccaaatcaaaatgaagctcactttctttgaaaaatctacaggaagttccccatagacatttttgcttgcacattgaatttatctgttgaatctgatgggcttgcatgaaagatcattcataatatactagaatctcatgaacggagaagacaacataatccgaccttaatctgatgatatactacctttctcaaaatagcrcagaattggttaaatcgtgaacatttctaggcttaaaaaa

SEQ ID NO: 353502 - DNA, 639 bp, Homo sapiens
tttttgttttctgggtaatgaaatctaggaatgccttcttgaatttgtggcaatggttctatactactgtcttttattaagctcacaaacaactataaattctggttctttgttttccatggagtcaagttgtatttccttatattgtacttttcagtttatttttggacttaatttcaagacttccatcattatccatcttaaaattcttcttaagtttactctaacttcaaacttgatatgatcattttatattatcccattcaaattctttgctattccttcttaaactatgtctttcaaatgctttagatttttaacaagaacttttggacatggaagcaaacatgttttactacttaatatagataagttattcagtaatctttctatgcagtattttaccagtgatcaattctcctaactttatttcaaatmtaaatttattaagtccacataatattttgataaacattaatcaaattcataacaaaattcaggttataattgaggatatcaaactaggctcagttggagttcatagtagacatacactgtttggacttcaagggtttagaagaatgaaattcaatgactttaggagaggcatgcattctcccctttccacaggcctttgaa

SEQ ID NO: 353503 - DNA, 599 bp, Homo sapiens
agaaaaaaataagtaaaacttcatgattcaaaaacaattcagcataatttccagcrtcagtaggtcatacattaatcagtacatcaacaatttgagaaattcatgataagattctttacttagagacaggatacttccatgaatgagaagacctaaccctagacaggttaatttggatgttagctaaatgtgacttgtaggttatgaaagccaggaatgtctttctcaaaaacctggggccatccctcttaaatcaaggaatataagacttctgtctttcagtctctatggagagactgacttcaataagtgccaattggcaaacacagatgatctaatcacattgaccacactctctgctaaagtcttgcagtacttttccacttaaacattcttcctcctttagttacaggggagttgaattgagcctttgtctttgattacattagcctttgataaagtctttctttcctgtttacttttatagtatgatatttctttgatattactaaccaagctatggcattcccctttataaaaaaaattaaatgttaaagtgtttttcttaaatagtaataacatttattgtgcagtttgca

SEQ ID NO: 353504 - DNA, 599 bp, Homo sapiens
agaaaaaaataagtaaaacttcatgattcaaaaacaattcagcataatttccagcatcagtaggtcatacattaatcagtacatcaacaatttgagaaattcatgataagattctttacttagagacaggatacttccatgaatgagaagacctaaccctagacaggttaatttggatgttagctaaatgtgacttgtaggttatgaaagccaggaatgtctttctcaaaaacctggggccatccctcttaaatcaaggaatataagacttctgtctttcagtctctatggagagactgacttcaataagtgccaattggcaaacacagatgatctaatcacattgaccacactctctgctaaagtcttgcagtacttttccacttaaacattcttcctcctttagttacaggggagttgaattgagcctttgtctytgattacattagcctttgataaagtctttctttcctgtttacttttatagtatgatatttctttgatattactaaccaagctatggcattcccctttataaaaaaaattaaatgttaaagtgtttttcttaaatagtaataacatttattgtgcagtttgca

SEQ ID NO: 353505 - DNA, 499 bp, Homo sapiens
tcttaattcattccagcattaactcaaaagtccaagtccaaagtttcatctgagacaaggaaagtccattctgcttgtgagtctataaaataaaaaacaagttagttacttccaagatacaatgggagtagaggcattggataaaggctcccattccaaaaaggagaaattggctaaaacaaaggggctrtaggccctatgcaagtctaaattcagcagggcagctgtaattctaaaagctccaaaatcatctccttttgttccatgtctcacattgtgatgattaacattgagtgccaatttggttggtttaaagaatgccaagtattgttcctgggtgtgtctgtgagggtgttgccaaaggagattaacatttgagtcagtggactgggaaaggcagacccaccctcaatctgggtgagcacaatcttatcagctccaaacatggccagaataaaagcaggcagaagaacatgaaaagattaggctggtttactct

SEQ ID NO: 353506 - DNA, 599 bp, Homo sapiens
tatcttgaagagtataatttaatgaagaatattctgtcatcctttgaagtttaactgaacatgcaagtaaccaaaaaccaagatttgagtagaaggtaagtaccaaatttcttatgaacttatttttaaatcttctgcttaactcaagtatatttctttgcaattcaatgtgaataggaagtctgtttttttttttttttgtcttgaatgttataatccttatcaaagcataggtgcataaagtatggatggaggattaaggattacaagaagtcactaaaaggcaaataaattttkttttttttgagatggagtttcgcttttgttgcccaggcttgactataatggcacaaccttggctcaccaaaaccgccacctcctgggttcaagcgattctcctgcctcacaacctccacctcctgggttcaagtggttctcctgcctcagcctcctgagtatactatttttaaaactttgaatgtaaattgattatagcttttgagaaattaataagatgaagaaagcaaatttgtagtttagaacaacgaatttacaactgagctgagaaggattgaatatcttactttaagtttgtatgc

SEQ ID NO: 353507 - DNA, 629 bp, Homo sapiens
ctatgtttacagcaatattggaccaattgggcaaagtttaacagccacaggcatttaaaggatccacaacattgtcactgtatttcattggcagaaatcctaaaaatgctcatcctaaatgatcaaatgctattttggcagagtgctgggaaggtagaaatttacaggctcattttaaagatttagaatcaatctgttgaaatggatacaaaattaatagttcaagtactgtaattattacaaaagtttataagggagacttttttactgaccctattgtaaaattagtttgataatatcataatggtattgactatctgagaaaatagtttagacgaagctcccatatatacctaaaaaatgcccaaagacaactcatttagcagtatgttatcttccacttaattactcaataagttgcattcactgtttacaatgtgtcaacactactaaacacgctagctgtattcrctaatttaattttttttaaaaccttatgaagtatggattgatatcaaacctatttcaattggactactagagcctagcaaagtaaaataacttgtccaaggaaatacagctagaaaggatgaagccaagatgaaaacctatttattttgactccaaag

SEQ ID NO: 353508 - DNA, 536 bp, Homo sapiens
ttattttgactccaaagttcactcaactgacctgctaaattataattyaaacattcaaaaacttagttaattttctgtgtttggaaagaaaacattttcttttctcactgaactacaaactttgtagcatattgaaccatgtataaaaatgggcatattaaaatattttataagatgatttctgcctgcagatagttacacaagcattgaggagtaaaaatctttttttttttagattaaaaaggaactagaattttaatagacagatagacaaggaagacacttcaaaaagacaaaatcaagactataggaggaaaaatcatagtgaatattcatgggggaataagaagactttttatgtttctggatagaggatgatatgctgagtagtgataagagataaagcttttaaagggggttgggttcaaatcataaagatcttgaaagtgagtttacaaaacagggacttggttcctttgagaacagaaaatatggataattttgaataggagagtgacaaacatagattaaatatg

SEQ ID NO: 353509 - DNA, 536 bp, Homo sapiens
ttattttgactccaaagttcactcaactgacctgctaaattataattcaaacattcaaaaacttagttaattttctgtgtttggaaagaaaacattttcttttctcactgaactacaaactttgtagcatattgaaccatgtataaaaatgggcatattaaaatattttataagatgatttctgcctgcagatagttacacaagcattgaggagtaaaaatctttttttttttagattaaaaaggaactagaattttaatagacagatagacaaggaagacacttcaaaaagacaaaatcaagactataggaggaaaaatcatagwgaatattcatgggggaataagaagactttttatgtttctggatagaggatgatatgctgagtagtgataagagataaagcttttaaagggggttgggttcaaatcataaagatcttgaaagtgagtttacaaaacagggacttggttcctttgagaacagaaaatatggataattttgaataggagagtgacaaacatagattaaatatg

SEQ ID NO: 353510 - DNA, 607 bp, Homo sapiens
ttttattcctagagtcaagaggtgtatctttaaaagtacctcatctaaaacctaaagataataatatctgggctgttaaacaattgcagtttcaaagctagattttwaaaaaaaatgtctttactgggcctagtggctcacatttctaaacccagcattttgggaggccgaggtcggtggatcccttaagcctgggaggtggaggttgcagtgagctgagattccaccactgcacactcactcactccagcctgggtgacagagtaaaaccccttctctggaaaaaaaaatgggaagatatcggctccttggaattacaaatttataaagacctaacaacatattatgtcttgcccgtagaacaaaccacaagggtaatccacattatgacaaaagttgaagtgtaaaaataaagggaaaataataaagtttattcaataatatttaccttatgagacacctagatccgtgtaaatgttgttgatggttgaagaattgcaaaattatataatatactccctttttagaaaaaaattaaataattcgatgatgcatgggtaattgtattataaatgtaaaagttataacgttaagtattttgtgaaat

SEQ ID NO: 353511 - DNA, 607 bp, Homo sapiens
ttttattcctagagtcaagaggtgtatctttaaaagtacctcatctaaaacctaaagataataatatctgggctgttaaacaattgcagtttcaaagctagatttttaaaaaaaatgtctttactgggcctagtggctcacatttctaaacccagcattttgggaggccraggtcggtggatcccttaagcctgggaggtggaggttgcagtgagctgagattccaccactgcacactcactcactccagcctgggtgacagagtaaaaccccttctctggaaaaaaaaatgggaagatatcggctccttggaattacaaatttataaagacctaacaacatattatgtcttgcccgtagaacaaaccacaagggtaatccacattatgacaaaagttgaagtgtaaaaataaagggaaaataataaagtttattcaataatatttaccttatgagacacctagatccgtgtaaatgttgttgatggttgaagaattgcaaaattatataatatactccctttttagaaaaaaattaaataattcgatgatgcatgggtaattgtattataaatgtaaaagttataacgttaagtattttgtgaaat

SEQ ID NO: 353512 - DNA, 607 bp, Homo sapiens
ttttattcctagagtcaagaggtgtatctttaaaagtacctcatctaaaacctaaagataataatatctgggctgttaaacaattgcagtttcaaagctagatttttaaaaaaaatgtctttactgggcctagtggctcacatttctaaacccagcattttgggaggccgaggtcggtggatcccttaagcctgggaggtggaggttgcagtgagctgagattccaccactgcacactcactcactccagcctgggtgacagagtaaaaccccttctctggaaaaaaaaatgggaagatatcggctccttggaattacaaatttataaagacctaacaacatattatgtcttgcccgtagaacaaaccacaagggtaatccacattatgacaaaagttgaagtgtaaaaataaagggaaaataataaagtttattcaataatatttaccttatgagacacctagatccgtgtaaatgttgttgatggttgaagaattgcaaaattatataatatactccctttttagaaaaaaattaaataattcgatgatgcatgggtaattgtattataaatgtwaaagttataacgttaagtattttgtgaaat

SEQ ID NO: 353513 - DNA, 607 bp, Homo sapiens
ttttattcctagagtcaagaggtgtatctttaaaagtacctcatctaaaacctaaagataataatatctgggctgttaaacaattgcagtttcaaagctagatttttaaaaaaaatgtctttactgggcctagtggctcacatttctaaacccagcattttgggaggccgaggtcggtggatcccttaagcctgggaggtggaggttgcagtgagctgagattccaccactgcacactcactcactccagcctgggtgacagagtaaaaccccttctctggaaaaaaaaatgggaagatatcggctccttggaattacaaatttataaagacctaacaacatattatgtcttgcccgtagaacaaaccacaagggtaatccacattatgacaaaagttgaagtgtaaaaataaagggaaaataataaagtttattcaataatatttaccttatgagacacctagatccgtgtaaatgttgttgatggttgaagaattgcaaaattatataatatactccctttttagaaaaaaattaaataattcgatgatgcatgggtaattgtattataaatgtaaaagttataaygttaagtattttgtgaaat

SEQ ID NO: 353514 - DNA, 631 bp, Homo sapiens
atttgtgaataataaaaatttgctattttccactatacacaagtgtttcatgacacattttacttgaaagaaaattagagagaaaatggcacctactctattcctactttactgtattaaagcccaagtctgtttaatcctgggtcaccaatttctttactatagcagtgatagctattaagtaaaagctatcatgtatacagtgtcaagttttatcctatatgcaaaacacatcttaattcatttaatcttcataacaactatatcttttttgggctaagggctcttaaactgttttaattatattatagcctatgcatttttgtgtcttctctaacaagtctttgcctaatctaaggtcacaatgatattctcctttgttttcttctagaagttttattgttyggggcttatatgtttcaagttaatttttgaatgtggaatgaggtttggcttactttttttcctacatagataccaagtttatccagcattattcattgaaaagactgtcctattgccattgaaatacctggacaattttgttgaaaatcaactgactatgaatgtctgagactatttctgaattattaatttagttctatttagtctatgtagaacaaaattgtat

SEQ ID NO: 353515 - DNA, 631 bp, Homo sapiens
atttgtgaataataaaaatttgctattttccactatacacaagtgtttcatgacacattttacttgaaagaaaattagagagaaaatggcacctactctattcctactttactgtattaaagcccaagtctgtttaatcctgggtcaccaatttctttactatagcagtgatagctattaagtaaaagctatcatgtatacagtgtcaagttttatcctatatgcaaaacacatcttaattcatttaatcttcataacaactatatcttttttgggctaagggctcttaaactgttttaattatattatagcctatgcatttttgtgtcttctctaacaagtctttgcctaatctaaggtcacaatgatattctcctttgttttcttctagaagttttattgtttggggcttatatgtttcaagttaatttttgaatgtggaatgaggtttggcttactttttttcctacatagataccaagtttatccagcattattcattgaaaagactgtcctatygccattgaaatacctggacaattttgttgaaaatcaactgactatgaatgtctgagactatttctgaattattaatttagttctatttagtctatgtagaacaaaattgtat

SEQ ID NO: 353516 - DNA, 612 bp, Homo sapiens
atggagtacatgaatgtcaagaccacagaaaatgagaaagaacccttttttctataggagtagcaaagatactcttatatccttgaaaatacctttctctagtgcctgactcattatacaatcaaatgcactgataaatagcagtgcttgtgataagrataatgacaatttcttttctcaattgaggtaacatttcaaaatgtagtttaatttttgcttactatttccaaaatagcaacataaaaagagcacgaatgagaacatgaggcaatttgagaaacatgacattaggaaatggatgaaaactcaaatggcactttcaaagttgttgtcttgaattgtttgattttctacagatgtcatctattctcagcaaaatatactgctgccccgcaactaatcgatgtgccactgtgtgaatttgcactgtcagagacatttatttttcctgagtctttactgacttttgtagagctaacaaaatgatataaccaagggcctatatctttcagtaactagcattctatttgccccagaaatatttttataaataatgttatgaataaatattagcaataattagaagaaagaaatattgtagaccttaaaata

SEQ ID NO: 353517 - DNA, 612 bp, Homo sapiens
atggagtacatgaatgtcaagaccacagaaaatgagaaagaacccttttttctataggagtagcaaagatactcttatatccttgaaaatacctttctctagtgcctgactcattatacaatcaaatgcactgataaatagcagtgcttgtgataaggataatgacaatttcttttctcaattgaggtaacatttcaaaatgtagtttaatttttgcttactatttccaaaatagcaacataaaaagagcacgaatgagaacatgaggcaatttgagaaacatgacattaggaaatgkatgaaaactcaaatggcactttcaaagttgttgtcttgaattgtttgattttctacagatgtcatctattctcagcaaaatatactgctgccccgcaactaatcgatgtgccactgtgtgaatttgcactgtcagagacatttatttttcctgagtctttactgacttttgtagagctaacaaaatgatataaccaagggcctatatctttcagtaactagcattctatttgccccagaaatatttttataaataatgttatgaataaatattagcaataattagaagaaagaaatattgtagaccttaaaata

SEQ ID NO: 353518 - DNA, 612 bp, Homo sapiens
atggagtacatgaatgtcaagaccacagaaaatgagaaagaacccttttttctataggagtagcaaagatactcttatatccttgaaaatacctttctctagtgcctgactcattatacaatcaaatgcactgataaatagcagtgcttgtgataaggataatgacaatttcttttctcaattgaggtaacatttcaaaatgtagtttaatttttgcttactatttccaaaatagcaacataaaaagagcacgaatgagaacatgaggcaatttgagaaacatgacattaggaaatggatgaaaactcaaatggcactttcaaagttgttgtcttgaattgtttgattttctacagatgtcatctattctcagcaaaatatactgctgccccgcaactaatcgatgtgccactgtgtgaatttgcactgtcagagacatttatttttcctgagtctttactgacttttgtagagctaacaaaatgatataaccaagggcctatatctttcagtaactagcattctatttgccccagaaatatttttataaataatgttatgaataaatattarcaataattagaagaaagaaatattgtagaccttaaaata

SEQ ID NO: 353519 - DNA, 607 bp, Homo sapiens
gaaatatcacaaataaggtataaatgctttatgtctaaatatgacaatttctttccccataaaatttttctcaatattatgaaaagtaataaccaatttgagaaaccaatcaacaaaagtaaatcattactaaacatattattacctctggtttaatttcctatgaggctggtcgttagctaagatgtgagtaaaaaataacaacaaaagagtcataggkcattggaatttccacaaaaacaatcagctccaacagaataaaacaaaagttacctcagctcggtctgcatttaggaacccctttaatctttgttgaaaattcttcatccaattactaatttttcagtggagaattggagcagtaggacatagcttttactaaatccaagagggcttattgccttattatatgccttgcagtaactattcaggaatttttctccattttttaggggctcactcctaacttttatttatctattcttctcagcagatacaatactcttgctttgcagaccaaagaaatcatcacttttgagctatattttttaataaactccttagctgctctgttaatcctttagttcccttatctctaatttgggga

SEQ ID NO: 353520 - DNA, 577 bp, Homo sapiens
acacagaaatgtttaatttagcaattcagttttaatactagatgtctggtagcaatggcaacaactatagctcatttatttgggcctggaaatataaataaattatatccatagaataagatattatktcatttttaacataaaattagttggaatgtccttacagttgggtttcatgaggtgagatagtcctgagaaagaaaaaaaaaaaaaaaactaccatcaccaggtatcaggtagagagggctccaggtagtaagaacaaagctaaacttgcaactatccgtgaggttctagatgctttggaggctggatttctatagtagagaaaatccaaggagcactgatgaagtcctccgtttttaaaagtgtggtcatttttaggggccagtgaagtacagaatgccaacatagccatctctagcaggaacaggaatgtttggatacagttcagagggactttacagaggatgtgatcttggagagctatcaaagctgtgctcactggggttttgagttcacagtgaatggaataaggacacacaattctgactttcccactgaatacaacaaaaaa

SEQ ID NO: 353521 - DNA, 535 bp, Homo sapiens
atatgcatcctgagcagtaaactcttaaagttaattttgaataaacattatttaaatggtgttatgcttttcctatgcctgattataagatacagtcttgcactgcataacaatgtttcaatcagtatggactgcctatgctacagtggccccataaggttatmatggagctgaaaaatttctagcgcctgttgttatagccagcctttgtaacatgacagcacaatgcatggcttatgtgtttacagtggtgctggtgtaggcaaagctactgctctgccaattgtatgaaagtatggcacatacaattatgcataggacacaatacttgataataaactactatataactagtttatgtatttactatactgtactattcatcattattctagagtgtactcctacttataaaaagttaaagccaggtgcagtggctcacacctgtaatgccagcactctgggaggccgaggtgggaggctaggacttcaagtggagtgagctatgatcacaccactgcattccagcatgggt

SEQ ID NO: 353522 - DNA, 535 bp, Homo sapiens
atatgcatcctgagcagtaaactcttaaagttaattttgaataaacattatttaaatggtgttatgcttttcctatgcctgattataagatacagtcttgcactgcataacaatgtttcaatcagtatggactgcctatgctacagtggccccataaggttataatggagctgaaaaatttctagcgcctgttgttatagccagcctttgtaacatgacagcacaatgcatggcttatgtgtttacagtggtgctggtgtaggcaaagctactgctctgccaattgtatgaaagtatggcacatacaattatgcataggacacaatacttgataataarctactatataactagtttatgtatttactatactgtactattcatcattattctagagtgtactcctacttataaaaagttaaagccaggtgcagtggctcacacctgtaatgccagcactctgggaggccgaggtgggaggctaggacttcaagtggagtgagctatgatcacaccactgcattccagcatgggt

SEQ ID NO: 353523 - DNA, 535 bp, Homo sapiens
atatgcatcctgagcagtaaactcttaaagttaattttgaataaacattatttaaatggtgttatgcttttcctatgcctgattataagatacagtcttgcactgcataacaatgtttcaatcagtatggactgcctatgctacagtggccccataaggttataatggagctgaaaaatttctagcgcctgttgttatagccagcctttgtaacatgacagcacaatgcatggcttatgtgtttacagtggtgctggtgtaggcaaagctactgctctgccaattgtatgaaagtatggcacatacaattatgcataggacacaatacttgataataaactactatatwactagtttatgtatttactatactgtactattcatcattattctagagtgtactcctacttataaaaagttaaagccaggtgcagtggctcacacctgtaatgccagcactctgggaggccgaggtgggaggctaggacttcaagtggagtgagctatgatcacaccactgcattccagcatgggt

SEQ ID NO: 353524 - DNA, 535 bp, Homo sapiens
atatgcatcctgagcagtaaactcttaaagttaattttgaataaacattatttaaatggtgttatgcttttcctatgcctgattataagatacagtcttgcactgcataacaatgtttcaatcagtatggactgcctatgctacagtggccccataaggttataatggagctgaaaaatttctagcgcctgttgttatagccagcctttgtaacatgacagcacaatgcatggcttatgtgtttacagtggtgctggtgtaggcaaagctactgctctgccaattgtatgaaagtatggcacatacaattatgcataggacacaatacttgataataaactactatataactagtttatgtatttactatactrtactattcatcattattctagagtgtactcctacttataaaaagttaaagccaggtgcagtggctcacacctgtaatgccagcactctgggaggccgaggtgggaggctaggacttcaagtggagtgagctatgatcacaccactgcattccagcatgggt

SEQ ID NO: 353525 - DNA, 426 bp, Homo sapiens
caatataaagcattcacctctcaccagttcagagttaaccctatgctatagagccataggtccagtggcgaggaaggagtaggctggaggaatgagatctggtctgttattttgcaatatttgttccaaataccctttctcccattcccaccccaacaatttccccctttgggcttctcatttaattttgraaggtgcccatattttctggaccatattggctgtttctttggagaccatgaacaatatgtcatttctttttgtgggttgatttaatctccaggagacttcacacatcatcctcataagctcctaccctgggttcctttccctgggaagcaaacctcttgggcatctctcagggtgtcctcttggcccactgcaaaacttacaaacccttgttccacaaaacaggaaaagacaggt

SEQ ID NO: 353526 - DNA, 493 bp, Homo sapiens
caggaaaagacaggtctactaccaccccacccctaccttttcacctctctcctcaccttccatttcaggtttattcagcaagcctttgagttgaaagaggaaggagcatccttcctgcgtttttggaagagggaggaggggaaatgccatcaagtctctatctctaatgagtagctagcytttatatatatatatatcgcctggagactgagaatgggtattgatattgatcagattggccacctcttactaagccctctggaatgtgtaagcacctttctttggaatgcagatgtgtactttttatcctttgtcctgagccttgtggcctcagtgagtcctcatcccagacaatagaaatagtaccatttacaagaatattgcattaactgaggagcaattgctttgtaatacctattttagctacccagaagcctttttcattttgtttattccatacccaggtgtattctaaattttcaaatttgcagta

SEQ ID NO: 353527 - DNA, 542 bp, Homo sapiens
aatatatataaaatctctagcattatttaaggaaggtgctcaagatagatgggtatgtcaacctaaagaaagaaactgaggcaaaattgatataagtagagagttaatttgggccaaaattcagagcagtaacccaacaaatacttccaagcttctttagaaatgcggttagttggggcagttataagcagatttttaaaggcaaaatgaggaggcacagcaagggggtttcagtctgttcacatacaaataccatttgttaacagtgataagctaataaatgattggcaaaaggctacagtgtatctccaaatagtcattatcagtatgtggttasggttgttcctggaattattcacctaagcaggaagcattaaggaatttcaggcaagtaactttggtctcatgtcccttctctttgtcgatttaaatttagttaacctctgattgtccaattttgttctcatattctttaatcatatgtgttttccccgtgatttccatgtgagtgtttcactatctaacatggacagttttcaaga

SEQ ID NO: 353528 - DNA, 542 bp, Homo sapiens
aatatatataaaatctctagcattatttaaggaaggtgctcaagatagatgggtatgtcaacctaaagaaagaaactgaggcaaaattgatataagtagagagttaatttgggccaaaattcagagcagtaacccaacaaatacttccaagcttctttagaaatgcggttagttggggcagttataagcagatttttaaaggcaaaatgaggaggcacagcaagggggtttcagtctgttcacatacaaataccatttgttaacagtgataagctaataaatgattggcaaaaggctacagtgtatctccaaatagtcattatcagtatgtggttagggttgttcctggaattattcacctaagcaggaagcattaaggaatttcaggcaagtaactttggtctcatgtcccttctctttgtckatttaaatttagttaacctctgattgtccaattttgttctcatattctttaatcatatgtgttttccccgtgatttccatgtgagtgtttcactatctaacatggacagttttcaaga

SEQ ID NO: 353529 - DNA, 606 bp, Homo sapiens
gactgatatataacaagggctcaataaccactaactgaatgaaaaaatgaattcaaaatgcatgaatgcaaactgcaaaaacatttgggcactagtcattggtgaacagaagtcaaatatcaccaacatggccataagaggagaggaaagatagcttgagcatttccaatgaaaaacttccgctaatacactaatctgttcttgattagccctgcttctttgttctttttctttttttttttttttagcccagtagcctytcatgctgtgtacttggcttcagagaccttgtgtttttccaatcaaacatactgttagttaaaaaggccttttttaacttttcatgaatgaggaataatgccaatatttgactactttatttcattaggctgttcatccatgtagagttactagaatcatttatttctaaatatatactggattaatagctaagtcaaaatcaaattattgccaaatcagctacatacacattttaatatctttgtgatcctcatgaccaactctatggacatgctctttggccaactcaagtctaataagttagataaatgttccataatcaatataaactgtaattacacataa

SEQ ID NO: 353530 - DNA, 606 bp, Homo sapiens
gactgatatataacaagggctcaataaccactaactgaatgaaaaaatgaattcaaaatgcatgaatgcaaactgcaaaaacatttgggcactagtcattggtgaacagaagtcaaatatcaccaacatggccataagaggagaggaaagatagcttgagcatttccaatgaaaaacttccgctaatacactaatctgttcttgattagccctgcttctttgttctttttctttttttttttttttagcccagtagcctctcatgctgtgtacttggcttcagagaccttgtgtttttccaatcaaacatactgttagttaaaaaggccttttttaacttttcatgaatgaggaataatgccaatatttgactactttatttcattaggctgttcatccatgtagagttactagaatcatttatttctaaatatatactggattaatagctaagtcaaaatcaaattattgccaaatcrgctacatacacattttaatatctttgtgatcctcatgaccaactctatggacatgctctttggccaactcaagtctaataagttagataaatgttccataatcaatataaactgtaattacacataa

SEQ ID NO: 353531 - DNA, 409 bp, Homo sapiens
gcctaatgtagtttttctaatgtctggattagatttatgaaagctcattagaaaattattaaataagactcactgaaatgttattttattctttcacatttgtaggcaataacagtacttttaattaaaagtatggaattgacacatactgagaacttaagtgtaagtaacttgagagtcagaagtgtttataaaacctgaaatttctccaacacagtagcgactgtgcttactatgcgtgttagtccattttcacactgctatagagcaccacctgagactgggtaatttatgaagaaagaaggttaattgactcacagttctgcatagctgaggaggccttaggaaacttacartcatagcagaaggggaaggggaagcaaggcacacctcacatggcaggagaaag

SEQ ID NO: 353532 - DNA, 631 bp, Homo sapiens
ttagtctgtgttatacagctgaccatagaacagaacaagaattaggggtgcactcacccagtgtagtaaaaaatctgcawataacttttgtctcccccaaaatttaacttctaatagcctactgttgactagaagctttactgataacatagtcagttaacacatattttatatgttacatgtatttcatatagtattattacagtaaactacagaaaattaaaagtaagaaaattataaggaagaaaaaatttatttacttttcattaagtggaagtgaatcatcataaaggtcttcatcctcatcatcttcattctgagtagtctgaggaagaggaagaacatgagggattgggtcttggtgtctcaggggtggcagaggtagaagaggtagagtaagtggatggggaagcagaagaggcagatacacttaatgtaaacttgttgaaatacattataatttctgtctgacttttttacttctctaaaaatatttctatgtagtacaatacttctaccatttattttagcttcagtgcctatatcatagaaagatttgtgttgcaaaacaagtaaaaagcagtcttatataattgaaactcttctgtgagactatctaatgtaatttgct

SEQ ID NO: 353533 - DNA, 631 bp, Homo sapiens
ttagtctgtgttatacagctgaccatagaacagaacaagaattaggggtgcactcacccagtgtagtaaaaaatctgcatataacttttgtctcccccaaaatttaacttctaatagcctactgttgactagaagctttactgataacatagtcagttaacacatattttatatgttacatgtatttcatatagtattattacagtaaactacagaaaattaaaagtaagaaaattataaggaagaaaaaatttatttacttttcattaagtggaagtgaatcatcataaaggtcttcatcctcatcatcttcattctgagtagtctgaggaagaggaagaayatgagggattgggtcttggtgtctcaggggtggcagaggtagaagaggtagagtaagtggatggggaagcagaagaggcagatacacttaatgtaaacttgttgaaatacattataatttctgtctgacttttttacttctctaaaaatatttctatgtagtacaatacttctaccatttattttagcttcagtgcctatatcatagaaagatttgtgttgcaaaacaagtaaaaagcagtcttatataattgaaactcttctgtgagactatctaatgtaatttgct

SEQ ID NO: 353534 - DNA, 527 bp, Homo sapiens
acatttcacattttactgtttgaagtaacaatatactaggcaaaaaaaaacaaaaaagaaaggacaaggagtagattgctrttttaaaaatcataattcttacatattttgaattttcttaagactgtgagatcttacatttgtagaaaactaaataaagtatattaaaaaataaaattttaaaattctgccgaataaaaagctgaaatacaccaatatttagaaagcagattttgtagctgaaattgtgatgagaatttttttcctcctttccaggaccaaaatgaattcattgttttactcttagaattagcacaacaataatattcaattcaatatttatttagatctgtaatttattccatcaatatttattgagtgccagatcttgtgctgggcagtatataaaacagccaaggtcagttctcatgaaacttacattccaacagaaaatcctatactttgtaaagagctgtgttagggttactggtctttactttcaagaagtgtgcttattctgcttatct

SEQ ID NO: 353535 - DNA, 527 bp, Homo sapiens
acatttcacattttactgtttgaagtaacaatatactaggcaaaaaaaaacaaaaaagaaaggacaaggagtagattgctgttttaaaaatcataattcttacatattttgaattttcttaagactgtgagatcttacatttgtagaaaactaaataaagtatattaaaaaataaaattttaaaattctgccgaataaaaagctgaaatacaccaatatttagaaagcagattttgtagctgaaattgtgatgagaatttttttcctcctttccaggaccaaaatgaattcattgttttactcttagaattagcacaacaataatattcaattcaatatttatttagatctgtaatttattccatcaatatttattgagtgccagatcttgtgctgggcagtatataaaacarccaaggtcagttctcatgaaacttacattccaacagaaaatcctatactttgtaaagagctgtgttagggttactggtctttactttcaagaagtgtgcttattctgcttatct

SEQ ID NO: 353536 - DNA, 509 bp, Homo sapiens
attagttctcatctttgtgagtgttttcattacaccagccaattcacaactccctctggaaagtctaaggcataatggcctgccatggaccttaacaaaggcttagtcccacaggttctctctctctctctctctctctctctctctctctctctctctctaccccctcccttcactcactgattgagctccctgccacctctagacttcctattggccttcctggcctcccttcagcaccgccaacctttctaggacttgttaataatacatttcttctgcttcatacattttagttttatttcctcacgtgtctcatctgacatacacacctaaatctaaccttctgccctgtcatagctcccctagaaagtgtctatcttggcttatracgactctcaagacagacatctcaaggtcaagttagaagtaaatcataaaagatagttgtattcatctattattcttgtggccagctgtcattacccagaaggaaagagctactacag

SEQ ID NO: 353537 - DNA, 494 bp, Homo sapiens
tccgtgtacctgcctgttgtggagctaaaatggggagctgaactggggagaggagtgagtgaggactgaagtgccacagacaatcaccgttctactgtgacttagtaaattttcttaaataaatgtttcttggccaggcacagtggctcacgcctatagtctcagcaytttgggaggctgaggtgggtagatcacttaaagtcaggagttcaagagcagcctggccaacatagtgaaaccctgtctctactaaaaatacaaaaattagccgagcatggtggaccacacctgtggtcccagctacttgggaggctgaggcaggagaatcacttgaccccgggaggcagaggttgcagttagccaagatggcaccactgcactccagcctgggcaacagagccagactctctatgtctcaaaaaaaaaaaaaaaaaaaaaagtttatcatatgtctttgaccaacttccaaatactttatatgtttgctgttttta

SEQ ID NO: 353538 - DNA, 506 bp, Homo sapiens
atttttcttctgctttctccatgcctatgaatacctcacaactacttgaattggctcagtcttggctcttrtcttccttgtctctggtttgatgtatctgactttctttgatcttggtttagattattctatgatttttttggtctgctttttggttggttgttttttttggtgacaaagtcaaagtatctgccttgtattgctcttccttaaaattagtcagtcttcctaggggaacctgccaacatccttactcttatttcctattttccatccatcaccagtgactgtagctacaccaggcatattctcttttaactcctcagactttgacatgttcaggcagaagccattacaagacatcaagaaatataatttctcaggtgtgcctaatgctgtgataagaactattaataattcccttcacagatgctactgaataccaatatatgaaatgctaatattgtaataaataacatttaagagagtgaattccttgtgagatt

SEQ ID NO: 353539 - DNA, 599 bp, Homo sapiens
tctttttatctcttttgaggaaacacaataagatttaatatgattgccrtcaatggcatactgtaacttaatccatccaataatgttgtcactaacagccaactttgataaaataacatcaagcaaaaagactattcatgccatgaatcctctttgaaatgtgtcttcagccctaagctgaggaggtcgtttctaatgatcttgacacttctctttgatgaatgaaacattatctaaggcttatgttcctatggaatagtccacattgccagtatagataagaatttatttggtgagactgaatctagataccaagtttattttgtacgtataaataattggtataagcctaagaagccaaaatggattactagggttggaaatgttagcttatctatacaaaaaatcaatgtacttttctaatagagctttcattttcccaggcccatgatgcctacttacatttgtagagtggttcatacatttcaaagacctcataagttattttgtcttcaaaaaaattatgtggacttactaagtcagtataattctcccattttcaaatgataaggatgagttagaaaggggaaatgccttcc

SEQ ID NO: 353540 - DNA, 599 bp, Homo sapiens
tctttttatctcttttgaggaaacacaataagatttaatatgattgccgtcaatggcatactgtaacttaatccatccaataatgttgtcactaacagccaactttgataaaataacatcaagcaaaaagactattcatgcyatgaatcctctttgaaatgtgtcttcagccctaagctgaggaggtcgtttctaatgatcttgacacttctctttgatgaatgaaacattatctaaggcttatgttcctatggaatagtccacattgccagtatagataagaatttatttggtgagactgaatctagataccaagtttattttgtacgtataaataattggtataagcctaagaagccaaaatggattactagggttggaaatgttagcttatctatacaaaaaatcaatgtacttttctaatagagctttcattttcccaggcccatgatgcctacttacatttgtagagtggttcatacatttcaaagacctcataagttattttgtcttcaaaaaaattatgtggacttactaagtcagtataattctcccattttcaaatgataaggatgagttagaaaggggaaatgccttcc

SEQ ID NO: 353541 - DNA, 624 bp, Homo sapiens
ctaaaatgccttccagctccaaatatctatgattagatgactctaagatctgtgcttattttaaaaggtcatagaggtgttatcaacttctggttatggtgacacaaagagttcatgcttcgatgtactccctctgctccagagacgtagtgatgataaatcaaatattaaaagggaaaactaaaaaacatctccaggcttaaaaataaacctctccctggaccagaaatggtacagaaatgcaaagtggtgattgcatgtgaagcaacaggcctgctgggcactggctccagcaacaggcagtggcggctgggaattggccctggcagatccttccaaagccaaaaggacctaagccacgctgactacttaatgccagggattgaggtagggcacacatgctcatgaaaacaggttgaaaatagctagcgctccttgcttcctgggaaagtcagtaagtggcagggtagaaatttgaacccagcagcctggttccagcacctgtgctttyaatcacaatgccaagcatagtgtttacagtctctgacccagaagttctacttcttgatataaccctgggttaactccctacgatgcaacagaaaattgtacaagaatgttcgc

SEQ ID NO: 353542 - DNA, 589 bp, Homo sapiens
taatggatggatttatgtttccagtaacaaatggaagtgttggggatggaaattacattaaatatgaaaacttacctagtagtcaacaacttattagacccctttagggtggtagagatcagtatgtcaggtttaaaacagtctgagatgttagaagtgtcagaaataaaagttagaggtattgtatttacttagctaatttggagactttacaaatgattttttgaaagtattatttgctattattattaaattggacctcttgggacagaacccacaagtatagcttggttttaatctttcygtctgcctggagttatataggagtagatacagaggagtctactttcagtatgaatttagaatcatatactcatagaattcaacgagtttgccaaaatttggctaatcttaatcctacatatatatttcctatacatatatgtgtatactcacacacatatattttgatttctgatgtgtatatatgtaatattatgcagtatatacactcatatatactcagtatgtatatttatataatagaaatattatataaatataatatgtaattacacacacacacaca

SEQ ID NO: 353543 - DNA, 619 bp, Homo sapiens
accatttgcctcagatattaccaggtaatatttatttttccaaaaaattgagcaaatttaaccaactcttgcctgaacaaattgattatgtaacatacctaaaaagtggcaaaaagagaaaaggaaaacaaagaaaaaactcaaatggtttatagttagtaactaacagagctaacatcagtgatcctatctatgwatatagttagaatcaacattttattcaacattttgtttacatagaatcagtcacctttattcatatttgattgcctaactttacagctaagtttctacattgctttttatatttgaaaattgtagagaaaactttacttgataaacttcaaggagtagatagttttgccacatatcttctttatattaaatgaaatgccaattttttgcatgtttgatttatattattgatcagcaaactgggaatttaaatgcttaccttctgcaattttcttttttgaatacaaaccaatgtcccagctcaaagtccagtatcttcaagtgaggcatagatctctatatcaagtctggaaacctatgcgttaacaagttggttgtcccttatacaaccaagtctaagtagtggggcatggaataatacctg

SEQ ID NO: 353544 - DNA, 616 bp, Homo sapiens
ttagccagaatgaagttcaattcctttttctacctatcccatgaattaaatttttgaatgtctgctacttaatagctgtgtgatcttgtttatccagcttcaaaatatgtatgaaatccccatgttgtttatatcacagactagttttaagaattaaagaaayttatattcttactatcatttttaaccaatatttttgttattattaggtacttaagtataataatattacctgcagggtaatcatattttaacatttttatactttataaatggattgcaagttcagattttacattctgaagagcaaagcttttctctactaattatacaatcagtttataaatataatagtttactttgaaatgcagttttatatgataggttcttaattgattaactttctgggctcttcgtactctatatgttctggagttgtttgctctgggttatcaaaattttcaaatttcaaaaaatgctttttagtttcattggaaatataaagacttcttattatctgacaaatgttaaggttttatcagactaggttatttgatagattgacaattcatatcacattgaaagtaaagtacaaaaatggtttgttttataaaat

SEQ ID NO: 353545 - DNA, 545 bp, Homo sapiens
aattatgaaagtgaacaagtaaataaaagccaaggaaatagaagttgtttccttatactagcaaaataaaactattaccagcaaaaactccctgttacaaaaatgctgatctggtttgactacagttatagttctatatgtattgatagtcatataatacagtctaaatattcaaatgattaaagattcaaaaaaagggagtcactcactcttgcatatctagtttacaaatgtgtccatcaaattaaaacagctgtcccaaattaaatatatcaaacccaaattgtctaactagtaaactgcattaaagtaatcctagatttagagaatataaaagataaaaggaatcttacagtatttagttcaactcttaaacatttcataactgtaatgtcagaggtcaaragaggtctagtgacttgcagaaaaccgctattaactggagatagaaatgagaattatttctccttatttattctattgcctcatgtttctcaaaatatgcctgctatcattttgggaaatggattacatagaacagtaga

SEQ ID NO: 353546 - DNA, 552 bp, Homo sapiens
agtgacacaaaatatttccttatttttacagagggaaaactgaggcagtcacagaaaggttaagttacttgttcaaggacaacttgtaaggcagctaagttctagggctgaaaaccagcctcctccctccatctggctttaacctttaaccagagtagccattttaatatgttttatcacatctgttccaggagctgtttaaacaaaactaatcagaggtctctacaagactgcacttccactgtacttaaaatccatgtccactcaacaaaattacaaggcttggcttgaaattagatttttagtccgctcacaaaatttcaaaatgttcctatgagaatgtcaaatatctctcttgttgcttttgtcttragaaatgaatgtcatgttctcctgctactaactcaatttacattgtaaatgtgaaaattccaaagcccaggccttaaaacatgtacacctatcaaacggatgctatttctaactgaaactcattctccttatcactggccttttactaagtcctagttaattcattaattaatagaaaca

SEQ ID NO: 353547 - DNA, 561 bp, Homo sapiens
taagtgctacatatgtattagctcatttaatcctcatactcattttacaactgagaaacaaagagtaatcgaccaaagctagtgaatgacagagtgaagattcaaatccaagctgctgggctctattcagtctggtttcaggatgtgtttcttaatctttttctttcttttttttttgggggggckggggggacagattctcactctgtcacccaggctggagtgcagtgatacaatctcagctcactgcaagctccacctcccgggttcacaccattctcctgcctcagcctccagagtagctgggactacaggcacccaccacctcgcccagctaaattttttgtatttttagtagagacggagtttcaccgtgttagccaggatggtctcgatctcctgacctcgtgatctgccgggcccggcccatgtttcctaatcttgatggtatacaataaagacaattaactacataagcagtaaatgtctaatgtttggcagggacagtaaacagcacgggagttaaaagggctattttcaacccttcataatcgtgaagtg

SEQ ID NO: 353548 - DNA, 498 bp, Homo sapiens
tgtggttgaatactgaagggraaaagaagctacaaaggaagccccagtggagcatctttgacttctaacccataggccaggggatcgggaagacgcataccagtgagtgactcataggtcacacataccagtgggtgactcaagccactaccctttggagtagacacaatttttattttcatttcggatgttcgtcagaggaaatcagtttgaatcattttcaattatgtaaatactaaagcatatttcaaccacataagatggtaaaattttctcctcctttctctcaaaggtactaagtttatcaaattaaatgataaaacttcctctcccagactaggaaaatacaccaaaaaatagcttgccaattgaaaattatttttagaggtgtttggagtatatgcattatcaaacatagttcctattttaaaaaaaaaagcaaaacacaacattgtacttattccaatgtttctatatgtgactgaagccagaaactgt

SEQ ID NO: 353549 - DNA, 621 bp, Homo sapiens
tgggtgaaggttttattattattcatatatgcaactctttttaactgtaataattttaccataaattggtaacagatttttttctcctctcatgctatgttcccactccccattcccccacccatcgctacctccaaggcaagattatatcaacaattactatttctgtgtttttttccattctagttacatcatgtccactaaaagtaaacatttataacatagcaaattgtgtaacacaatacacttctctattttgctggtcctcaaaacttcaaaagtaataaaacattctacacttccaaaaattaaatgccttggtatttcaagttcttagtagratgtttcttaggccttgaattcctggaaacctgtgaggatagctcaaaagagacaaaataccacaaaagcacaacaaataatggctgcaaaatgattacaagaacttatttcatttcataagatttagctctgaacagtcccagcctcaagtttccatacttctgtttcttataataaaataatataataagactatatgcttgaggttaaactgtgtatacccaggatcttaatgaagcattcagatataaaccaatataaaatggtatcagattaaaa

SEQ ID NO: 353550 - DNA, 631 bp, Homo sapiens
ccaaacataaaaccttccactgcatttaaaacatgaaaacaattttgttttattcaaagctgtggtgaactmtaaagaaccacaaatattttaattaaaagaattaaaagtcataattatattaataaccattaatataagtcatggttacattaatattaatatcagttaatattaatattaatttaaaagtcatggttatattaataaccattaataaaataagttatatttcttagtataccatcagaaacatttagttattgactcagagatttgtgtttattttcttaaatattgtggagtttctacacaagcccccaaattatctttgtttgataaacaacatagtaagaatagcaatggggaaaactctcatgctcattgttaaacatgtgttctggcagatctttggaatagattctaaactctaatctcaaaacatctgcattacttccccacagggtagagactggttttaattctatatatggtaacataccttttggagcaaatccaaccatgataacagcagcaaatgaggattaactgacatttccttaacggatagacttcatttcttagaagaaacaaatgtggggtgtgaatacacatgactaaactctaatga

SEQ ID NO: 353551 - DNA, 581 bp, Homo sapiens
tggttccattttgaagatttttgggtggctactgcttgtttaccagcagtttggtatagaagcccaagacagtccatgtgtggttcagtattgacctaatagcagaataaatttggaccaaacagaagtccttttctttgtcactgtgtttgattaactatcctggatatgctttattctctaaaaacttcatttttgaaaataccatggttattaaacaactagtctttgtgcgtgattaggacataaacaggaatctcacccacttttaaacctktccaagaaataacttttccactgattttattttgaattgttaaaaaacttttagcagggagagaaaatttggttgatgattcagagcgcgagggaaaggaagcaagggattctgggcacatgcgcacgagttgaatgacaactggtggatatttttatatttattgctattcttagcctaaggcctggagctgagtagggagtaactaagcttagccatacttattagacttagagattttactttgtttatgtcaatgtcaaggcctttgggaaaactttggtatgcttagctgatttcttga

SEQ ID NO: 353552 - DNA, 572 bp, Homo sapiens
aaaatctgcaccctgcttatttccaatacagatrtgaggttggtacccactaatcttaacaggatatatatatatatatctaaagtatataacatattatttaaaaactaatgtattatttaggttttattaaattatcctgtttttaggctatgctgatgggctaaatttgcctaaactcctgagatttagattctcatttattggcattagaggagttcctaaaaaaaaaaagctattaagattaaatatcataaaaatctttctaggaaaatataatcaaaagcatcaaggctgtctcctacagttagtggtttctattattttggttctcagagctatgacaatgtcactggatttcaagaattcagaaagacaaaaagaaaactcataattttgaaatggggaaagggaaagatcttggacatagtcttctgtttttaaaatagtcattctcattttaaaataggaaaaaaattatttttcatttaacaaagcaaaaaacccagtctgtacttttaaattaatgcaaacatcaatattttatagggagaacattaataatcattgtg

SEQ ID NO: 353553 - DNA, 567 bp, Homo sapiens
ttaagagcccttgagccttaagaaaacataggtggtagtctggcagtactccttatggcctggagtggcagtggctacagagtgagcctcctctgcctttggaaggggaaaggaagaggaggaagractgcatcttgtgcactgatctgcaccttgtggtttgagtgccagctcagctgcagtacaacagaataccagatagacttctaaggtttttgactgtattccctgactcctgtacagcacctctggacccacctggtgtctgggggactttgccaccctgaagggaaggtcacaggcctggctggttttggcatcaagtgatcgaagagccctagggctttgagtgaacatgggcaatagccacgtagtggttacataggcagtagtggttacatcaggcctttggtgaaatccagtgctgtgctggcttcaggtgtgatccacagcagtcatagtggtggtagccacagaggttcttgtgtcgctacaccccagctttaggtggctctgaacaaggagagactgtttgtttggttaagtacgggaagagaacaagagtct

SEQ ID NO: 353554 - DNA, 567 bp, Homo sapiens
ttaagagcccttgagccttaagaaaacataggtggtagtctggcagtactccttatggcctggagtggcagtggctacagagtgagcctcctctgcctttggaaggggaaaggaagaggaggaaggactgcatcttgtgcactgatctgcaccttgtggtttgagtgccagctcagctgcagtacaacagaataccagrtagacttctaaggtttttgactgtattccctgactcctgtacagcacctctggacccacctggtgtctgggggactttgccaccctgaagggaaggtcacaggcctggctggttttggcatcaagtgatcgaagagccctagggctttgagtgaacatgggcaatagccacgtagtggttacataggcagtagtggttacatcaggcctttggtgaaatccagtgctgtgctggcttcaggtgtgatccacagcagtcatagtggtggtagccacagaggttcttgtgtcgctacaccccagctttaggtggctctgaacaaggagagactgtttgtttggttaagtacgggaagagaacaagagtct

SEQ ID NO: 353555 - DNA, 534 bp, Homo sapiens
aagaggatgtggtaggttatatgccaatactacatcattttataccagggacttgagcatccataggtattgctttctgcagaggtcttggaacaagtctgccatggataccaagggaggactgtaccagtatgcagttcctgtgcwgcctgtaactaggcaggggttgggggagtggggaaggtgatacatggggcatcaccctaggctatctgttatgaaaagcttttctgtgctgcccatagcaagacctcctcaccggagcttgggatgttttactttagcatctactactactcctgggaacagctgagcaccaaggatgtgagtgttggaacgttctggtctaggatttgttgattcactctttcagcaaacattgcaaacctgagtaaaagccaggcacccctcattcatttgtttattcatcatcaaatatttctatatttattccgtgcctgacactgttctaagcactcaacaaatactctctcattgcctccttataacggtgttatgaggttggttctatga

SEQ ID NO: 353556 - DNA, 534 bp, Homo sapiens
aagaggatgtggtaggttatatgccaatactacatcattttataccagggacttgagcatccataggtattgctttctgcagaggtcttggaacaagtctgccatggataccaagggaggactgtaccagtatgcagttcctgtgcagcctgtaactaggcaggggttgggggagtggggaaggtgatacatggggcatcaccctaggctatctgttatgaaaagcttttctgtgctgcccatagcaagacctcctcacyggagcttgggatgttttactttagcatctactactactcctgggaacagctgagcaccaaggatgtgagtgttggaacgttctggtctaggatttgttgattcactctttcagcaaacattgcaaacctgagtaaaagccaggcacccctcattcatttgtttattcatcatcaaatatttctatatttattccgtgcctgacactgttctaagcactcaacaaatactctctcattgcctccttataacggtgttatgaggttggttctatga

SEQ ID NO: 353557 - DNA, 534 bp, Homo sapiens
aagaggatgtggtaggttatatgccaatactacatcattttataccagggacttgagcatccataggtattgctttctgcagaggtcttggaacaagtctgccatggataccaagggaggactgtaccagtatgcagttcctgtgcagcctgtaactaggcaggggttgggggagtggggaaggtgatacatggggcatcaccctaggctatctgttatgaaaagcttttctgtgctgcccatagcaagacctcctcaccggagcttgggatgttttactttagcatctactactactcctgggaacagctgagcaccaaggatgtgagtgttggaacgttctggtctaggatttgttgattcactctttcagcaaacattgcaaacctgagtaaaagccaggcacccctcattcatttgtttattcatcatcaaatatttctatatttattccgtgcctgacrctgttctaagcactcaacaaatactctctcattgcctccttataacggtgttatgaggttggttctatga

SEQ ID NO: 353558 - DNA, 614 bp, Homo sapiens
gggagcattcctattctctccttcagtctgccttgttcatccctctgtgctcctatgaaaaggtatttattgagtccatgatctattccagcagtcttcaaatggacttcccaaaggtactagagcagggacagtttcacaaaaatgagtttctacatcctcaatttccatatgtactaattctgaaactgcctgagagcctttgggcatcaacaatattctttcacccactctacaaaagaaagtcacaccactcatatctcaaatcttaatatggtgtgctacactaaatgattccaaatactggttgggggaagccttagcactttctgtctctccctgtcctgcaagcaagtctgtaagagtagggttggccagtcctgggtagttctgagttcaggacaaagtagtacatataagtgatgtggattatctttaaataaccacagtgttttctgaagtcatcagatctttcaagatgtgctggataaagtctacatataagctttttactgatttccttccaatttaacatgttattcaataaggtcattaaaacctagytcatcaaatcatgtcacaaaatatttattccacacaccatcaatctttac

SEQ ID NO: 353559 - DNA, 599 bp, Homo sapiens
agggctgcagtcatctgaagtcttgactggggcttggaggatctgcttccaaggtggctctctcacatgcctggcaagttggggctggttgttttcaagaagcctcagatcctcaccaygtggaccttaccaaagatctactttggtgtcattgatatggcaatagttttctccgagagttatccaagagagagcaaggcagaagtggccatgtcttttaggacctagttgtggaagtcacacagcatcacaggtgccctattctactggtcacatggaccaaccctgatgcattgtgggaggaaactgcacaaggataattaggcgccatcttggaggctggctaccacagccatgctggaaacagttaaatgaggcatacagagaggagccctctttttacttgttttctgacagcaaggctatagtgcaggacaagaagacacttgaatggcagtggcaccttctcctcttagtctgaaaccatagtttccctgtaagtacaggtatgagagacgagttctcttttcagtctacatagtaatgtcctggaggaatagaataattcccttttgtaactaagctcaccaccaggcaga

SEQ ID NO: 353560 - DNA, 577 bp, Homo sapiens
ctatgttgcccaagctggtcttaaattccttgagctcaagtgatcctcctgcctcagcctcccaaagtgttgggattacaggcgtgagccatcatgcccagcataattcattcttctttttgagatagagtttcactttcagttcactgcaacctccacttcctgggttcaagcaattctcatgcctcagcctcccaagtggctagggctacaggtgtatgccaccatacttggataattttgtatttttagtagagacagggtttcactatgttgtccaggctggtcttraactctcagcctcaagcgatccgcccgcctcagccttccaaagtgctggggttacaggcatgagccactgtgcctgccgtaattccttcttattaaatttactttcactagtttagacagtgctccataaccatgcttacaaagcgcaaaaacattgtgtttgtatttgagtctcctccatggctggcccatcaattccttaaggccttgactatgtctcttaagttgccttgggaaaccgtagtcagtggaaaacctcatgctgatgggctcctcaccaaaagca

SEQ ID NO: 353561 - DNA, 429 bp, Homo sapiens
ggccataaccatactctgcctggatagataagttttttttttctccgaaggaatattaagtaccacatggatccgcctctctctgaggtggtttaaacgaagtcctgcccaaacatagaacggtgataacaayggccacgggagtgtttccagcccagcgcacgctttaaggcacgctgaaaacaagtgaggttgctgtccggacgcgaggtgctgaatggaggagcgtataatcatgacgtttgcttgataacaaagaccaggaaattcggtcccgcgctgacttattcttgccacactacaaggattccctgtatgtctgaccaatatgctcttctgacttttccggggcacctgctgggcatcatgccgattgccttctcatagtgaaacccagcaggggttagttggccaaaaccacaactatcc

SEQ ID NO: 353562 - DNA, 676 bp, Homo sapiens
tcttttaaaaaatatatatatacacggagtcaagaagctggaaagagatgtatctgatttttgcaagcccatatcagtatgcaggtgttcttggaaccctggaagagcgctgtaaattcctgagttgggtcctaggtttccaaagtaagctgtggcagagaatcccaggcatccaatcaatgccttgatatttctttttaaagcttcagggccataaccatactctgcctggatagataagttttttttttctccgaaggaatattaagtaccacatggatccgcctctctctgaggtggtttaaacgaagtcctgcccaaacatagaacggtgataacaacggccacgggagtgtttccagcccagcgcacgctttaaggcacgctgaaaacaagtgaggttgctgtccggacgcgaggtgctgaatggaggagcgtataatcatgacgtttgcttgataacaaagaccaggaaattcggtcccgcgctgacttattcttgccacactacaaggattccctgtatgtctgaccaatatgctcttctgacttttccggggcacctgctgggcatcatgccgattgccttctcatagtgaaacccagmaggggttagttggccaaaaccacaactatcctctcatgatcaaaaatgagcaagaggatttaactgaaa

SEQ ID NO: 353563 - DNA, 576 bp, Homo sapiens
gtgtgtgccaccacacctggctaatttgtgtgtgtgtgtgtgtttgtgtgtgtgtatatatatatatgttttttttaatatttttgtagagatggaggcatggagggggtggtgggggaaggtcttgctatactactcaggctggtctcaaactcctgagctcaagtgatcctcctgcttcagcctcccaaagtgctgggattataaggcgtaagctaacgtacttggcctgtaggaaggttttaaattatcgatccagcttttaaaataactacaggattatttgtatcttctrtttcttcttgtgtcatccctggtgtattatacagaatttgccataacttttcacatttgcaggcataaaattattaagaatattttgggtgttcctttagtttttcaagatgttaaaacaatttcactgattttaaacaggaattcacttactacttaaaatatcttttattatagaatgtatcataaacaagagaatgtaatacatatatgtattttttaaaggaataagtaaacaaaggtgtatacatgtggatattcacctgtcaagcttgagtaaca

SEQ ID NO: 353564 - DNA, 608 bp, Homo sapiens
tcgcttaaatttcattcttatgtttattattaaaagaaaatcctgtattttcttgcttctcttctattatattgctgtttgttatccctaaagtattatttatgctgtttattaaagaaggttttacctaatagatattaacagattgctgcaggccgggcatggcggctcacgcctataatcccagcactttgggaggccaaggtgggcagatcacctgaggttaggagttcgagatcagcctcgccaacayggtgaaaccccatctctactaaaaatataaaaattagctgggtgtggtgacacatctgtaatcccagctactcaggaggctgaggcaggagaatcacttgaacccaggaggcgggggttgcagtgagccaagattgcgccactgcactccagcctgggcaacagagtgaggctctgtctcagaaaaaaaaaaagaaagagtgctgcttgattatcataataatatcactgtcgttcatacaaacaggaatgcgattgagtagactgactttgaataggcttttctccagagtcaagcacttgtctgacatagctagagaaggaagaagggtgtgtaggggtgtgtgtgtgtgtgt

SEQ ID NO: 353565 - DNA, 590 bp, Homo sapiens
tatgataagtccctatccccaaggagctcacagactaatgagggaaattgacatgggagcagaggagtaaaaacaattgtacctgtgagcccaggtgaggacactgggactttgaggagttttgcagcctgcccaaagagaaccagctaacaagtgtggagccacacaccaggaaacagggactgtctcactgcagaccccagttctagytcattactctctcctgctttccaaaatacctggaatattgggacatattttctgcctagcactgttcaccaagcttttaaacaaaggtggtgacatggaataggcacctctagagtttcttaggagataaagttacagagaagtccctggtctcttgtggggcaggaagtgtattatcttcctttaaagaaatagaccagctgatttgctgacagcttataatggtaaagcctcctgcattaggaaagtcaggatgcccaaagcccacccctggaattcttgcttccaccattagctgggtgcctgctctgcctggggttggttccatgacacctgagctcccttctgagaggcagcatggttttacagtaagattgcag

SEQ ID NO: 353566 - DNA, 590 bp, Homo sapiens
tatgataagtccctatccccaaggagctcacagactaatgagggaaattgacatgggagcagaggagtaaaaacaattgtacctgtgagcccaggtgaggacactgggactttgaggagttttgcagcctgcccaaagagaaccagctaacaagtgtggagccacacaccaggaaacagggactgtctcactgcagaccccagttctagttcattactctctcctgctttccaaaatacctggaatattgggacatattttctgcctagcactgtkcaccaagcttttaaacaaaggtggtgacatggaataggcacctctagagtttcttaggagataaagttacagagaagtccctggtctcttgtggggcaggaagtgtattatcttcctttaaagaaatagaccagctgatttgctgacagcttataatggtaaagcctcctgcattaggaaagtcaggatgcccaaagcccacccctggaattcttgcttccaccattagctgggtgcctgctctgcctggggttggttccatgacacctgagctcccttctgagaggcagcatggttttacagtaagattgcag

SEQ ID NO: 353567 - DNA, 543 bp, Homo sapiens
tttttttcaggcattcttgcccgtgaaatgagctgattaggattttcccaagcccctcagaatggtgaaaagcaattgtggaatgtatgatctttaagaattaggctccatagggctcttctattttctctctcctgaatttgctgtcatttaattgttctaagcatggtcgacttagggrttcttgcacacacacacatttgcattaagttcatttatgcttgtttatgggtgtgtgttatttagacccagaataattgatgcatatttgacagaaaatttggaaaacttagagaaagagaagcatgatgcctggtgaactactcactcatgaatatggacatcctagcaggggggtagcatccccactctagagcgatggactggatatgaatccagattatccacctcctcaaagggcggtttgaaaattatataatggttataaaatgtatcttccctggcacatgataaatgttagctgaggacacacacaccaaggcacctatgtaaaaagatgttcattgcagtaaaatggaactt

SEQ ID NO: 353568 - DNA, 617 bp, Homo sapiens
gttatgatgtctacatgcccagctatctgggtttattattcttccttgctgcagcaagtcaggcctctagaagctccaggatgccaattgatttgttccatatactcagcaaaacagctcttcttttaaaatataactatgaaagtataagctttagtttcactgacccggttgagttctttgtctctcttttcactgagattatggaatgggatgtactgactagcttgtcctgggtttcaagtctatgcctggagctggcagtggtatcatccccatttcagagaatgtctgcccccatggacagagaatgaagatgaggtcatttgccacaggaaaatccgtgcacttttattagaagaagrgaaagtagataccaggttggctaaaacaagagatgttcattgacttaaatcatcacctaaatgagaagtgctaggttcgatttgataaatgactatgtttaatcaggaaccttaaattcctaaacagatatgcaatcacgtattctcttgtcgattattcattcagtttgtttaatgagtatctatgtgaccacaccctctactgagttatcgtgtgtattgctgagcaaattcaggtattgttcttgtatt

SEQ ID NO: 353569 - DNA, 495 bp, Homo sapiens
gttattaatttcaaacttgaggtgaaattgacaatgttttcaagttaacttaaaactttgcaaacgttaaagtttcaagttaacttaaactttgcaaacgttaaagcatatagatttctaaagataaaaccatgactctcatagaaatataatatgaatgcatgtcacagattgtatttaactacttaattaatgaagggaccaggaagatgttacaaccgtttcaaaggagaattcaaacatcagatacacacatacactgtatagaatgaatttataaataaatgcaaaaatggcttttactgaaactattgatcccccaagaacatatttcatttgcatatctatatataaaaatcatttgcaccgatatcagttacctgcaatttacagagttttaacatagctctaccacactgaaaggggcaaacmccatagaatcccatagcccagaatgatgtgatttaggcacagatttccatggaagacacccag

SEQ ID NO: 353570 - DNA, 612 bp, Homo sapiens
gacttgcctgattgtcttccacatagcaggtgctagataaatacttycaatgtgaacattgtcagaagtgacagtattcatattttataattttattagtaaagattatatagtctgctgaatctaacttcaaactatggagatccaaaataaaattatcaatttctcttaggaactgaagttaaaagatgaagaatgtgagaggctttcaaaagtgcgagatcaacttggacaggaattggaagaactcacagctagtctatttgaggttggtctatttacatcttggccaacagcaacatcttgacttttatatattgacaaaattgtattttgagggaatcttgaaaaatatttgcttagcttcatgtatatttataagtcctctaagcaaaagagaaatctttaagcaatgtagagtttacaacttaagatgatgtgaaaagaaataaaaaacatctatgggccaccagtatcagattatttaaaaatgtatgtgtgcaaagaaaggaggcaaattttagtattgatttttattttaccaagtatttacgggctactttagattaactacatatgactgtacaactaagagggcaaactctttgagat

SEQ ID NO: 353571 - DNA, 563 bp, Homo sapiens
tcctttgcaagggcatggatagagctggaggccattaacctaagcaaactaatgcagaaacataaaaccaaatacagcatgtcatgttctcacttataaatgacagctaaatgatgagaactcgtggacacatagaggggagcagcacccaatggggcctactgaagggtggaggataggaggagggagaaggtcaggaaaaataaataatgggtactaaatttaatatctggatgataaaattatctgtacaacacatccccatgacacaagtttacctatgaaacaaaccttcacctgtaccctgaacttaaaakttaaaagtaaaaataaaaaataaaagcagcaagatcagcttttagaaaagaaaaatagttgattaatttttcagtgtttccatgttttgaaatacttttacataatgaaatatctttctttaaaagtaatccgaacatttacatgtttatgtcttatttttagagtatgtttttattatatattttttgtttcctcctatgttcatatatccttatatatatattgatttatttctgtctcacagt

SEQ ID NO: 353572 - DNA, 593 bp, Homo sapiens
tacagtgaaagaaaaataatgtgttcagggtaattaagtacaatagcatcaacagaatacctatatcagctgttaaacaatagcaataacgagcaacagcaggctttcagtcttcacctaaaaggctgtgctttggttaacattttttttaggtkagttgaaacatcacaggcagttgaaggaccaggaagtgagtcctctagggaagaggaagcattccactggatggtttttaaaaatgttgctcctagaggcatctgcctaatcaacaatgtgcttttttctttcttagaagtctctttgactttataaacttacctgatttcttgttctgttgtgaatgaacactggtgtagccctccaagaagcccatcacacaattgacatccttcaaagccagcaccttgttcatcataatcactgaacatagttgtaggccagatgttgggtccaggcatgcacaactgtgtctttagtcattgttttccaacagttggcaacagaatatatgacatccttcatactaaactccttttgaaaaacttccatactcatgcctctgttccctgctgctagcatgatgttcaaaaaag

SEQ ID NO: 353573 - DNA, 593 bp, Homo sapiens
tacagtgaaagaaaaataatgtgttcagggtaattaagtacaatagcatcaacagaatacctatatcagctgttaaacaatagcaataacgagcaacagcaggctttcagtcttcacctaaaaggctgtgctttggttaacattttttttaggttagttgaaacatcacaggcagttgaaggaccaggaagtgagtcctctagggaagaggaagcattccactggatggtttttaaaaatgttgctcctagaggcatctgcctaatcaacaatgtgcttttttctttcttagaagtctytttgactttataaacttacctgatttcttgttctgttgtgaatgaacactggtgtagccctccaagaagcccatcacacaattgacatccttcaaagccagcaccttgttcatcataatcactgaacatagttgtaggccagatgttgggtccaggcatgcacaactgtgtctttagtcattgttttccaacagttggcaacagaatatatgacatccttcatactaaactccttttgaaaaacttccatactcatgcctctgttccctgctgctagcatgatgttcaaaaaag

SEQ ID NO: 353574 - DNA, 579 bp, Homo sapiens
ttgaatcccacttctgtcaaattactgagacaatctgagcctaggttctcccatctggaaatctgtgtcttggttttgctacctaacagaatgaaaattaaaagggataatactacataacagcagtccccaacctttttggccccagggaccagtttcgtggaagacaatttttccacagacagggcagagggtgggaggagatggtttcgggatgaaactgttccacctcagatcatcaggcattagattctcttaagaagcatgcaacctagatcccttgcaatgtgcagttcacaatacggttcgcactcctatgagaatctaatgcagcttgctgatctgacaggaggtggagctcaagtgggaatgctcgcttgtccgccacttaccttctgccacttacctcctgctgtgtggcccaattcttaacaggccacagaccactttaggtccacagcccaggaactggggacccctgttatatagcacttaggacaatgcctctgagcagtgcttctaacctacaatgtttccyttctgggggatacatttaaatactgtctaaattcaagtcac

SEQ ID NO: 353575 - DNA, 571 bp, Homo sapiens
caactcccccgaacacaagtctggcggcacggagctgcctacttgggcgcgactccgggcgcctgcccggaatttcccaccaggtttcaccgaaacctcccgagggtgacctctacgcctcagcacggtgcctcgcgcgtagtttcctaagactgggacacgaaaccaccccaggtccacagccctgccgcgcggcgtccggtgttgtgagctgcttccgacttgttcgggaactctctcttcatcctcttcgcgaccgcggccctccgctcccggccgcgcccgcccgccgccaggtaacccgctggactcgggctccctgccccgggcgcgcgggacsgcgcagttaatgtgtaacgcgcccgtgcccgggggaggagccgccgcccgacgcccaccagcagcccagggggcggccggctgacccgggtcgccaaagtcccccccacacgccgcccccaagggcccggagcccaagtgcccaggcggagagcgagctcaccgggcctgggcatccccccgaacccccgcgtgccgcgccctgcacggcgccagcacctgcacctgccgc

SEQ ID NO: 353576 - DNA, 479 bp, Homo sapiens
aagtgtgagtcctaatgacatcattttacttcctggatcaacctgtgactgaagccagagaccctggaatttttagttacatgarccagtaattttatcttcgcttatgccagattatgtagggttttctgccactagcaactgaatatatagaaataaaggtgagaaaggaatcaatgagaattccaagttttaaagatagtatcatctacctttgccatacatagtattacccagacttggctctgatcaattttatctgttccaaaaaatcaaatctacattcaaaggaggatgtttggggctgggcagagtggctcacacctgtaatcccagcactttgggaagctgagttgggcagatcacctgaggtctggagttcaagaccagcctgtccaagagatggtaaaaccccatctctactaaaaatataaaaattagctgggcgtggtgttgggtgcctgtaatcccagctacta

SEQ ID NO: 353577 - DNA, 622 bp, Homo sapiens
aactaataagtatgactaactcaactttcttaagtcctttcacttgaaaatttttttaaaagcagcagaaccacaaaaggaacttaaatacgaattgaaaaagggagaggaaaaaaataactatttaaaaaatgaagacaaaattaacacaaacttggaataaacacttgttaaggggggaaaaaaaggcaaaataaaaaatgttttaagaatcacaaaataccagattgagaaaagcaagttaaatgaagtgaaaatgaaaaaaagggattagagagaaaattatgtwaatggaaagaaacaaaagaaatccaatatgtatataatctaaaaaaagaatctagaagttggaacaggaaaaaaaaaaagcagataaatattttgagacactttccagaaataaaagacctaaatctatagattgaaagagcatatcatatcccaaattaaaaaatgtcaagaataatcaaagcaagacctagtctagcatagctactggatttcaaagataatgaaaggatctttcatgcatccagagcaaaatgatcaagacatctataagggggaaaaaattaaaatgtaattctaaaggtttcatacccaaggatttcataccagagaa

SEQ ID NO: 353578 - DNA, 584 bp, Homo sapiens
aagtggtctgatgctccttgcatcattcatcgggtgtgtttttcatttgagctttgcaagaaagcttttcctggtctaagaatagaaattatcatsgttgtcaacattcttcatgcctgtactcctaaccgtcatcagtttgggcaaagacaaaacagcgtatgcagtctgggtttatttgaatgcagtcagaagtgtaggttatgggtacttgttaaagagatgttttgaggtcaagaactttggggaattaaagagctctcactggcccaacttattcaacattcaggggcccaagagattgtgctttcttgttctgatgaaacatctgaatatactgaacttgaaatcacaggggaaaggaagggcttttgtttcagaaagtaaaaatctcaggcataaaccaggcatatgagttgagctcaggtcaaccgccttgagcttaatggaattacagattttgaggagttgctgtactattttggtagaaataaagtccgaattttagaagacatattctgatgaacatgaatcatactttaagtttctgcagctgcttttggtgtgcaaaccccaagatgtgt

SEQ ID NO: 353579 - DNA, 463 bp, Homo sapiens
ctattcaggaatacatctgcagcctgatgaaggaagattccagaaggtgaaaaattgagagcttgaaaattcagtttctctcttagactttctctacagtaggctcactatcacattctcttctcgcaaaaggaaactgctttttaataattttattttctttttcccatttttcaaaaaatctagtatgccagaacttaatgagttctaactggaaaagaytccttgggcctttcaacaaatacaagattgttccaaacagaaatctaactattaaacaaggagctgaagtcatttcagaaacaagcaggtggtgtccattcagcttcaggtatactgatcccagggccaaccaaagatgtcaaaaatgaccagcttaaattttagccctactcgaacaggagctacatcaacgtgcacctgaactccggggaatccatagactaaaacagccagcgttagc

SEQ ID NO: 353580 - DNA, 582 bp, Homo sapiens
aaactatgtatatatggatatataaagatatattttaaaatatatattatataaaatatatattctagtaacatatakgtaaaatatatatatatttatatttttttcttttttcttttttaggggaaagcatgaatgcagtcccccactaccacaaatcatgcagtcgagtttcgcacttttggggaaatcacaggggtcagcacacccagagtgcaatggataaacctcgccctgggaaaaccaccttcgtgatcatgttatctcccctgccaggtaagaatgggatatagaataaatgttatttattaacagccataattgttaatgtaaggcaataaatataaattaaattgaagaaaaaccttgtaatgttaaatttgaattggagatatcaatatgaagtcaactgttgaaatacatgtattttttaatgctgtctactcaaagggcctggaaacaaggacatcctaggactgtgagcattctaaacacccagactttggtttccaaatactactccccactgaaagaaaccagcgtttcttggcaaaatggtgattccagatacgagacagtaaa

SEQ ID NO: 353581 - DNA, 431 bp, Homo sapiens
aaatcctaacccctaataggatgctgttaagagatggggcttttggatggccgggcgcggtggctcacgcctgtaatcccagcactttgggaggctgargtgggtggatgaggtcaggggttcgagaccagcctgaccaatatggtgaaaccctgtctctactaaaaatacaaaaattagctgggcgtggtggcgggcgcctgtaatcccagctattcaggaggctgaggcaggagaattgcttgaacctgggaggcagaggttgcagtgaggcgagattgtgccaccacactccagcctgggtgacagagcgagactctgtctcaaaaaaaaaaaaaaaaaaaaaaagagatggggcttttgggaggtaattgggtcatgaaggtggagccctggtgaatgggattggtgcctttataagagaaacccct

SEQ ID NO: 353582 - DNA, 285 bp, Homo sapiens
tttggcaccagatgtgcctgagctggagttcagcaatgcctttggtatagccctgcacaagtagatgtgctctcagkccctcaggatcctcattaatcaattagggcaaaatctggggctcattcgtgagattattgcaaagattaaaatagggaaatgaatgtggagagcttaggaggtacttagcactgtgcctggcaaaacaaatgctgctgctgttgagtgagctgagaggtattctaggaattgaattttcaaaaaaggaaatatactgtttccttcccc

SEQ ID NO: 353583 - DNA, 541 bp, Homo sapiens
ggattaagggcaaacatgtctgggaacatcctttgtgaaggataaggtgctatttggccatcagttgtggctattaaggtcttcggagcctcattctttcttccatgcagatgtagagctaacaggcaaccgtaagcaggaagacacagcacatccccgtargaaaaaccacttcctgctgagcaatcaagccacctaattcatactttttctactgtaagcatgaaggagcatacccgtgcaactttatccagaacagtccattgttctcctctaaaatgaggactcagatactcagaaggatgcctcagagataataatctaaagaaggtatagctgggttagattgaaatagtcataaaaggagccctttttttttttttttttccttagctgggagctcagtgcccctccaggagggaggagaaagccacaggcagccttgttttcttctcattagaaaccaagtcctagcccggcagaggcacattccacaggggctggttgggtttgggaggaggccggagcacagaaacatctt

SEQ ID NO: 353584 - DNA, 541 bp, Homo sapiens
ggattaagggcaaacatgtctgggaacatcctttgtgaaggataaggtgctatttggccatcagttgtggctattaaggtcttcggagcctcattctttcttccatgcagatgtagagctaacaggcaaccgtaagcaggaagacacagcacatccccgtaggaaaaaccacttcctgctgagcaatcaagccacctaattcatactttttctactgtaagcatgaaggagcatacccgtgcaactttatccagaacagtccattgttctcctctaaaatgaggactcagatactcagaaggatgcctcagagataataatctaaagaaggtatagctgggttagattgaaatagtcataaaaggagccctttttttttttttttttccttagctgggagctcagtgcccctccaggagggaggagaaagccacaggcagccttgttttcttctcattaraaaccaagtcctagcccggcagaggcacattccacaggggctggttgggtttgggaggaggccggagcacagaaacatctt

SEQ ID NO: 353585 - DNA, 545 bp, Homo sapiens
agacggggtttcacgatgttggccaggctagtcttgaacgcctaacctcacctgatccacccrcctcagcctcccaaagtgctgggattacaggcatgagccactgcgcccagccaccttgagtattcttggacgtctttgaagtaaggatggtggggagactgcaggaacagtttcagcatgggagaaagtagagggctgaaataaaaccttacataaatttcattcttgcctagagagccagtttttggtagaagcagtggcatgtttaacaactggatctccaggaaaaagaaaaaaaaaaaccaaaagacttggtttgtagtatttactgatttctatggcgtaaatactcccaccagggctgatttcaagataccaaaatgactgtaccgaaagtggagttaggaaaaatgtgcacaatcagctttcgtgagtgagtgtgaacagggttcagcacaccactgggccagctcatgcctgtggggtgagaccaagaatgaagagtctagatgaaagtcagcatgctcaagagagcacgctca

SEQ ID NO: 353586 - DNA, 545 bp, Homo sapiens
agacggggtttcacgatgttggccaggctagtcttgaacgcctaacctcacctgatccacccacctcagcctcccaaagtgctgggattacaggcatgagccactgcgcccagccaccttgagtattcttggacgtctttgaagtaaggatggtggggagactgcaggaacagtttcagcatgggagaaagtagagggctgaaataaaaccttacataaatttcattcttgcctagagagccagtttttggtagaagcagtggcatgtttaacaactggatctccaggaaaaagaaaaaaaaaaaccaaaagacttggtttgyagtatttactgatttctatggcgtaaatactcccaccagggctgatttcaagataccaaaatgactgtaccgaaagtggagttaggaaaaatgtgcacaatcagctttcgtgagtgagtgtgaacagggttcagcacaccactgggccagctcatgcctgtggggtgagaccaagaatgaagagtctagatgaaagtcagcatgctcaagagagcacgctca

SEQ ID NO: 353587 - DNA, 576 bp, Homo sapiens
ctgtcgttgaaacagtagttcagatctgcatgttctgaagtatcctttggccctcatcatctaggtcagaagtaataagttttattgcagcaataactgccctctataaaatattttcatgatgattggtcatggactgagttgcctgatgcagtaataaaagaggtaaaaaaaaatccagatctttcccacatatgttactgtacgtcttgctttctttctgcagagattcccaggtttctattggaaacagacaaaccacctcttcttctctctgctcrggatcctagcacaaacgaagcacaagcacagagtgctggcatgctctggatgtgactctccagggaacaaaggaagatggacctggcctgatgtgacttttatctgaatactcacctcattgttgctctcaaatgtgggttctaacttgtccatggctctgtcaaggatgtgcagaagcccattggaagcaatgatgtccccttgtataatttttaccttctttttgcctccatggagtttaagctttatttgattgtcctaaaacaccaaagaaagataaaataagattactat

SEQ ID NO: 353588 - DNA, 592 bp, Homo sapiens
aaacaaaattgtgatagtctgagtttttctcttaggagtggggcagatttatatgcatccttccattctaaccaacaatgcccactcataattatctagaactcatgtttactgagaacattttatgggccagacacattgcacagatgagttcatcaatcttcaattctatgtggatgtttytcatgccattttttatagataaggaaacaggcccagacaggttaaatcattttttccaagaaacactgatagtaagtataaggtctagagaatgggtcttatcacgtacagactttaggatcacagtcatgtagcctctgtgggcctcagctgcctaatttataaaatatcaagaaaatattgatgagacaataatgctgatttcaagttttgtcacgagaatttagtctctggttcaaattttgttttagataattgttgatgtcaagcttatcccttcatcttaggctgttgctcaagaagagggcaatgagactttcctaggctataaaatcctaaaatattagctatatgaaggaattctgaggtcactgaggaaggagcactacagtccttttgggaatctcag

SEQ ID NO: 353589 - DNA, 592 bp, Homo sapiens
aaacaaaattgtgatagtctgagtttttctcttaggagtggggcagatttatatgcatccttccattctaaccaacaatgcccactcataattatctagaactcatgtttactgagaacattttatgggccagacacattgcacagatgagttcatcaatcttcaattctatgtggatgtttctcatgccattttttatagataaggaaacaggcccagacaggttaaatcattttttccaagaaacactgatagtaagtataaggtctagagaatgggtcttatcacgtacagactttaggatcacagtcatgtagcctctgtgggcctcagctgcctaatttataaaatatcaagaaaatattgatgagacaataatgctgatttcaagttttgtcacgagaatttagtctctggttcaaattttgttttagataattgttgatgtcaagcttatcccttcatcttaggctgttgctcaagaagagrgcaatgagactttcctaggctataaaatcctaaaatattagctatatgaaggaattctgaggtcactgaggaaggagcactacagtccttttgggaatctcag

SEQ ID NO: 353590 - DNA, 605 bp, Homo sapiens
ccttgaattcctgggctcaagtgattctcctgcctcagtagctaggactacagaccctcaccatcctgcctggatagttttaaaaaatatttttaaaagatttttagagatggggtcttccaatgctgcccagattggtctccaaattctggcctcagcctccctagggtctgggattacaggtgggagccaccctgcccaggatcctccttttgctgagtcatcacagttttgctcattcccacatcaggctctggcccccaataccagctcagttgctcaatgggctgtttgtcctggagcccagatggactgtggccgggcaagtggatcacaggcctggccagcctaggagttgccacatgtgaggggccgaggggctcaaggaggggaacatcggggagaggagcctactgggtggaggctgggggtcccagcaggaaatggtgagacaaagggcgctggctggcaggragacagcacaggaaggtcctagaggttcctcagtgcagctggactctcctggagaccttcacacaccctgacatctgggccccgcgccacgagggtgctttcactggtctgcaccatggcccaggccctgg

SEQ ID NO: 353591 - DNA, 605 bp, Homo sapiens
ccttgaattcctgggctcaagtgattctcctgcctcagtagctaggactacagaccctcaccatcctgcctggatagttttaaaaaatatttttaaaagatttttagagatggggtcttccaatgctgcccagattggtctccaaattctggcctcagcctccctagggtctgggattacaggtgggagccaccctgcccaggatcctccttttgctgagtcatcacagttttgctcattcccacatcaggctctggcccccaataccagctcagttgctcaatgggctgtttgtcctggagcccagatggactgtggccgggcaagtggatcacaggcctggccagcctaggagttgccacatgtgaggggccgaggggctcaaggaggggaacatcggggagaggagcctactgggtggaggctgggggtcccagcaggaaatggtgagacaaagggcgctggctggcagggagacagcacaggaaggtcctagaggttcctcagtgcagctggactctcctggagaccttcacacaccctgacatctgggccccgygccacgagggtgctttcactggtctgcaccatggcccaggccctgg

SEQ ID NO: 353592 - DNA, 622 bp, Homo sapiens
gctcagcgtgagggtgggattggagctcagtttgtaactagggtcagggctggataaaaccaggtccgaggccatatctgggaccagggttagggttttttccagggccaagggctctgtctccatctttaacctgagtcagatataggatttgatttcagtctataatcaggatcaggaatcagtgtacagctgaactcacagcctagtcccgggccaatgtcccggctgtgtctgtgtttagggtcagagctatcagtgacctggggctttgcttgtggcctatagggttgggtctagagcttggtctttggccaaggtgctgactgggactgggactcagcagggggtccaggcttgggctgggatgagagctcagtcagtgaccaggatcggggctcagcctgtggccaggctygagttgagtgaggtcaggatcagggctcaaccaggtccaagaataatcttggtgtttctgctctgtagaggccatggtcagggctgggccacatggaccacaggtctcccttccagcacagccccaccctcagccccgccctggatttcccatcttcagggagaggatggggtttcttggtcttccccaagaacaactgctgcc

SEQ ID NO: 353593 - DNA, 680 bp, Homo sapiens
agataatgaaagctaggggattatttttaggatcttgaaattgtgtctgttaaaggtttttggctgtaagcaacagaaaccaaggctaagcaaaaagggcagtttataggaaaatgtgggggcatctcgggatacgtatgttcagtgattatttgagaattgagtggacaaaggctaagataaagtcagaagaagcagtggtgttatgctgacaaaggtgggtagttcagtgtctttttttcttagggtgtcaaacttcttgggtatccatattcctactcttcttctcaatatgactcaaatatcgtcttctgtttttgtcttcagcctgggctggaaatggttttcccatctagaaataagcatgcaatgcatgcttaataattcctttcagccttaactttcmttcttagattaatgaccctagctgagaacttttcagcagagaatattttcttttgaaccataattgaacttctccagttggtctcagctccccattcctagaaaagactgataagccccctgagtatctgagtcccttcatgagcttgtctagctctttctctgtttaatggctgtatctctcagatagacttatctggccttctagttctgagattctgatctctaagtggacttcatatggcctttggagtcctccctctgtaaatgaagtg

SEQ ID NO: 353594 - DNA, 680 bp, Homo sapiens
agataatgaaagctaggggattatttttaggatcttgaaattgtgtctgttaaaggtttttggctgtaagcaacagaaaccaaggctaagcaaaaagggcagtttataggaaaatgtgggggcatctcgggatacgtatgttcagtgattatttgagaattgagtggacaaaggctaagataaagtcagaagaagcagtggtgttatgctgacaaaggtgggtagttcagtgtctttttttcttagggtgtcaaacttcttgggtatccatattcctactcttcttctcaatatgactcaaatatcgtcttctgtttttgtcttcagcctgggctggaaatggttttcccatctagaaataagcatgcaatgcatgcttaataattcctttcagccttaactttccttcttagattaatgaccctagctgagaacttttcagcagagaatattttcttttgaaccataattgaacttctccagttggtctcagctccccattcctagaaaagactgataagccccctgagtatctgagtcccttcatgagcttstctagctctttctctgtttaatggctgtatctctcagatagacttatctggccttctagttctgagattctgatctctaagtggacttcatatggcctttggagtcctccctctgtaaatgaagtg

SEQ ID NO: 353595 - DNA, 680 bp, Homo sapiens
agataatgaaagctaggggattatttttaggatcttgaaattgtgtctgttaaaggtttttggctgtaagcaacagaaaccaaggctaagcaaaaagggcagtttataggaaaatgtgggggcatctcgggatacgtatgttcagtgattatttgagaattgagtggacaaaggctaagataaagtcagaagaagcagtggtgttatgctgacaaaggtgggtagttcagtgtctttttttcttagggtgtcaaacttcttgggtatccatattcctactcttcttctcaatatgactcaaatatcgtcttctgtttttgtcttcagcctgggctggaaatggttttcccatctagaaataagcatgcaatgcatgcttaataattcctttcagccttaactttccttcttagattaatgaccctagctgagaacttttcagcagagaatattttcttttgaaccataattgaacttctccagttggtctcagctccccattcctagaaaagactgataagccccctgagtatctgagtcccttcatgagcttgtctagctctttctctgttkaatggctgtatctctcagatagacttatctggccttctagttctgagattctgatctctaagtggacttcatatggcctttggagtcctccctctgtaaatgaagtg

SEQ ID NO: 353596 - DNA, 692 bp, Homo sapiens
gggatggaggaaataatgttatattctaggtgccaaagaattttatttttatcagaaaaaaaaaagaaatttagatataggcttgggaatttggaggggttcaggagttgttttgacaggattagtttgtaaagtactaccagatcactagggtgaatgacttagagaatgctaaatattctctttataggtgaacttctaagaacttttaattagctgaggagaatcgagaatcttcaagaaggaaatgaaatgcaatgcaagtatgcaatgttacttaactctgtcccatcagtgaacacactctaggtaaaacatagatgtagacaatatgcctagatattgtgacccttcctaaactcttccctgtgygtggtgctgggaagttttctgatgagcatgtgttctgaaatatttagtggtgtcagtgaaatttgacataagggtagaaatgaagtcatccatcataaatatttagctcttactttccaagttaatgaatgagttcactggcctgagagttgagaaatttggtctcaggccctgggttgtgcattagtttcaacaatttgaaagatctggagatgaggatgttggaaaaaatctcaagggctctgtgctgttctaatcccgtctgaatgttaaaattttgaaagaggctatcatattttatggcattccaattgcagcaa

SEQ ID NO: 353597 - DNA, 570 bp, Homo sapiens
gttaggcacatccatatctttcaaattttcatgcataaaatttttcacttatttctaatgagagttcctaggaaatatgtacyagtatcctcattgtacagataaagacactagggctcagagaggttaagtgacttgctccaatttacatagcagggagaagggaagcctagatttgaaccaaggtgggttttttctgttttttgttttgtcttgtcttgtcttgtctttagaagccctctatgcctctgattcctctgtaagggaatgacttcaaaggtgtagagatgtggacaaggccaggcacagtttgaagatgttttgggaacacgtgatcaagggtcacattacaggaatgttgctctttttcggggatatgtccattgatgacagagacagagaaaagaactgagcaaaagatgcatagtagggagatgggaattgaatgatgacaggtttggggaatattgaggcttgtctgtcctcacacataaaagtgaagctcaagcttgtaatgacatatcattaaaagtatagtgctcaggtggaccttcttttaaaccccagctc

SEQ ID NO: 353598 - DNA, 582 bp, Homo sapiens
ttagggactgaacctgtgctgcataatacagtatcccattgtgcctggcacactacatacagcagccataataaatatttcctgataggcaaaaagaatggaacataacaattcaacaatacatcctcccagaaagatgtttttattctatttttctgaatggcagagttcactttctcatccctacttagaatagctaaaatgtgccattcataattactacaatttttttttgtttaaaaaaatcctaccagccttgccaatatggtgaaaccccgtctccactaaaaatacaaaaattagccggacgtggtggccagtgcctgtaatcccagctacttgggaggctgaggggggagaatcrtttgaacatgggaggcggaagttgcagtgagttaagatggtgccactgcactccagcctgggcaacagagtgagactccatctcaaaaaacaaacaaacaaacaaaatcctagacaatgtatggattgtgtataaagtgggggagattatgtgcatatgttagagcaactgagacaacttcaacttggagatcaatcatcaagccttcaaccacgtga

SEQ ID NO: 353599 - DNA, 546 bp, Homo sapiens
aagggttgactccaggattctggatggaaaaggactctcaggcttcaatcagcacccgcattccccaggccaatcaaatagcctcaggactttgggtgaagcgcctgcattttagctggactttaacctaggggaaggctggagaasctgggagcacctaggatcctaagaacaaagcttgcatggcaaaagatagggttaaaagatgcagaagtaagtgagagctaaataatgtgtacacatggacgtagagtatggaacaatagacattggagacttggaaaggtgagagagtggaagtggggagggtgacgatcaattacctcatgggtacaatgtacagtatttgggtgatggacatgctaaaaaccaagagttcactactagacaatatgtgtgtgtaacaaaattgcacttgtaccccttaaatgtataccacataaaataattattgatattttaaaaaagaaagtgaatcttcatgacatcatttgagtcatgaatttagttctatttactatggtcatctttatctccattttacag

SEQ ID NO: 353600 - DNA, 608 bp, Homo sapiens
gttagctgaagctatagaagagagaagtgatgttattttgctgatactgacatgtgcatggattttattcttaggaaaggggtaaaattaaattatcaaagttaatggtaggttctaaacagaagtatggccaggaaaatgcaaaacaaaagtcgctatatggaacctccatgatggaaccttcacaatatctgtcagtgatttaaaaatgcctcccttggaagatgttgcagtggtgctggaaattacatcctaygtggaaaacaagggaagtgcaatgcatttcctgaaaattgtactataaaggaggttcatctttcccaaagtaagagaaaagcaagttgtacttatgctgtaatcccataggtggtttactactttttttcccatggcagaaaattcacagccatattacttgatgtcttgggttttaatacagccaaactctttgtaagcctgtggaaatgggtgttgatataatgttgttataaatcagtcaaagacgaactaaataaatattcagcttcattagttataagaagggacaatttaagaaatgaaccactttacctatgaaattagtaaatactgaagaaaatatgaaagct

SEQ ID NO: 353601 - DNA, 614 bp, Homo sapiens
actaattatttttgttgttttcattctgtgtgtttcccaaatgttctatactaagcatttgctaaataatgttaacatgtatattaatgcccattttatagtccctggccaatatgagtaatggaaaagcataatccttagcacttgaagactttttcagcaccaaggacagcaaaacgtcatcgtaatcagcacccayaagcatccaccttaggattgcctaggggccggccgctctcataaatacataaaggggaggaaggaacaaatgtagcaagccttagattgagccctgcgggaaattctacttcccatttgcaaagaacaaggctgggttctttcttcacgatgtctctgccacctgcacacagtgctagtattgtgtgtgacgtttctctgtatctcttgggaactcattgtgtttgttggggcttagagaaaagcgagggaaagtggggaaaatcagaatcggtttttcagaggcaggcttagaggacacctgcaaggcagggagaatggcagattacattgggatgcaacgtgggcctgagttctgaatatgttgactttatctattaataacgcatttcattaggaacaggggctattgatgt

SEQ ID NO: 353602 - DNA, 620 bp, Homo sapiens
gggaatataaagatggatgacatgaagccctgccctgaagtggctcagtctagagggaaatgytttgggattggggcagggaatgggaggcaggaagcttggtctctgacaaccagccagagaagttaatcagaggaagacttctttttctttcactgcccctctaattgtagaacaggccaagcttctggtgggataccaggcaaattagttattgcaacaatttgatggctgcccttctggaaggaggtgcaggattctatggaggcacatggcaaggtctccattccagttggaggaggtgaggacagacgtcttctcaaaggagggtacgcttgttgctgcctcatgaagggtgagtaggggtaaggacaatgaacatggggcaggtgcagggcagaggaaacctcacagagagaggtttctatgtattccagaaatgtttattgagcacctaatgtgtgccaggtgcagttctaggcactgggaatacggcaatgaaccaaatgcaaaaaatctgtgccctcatggagcttagagtgtaaaggtggggcctgcctctacaatcaggcatgaccgacaagcaaacacataggcagtgaggcaggtggtgacaagtc

SEQ ID NO: 353603 - DNA, 506 bp, Homo sapiens
gcgttgcttctgattcctgatacatttttgccccgatgttgcagctctctaggtattctctctctgctctgactgttccttgtctcaccattcagagagcaagacaacatatctcttctgaaggattacaaaggtgtgtaatttgaccacgtagataatttacttcctttccaaagcgtcacctttgtggggatgtgggttaatgagatgcacagacttggaccctgctcacagatacatgaagttttgcatgaaacacgtggaatgtgcattggtctaggrcagaaaaaatcctggtctatgccaggctctctcaccaaatccctgtgtgaacttcaggaagtttggagcatccgggtccttgaggtgcccgttggaaggtcttagataaaggaggtgcttccttttagctttagatacctatggttttagaattgtctttcttaatttcttcaaatcattattattgtttcccttctcccagagtcaatttaaacatttattcc

SEQ ID NO: 353604 - DNA, 506 bp, Homo sapiens
gcgttgcttctgattcctgatacatttttgccccgatgttgcagctctctaggtattctctctctgctctgactgttccttgtctcaccattcagagagcaagacaacatatctcttctgaaggattacaaaggtgtgtaatttgaccacgtagataatttacttcctttccaaagcgtcacctttgtggggatgtgggttaatgagatgcacagacttggaccctgctcacagatacatgaagttttgcatgaaacacgtggaatgtgcattggtctaggacagaaaaaatcctggtctatgccaggctctctcaccaaatccctgtgtgaacttcaggaagtttggagcatcygggtccttgaggtgcccgttggaaggtcttagataaaggaggtgcttccttttagctttagatacctatggttttagaattgtctttcttaatttcttcaaatcattattattgtttcccttctcccagagtcaatttaaacatttattcc

SEQ ID NO: 353605 - DNA, 509 bp, Homo sapiens
cactattatgggtaattcagaagcaaacttagggctttagaacagaagcaaaacataaccattccaacatatactaaaaccatatgggagccaccgaagatcacgcaaaccagaccaggataattcccttagccacactgaacgaataatccttgtcatgcccttagcaaagaactgaaggctgagatcaagttttggggtgcctgctctatccatatttccttctttggaagttccctacccatccctgatcctagagtgctatttctactgtagaatccatccttgtggccacagctgaatggatggagtgagtcatgtgatccaagatgaattactgcatagtctggactgaatcagtcagatttgttcttcacaaatctaatgtaaaagacataaagaaaatatgtaggctcttaatttgcaacttaggtagagttcattcattcattcatttatgaactaatgtttrttgaatgcccacttgcagaaacagcaccctcagatcc

SEQ ID NO: 353606 - DNA, 575 bp, Homo sapiens
tattggaacataaaacattgtttaaatatttatccccaaactattaaaaattttaatttcctgctctcaaatgtttgtaaaaacttttttattttttcatatttttggagtcaaggtcttgctctgtcacccagactggagtgtagtggtacgattacagctcactgcagcctcgacctcctgggctcaagcgatcctcccacctcagcctctggagtagctgggatgccagccaatccacatactgaataccactctttcagggcatgggaagtttgctgagaaacaattccttttacatgactgacaaaggaggaaatgatgtttgtgttttgtgyttcagttccacatgttggtcaaagaatagataatctaagatagtgttactcactcatcttgtggttggaagttggcaaccagagtgatgaattgttgactgccaagccttgtttctctcccacgtggcctcttacactccagcaggtcagcactttttgacatccagttaattgttgtttcattaagttttgtataccacatgaggtaggggtctaacttcattctttttcatttgg

SEQ ID NO: 353607 - DNA, 438 bp, Homo sapiens
ggtgggagctgacaacccattcctggggttggcccccctgccacagctggaaaccgcccaggggtgggctcaagcgggctgcgcacacgctcagcaccagctctgtccagagattcaccggcygtccccggtgcaaggatacttaagacgctctccaaatgcagtggacttgaaccttctccttggctgctgcagggctgcagggcctgcagtctccggtaggcgcagagttgctgcggcttctccaggtgctcgtccccttttctgcgtctgacctggttgtcaggatgagacctgatccttgtcaccggcctccggaagatgcagctggtgagtctcatggggagagcagacctcgcagctcgtctccgatgggccttggccatgtggattcctcgtttcttctgtaaagcccagggcatcatgttccttttgagc

SEQ ID NO: 353608 - DNA, 438 bp, Homo sapiens
ggtgggagctgacaacccattcctggggttggcccccctgccacagctggaaaccgcccaggggtgggctcaagcgggctgcgcacacgctcagcaccagctctgtccagagattcaccggctgtccccggtgcaaggatacttaagacgctctccaaatgcagtggacttgaaccttctccttggctgctgcagggctgcagggcctgcagtctccggtaggcgcagagttgctgcggcttctccaggtgctcgtccccttttctgcgtctgacctggttgtcaggatgagacctgatccttgtcaccggcctccggaagatgcagctggtgagtctcatggggagagcagacctcgcagctcgtctccgatgggccttggccatgtggattyctcgtttcttctgtaaagcccagggcatcatgttccttttgagc

SEQ ID NO: 353609 - DNA, 595 bp, Homo sapiens
tcctcggggtgcacagttgggttgtttattagaaacctttcttctttttgaggtagggtgtttattgctatgaactttccttttgctatgtgttaggggtttctgtatgatgtgtttccattttcattggtctcaaggaatttttaaatttcccttttaatttcttcaatgagccatcagttatttaagagcataaggtctaatttccacatagctctaagttttccaaggtttttatagttgttgatttttagttttattccactgtggtccaaaaagatacttgatatgatctctatcttcttaaatatgttaagacttgttctgaccaggcgcagtggctcacgcctgtaatcccagcactttgggaggcccaggygggtggatcatgaggtcaggagattgagaccatcctggctaacacggtgaaaccccatctctactaaaaatacaaaaaaaaaattagccgtgcatggtggcagacacctatagtcccagctactcgggaggctaaggcagaagaatggcatgaacctgggaggcagaggttgcagtgagctgagattgtgccactgcactccaacctgggcaacag

SEQ ID NO: 353610 - DNA, 579 bp, Homo sapiens
aaaacaaaaagttgcgctgcatgcacacattttgcaaccatgtgaatatcccttcattttcccttttccaaaggaatcccataacttcaaagccagcaggtggagtggatgtacactactctgtttatatctatggaggagacatttgctttaattaagcagaaaagtcctcaaccctttgtctgcaaccctagaagaagacctcacatgattttytttttttttttttttttttgagacagagtaccacggcctcccaggctggagtgcagtggtgcaatcatagctcactatagcctcgaattcctggggctcaagcaatcctaccgcctcagcctcctgtgtagtggggagtacagcaatgcaccactatgcttagctaattttgtaaatttttgtagatatggggtctcactatgttttccagggcgtctcaaactcctggcctcaaacaatcctcctacctcagccccccaaggtgctgagattacaggcatgagccaccgcgcctggtttgaaatttcttcaaataaatgatgataactcttgcctattttaacattgacagtcattagcatt

SEQ ID NO: 353611 - DNA, 579 bp, Homo sapiens
aaaacaaaaagttgcgctgcatgcacacattttgcaaccatgtgaatatcccttcattttcccttttccaaaggaatcccataacttcaaagccagcaggtggagtggatgtacactactctgtttatatctatggaggagacatttgctttaattaagcagaaaagtcctcaaccctttgtctgcaaccctagaagaagacctcacatgattttctttttttttttttttttttgagacagagtaccacggcctcccaggctggagtgcagtggtgcaatcatagctcactatagcctcgaattcctggggctcaagcaatcctaccgcctcagcctcctgtgtagyggggagtacagcaatgcaccactatgcttagctaattttgtaaatttttgtagatatggggtctcactatgttttccagggcgtctcaaactcctggcctcaaacaatcctcctacctcagccccccaaggtgctgagattacaggcatgagccaccgcgcctggtttgaaatttcttcaaataaatgatgataactcttgcctattttaacattgacagtcattagcatt

SEQ ID NO: 353612 - DNA, 579 bp, Homo sapiens
aaaacaaaaagttgcgctgcatgcacacattttgcaaccatgtgaatatcccttcattttcccttttccaaaggaatcccataacttcaaagccagcaggtggagtggatgtacactactctgtttatatctatggaggagacatttgctttaattaagcagaaaagtcctcaaccctttgtctgcaaccctagaagaagacctcacatgattttctttttttttttttttttttgagacagagtaccacggcctcccaggctggagtgcagtggtgcaatcatagctcactatagcctcgaattcctggggctcaagcaatcctaccgcctcagcctcctgtgtagtrgggagtacagcaatgcaccactatgcttagctaattttgtaaatttttgtagatatggggtctcactatgttttccagggcgtctcaaactcctggcctcaaacaatcctcctacctcagccccccaaggtgctgagattacaggcatgagccaccgcgcctggtttgaaatttcttcaaataaatgatgataactcttgcctattttaacattgacagtcattagcatt

SEQ ID NO: 353613 - DNA, 435 bp, Homo sapiens
ggtgggagctgacaacccattcctggggttggcccccctgccacagctggaaaccgcccaggggtrggctcaagcgggctgcgcacacgctcagcaccagccctgtccagagattcaccggccgtccccggtgcaaggatacttaagacgctctccaaatgcagtggacttgaaccttctccttggctgctgcagggctgcagggcctgcagtctccggtaggcgcagagttgctgcggcttctccaggtgctcgtccccttttctgcgtctgacctggttgtcaggatgagacctgatccttgtcaccggcctccggaagatgcagctggtgagtctcatggggagagcagacctcgcagctcgtctccgatgggccttggccatgtggatttctcgtttcttctgtaaagcccagggcatcatgtttcttttg

SEQ ID NO: 353614 - DNA, 483 bp, Homo sapiens
  misc_feature (1)...(483): n = A,T,C or G
gtgactttctggtttgccactccaatttgagtactaattaagtggtagtcacatcttcaacataaaaaccaaaataatggcatcctcgtggaaggaattttgtcagaaaaatgctgtgtactttgctgtcttcctaggatttgttctgtttttgtttgtttgtttttttttaatggttccacaggctgcgtaggaatacaagctaaccaatattttaattacagatcattaagcagctttgagtctggaaaatttgttgaatgtaccgagcaattagaattggttaccaggagaaaatatcartctacttgctggaggatcaaaagaaaaaataggtaggtatttgagaaaatagttttaaagttatttntagtggacaagttgctcaaaatgtttggcttagtatattttactggaaaatctggaagttattttacatttntgggggggcagaatcccatgtgaagcaacaaatttagggct

SEQ ID NO: 353615 - DNA, 544 bp, Homo sapiens
ccgggcatggtggcgagcgcctgtaatcccagctactcaggaggctgaggcaggagaatcgcttgtacccaggaggcagaggttgcattgagctgagacagtgccattgcactccagcctgggcaagaagagcaaaacttcatctcaaaaaaaaaaaaaaagtaagtaagtagataaataaagaaataagactgcttcaatttgcttttcaggtttgaaaaggcctctgtggagtaccaggaacacctgtgtgccatgataggtgttcattgctgcatctccagctttgacaaatcggtgctcaccttagccaatgctgggtgtaacagtgccagcccgaaacattgtctgaatggtgagcgttcagtatttttaaataaagcaaaagttatagtaatatatttcgtactgatgatcttatcatgtttttaggtttctgtgctctttgaaatatttctaattgatctgaatctctctcttcttaytttataaaatactttcaggtgaatccagaaaaactgtgctgtccaaaccgactgactct

SEQ ID NO: 353616 - DNA, 516 bp, Homo sapiens
  misc_feature (1)...(516): n = A,T,C or G
gattcatattttctttaaaggaaataaaacacctcactgttgaagtcaccttttcaattcttctggatcacacttccctcccttcctctctccttgcctagaggaaaacactgttttgaagctggtctgtattctccctgtaactgtttttctttcattacctaggtatgtgctacatgttttaagtatatatacgttgtatcatacatgtgttcttctgcaacttacttttctctacctctcaatattaagttcttgagatttagccatgtggatcatgtaaaacctagttcctttgtttcaactgctatagagtatattccaatatttgrtaataacacaattnatttatccattgtctcttggatggacatttggattcctacagacactcttaggctgggggtgctggtatatgcctataatcccagcactttgggaggctgaggcgggaggatcccttgtttcaggagttcaagaccagaaaatactcttccttatgtctccttattgata

SEQ ID NO: 353617 - DNA, 617 bp, Homo sapiens
gttccagtctttttctgaaccatgttatttgcttcatttcattggctacagcttattcactcaccattaattagacgcactactttaaatgtgaatgtgctaggaacttagaaatttgtctttttccttgtattgcagttttgcagaggggctatacctacatgaaaactatgttttaaataattaaactgtctcaagatatgtaacaatcatatatattaaggttgatgatgatayaaggtgacagaaacacacagaagagggagaatgaacccttccagggatgacggtatggaaaggggatatttgtgtcaggttttgacagataaataggagttcaccaaggggagaagggagaaatggcttgagtcaagaaagggcaagaggcattcagaagagagagtgaagctcgggaggctggagaaatggttagtaggagcatggcgccggagaggcaaaatgctcatcagctcgttcccacacctgaccacctattccactcctcagggtcatcttccacctcaaccagagcagaagccccagcaccagtctctgtgcttccacccttgcccttctgtcatctgtcttccacattgcagccaaagggatcttcctga

SEQ ID NO: 353618 - DNA, 608 bp, Homo sapiens
tctggctgaggaagtcttgtagggattggaggtatcatgagtaaatggatgctattccagctggaagccaggcagatggagctgtagcatccrtgacaagctctgagacctattctcagcagaactgaggcatgctcaacaaggtaagtgaatcccagatagaaagcattgagctgtgggtccagcaacagcagggtggccagtggagctgaaagaaaagagcatgggctttggaatcaagtcaaacctggttcagatcttggtcccatctcttactcatgtgtgatgttgagcaagataatttccctgggcctaattccttcttctatcaaatagaagcaagaagacttgtcttgcaggattgtaatgaagattacacaagctaccctctgtaaagagcccagagcgatgcttgacacatggggggcactgtatgaatacttgggaatggatgaaaggaaagatagaattcaagtgaaggaatcatgaaatacttcaaggaggagatagcatttgaattggaccctcaaagttgggtagggtttctgtgaacgaaggtcagagatgagtccaggatgggccgtctcttggaaccttttgaggcaggc

SEQ ID NO: 353619 - DNA, 535 bp, Homo sapiens
atgcaaatcatccatctcaccgttgtcagtaaaccatgctaacaaactcgtgcaaaccagttccaatttccttgggctgatagttacaaaacaacattattaatcactacatttcatggcttgactaagggtcaatgtcatcgtggtactttatcaaaatagcttgggtcaattctatatttcaggaattaattttcatatccaaggatgaagtcagagtatttatcccctaacaatctccctgcaaagtcccctcttggcyggctgtgtccttcgactgaagaccatggctcctcccgaggaagctgactctccatgcctctcattccctggttcctggtaactactcctgcctcttagccttttggtcctagggatggtaaagttctgcttctaccaagccccagatattttcttatccctttagtatcctctacccacattttcctacccagcccttcagaaagaaactttttgagtcactctattttcagtgtgtgatttcttactttttgggatctggactgattcaagg

SEQ ID NO: 353620 - DNA, 608 bp, Homo sapiens
tctggctgaggaagtcttgtagggattggaggtatcatgagtaaatggatgctattccagctggaagccaggcagatggagctgtagcatccatgacaagctctgagacctattctcagcagaactgaggcatgctcaacaaggtaagtgaatcccagatagaaagcattgagctgtgggtccagcaacagcagggtggccagtggagctgaaagaaaagagcatgggctttggaatcaagtcaaacctggttcagatcttggtcccatctcttactcatgtgtgatgttgagcaagataatttccctgggcctaattccttcttctatcaaatagaagcaagaagacttgtcttgcaggattgtaatgaagattacacaagctaccctctgtaaagagcccagagcgatgcttgacacatggggggcactgtatgaatacttgggaatggatgaaaggaaagatagaattcaagtgaaggaatcatgaaatacttcaaggaggagatagcatttgaattggrccctcaaagttgggtagggtttctgtgaacgaaggtcagagatgagtccaggatgggccgtctcttggaaccttttgaggcaggc

SEQ ID NO: 353621 - DNA, 535 bp, Homo sapiens
atgcaaatcatccatctcaccgttgtcagtaaaccatgctaacaaactcgtgcaaaccagttccaatttccttgggctgatagttacaaaacaacattattaatcactacatttcatggcttgactaagggtcaatgtcatcgtggtactttatcaaaatagcttgggtcaattctatatttcaggaattaattttcatatccaaggatgaagtcagagtatttatcccctaacaatctccctgcaaagtcccctcttggccggctgtgtccttcgactgaagaccatggctcctcccgaggaarctgactctccatgcctctcattccctggttcctggtaactactcctgcctcttagccttttggtcctagggatggtaaagttctgcttctaccaagccccagatattttcttatccctttagtatcctctacccacattttcctacccagcccttcagaaagaaactttttgagtcactctattttcagtgtgtgatttcttactttttgggatctggactgattcaagg

SEQ ID NO: 353622 - DNA, 535 bp, Homo sapiens
atgcaaatcatccatctcaccgttgtcagtaaaccatgctaacaaactcgtgcaaaccagttccaatttccttgggctgatagttacaaaacaacattattaatcactacatttcatggcttgactaagggtcaatgtcatcgtggtactttatcaaaatagcttgggtcaattctatatttcaggaattaattttcatatccaaggatgaagtcagagtatttatcccctaacaatctccctgcaaagtcccctcttggccggctgtgtccttcgactgaagaccatggctcctcccgaggaagctgactctccatgcctctcattccytggttcctggtaactactcctgcctcttagccttttggtcctagggatggtaaagttctgcttctaccaagccccagatattttcttatccctttagtatcctctacccacattttcctacccagcccttcagaaagaaactttttgagtcactctattttcagtgtgtgatttcttactttttgggatctggactgattcaagg

SEQ ID NO: 353623 - DNA, 623 bp, Homo sapiens
tttctcttgtttgactgatcttaattttaggactaagggacctcattggaatacacttcttcggaaaggttttgcgttttcttctgctaggtactcaaaggcaatgtcaaactaggaacactaattcctcagcttcaaattttatgtaccacataagtagaatacactcaaaccctactcttgcattagaataaggtagtagttaaaattcttggggaagatatatttgagggagagagtttgttttgggtgcccctcccctcacacctgcaagcctaaatggagacaratacattatcattttcctttgccagaacagggatttttcccatctaacccaatctttcattccaggtacagctccttaagattcttgaatttactacgcagaggcctaagttttctataggcccaaggccctggctccctgccttgacctttttcccctctctccctcctcttctttcttcttggcgtcctttttctgtttcctccttttcctcctttttctttgtagcaagtgccctcaaggcagcctggattttagttcttctcaccactcttgtttgctgctttcattttgctcttaactcctgtggatttcccttgttcatgaggtcacc

SEQ ID NO: 353624 - DNA, 535 bp, Homo sapiens
atgcaaatcatccatctcaccgttgtcagtaaaccatgctaacaaactcgtgcaaaccagttccaatttccttgggctgatagttacaaaacaacattattaatcactacatttcatggcttgactaagggtcaatgtcatcgtggtactttatcaaaatagcttgggtcaattctatatttcaggaattaattttcatatccaaggatgaagtcagagtatttatcccctaacaatctccctgcaaagtcccctcttggccggctgtgtccttcgactgaagaccatggctcctcccgaggaagctgactctccatgcctctcattccctggttcctggtaactactcctgcctcttagccttttggtcctagggrtggtaaagttctgcttctaccaagccccagatattttcttatccctttagtatcctctacccacattttcctacccagcccttcagaaagaaactttttgagtcactctattttcagtgtgtgatttcttactttttgggatctggactgattcaagg

SEQ ID NO: 353625 - DNA, 552 bp, Homo sapiens
gttttcacttatagaaacaggaagtcaaatactgcatgttttcacttacaagtgggagctaaaccaagggtacatgtggacatccagagtggaataacagacaccggacacagcaaaaggtgggagggggtaaaggggataagggttgaaaaattacctattgggtataatgttcactatgtgggcgatggctacactaacagcccagactccaccactatgcagtatatgcatgtgagaaatctgcacttgaactccataaatcttttttgttttgagacagagtctcaatctgtcactcaggctggagtgcggtggcacaatctcagctcactgcaacctctgcctcctgggttcaagcgattctcctgccttagtctcctgagtagctgggtttacaggtgccygccaccacacctggctaatttttgtatttttagtagagatggtgttttgccatgttccccaggctggtctcgaactcctgactgcaggtgatcctcctgcctcagcctcccaaagtgctgggattaaaggagtgagccaccgtgc

SEQ ID NO: 353626 - DNA, 552 bp, Homo sapiens
gttttcacttatagaaacaggaagtcaaatactgcatgttttcacttacaagtgggagctaaaccaagggtacatgtggacatccagagtggaataacagacaccggacacagcaaaaggtgggagggggtaaaggggataagggttgaaaaattacctattgggtataatgttcactatgtgggcgatggctacactaacagcccagactccaccactatgcagtatatgcatgtgagaaatctgcacttgaactccataaatcttttttgttttgagacagagtctcaatctgtcactcaggctggagtgcggtggcacaatctcagctcactgcaacctctgcctcctgggttcaagcgattctcctgccttagtctcctgagtagctgggtttacaggtgcccgccaccacacctggctaatttttgtatttttagtagagatggtgttttgccatgttcyccaggctggtctcgaactcctgactgcaggtgatcctcctgcctcagcctcccaaagtgctgggattaaaggagtgagccaccgtgc

SEQ ID NO: 353627 - DNA, 563 bp, Homo sapiens
cttggtcttgtaacgacatccagatagcctgggacattattaacaagtgtaatcctgaccctgacctcaaatctcaagaaatagtttatgtgagttgggcctgggaacctgcattttaaatacattctccaggtgtccttgtgctcccaagtgtgactgccctatattgaaactgttgctttacgcytttttgaggggcgtagaattagtagggatattatcttttcaaatttgctatagttattttgttataatgttttcacaattgttaggaggaaaagaagtgtaattttccttgagcattccaaagaaaagtcattttaattatagacatcgtaatagtcccccattaaggtgcatagcttaacctcatctacgtgggtaggttaagtatcaagagagaaaagtcttgcactaagtaaaggacactcttatcattattaatcttcctggtaatagatatttatgatacatttaaggatcttttgttattaaccattccaaagcccccttggttctgtttctagcactcttctggctcctgccttgtggaggctgggatg

SEQ ID NO: 353628 - DNA, 582 bp, Homo sapiens
ttgtgtctctgtctgacaacagggaagttcgcctttgctgtcccttcctgcctgacctcatccttaataatcctaccaccacactgctcctgctcccaccccttcataacagccagtgatacttgcttttcttcgccaagcctgccttgggtagacagctgttgtgagaaatgactgtttttctgtcaccctgaagggttttcaaataaagctcctttattgcagtttaaagacacctgaccatgtagtaccaatggtgttacttaaccaaaagyggtatgctggggtgctaatccattccacccctttagctgatctgataagatggttctccttgtaggccatgcaaatatttctgagcagtgcacagagaccttcaccttctgcctgtctaccactgtctatggcacattgtgcactgctggcttcttttagacctggggtggggggataaagtgcaatatttcaggaaacaagcagccatgaagaaaacagacttgacctgaaattctactgatctcatttcaagattgcagcttcttttcctgcccactgtgtggccttgggaaagtatcagaactt

SEQ ID NO: 353629 - DNA, 587 bp, Homo sapiens
gttattaatcatggctttctccttcagctggaatgtaagctccataaaggcagggatcattgcctctgatttatccaagtacctagaacagcactggcaaggagtagacactgagtgcatattcgttgagtagatgaattaatgaatatttgcccttcaattatgagcaagctgaagagttggacttcattgatgtggctgatgacatcagcttgggatttgttgttgtgggcaatggaattgaaggaagttaagcagaggaattatgtggtcatattttgtttcagagatgctcgtccagtggttgtgtggaagggagaagaggatcaggaagacacaatccaggtgagggatgaggaggaaggaggttctagggcaaggcagggagtgtggggattggggagagggagacatcaatgggattagatagacttgatgctatgggatgcctagaarggagaactgaagcagatccctcactttgaagctgagcaactgggtggagaatctggtcattaattgactctgagattgtggttatggaaaacatgttgtgaaaacgtgtgtgtgtgtgcacatacactagc

SEQ ID NO: 353630 - DNA, 572 bp, Homo sapiens
tgattatctgactaccttctgtttggtattctagggygaggaccaaatgcactggtgaaatgatttctgactctgaggcaacacagtgcttcccccagtcagagcagtgagcacagggctctgtttcctggtggggccaaagtcgagagttcagcatgtcctgcttcctctctgtcctgggattcctggggctggcacatctcttccctactcttttttttggatcctcttctgttgtctcctcttccgtcctgtcctcctcatcacataactgtatggttaaccaggactttatatctttcacaccctctgtgctaactcacatggggtccccaatcctaaggggtttctcatatgggaccttgtggaccccaggctcctgggggcagacaccccaccccacagtggtgaagaaccaggctttggtcccaactctgctatgggcactgtacatgaaacctaaggaaaatcctttttttttttttgaatttcaaggctctcatctggaaaggaggataataatgactgtcctgtatttctaaatcagaatgctggaatttgagagttgagca

SEQ ID NO: 353631 - DNA, 573 bp, Homo sapiens
gcaacttctctgttgggtggcaccctctgtggtaggaagaactgtctagagaaataactacataaaaataattcctgaaaaaaggatatttctattatgccataaaaatttcaatttgggccatatttgataaattttctctgaaatttctgaaaaactttttatctcctactaaaagcattttatgaaagggggatatgcctgtggctgaggggcagttatgtccagttagattcttagttttcatacttcagttattccttttggtgacatgttcactactgctaggccaacaagggtcttccttggccaccatgcagaggagagtagatttttgtcctgctatgcagtggggactattttagaatgctgagcaaggagaatmacatttctattttctttctttggcatggagtgggggcccgagttgagggtattaagtagatgtctgtggatgagcttggaaggccagaacacatcactgatgcatggagagatggaaaggatttaaaagctattaagcagataaagtctggattgatggaacttttaatgattggacagaagtgagga

SEQ ID NO: 353632 - DNA, 580 bp, Homo sapiens
gaatttattaaattcttgggtcctcagtttctttctctgcacagcagagcttttgtatcaacttggcataatgttcatgagaagccagtaagaaaatattagtaagggcctagcatggtacctggcatatggctgcatccaaacctgttgattcctcttccctgaggttcctgatggagagasgtcatttccctaaatgaacaggcaagctagttgcagcgcagtggccagtgggagtgtctgttttgtatttgcatcgtgggcactgaaggttgttggcagccatgggtggctgtgtgtccaattaacctggctgggagatgtggagatttttattggagcaggataagggtttgaaagagttcatttcaaagcttgttcctttatttcatatcaggaaacctctagcctgcttccttccctggttttgctggtctagaatgtacctggctacaggatgtggtaggatctgcctgatccaggctttggacaataatccttgatgctgcgattgaacccagtgtgaaatagtccatgatgccttaccatttagggaatggaaattgcattcttcacacca

SEQ ID NO: 353633 - DNA, 591 bp, Homo sapiens
acttcttttcacttccaaacttctttgtgtgtgtgttccagtaacactttattcacagacactaatatttaaatttcatatcattttcacatgtcacaaaatattcttcccccaccaaaccctttataaatgggaaaaccattcttagctcacaggccatacagtaacagattgttgtttgttgccctctgcactgtagtgaccaagagcacagcttctggagccagatcgcttgaggttgaattggttccrttgtttgctagctgtgtgatcttgggcaagttacttgatgtttttgcacctcagatccccatctgtgaaatggggaagtggcaccattctgtatgattttttttattatttatttatttattttttttgagacagagccttgctctgtcacccaggctggagtgcagtggtgcaatctcggctcactgcaactgctgcctcctggcttcaagcgattctcctgcctcagcctcccgagtagctgggattacaggtgtccaccaccatgcctggctaattttttgtatttttagtagagacggggtttcaccatgttagccaagatggtcttgatctcct

SEQ ID NO: 353634 - DNA, 626 bp, Homo sapiens
tctttggttcactgcttaatctccagcacccagagcagggcctgatgagaatacaatacacatttgctgaacggatacattgaatttgtcaaataaattytcaacagattcaaatatagaaatacattccagcagatggttaatttctgtttagttgaggtgttctattttagccctttgatcctggaatgtcactcgagtgagcaccaggaaagaaggggccagtggattcttcaacaacgaagcccttgaatagcctctggccaaataatattggaaaaacctcaaaatatgcatgtccagtatgaacagcatgcagccaccataaggaactttgtttataaatctgtgcttattcttttagtgtcaagagaacatgagaaaactgcacaccccattgagggatgggacaaggaatttggaaagatctgtggttctttagcaccttgaaatcactcccaaattgtcttctattgccaaaattaagtttttgtctgttttggaggatagtttttgagagaaatgtgttaagtccaatgacactgggttttctagatgttaccatttttggtgaccaggtgcactgctgcgaccacaggttggcagctggaaaggcactaactggc

SEQ ID NO: 353635 - DNA, 626 bp, Homo sapiens
tctttggttcactgcttaatctccagcacccagagcagggcctgatgagaatacaatacacatttgctgaacggatacattgaatttgtcaaataaattctcaacagattcaaatatagaaatacattccagcagatggttaatttctgtttagttgaggtgttctattttagccctttgatcctggaatgtcactcgagtgagcaccaggaaagaaggggccagtggattcttcaacaacgaagcccttgaatagcctctggccaaataatattggaaaaacctcaaaatatgcatgtccagtatgaacagcatgcagccaccataaggaactttgtttataaatctgtgcttattcttttagtgtcaagagaacatgagaaaactgcacaccccattgagggatgggacaaggaatttggaaagatctgtggttctttagcaccttgaaatcactcccaaattgtcttctattgccaaaattaagtttttrtctgttttggaggatagtttttgagagaaatgtgttaagtccaatgacactgggttttctagatgttaccatttttggtgaccaggtgcactgctgcgaccacaggttggcagctggaaaggcactaactggc

SEQ ID NO: 353636 - DNA, 583 bp, Homo sapiens
atgagaaaactgcacaccccattgagggatgggacaaggaatttggaaagatctgtggttctttagcaccttgaaatcactcccaaattgtcttctattgccaaaattaagtttttgtctgttttggaggatagtttttgagagaaatgtgttaagtccaatgacactgggttttctagatgttaccatttttggtgaccaggtgcactgctgcgaccacaggttggcagctggaaaggcactaactggcccttcaagaagtccctgcataatggaatgttgctgcagacagcaatgagggaccttgggtttggaattcttatggakctctcagggagtgctatcttattctccccactcagctcctagatctacacagagccagcttggttttgtgctttatagtattcccaaggttttcctttacttcgtgacagcacagggactggataaggttgcctggattccaccaaggcatgttttctttttctttttttttgaaacagggttttgctctgtcacccaggctgcaatcttggcttgggtcaccgcaacctccacctcctgggttcaaacaattcac

SEQ ID NO: 353637 - DNA, 542 bp, Homo sapiens
ggcccaccaacacatattcttgattggaactctctgttactctaatcccacaatgataggtggccttcagagtggctctcgtctttattctgatccctcttcacagggcacttggtaaaacctgcaggcagaagtggctctgagaaatgtcagttccatgattggtcacttacctagattggaaggtcctcttctttcattattcaagcctcttctcattcctgagttttttattccccaggtctcatgttggaatatcactttcttatcttgggtgatccccagactttctgcctgcaattatacaaacaacaaagctytctctttaccgaagacatcactaagtgggtcaaataaataatttctaggctattaatatacaccccaaattgcagtatgtgtccatctatttttgactcatcaatgaataactgtctcatcacagccttaccagctttgagtattattactttttattaggctttgccaaattaaaagacaaaccatgataaaatttcattactggttcagttttattcctt

SEQ ID NO: 353638 - DNA, 600 bp, Homo sapiens
attcagggacccaggctcctttggtctgttggctctgctgttgactggggctcctgagccccactttatcatcttcatccagctttyaatggaacagggagcttggaggatcttgtgggggaatatgaagatctgggggtgtgtatgagatctatatacccttttcccaattccaccaaacaaaactcaattatgtggccccctaaaagccaggtattgaaaagtgtcacctatccagtatgccacagaaagagaaaacatggaattcatgagcaaccagcttgttactgctgtagcatcctcatctgcagaacaagagtacaaatcgcccccttactgggccacagcagaggctataaaggaattaaacatatgagtgcttctgacaaacagtaagtgctaaataaatgttcatcctaccacttgtctttggcagtctcttctcccatgaattggaccctttaacccaagtctgagtctctgtgtccttttgtagagatatggacaaggcaccttccacattctgatctggcatcgcaggtggttttgctctgtccagcttgtgggggctgctggggagactctccacttgtcccctgg

SEQ ID NO: 353639 - DNA, 616 bp, Homo sapiens
cccatgcacattcaggtcctttaaggaagtcagaccacaaaacccccgatttccccagaccctggaaaaggtctgctcttgaaagggtttggcttgactcgtaatttatttgcagatctcagcctgtgggtttgattctgaatttatgatgcatgctcaggtctttcgtgacttgtgctcctcgaatttcattagggcgacctgtaattgttgtggtaaatgtttacacatctatatattattattaggcaagtggggcaaggtcaacctttatcttttaaggtgccgggaacagacttcggagatttcccagcagacaaaaggggttgggatctgattaattacggactgtgttgggttcatattgacaacactgttactgctaatattgaagtcccaaatgggtcatcgtttctgagcatgaaaaattatcacccttttactgattgttttgtaagtgattcaattttaaatcattaatgactattggtagctaatctttttactcaggaagcaaagcccaagatacctttggggtctcgggctgaactttattttactgtatttcctgctacctgtttaaactaataccyttattgccaactcatggcattat

SEQ ID NO: 353640 - DNA, 642 bp, Homo sapiens
tgattgttttgtaagtgattcaattttaaatcattaatgactattggtagctaatctttttactcaggaagcaaagcccaagatacctttggggtctcgggctgaactttattttactgtatttcctgctacctgtttaaactaatacctttattgccaactcatggcattatatgctaattattagaaaatggattgcaaaagtaacattaaagaaatacttatgaatgaaaaagaattaacataactacacattcactatgtgttagacacttttgtgttacgttatctaatgcaacaaacacatgaggtaggtttcattcctatttttaagttatgaaactgagattcagagwttatgttattctaggataatgtgaaggatgtgatgtctaggataatgcaaagtaaggtttatgaggttacaaacctagttctttctgccacacatttaggattaacaccatgagtcctctttccaggttctgagaactgggttgaaaggttgaaaaagtagttgtatttctgttgagtttgggatcatactgtcagcttatacaacacccttggtggtagcaaaattaccagaagtgatacagcatgacctcaatctcaatacaactttcttctgttttgggaaca

SEQ ID NO: 353641 - DNA, 642 bp, Homo sapiens
tgattgttttgtaagtgattcaattttaaatcattaatgactattggtagctaatctttttactcaggaagcaaagcccaagatacctttggggtctcgggctgaactttattttactgtatttcctgctacctgtttaaactaatacctttattgccaactcatggcattatatgctaattattagaaaatggattgcaaaagtaacattaaagaaatacttatgaatgaaaaagaattaacataactacacattcactatgtgttagacacttttgtgttacgttatctaatgcaacaaacacatgaggtaggtttcattcctatttttaagttatgaaactgagattcagagattatgttattctaggataatgtgaaggatgtgatgtctaggataatgcaaagtaaggtttatgaggwtacaaacctagttctttctgccacacatttaggattaacaccatgagtcctctttccaggttctgagaactgggttgaaaggttgaaaaagtagttgtatttctgttgagtttgggatcatactgtcagcttatacaacacccttggtggtagcaaaattaccagaagtgatacagcatgacctcaatctcaatacaactttcttctgttttgggaaca

SEQ ID NO: 353642 - DNA, 642 bp, Homo sapiens
tgattgttttgtaagtgattcaattttaaatcattaatgactattggtagctaatctttttactcaggaagcaaagcccaagatacctttggggtctcgggctgaactttattttactgtatttcctgctacctgtttaaactaatacctttattgccaactcatggcattatatgctaattattagaaaatggattgcaaaagtaacattaaagaaatacttatgaatgaaaaagaattaacataactacacattcactatgtgttagacacttttgtgttacgttatctaatgcaacaaacacatgaggtaggtttcattcctatttttaagttatgaaactgagattcagagattatgttattctaggataatgtgaaggatgtgatgtctaggataatgcaaagtaaggtttatgaggttacaaacctagttctttctgccacacatttaggattawcaccatgagtcctctttccaggttctgagaactgggttgaaaggttgaaaaagtagttgtatttctgttgagtttgggatcatactgtcagcttatacaacacccttggtggtagcaaaattaccagaagtgatacagcatgacctcaatctcaatacaactttcttctgttttgggaaca

SEQ ID NO: 353643 - DNA, 642 bp, Homo sapiens
tgattgttttgtaagtgattcaattttaaatcattaatgactattggtagctaatctttttactcaggaagcaaagcccaagatacctttggggtctcgggctgaactttattttactgtatttcctgctacctgtttaaactaatacctttattgccaactcatggcattatatgctaattattagaaaatggattgcaaaagtaacattaaagaaatacttatgaatgaaaaagaattaacataactacacattcactatgtgttagacacttttgtgttacgttatctaatgcaacaaacacatgaggtaggtttcattcctatttttaagttatgaaactgagattcagagattatgttattctaggataatgtgaaggatgtgatgtctaggataatgcaaagtaaggtttatgaggttacaaacctagttctttctgccacacatttaggattaacaccatgagtcctctttccaggttctgagaactgggttgaaaggttgaaaaagtagttgtatttctgttgagtttgggatcatactgtcagcttatacaacacccttggtggtagcaaaattaccagaagtgatacagcatgacmtcaatctcaatacaactttcttctgttttgggaaca

SEQ ID NO: 353644 - DNA, 237 bp, Homo sapiens
aaaagtagttgtatttctgttgagtttgggatcatactgtcagcttatacaacacccttggtggtagcaaaattaccagaagtgatacagcatgaccwcaatctcaatacaactttcttctgttttgggaacataggaaagagccgtgtgagcttttggaaacactcaagggttatcctcccaatattagcctgctcaaatttccattttttttcgaacccctttcttattttcact

SEQ ID NO: 353645 - DNA, 645 bp, Homo sapiens
ttgcctcttctttcctgagagggtgagtgtcggaggagacctagaaagtcaccttttaaaagagagttgctctcctctcctgtgctgacaccttctctctgctgcatcccttcttgtgcttctgcatccaccctgctgtgcgaagtgttgcatgggagcagaccccatcatccatgcatatggaattccttagagcaggggtcctccatgcttcctatcaaaactgtgttcatcctgaatgaagagtcggctttccatcagagagactatagaagggactggaaataatgagaggcaatgctcagccgtttttgctacacatgaggtgctatagtaagagctttcttkacatgcttcaacccattgactcgtcatagccactctgtgagaaagggaggcaggcatgagtgtggacccatttaagagatgtgagaggggtggcttagaggagttgagtcacttaccaggattttgattctaacatgacttttacacttaacctctctgctatcctgcttctcagaaagaccccaatctggaagcctgtttctaatggttaggaatgagaccttgagcaagtcataccatctagacctcctcatatatcacttgggggtgaaactttctgtcctgcaagatcaaagc

SEQ ID NO: 353646 - DNA, 583 bp, Homo sapiens
gctctcctctcctgtgctgacaccttctctctgctgcatcccttcttgtgcttctgcatccaccctgctgtgcgaagtgttgcatgggagcagaccccatcatccatgcatatggaattccttagagcaggggtcctccatgcttcctatcaaaactgtgttcatcctgaatgaagagtcggctttccatcagagagactatagaagggactggaaataatgagaggcaatgctcagccgtttttgctacacatgaggtgctatagtaagagctttctttacatgcttcaacccattgactcgtcatagccactctgtgagaaaggsaggcaggcatgagtgtggacccatttaagagatgtgagaggggtggcttagaggagttgagtcacttaccaggattttgattctaacatgacttttacacttaacctctctgctatcctgcttctcagaaagaccccaatctggaagcctgtttctaatggttaggaatgagaccttgagcaagtcataccatctagacctcctcatatatcacttgggggtgaaactttctgtcctgcaagatcaaagcactttt

SEQ ID NO: 353647 - DNA, 492 bp, Homo sapiens
gagacacatgagaatttgaatgaaatctgtggattttccagtcccattatgaagaccatactgttactatgactacattttrtcatacataattcattaagaaaaattctttataactttcattcttaatgcatgtttctgttaaagaaattgtatcatgatagaattacaaaaatcagcttagaaacaaatgcatattcactgttgaaaacagtgtggtaatattctactcatggggaagggaagtagatgtgcttttccctattccttttgctaaggactgttaaaaactctggatattatatgtgaaacaaacataagaagactctgaaaggtagaaaaaggcagaccaactagggccattgggacctgaggagctacacagaggtatgttccttggatgatgatttttttttgcctcatctatcccgggcttggagctgaaggaaacagcaacctagaaacaccagcaggtgcagattttttttttta

SEQ ID NO: 353648 - DNA, 492 bp, Homo sapiens
gagacacatgagaatttgaatgaaatctgtggattttccagtcccattatgaagaccatactgttactatgactacattttatcatacataattcattaagaaaaattctttataactttcattcttaatgcatgtttcygttaaagaaattgtatcatgatagaattacaaaaatcagcttagaaacaaatgcatattcactgttgaaaacagtgtggtaatattctactcatggggaagggaagtagatgtgcttttccctattccttttgctaaggactgttaaaaactctggatattatatgtgaaacaaacataagaagactctgaaaggtagaaaaaggcagaccaactagggccattgggacctgaggagctacacagaggtatgttccttggatgatgatttttttttgcctcatctatcccgggcttggagctgaaggaaacagcaacctagaaacaccagcaggtgcagattttttttttta

SEQ ID NO: 353649 - DNA, 492 bp, Homo sapiens
gagacacatgagaatttgaatgaaatctgtggattttccagtcccattatgaagaccatactgttactatgactacattttatcatacataattcattaagaaaaattctttataactttcattcttaatgcatgtttctgttaaagaaattgtatcatgatagaattacaaaaatcagcttagaaacaaatgcatattcactgttgaaaacagtgtggtaatattctactcatggggaagggaagtagatgtgcttttccctattccttttgctaaggactgttaaaaactctggatattatatgtgaaacaaacataagaagactctgaaaggtagaaaaaggcagaccaactagggccattgggacctgaggagctacacagaggtatgttccttggatgatgatttttttttgcctcatctatcccrggcttggagctgaaggaaacagcaacctagaaacaccagcaggtgcagattttttttttta

SEQ ID NO: 353650 - DNA, 622 bp, Homo sapiens
gtggggaactgggactttatccctgctgggtggtaataaggaggctcctccgcattacagtggagatcacggggaacctggacctccacccatcatgggaatgatgaagtgctcctcttcctccttgctgggaggtgtcagaggagacctcatgaaaaatcagcactctgacccctgcccatttataacaaggccacacactcctatggtatcactggaggccaactggggaggagtaatgagtcccttccaccatctcagcctgcgaggtatcaattgaggtatatgaagtggaactctggcctcacccagcagtaatgaggagacccctcacttggttgtccacaaaggccatgtgggaaatttgaaatttctaccctcacctgaaagtaatgaggtagtgacttcccttctcctgccagagcagggtcagaaaaagtcagctaaaacaggttaaaataagagccatagagtcataagtatatgtatacttacgacatagtacccagtatatgtgcaggtttcaatargaaatcacttatcacacaaataaccagaaggacctcaaactgaatgagaaaagatgattaattgatgtcaatattgagatgacagggatgtt

SEQ ID NO: 353651 - DNA, 615 bp, Homo sapiens
gctgatgacccttctcttgtaagtgggagttccacttaatattttcgcttcagggtttccaactccatcctcagaggatttttctgggtaagggacaaggggtgcagcaatggggtacttttctaaggcaagctcgtcaagttccatagactctaggcttaactgctgattaatctcaggcttgccttcctctcctgttgataaaaacaaawgaaagcaaaacatagacaatatcttcaagggatactggggaaaaagtaagctaaggtagttacaaacaggaccaggaaaccttagaagggttattctataacccagacactaaccacacaaaatcaggaccaagcagactctcctggcctcccagaagatccagttttgggtgaatatccaaaggtaaggagagaatagctataactaagtcagagtccagtgggataggtactaaggacaatctcagtagcagctatctagaggtgaacttttccatctaatctatttaggcctcaagagcctttcatttttgaagctatctcaagtgacagcagaacaattaacaattggaaaaaagattaggattcatatttatcaacaaagagaggggttgggcagtgt

SEQ ID NO: 353652 - DNA, 615 bp, Homo sapiens
gctgatgacccttctcttgtaagtgggagttccacttaatattttcgcttcagggtttccaactccatcctcagaggatttttctgggtaagggacaaggggtgcagcaatggggtacttttctaaggcaagctcgtcaagttccatagactctaggcttaactgctgattaatctcaggcttgccttcctctcctgttgataaaaacaaaagaaagcaaaacatagacaayatcttcaagggatactggggaaaaagtaagctaaggtagttacaaacaggaccaggaaaccttagaagggttattctataacccagacactaaccacacaaaatcaggaccaagcagactctcctggcctcccagaagatccagttttgggtgaatatccaaaggtaaggagagaatagctataactaagtcagagtccagtgggataggtactaaggacaatctcagtagcagctatctagaggtgaacttttccatctaatctatttaggcctcaagagcctttcatttttgaagctatctcaagtgacagcagaacaattaacaattggaaaaaagattaggattcatatttatcaacaaagagaggggttgggcagtgt

SEQ ID NO: 353653 - DNA, 570 bp, Homo sapiens
aaaaaatacaaaccatgttgtctttaactgggttcatatagtaagttcagactgtactcgggacatatataccttgtaattgttcaatagyttcagcctggacagacagtgttaatcagtttctgctgcttgctctcagctgtggctttggcgagtgagaaaagataaattcccagagttgaaaactgaaaagcaacactgtgcaatcatgagaattaagggaaaaaagacagtcttggtttgagttattgtatattcctggggaagctgtgcaaggactttccagctgtgagctgctaggagagtctgggccaaaatgctcacaggggagctacatggactgctgcagtagaaggaacagaggcaatggatagacaaatggttctcagccagggtcaattctgttccctgggaacactcgacaatgtctgcagacggtattgattgtcacgggggttgggggatgtactgccggcatctaatgggcagaggccaaggatgttgctaaatatactgtaatgcacaggacagcctccacccctgcaaacccctccaagaaagaatttatcc

SEQ ID NO: 353654 - DNA, 570 bp, Homo sapiens
aaaaaatacaaaccatgttgtctttaactgggttcatatagtaagttcagactgtactcgggacatatataccttgtaattgttcaatagcttcagcctggacagacagtgttaatcagtttctgctgcttgctctcagctgtggctttggcgagtgagaaaagataaattcccagagttgaaaactgaaaagcaacactgtgcaatcatgagaattaagggaaaaaagacagtcttggtttgagttattgtatattcctggggaagctgtgcaaggactttccagctgtgagctgctaggagagtctgggccaaaatgctcacaggggagctacatggactgctgcagtagaaggaacagaggcaatggatagacaaatggttctcagccagggtcaattctgttccctgggaacactcgacaatgtctgsagacggtattgattgtcacgggggttgggggatgtactgccggcatctaatgggcagaggccaaggatgttgctaaatatactgtaatgcacaggacagcctccacccctgcaaacccctccaagaaagaatttatcc

SEQ ID NO: 353655 - DNA, 540 bp, Homo sapiens
tttaactaaaaatgctgtataattgacatacatattttacaataatggggggaaaagtttttcccctctcttaaccttgaaaatctgagccagacatacaatatttttcttctcttaaaaatctgatacattgctttaaagggatgtggctcttgattatgtgcaatttcttagagaaagtctaccttctccttctgtcaaactaaaacttaactatgaaaaagattcctgacatatgcaggaagtctgtgtctcaccttcttgtcccaaatcatctgaaactctgcctgctcttacttggaaggctctgtaggaacgttatccagccagccttctatggaaccagccatcaaacggccccagacacctgctaccagcttgtttccaaggggagaataacaggctgtyggttacattcggttcttgatggaagaagggcagtcagtgtcccctgtaaagagtgatctctgattgaccacttcaggaggtgagtaagggtgaggtccttacaaggttgtggctgggtcggacgtggcctcc

SEQ ID NO: 353656 - DNA, 567 bp, Homo sapiens
ctatggcactcctgcccatgggaaacctccagcgtcatctccatcctattgggctcactgttctgcttcccagcaggccggctccatgggatctcatcttccaggcagcttcctctgttctagcaggttcttccttcctcttggaactggagatggattaggattcctgcgagttcaggcggggtgaatatacatttatatcccaggaagaaaatagaagaatagaaacaaaatggcaaaggcttcatgcaatttaacacttgtaagtccaaggcaacccagaagcactrcaagttgagaaacttccacccttgggatgctttcccaagtgaacttagacacacatacaccattttttatttttgccttttttttttttcttttgagacagagcctcacttcatccctaaggctggagtgcagtggtgtgatctcggctcactgcaacctctgcctcccaggttcaagcaattctcatgcttcagcctcccaagtagctgggattatatgcacacaccagcacagctggctaattttttgtatttttagtagagacggagttttact

SEQ ID NO: 353657 - DNA, 444 bp, Homo sapiens
ggtgggtggtgagacacacagagttaagtttttaaaatgttgagttttagcggcccttgagatttaaagaygtaagattagaataggatctcagagaaaaggtttgggctgaagatatcaaaatgtggcatgactcacacagctaagtctcagggttgaagcttacaaagaaagtctgaagtgagaagacaacaggtctcaggatcagcctggagggactccagtacctgtgactcgtgtagcagaagtgcaataaaatttttttataataacatgaagaagaaagaagagaaggagggaaaaggatgaaaaaataagagtgaaagagactgtattggattcaaggtctggctctgccatctcaacaagtttcttattcctccaagcctcagttccctgtctgtaaaatggaaagaaggtggttcatatctcatgtatgtacta

SEQ ID NO: 353658 - DNA, 570 bp, Homo sapiens
ggacaagaacagcaaagtggtcaagagcattgctgggaggtcagactgccctcatttgagaatcctggctccaacactaaccagttctgaggattcaggcatgtgacttcacctcttcaagcctccattcccttatcttctaaagggagattataacaagatcctcctcacaggttgtggaaggatcatgtaatacctttagaatgtgcctggcactaagtttttatggttttgatatgcatgtgccaacaataataaaaaattgctagcagcctttgtgcatggtggagactgctccctccaaggtgaaaaaacagggtcctaaattctctcccttgcttcctgctgtatttaaaagagaatgagtagaattctmattccagctcacctaccaactgaaggtcttaatatcaggtaaattacttcctttctgtatttatcgggactcttttggttctatgtgtcatgaaccctactcacaccattagacatagaatgcaatttattagaatatgcagttgggaagtccaggtaccagcttcaggtactattggatacagagatcgtaaa

SEQ ID NO: 353659 - DNA, 550 bp, Homo sapiens
gcagtgatttgaacttggtgcatatgagtattgggggaagggtagaataagaaggtatatatcagattttcgcaggggaaattcatgtatacactttaaaagtttttaaaattatactactgcttagatttaatgtgttttaaacagttgtatatacttggaagattcaagggagtgagccagtttctcttttacagacaggtaaactgatgtccagagtgatttgcacaaggacacccagctagtggaagtggcagacttgagacgtgaaatcattactcattctaacctcagccccgtttcctgatattcrtatatttgtggctgcaaggacatggtttggtggccgcaaggacatggtttggtgtctgttctaatcatctctctgctaaagagaggaaaacgaggatcttgtgaatggcagttgataagttctagacatagtatttaataaatgttattagtttttgcagatcattgtactaagcattttatgtgcatgatcttatttaaaactcatcactatgctacaagttgagtactataatta

SEQ ID NO: 353660 - DNA, 588 bp, Homo sapiens
atgtgttgataggtgcagcaagccaccatgggacatgtttacctatgtaacaaacctgcagcacatcctgcacatgtatcctgggacttaaagaaaaaattcctgccaggattttgattgcaattgcagtgaatctagagatcaatttggggagatccaaattggggaggttctcaatattgaatttttgaatccatgaacatattatatctctccatttattttattcaattatatttttaagaatctggatgataagctgacttagggttaggtctgaaagatatctaagtggtcactaaacccaaatcatttattttatatgtaataaacattttttcatataggtgcctagtctttcttttccatccaactagccaaaacgtttttgattgtcagtctagtattctttttcttgctcattgaaggttaatttgagttaaataataaagtactcaaaggaaagagataaaaatttttttttaaatgttgagtacrcttagggttgaggccgattcttccctatagcacatgcattcgtgtgtgggcaaacacacacacagtgcacacacagacaccatcaaacct

SEQ ID NO: 353661 - DNA, 592 bp, Homo sapiens
aatgacctaatggaggtccacaaagagcttaccagaacttttgtgtcacattgctggtgcacgttccaattgtgggaactcatctggktgtagactccttacatggacctcttcaggtattgctagagtcatcaaattcaggctttgccaatacttttttcccccagttttcaaaatagtcatcaaagttatgtgttaaccaagtcatatacatgcacatctacacgtttgtttctgagttacagtaaagctataggataatttgggcatgaaaacaatttctacatgaccttgccagaatagacgagacattgtgcaaagcaatgagtatattgtcgtcatctaatttgcttaaacaatctaacattatattgctcaacaaggaatcctttgtacaacctcttagagtgtgcaaaatcctttcacttgcattattttatttcatatttactgtagactataaggaaaatatatcagagggcagtggttattatctctagttacagaaaaggaaatatagtctcagaaaggtcaagaaagctgctggagactgtaattaaaatatgatgacacctactccaaagacagtact

SEQ ID NO: 353662 - DNA, 581 bp, Homo sapiens
acctgctggactcaagcgatcctcccacctgagcctcctgagtarctgggactacaggcatgcaccaccatgtctggctaatttatttttgccaagatggggtctccctatgttgtctaggccagtctccaactcctgggctcaagtgatcctctcacctcagcctcccaagatgctgggactataggtgtgagccactgcgcccagccaggcattaatctaagccgaaaggatacaggaatgaacaaaatagaggggtctgaaccctgcttacagagtttacattcagggccttggacagtaaataaccaaacatgaaataaaggaaaaggaacattccaagtacatagtgacagtggtcagatgaaaactcgacagggtggttggacagtggatggggctcttttagaaaggtcaggaggtgacactgaaattattgtgcctggaatgacagaaaggcaccagcccggcaaagccaggagatgagatgagcagtccaggcagagggaagagcgagtgcaaaggcgctcagtcaggaaggagttcggcccgttcaagaaggctggcagagtgggaggggt

SEQ ID NO: 353663 - DNA, 621 bp, Homo sapiens
gatgtatgtggggtttactttggtacaataaaaatatctttgaaaaatattctttttttttttttgagacggagtctcgctctatcgcccaggctggagtgcgatggtgcaatctcggctcactgcaacctctgcctcccggattcaagcgattctcctgcctcagcctcctgagttrctgggattataggcgtgtgccaccatgcctggctaatttttgtatttttagtagagacggggtttcaccatgttggtcaggctggtctcaaactcctgacctcatgatccgcccatctcagcctcccaaagtgctgggattacaggtgtaagccaccatgcccagccttgaaaaatattacttgtttatcttatccttttgaattctgttccattatacaatactttcaattccatataaaggtgtggaaacaaggtcagtacatacagatctagttttacaaagataccagtttgcactactacaaacagttatgcagtgaacatccctaccagtgtctgtgtccattatgtgaaggggttctctagggtttacatgctgaagcacaagtgccagaatattttgacattagtatttattgctaaattggcctcagctgaatt

SEQ ID NO: 353664 - DNA, 546 bp, Homo sapiens
tcattgtggttttgatttgcatttccctaatgactaatgatgtttatcgattttctgtgtgcttattgtccatttgtgtatcttctttaaagaaaagtgtattcaaattcttcacccatttttaggttgtgtttacaatcttgttgagttgtagcagtttttttttttttttgtatattctggatattaatcccttatcagatatatcatttgcaaatattttctcccatgcagtaggttatgttattgtttccttgatggaatccttcagtgcataaaagttcttaattttgatgaagtccaatttatctgktttttatttattttgttgcctatgtttttggtgtcatattcattaagtcatcgccaaatccacttcactttctccagtgttttcctctaaaagtatagttttaccgattaagctgaagcctttgattgttttgagttaatttttatgccttaagtggtgtaagggtccaacttcattcttctgcatggtggatatcacttccccaacatcatttgttgaaaagactatttttt

SEQ ID NO: 353665 - DNA, 546 bp, Homo sapiens
tcattgtggttttgatttgcatttccctaatgactaatgatgtttatcgattttctgtgtgcttattgtccatttgtgtatcttctttaaagaaaagtgtattcaaattcttcacccatttttaggttgtgtttacaatcttgttgagttgtagcagtttttttttttttttgtatattctggatattaatcccttatcagatatatcatttgcaaatattttctcccatgcagtaggttatgttattgtttccttgatggaatccttcagtgcataaaagttcttaattttgatgaagtccaatttatctggtttttatttattttgttgcctatgtttttggtgtcatattcattaagtcatcrccaaatccacttcactttctccagtgttttcctctaaaagtatagttttaccgattaagctgaagcctttgattgttttgagttaatttttatgccttaagtggtgtaagggtccaacttcattcttctgcatggtggatatcacttccccaacatcatttgttgaaaagactatttttt

SEQ ID NO: 353666 - DNA, 319 bp, Homo sapiens
gttttgagttaatttttatgccttaagtggtgtaagggtccaacttcattcttctgcatggtggatatcacttccccaacatcatttgttgaaaagactatttttttctcattaattggtctaggtacccttgtcaaaaattaattgaccatatatgtgatggtttatttcttggctatttatttttatttttattttttttttagaaacagggttttgctctgtcatccaggctagagtacagcagtgtgakcatagctcactgcatcttcatcctcctccactcaagtaatcctcttacttcagcctcctgagtagc

SEQ ID NO: 353667 - DNA, 583 bp, Homo sapiens
gctgaaccctgtgggtcattgggcaaagtctttggcctcaggactggtaaaggagatagataacaaactaaatatataaaatgatgtcaaaggtaaaatgaagaaaataaaacaagggactggagagggaataactaatgtttccatttttgacagagtggtcaggrcatgaccctctgagaagttgctgtctgagcaaaggccaggatgaagagaagcgtgaactattgtctatctggagggaaagcatttcaacaagatggaaaagccagtgcaaagtcctgaggcaggggcatgcctggtatggttgaggaataataaggaggcccatgtggactgcagtgaaattggtagtgacaggaggaagcaaaatgcctaggtagatggggtgagtccccagtgaaaccccacctccaagctgaagacagtttaaagcctgaaagccaagctacaagttaaatcctcggaccaaattgagaacttgtcttcctgtttggcatgctttcctctgatggatccccaccccttacctatttaacatatacctaccctttcctaattggctttctatgctgttgtgccc

SEQ ID NO: 353668 - DNA, 592 bp, Homo sapiens
ttttcatctagattgattttttaataaatattgacttaaaatgccataatctcatcatattctttcattttctttgtaccaaaaatcaaacaaatggaagaattagcaagcagaaggaatcgagggacttcaaaagcttctgctggttcagacacacaaaactatgctgtacagaagcccagcttagcttgcctaataacaacactcaatagcttccaccttttattggaaaaaagaacaaagcaattcaaygattatatttcacaccaacattgttgcaagcccaccattctaagagctcctaatttcatttattgtactgccaaagacaatcatttctatgaatgatattatttcctttaaaacaatcccacacatgctactagaattttttagcattatgagaaaacatataatgcttaatgctggaaccgcaaccactgagttttcttaaacatatgaatgccactacagccagataacttccttgtctttgctgccgtgtgtcttttatgtattgtaattaaaacattgtcaataacacagttcgttgctttttggttgtagtgactgatgttgaacatggaaaatc

SEQ ID NO: 353669 - DNA, 546 bp, Homo sapiens
atttgtaatattttatttcttaaggtgggtggtggctacatgggtgtttattatatgacttttagacctctttgggtgttgtaaatatttcctaattcattggtaaaaataaatcaactttattaaaataaaataagcaaatgaaattgaatccaaaccttgtggaagtcagaacccactggaaaagacctctggtcccccctgggacaggccagtgggacaggaagtcygccggctccagttccagccatgggcctccgcagaagcaccctgcacacagcctcgcgctgtggcatgaattccaggcgaaggaagggtcaagatgacgggacaagagcagacggggatcacgaagcccctggatcaaccgaggtcccatcatgaggtgggagaaatgatggatttatatatttaatgaaagggtaactctggaagagtaataaaaatatggtcaagtaggcaggtatgtttggcgctttttttttttttttttttttaaatctacactctggagctctcactctggtacaattcttttgttagatc

SEQ ID NO: 353670 - DNA, 546 bp, Homo sapiens
atttgtaatattttatttcttaaggtgggtggtggctacatgggtgtttattatatgacttttagacctctttgggtgttgtaaatatttcctaattcattggtaaaaataaatcaactttattaaaataaaataagcaaatgaaattgaatccaaaccttgtggaagtcagaacccactggaaaagacctctggtcccccctgggacaggccagtgggacaggaagtctgccggctccagttccagccatgggcctccgcagaagcaccctgcacacagcctcgcgctgtggcatgaattccaggcgaaggaagggtcaagatgacgggacaagagcagacggggatcacgaagcccctggatcaaccgaggtcccatcatgaggtgggagaaatgatggatttatatatttaatgaaagggtaactctggaagagtaataaaaatatggtcaagtaggcaggtatgtttggcgctttttttttttttttttttttwaatctacactctggagctctcactctggtacaattcttttgttagatc

SEQ ID NO: 353671 - DNA, 562 bp, Homo sapiens
ttgtgtgcataggcacagtgattagtacattgttaattaagggttcagtaaacattaggtacggttctgttgatgtggttattataattatcmaccaaagactggatgagtttatagatggaaagatggaaaggaagtttgggttaatctacaaataataataataagctctgctgagagatcagaatacatgtaaaaacaatgacttaatacaaaggaagccatcgcaaaattttcctaatatttggattgttaaaacaacccagacttctggtgttttctaaattttcaaaccatttgacccagcctactctgaggcaatgctgacaaaccttccagcagagggcactggccccattgaaagatagggagaccattttgaaaatggctgccttcgctattccaaagaaaacactcacgctagccacgaggacaaaaagcatttatttttgtctgggcaaatttgccttcagaccaaaagcttctcaagatggcaaatgttctgcctgctaggatgttgccagataaaacaattacttactagagtcaaaataactccaaa

SEQ ID NO: 353672 - DNA, 522 bp, Homo sapiens
tgatcccaagtgctggaggtggaggctagtgcaaggtgattggatcatggcggtggtttctaatggtttagcaccatgggggtgttrtcttgtgatagagttctaacgagatctggttgtctgaaagtgtgtagcacctacctttctctgtttcttcctcctgctccaccacgtaaagaaggcgcttgcttccccttcacccttctgccatgattgtaagtttcctgaggcttccccaaccatgcttcctgtacagcctgtggaactgtgagccaactaaaccttttttcttcataaattacccagtcccaagtagttctttatagaagtgtgagaatgaattaatacattacactaagattggatggtgggagagaccatttaatcaatggggcatttctagggcaccatcttattagtggttcttcattcaagctaccaaccaacttatccccgatcactccacagctttcacttcagtggcatctggaaatttggaggatttgagtatttagacccaca

SEQ ID NO: 353673 - DNA, 594 bp, Homo sapiens
cctaatgttttttaaaggacaaaaggattgaacagatagttcacagaagatatgtgaatgcccataaacacatgaaaaagtgcccaacatcattagttgtcagaaaaatcttaatttaatgtaaattaaaaccacactgagatactactacacaactgccagaagagttaaaactaaaaaactgacaacactaaatgttggccaggatgtggagcaactggaactctcatacgttgttggtggaaaggcaaagtggcccaatcactttggggaaaggcgcagtgcttttcttttttaatatatctgaacataacagccaccctatgkcccagcattcccatcctaggtattcacccaagagaaatacaagcagatggcctccaaaagaattgtgcaagaatattcatagcagtttaattcttaatagccaaaaatctggaaatagcccaggttttcataaagaggagaatggataaacaaactgagttatggtcatataatggaatttgggaataaaaaggaacaaacttgatacatgtaataacatggatgcatctcaaaaatattatgtggaataaaaaagccttacactaa

SEQ ID NO: 353674 - DNA, 580 bp, Homo sapiens
tgctttgaaaactggctttcatgtgaatatcagacgctttatgtctttgactcgagtgacctcatctaccagaatgaagtcatctatcccgccagggaagacaaaccttctttccagagaatcaatcagcccatcaagggtcctccttacctccttatctccagccagtgagcgagtgagcagttaaaaacctggcaggccccagagagcccccgtacttcacgttcccttaaatcaaaagggaacccgaagactctcagggaagcaccaacttgctgctgggtgatcacagcttgacatcagttcagacttggaggattgtttccaagcgagatattttttgagcacgaaaaccatggcattccagtgaacttkaggggtttctccttcatgttattaaactattaactcctgccagatagaaatgctaggcacataattgttcgcccaaccttttcatcccaagctattgcacaacccataaacagtccaattaggaaaccaattaaaacgagaaagaggcttcctgaattatccagcagttggagcagcactgccttttcgttgtcagccagtgaaa

SEQ ID NO: 353675 - DNA, 498 bp, Homo sapiens
tgggccctggggagatgtgcaaggcaaacacacccaagagattcctgccttcactgagcatgcaccgcagagacacgctcagtcacttctccctgagctctcscagcacctcagacatgcctctagtttaagcctctacttttaaatgtaatccctgtgcatggcacaccataggtactcaaacaggggctggtggaactcttgagggagagggagtgccactgattcctcttcctgagatggaagtgtgcgtgcatccgtaccaatgtgcatgcatgtgtgtgtttgggggaagacatagtaaataagctgagtgtttcttgttctccatggtctcaaggcctctatacattattgtggccactcagagctcaactggtagagttgacttttggccttgttccttgctacttgcaaagttagaaaaagaaaagtgcaatcaaccgacagtggatctctgaaatgccaagtggctgtactctagaaaagccccattga

SEQ ID NO: 353676 - DNA, 498 bp, Homo sapiens
tgggccctggggagatgtgcaaggcaaacacacccaagagattcctgccttcactgagcatgcaccgcagagacacgctcagtcacttctccctgagctctcgcagcacctcagacatgcctctagtttaagcctctacttttaaatgtaatccctgtgcatggcacaccataggtactcaaacaggggctggtggaactcttgagggagagggagtgccactgattcctcttcctgagatggaagtgtgcgtgcatccgtaccaatgtgcatgcatgtgtgtgtttgggggaagacatagtaaataagctgagtgtttcttgttctccatggtctcraggcctctatacattattgtggccactcagagctcaactggtagagttgacttttggccttgttccttgctacttgcaaagttagaaaaagaaaagtgcaatcaaccgacagtggatctctgaaatgccaagtggctgtactctagaaaagccccattga

SEQ ID NO: 353677 - DNA, 498 bp, Homo sapiens
tgggccctggggagatgtgcaaggcaaacacacccaagagattcctgccttcactgagcatgcaccgcagagacacgctcagtcacttctccctgagctctcgcagcacctcagacatgcctctagtttaagcctctacttttaaatgtaatccctgtgcatggcacaccataggtactcaaacaggggctggtggaactcttgagggagagggagtgccactgattcctcttcctgagatggaagtgtgcgtgcatccgtaccaatgtgcatgcatgtgtgtgtttgggggaagacatagtaaataagctgagtgtttcttgttctccatggtctcaaggcctctatacattattgtggccactcagagctcaactggtagagttgacttttgrccttgttccttgctacttgcaaagttagaaaaagaaaagtgcaatcaaccgacagtggatctctgaaatgccaagtggctgtactctagaaaagccccattga

SEQ ID NO: 353678 - DNA, 618 bp, Homo sapiens
gaccagactcatgttagcttatgctaactaggacttgtgagtcaggcagaatcctaacatgtcacttcatgaagctcagggccactgtcaagaggcctgtaaacttcagaaaaatcctagaacagccaggatggtctttccaaagcacacatttgacaatgtctgaccctagactaaatagctggccatgagttactccctccctctcctcctgcctcatctgccttcatccccrgctctccaggccccaccctgactcagttgcatttgctcagcttgctatgttttgttgagagcagtgtttcacaactgggggtgatttgccacctgaagacactgggcaatgcctagagacatttttggttgttgtaacatggggagggggtgctactagatctaatgattagagactagggatgctaccaaaagtcctacaatgtatatgacagctcccccatgacaaagaattatgggccccaaaatgtcaatagtgccaaggttgaggaactctgggctagattccggccctttccagagaattcttcccatcaccaatccactcacctgtgcctaccagtatcagtcaggataagctaggttatcttgcagtaacaaaca

SEQ ID NO: 353679 - DNA, 482 bp, Homo sapiens
ggcgttgcaccagcagagtaaattaaaacacggattagagcaagtatgattggggatgacaagcggggcgggtgtagccgcggaatgagcmgtgttgcccatatggtcctcggaaagcccacgcagcgcagctctctccccagcctgctccagctgcccgtctgaagggggcacttaggaggcctcaagccattttctggaactgggaaaattagtttcccttctttacgagttcagaaataccaccagctgctaccaggtacttggagatttcagtggattcaggctctcagtggaaggaagtggggggtggttagtggggtattctgatgtgcagggctacccctttgtggttaccttgtttgaattcagagaagaaacttcctgggggcctcaggccactgaaagttgagtaaaggtggcaccctggccaatctcgctgccatgatgatggggaaagagccaggactgtcttggcgaca

SEQ ID NO: 353680 - DNA, 560 bp, Homo sapiens
ctatagttgtatttccagggatcatgtgacggtttgagcagataataccctgccaaagtcactggcccaggaggggccaaatggggctaaagttgaatccacattctgctcaccaagccattgctcctgtgcagagtagtgtcccctggggaagtggtcccttttctactttccacaaatgcattatatagaccagcagggyccccatatttatcacagccttactacaaaactatcctatggatctgacgatcagcatccccattttacagatgagaaaacagaggttcagagaaggtcaacaatttgcctgaagtcacacagttaagaagtggggagctaggattccagagtcttctgagtccagagcccaccccttttaaccactgtgtgggaagaaggagtgggtgaggctaggagaactggatagctaccccttccccagatgccttatcagtacaggggcctagaagcacaaaaggatatggtgacagtcccaggaatcgttctgggagttgaaaatcccacaaggagacaaagcaagatgaactctccaaggg

SEQ ID NO: 353681 - DNA, 443 bp, Homo sapiens
taaagagcttcaaggaccttctagaatgatctcaatctgaaatctatctgtaatgatttgggttattaaacacattgagaacctmcagttgaggtagcttttgtctctttgggtgggacctaaatcacacactcatttttttttttagttgtgttttaacattttatttgttgttattatttcttaaaagaaatccactgttctaattttggctgtaatgtgactcagatgaaggttcaaggtgaacaatcacctactgtatataatcatataatttaatgaaagcgaacacactcaatctttttcaaaatgtgcactagtgcccagctattgatcttacatttatccaggcatgtcttcttgtcccagtgttttaataatctaattttaaaataggattcgtctctgagaatatctgagtttgagccccatgcttcctgcaa

SEQ ID NO: 353682 - DNA, 443 bp, Homo sapiens
taaagagcttcaaggaccttctagaatgatctcaatctgaaatctatctgtaatgatttgggttattaaacacattgagaacctccagttgaggtagcttttgtctctttgggtgggacctaaatcacacactcatttttttttttagttgtgttttaacattttatttgttgttattatttcttaaaagaaatccactgttctaattttggctgtaatgtgactcagatgaaggttcaaggtgaacaatcacctactgtatataatcatataatttaatgaaagcgaacacactcaatctttttcaaaatgtgcactagtgcccagctattgatcttacatttatccaggcatgtcttcttgtccmagtgttttaataatctaattttaaaataggattcgtctctgagaatatctgagtttgagccccatgcttcctgcaa

SEQ ID NO: 353683 - DNA, 443 bp, Homo sapiens
taaagagcttcaaggaccttctagaatgatctcaatctgaaatctatctgtaatgatttgggttattaaacacattgagaacctccagttgaggtagcttttgtctctttgggtgggacctaaatcacacactcatttttttttttagttgtgttttaacattttatttgttgttattatttcttaaaagaaatccactgttctaattttggctgtaatgtgactcagatgaaggttcaaggtgaacaatcacctactgtatataatcatataatttaatgaaagcgaacacactcaatctttttcaaaatgtgcactagtgcccagctattgatcttacatttatccaggcatgtcttcttgtcccagtgttttaataatctaattttaaaataggattcgtctctgagaatatctgagttkgagccccatgcttcctgcaa

SEQ ID NO: 353684 - DNA, 562 bp, Homo sapiens
cttgggatcccccagggcagggcaarcctgtgtcatccctgtttccagagcatttaagctgcccctctttgaccatgcttcccccattccaatatgggacataaacttcccactaccctgagccccctgatggtaggaactgctttgtttcaaacttgtgcctcctggttctccctcctcttatcactgaagtgctgggtacatggaaagtgcttcatacatgcttgagactccaaatcaggttgttgggtaaccttcttcacatctccacagcaagctcccagctgccaacctagtaagtatgcccttcatagccacaaactcagatgtatgcaaataggccattattctctatgtctcagctaaactttgctctccagcacagattctatccaagaacagaaaacttgattcagtaaacagagatcactcttgtcttgattttttcccctgtagtcccttttgagtaaataatccaggcaaattcagggtgtccccttcctcctcttctcccctccttgccaaggttgatttaagttctgggggccaggggcaatcactc

SEQ ID NO: 353685 - DNA, 562 bp, Homo sapiens
cttgggatcccccagggcagggcaaacctgtgtcatccctgtttccagagcatttaagctgcccctctttgaccatgcttcccccattccaatmtgggacataaacttcccactaccctgagccccctgatggtaggaactgctttgtttcaaacttgtgcctcctggttctccctcctcttatcactgaagtgctgggtacatggaaagtgcttcatacatgcttgagactccaaatcaggttgttgggtaaccttcttcacatctccacagcaagctcccagctgccaacctagtaagtatgcccttcatagccacaaactcagatgtatgcaaataggccattattctctatgtctcagctaaactttgctctccagcacagattctatccaagaacagaaaacttgattcagtaaacagagatcactcttgtcttgattttttcccctgtagtcccttttgagtaaataatccaggcaaattcagggtgtccccttcctcctcttctcccctccttgccaaggttgatttaagttctgggggccaggggcaatcactc

SEQ ID NO: 353686 - DNA, 562 bp, Homo sapiens
cttgggatcccccagggcagggcaaacctgtgtcatccctgtttccagagcatttaagctgcccctctttgaccatgcttcccccattccaatatgggacataaacttcccactaccctgagccccctgatggtaggaactgctttgtttcaaacttgtgcctcctggttctccctcctcttatcactgaagtgctgggtacatggaaagtgcttcatacatgcttgagactccaaatcaggttgttgggtaaccttcttcacatctccayagcaagctcccagctgccaacctagtaagtatgcccttcatagccacaaactcagatgtatgcaaataggccattattctctatgtctcagctaaactttgctctccagcacagattctatccaagaacagaaaacttgattcagtaaacagagatcactcttgtcttgattttttcccctgtagtcccttttgagtaaataatccaggcaaattcagggtgtccccttcctcctcttctcccctccttgccaaggttgatttaagttctgggggccaggggcaatcactc

SEQ ID NO: 353687 - DNA, 618 bp, Homo sapiens
attctatctctttcacttatttttgttccaacctaccattccctgtaagaatttaatccttgtgcttgggaatgaagtgtacaattctccttgcctagaatgctctaatctgcctgctgctatgcttggcaagctcttagtcctcaaccagctattacctttgcraagtatttctcaagatcaccagcctcgatggccctttcttctttgattctgtgaggctctttttaatgtttcttttatagcatttttcatactgggctctcattctttgtgtacatatccgtctttccctttatactgggaaaactttgagtcaagagtagcatctctccctctcttccttcatcaaacatgtattaagcgtcagaccctgtgataggatctgtggatacagaaatgaattagacacagcccctggtctggaagggagatctcaagacaatgtgggagcaattaaagaacgaggcactgaggtaaaaccttacataatgctttcgtttagtcttccaaatgaccttagatgcatctgtgaggattcccattttaccattgaaaagcctgagctaaggagaaactataactcatgaaagaacataaggctaccaagtgttcaca

SEQ ID NO: 353688 - DNA, 618 bp, Homo sapiens
attctatctctttcacttatttttgttccaacctaccattccctgtaagaatttaatccttgtgcttgggaatgaagtgtacaattctccttgcctagaatgctctaatctgcctgctgctatgcttggcaagctcttagtcctcaaccagctattacctttgcaaagtatttctcaagatcaccagcctcgatggccctttcttctttgattctgtgaggctctttttaatgtttcttttatagcatttttcatactgggctctcattctttgtgtacatatccgtctttccctttatactgggaaaactttgagtcaagagtagcatctctccctctcttccttcatcaaacatgtattaagcgtcagaccctgtgataggatctgtggatacagaaatgaattagacacagcccctggtctggaagggagatctcaagacaatgtgggagcaattaaagaacgaggcactgaggtaaaaccttacataatgctttcgtttagtcttccaaatgaccttagatgyatctgtgaggattcccattttaccattgaaaagcctgagctaaggagaaactataactcatgaaagaacataaggctaccaagtgttcaca

SEQ ID NO: 353689 - DNA, 545 bp, Homo sapiens
cagctctagtggataaagaaaacaatatgaaagattaaatgcataaggtaaacagagatgtagaaactctataaaagcataaaaattaatgccagatgtcaaaaaactgtaagaaaaatggaaaagtctttgataggcttatcagtygactggacacagatgaggaaagaaacagtgagcttgaagattggacagacaagataattttccaaaactgacatacaaggagaaaaaacaatattttttaaaaagtctaggaaatgtggaccagttttaaaaggtataacatacatataattggagaatcagaatgagaggaaaaataacatgaagcagaaaaagtatttttattaataatgacttgagactttccaaaatttatgacagaaactgaaccatagatacatgtagcttgatacaagcatataaaaaaacacagatttatcaaagaggtaaatatttttatttatttattttttgagacggagtctcgctctgtcacccaagctgcagtgcagtggtgtggtctcagtagttcactgcaa

SEQ ID NO: 353690 - DNA, 545 bp, Homo sapiens
cagctctagtggataaagaaaacaatatgaaagattaaatgcataaggtaaacagagatgtagaaactctataaaagcataaaaattaatgccagatgtcaaaaaactgtaagaaaaatggaaaagtctttgataggcttatcagtcgactggacacagatgaggaaagaaacagtgagcttgaagattggacagacaagataattttccaaaactgacatacaaggagaaaaaacaatattttttaaaaagtctaggaaatgtggaccagttttaaaaggtataacatacatataattggagaatcagaatgagaggaaaaataacatkaagcagaaaaagtatttttattaataatgacttgagactttccaaaatttatgacagaaactgaaccatagatacatgtagcttgatacaagcatataaaaaaacacagatttatcaaagaggtaaatatttttatttatttattttttgagacggagtctcgctctgtcacccaagctgcagtgcagtggtgtggtctcagtagttcactgcaa

SEQ ID NO: 353691 - DNA, 460 bp, Homo sapiens
tccagcgttgtttggtccagtagtgagcttcacagattcctctcttgacatgcccagcctgtacagaaattagaaataaattattgctcaaccacaaaacataaaaggtacaactgggatctctcatgaatgyagtattcaatagaagtaaatgcatcaaattacatttataatcattaacatgcttaatttatgtaaaccagtttacaatgatgatgtttctttgctgcttttataatctcaactaatactctgcttttggttaagaacagtctagatttttattttgtaaagcaaggagataggagccttaccaagtgttagtaaaggaatatgaaaattacatacaacaaagtattagaaaatatttataatcactaacatgcttaatttatgtaaaccagtttataatgatgatgcttctttgctgcttttataatctcaactaaaactctactgc

SEQ ID NO: 353692 - DNA, 460 bp, Homo sapiens
tccagcgttgtttggtccagtagtgagcttcacagattcctctcttgacatgcccagcctgtacagaaattagaaataaattattgctcaaccacaaaacataaaaggtacaactgggatctctcatgaatgtagtattcaatagaagtaaatgcatcaaattacatttatartcattaacatgcttaatttatgtaaaccagtttacaatgatgatgtttctttgctgcttttataatctcaactaatactctgcttttggttaagaacagtctagatttttattttgtaaagcaaggagataggagccttaccaagtgttagtaaaggaatatgaaaattacatacaacaaagtattagaaaatatttataatcactaacatgcttaatttatgtaaaccagtttataatgatgatgcttctttgctgcttttataatctcaactaaaactctactgc

SEQ ID NO: 353693 - DNA, 460 bp, Homo sapiens
tccagcgttgtttggtccagtagtgagcttcacagattcctctcttgacatgcccagcctgtacagaaattagaaataaattattgctcaaccacaaaacataaaaggtacaactgggatctctcatgaatgtagtattcaatagaagtaaatgcatcaaattacatttataatcattaacatgcttaatttatgtaaaccagtttacaatgatgatgtttctttgctgcttttataatctcaactaatactstgcttttggttaagaacagtctagatttttattttgtaaagcaaggagataggagccttaccaagtgttagtaaaggaatatgaaaattacatacaacaaagtattagaaaatatttataatcactaacatgcttaatttatgtaaaccagtttataatgatgatgcttctttgctgcttttataatctcaactaaaactctactgc

SEQ ID NO: 353694 - DNA, 535 bp, Homo sapiens
agcttctggctccagtaacttgtgcttcacataagtagaccttgactatgttttcctgtgatgtcagtcctctcatggatccaagaaaattcattgatttttcgtttgttcagctttgttgctgttgttgttgtaggacagtaatcatgacttcccagttctttagatgtgggagctaaatccaaaaatgcagttacatcctcttttaagtaactgtccccatcttgtatttcccttctccgtctcctgttcttctctaagatgacatctgagaatctgagagaargggtatatgtgatcttatagtggaggtgtagaagggatcccttccatatgtcctcaggttcctgtactgctctgtgtcttattgggtcttcccagaggtgttgctggttaacacttgctcagcaagtgtccgcagctgagtccttgaacttttttctcctggctctgatagttccctctgcttatccagcctcactttgaccttgctaaaactgcagtcccccacagttacagcaatgcatcctattta

SEQ ID NO: 353695 - DNA, 571 bp, Homo sapiens
cattttgtgatgcttaataaatatgttaaataactaaatgagtagaaaaattaagtactgccgtaattcaggttctttgaggggccagagaccaccacacatgcagttataaagagaattagactgggcacgatggctaacacctgtaatcccagcactttgggaggctgaggcaggtggatcacgaggtcaggagttcaagaccagtctggccaagatggtgaaactccatctctactacaaatacaaaaattaggcaggtgcagkggcacgcatctgtaatcccagctactcgggaggttgaggcaggagaattgcttgaacccgggaggcggagactgcagtgggccgccaagatcatgccactgctctccagcctgggcgacacagcaagactccatctaacaacaataacaaaaaagaattaaaactgagaaattggacacaataaatacagacaaaactcagaacactaagaaaggtggggagacaaaagcaataaagggtgacgcagagttaggttgtgttttgtttctgttttgctgttttttattttagaataaaacagact

SEQ ID NO: 353696 - DNA, 567 bp, Homo sapiens
atgcacagttctgtgctttgttttaaaagtttctcaaaccaccgtaagttagggcttccaaaataagctgattaaaatctagctgtgttaaaagctcctgttcctggattatcagaaaacagatggggtaggaggcctttcacatacagagggatcccttttcatagcaatataaagcaccaacccttggagagaacaaacagattttaagtattggcttctttttccataatcacagctgatttatktatccgttatgcacggagaaattcggtagctgtatggtcagcttctgaatggttgttaactgtgttttccatgcacagaatgaggctaaatgggagagactatggcattaacttgtaatgatcatgtctggatctgctttccaatgtttggacacaagagaaacctgataaaaactgaagcttgggttctgataccctttttctgctcccactaaaggaagctgggtggatttggcacctacatctaattttccatagcctctgctcagtctgtagcctcagtttgtagttaattaacctgttcatgaaatgtaaatag

SEQ ID NO: 353697 - DNA, 567 bp, Homo sapiens
atgcacagttctgtgctttgttttaaaagtttctcaaaccaccgtaagttagggcttccaaaataagctgattaaaatctagctgtgttaaaagctcctgttcctggattatcagaaaacagatggggtaggaggcctttcacatacagagggatcccttttcatagcaatataaagcaccaacccttggagagaacaaacagattttaagtattggcttctttttccataatcacagctgatttatttatccgttatgcacggagaaattcggtagctgtatggtcagcttctgaatggttgttaactgtgttttccatgcacagaatgaggctaaatgggagagactatggcattaacttgtaatgatcatgtctggatctgcttyccaatgtttggacacaagagaaacctgataaaaactgaagcttgggttctgataccctttttctgctcccactaaaggaagctgggtggatttggcacctacatctaattttccatagcctctgctcagtctgtagcctcagtttgtagttaattaacctgttcatgaaatgtaaatag

SEQ ID NO: 353698 - DNA, 577 bp, Homo sapiens
acataagaacatcatttattttaagatatctcactgttttgccagtcatcccccttttctgcctatgagacaaaagccttaatgatcctctttggagtgcccttatccccaaaactccttttctttacataaaaagttttatttattttaaatgttcctctccatcaacaaaaattgattatgtaatatttcaatttaatttatttggtattgatgttgaccacttcagaaatgtaaaactggcatttcattctcctagagttcttttctttttacctatgattgctcygatttttatctgtaaacattattttagttgttaatgactaatttttgttaatttgattttttcctagtccctattttcttttctttgtcgtcaatatttccagaatgacaatgatagtagctaggaactgctatgtatatacctactgtctaaatgcctaaattctcatttaatcctcacaacaactataaagcacagaattgctgctgtgctcacttcacaccctgaaagatgttacacacggccactacacggcagagctgggcttcacggctgcacatggctaac

SEQ ID NO: 353699 - DNA, 673 bp, Homo sapiens
tagctcaagtccaacttaaagtgtgacaagttagtccacagccccatcttgtgtttaggtccctggttcccgaatgtatgattgcaacagagacactcggcaacagtcagaaaccccatattgactgattcatagatatggaccattattatagaaagggctaagtgaaagcccctggaacttcctcctcaatcctaagataacataccagaagcaatgcagtatcactgggggaattttttatgtaaacgccataatcaaaaatttgaaagcagcaacagcggtgaaatctagctatccttatataactcaacagtttaacctgtggagaaatcaggtagatattagagaatgatcatggactactgtaagcttaataagttggtgacttcaactgtggctattgtcccacatgtaatatgttcactggaacaacacaggccctttcatttggaatgccactcttgacatggctaakgcagcagtatacctgcagatacctacctgctccctgccaagtagagtctgcagaggtctttgtctttatgacacttagaaaagcatacactggtctactgtattgatgaagctgtgcttattagatacagtcagctgaaagttacaaacattttaggtgccttagtaagacatatatgaacaagaggttccaagt

SEQ ID NO: 353700 - DNA, 587 bp, Homo sapiens
aaaactgactcaccacctggagcatggcatcaatttattcatgcgggacctaaacacctctcactaggctccaccagccaacatggaaagctccatggcattctatctctagggtgaccaagaaaaaaaagagaaggtacaaatccacaaatttctaatattcaaaataaagkgggggcatcactactaatcccatggacactaaaatactatgaaccactctaagcccacaaatttaataacctagatgaaatagaccaattcctggaaatacacaatctaccaaaagtcacacaagaaatatataatctgaataagtctgtatacattaaataaatcaaatacattcttaataaccttccaaaacagaaagcaaccaggaccaaatggataccctggtgaattctgtcaaacacttggagaacaaagaataccaattttctacattcctttccagataaaagcagagggagtacttcctaacacattctatgagtccagcattaccctaataccaaaaccagaaaaaaaattacaaaagggaaaactacaaaccaatatctttcatgaacatagacgcaaaaatc

SEQ ID NO: 353701 - DNA, 587 bp, Homo sapiens
aaaactgactcaccacctggagcatggcatcaatttattcatgcgggacctaaacacctctcactaggctccaccagccaacatggaaagctccatggcattctatctctagggtgaccaagaaaaaaaagagaaggtacaaatccacaaatttctaatattcaaaataaagtgggggcatcactactaatcccatggacactaaaatactatgaaccactctaagcccacaaatttaataacctagatgaaatagaccaattcctggaaatacacaatctaccaaaagtcacacaagaaatatataatctgaataagtctgtatacattaaataaatcaaatacattcttaataaccttccaaaacagaaagcaaccaggaccaaatggataccctggtgaattctgtcaaacacttggagaacaaaraataccaattttctacattcctttccagataaaagcagagggagtacttcctaacacattctatgagtccagcattaccctaataccaaaaccagaaaaaaaattacaaaagggaaaactacaaaccaatatctttcatgaacatagacgcaaaaatc

SEQ ID NO: 353702 - DNA, 521 bp, Homo sapiens
tctgtgttcatactttgtgttgctttgcgtctcaacaatgtctctctgttacatttcagcacagcacrttgccaagggctcaaattgaattcaatataggcaggtcccgggatcatggaatcactactcatccagcagcacttaggtccttcctaactccatttcaccctcttttcattaactgctgcttctttgaacctagttattgtcattttttcctttgctctacctatgccatagaactttagatcttgaaggaacattaagagatctattttaatcactttcacattaacagtaacttgccccaaaacacatggttcgttctaactctaaaacaggccacgggtatttcttattgctctcgtatttcccataagaagcaagctcccttttcattctgtccacgttttccccaactcagctttagaccaccactcctttcttgagttgatggcattctctggacctgtggggtacatgttccaccaggcccccaactcttcccccattctcctccc

SEQ ID NO: 353703 - DNA, 478 bp, Homo sapiens
tgaataagtctcatgaaatctgatgatcagataaaaatctgatgtagggcagttcccctacacatgctgtcttscctgccaccatgaaagacgtgcctttgctcctccttcaccttctgccatgattgtgaggcctccccagcaacatggaattgtgaatcctttaaacctcctttgctttataaattacccagtttttggtatgtctttattagcagggtgagaatgggctaatacaactgggttttagcatgcatttatttgtgtgttgtttaatccccagaacaagtcttcttgtgatttggctggtttctaaaaatgatacaacagagggtttggcttatcagagagaaaatatattttcaacaaagaaaaacatacaaacaatataaactgagccttgagatggagagagataaatggaatattgtgaaccatgagtgaaaatgtactcgaatatgttttaggttctttaatt

SEQ ID NO: 353704 - DNA, 478 bp, Homo sapiens
tgaataagtctcatgaaatctgatgatcagataaaaatctgatgtagggcagttcccctacacatgctgtcttgcctgccaccatgaaagaygtgcctttgctcctccttcaccttctgccatgattgtgaggcctccccagcaacatggaattgtgaatcctttaaacctcctttgctttataaattacccagtttttggtatgtctttattagcagggtgagaatgggctaatacaactgggttttagcatgcatttatttgtgtgttgtttaatccccagaacaagtcttcttgtgatttggctggtttctaaaaatgatacaacagagggtttggcttatcagagagaaaatatattttcaacaaagaaaaacatacaaacaatataaactgagccttgagatggagagagataaatggaatattgtgaaccatgagtgaaaatgtactcgaatatgttttaggttctttaatt

SEQ ID NO: 353705 - DNA, 519 bp, Homo sapiens
ctaggctttaaaaattaaatgaagagatattacaatggaaaataaatatttaataaaagttgggttcttgaaatccattttgcatccttttatcttcctttctctccttctctgttgtctctctcttcctctgtgtatgtgtgtgtgtgtctttctctttttattattttgtttataacaaaatttgagtgccgactccaagctgattccattacatgcgttataacagactgacaaggatgtgaatacatccaaacctttcagttttttatttgtttgctcatttttaagctacrctagtgtttaaaaaattttcttcaatcattctaatcatgtcaaactgtgaggaaataaaacgtttaaattgcaataaactgtatatattttcaatagcaatacagattgaattccccttcagctgtgaatttataagacttaaaatatatacatatatgaattcactttccttctgcattcttcatctttttttttttttactttttgttaataggaaagaat

SEQ ID NO: 353706 - DNA, 549 bp, Homo sapiens
attttgcagcttttaaatgttgagtatgtggttaatggaacaagtaaatttcaaatacattttttgtggccccaaaggggtgaaaacgaggaaatatgaaattagtttgctctattgaaacagtagtactgttgtattgagaatactatgaccatctatattgtgaaattattgccgtgactatcagcataacacagttatggctttgctcttgttcatcaaactgaatcaaatctaactgacccattcaactctgaccattatactcagctgtacacatgagacacataatttataggctttcaaatattttcatttatagtaagactataaaataaacagcaaaatatctcaaagcaaattgaagtaaaaataagaaaaaaattgaaaggaaaacatgggacaatattttaaaaacttgaatgttgatataaatttattttccaagcattacttttttwaaaaaaaatcattcctctgagatatatttaatgcaaacattaattgactgaaattggtgtatgaactagaatgtctaattgtaattta

SEQ ID NO: 353707 - DNA, 623 bp, Homo sapiens
  misc_feature (1)...(623): n = A,T,C or G
aattgttcgtggatgaaaaaagggtttayagaaaaaacatttttaagtgagttaagagccaaatgacatttaaaaattaacttgtgccttgaaatcacaaaagaagatgttagcataataattgtcatcatgctcaaaggttgaaaagtttatgaagagggaaaaacgaagacacatttagcatgactacactcttggaatgattcaagtagacagacccaagctctttggtggaggtaggcaaatgcaaacaagcttggttcctatttctggaaattccatcagtacccgagcccaggaaagggtaatgtggacaatggctggctcaatgtccatatanagagtgagatttctgacttcctgaaaaagcaggacattctgagatccgcaggagaaccccttcctaagtggcagagggctggtgagaccagtgatatttaactgcgtttgttcagatagctccccagaggatgtgtcanagttcacaggaggctgtttaaagaaaacaacccaagccaacggtaatgagcccatgtcacctggaaagaccctaaacagtttactagcagactcaagaaggaaggtcccaggatacttttcattccttcccttcagtgagtagg

SEQ ID NO: 353708 - DNA, 623 bp, Homo sapiens
  misc_feature (1)...(623): n = A,T,C or G
aattgttcgtggatgaaaaaagggtttacagaaaaaacatttttaagtgagttaagagccaaatgacatttaaaaattaacttgtgccttgaaatcacaaaagaagatgttagcataataattgtcatcatgctcaaaggttgaaaagtttatgaagagggaaaaacgaagacacatttagcatgactacactcttggaatgattcaagtagacagacccaagctctttrgtggaggtaggcaaatgcaaacaagcttggttcctatttctggaaattccatcagtacccgagcccaggaaagggtaatgtggacaatggctggctcaatgtccatatanagagtgagatttctgacttcctgaaaaagcaggacattctgagatccgcaggagaaccccttcctaagtggcagagggctggtgagaccagtgatatttaactgcgtttgttcagatagctccccagaggatgtgtcanagttcacaggaggctgtttaaagaaaacaacccaagccaacggtaatgagcccatgtcacctggaaagaccctaaacagtttactagcagactcaagaaggaaggtcccaggatacttttcattccttcccttcagtgagtagg

SEQ ID NO: 353709 - DNA, 599 bp, Homo sapiens
aggaactgtcaaacactaacaaaaccatcggatctcatgagaactcacttaccttcatgagaacagcatgagggaaacctctcccatgatttaatcacctcccatcatgtccctccctcaacaagtagtgattatggggattacaatttgaratgagatttgggtggggaaacagagccaaatcatatcaatagtacctagacaattgtaaccttctggtgaacagttactctcattattagttaataaatatttaattcccctaagctttcatattaaagccagttacagtggttcctcagtatccttagggacttgggtccaggataccaaaatccaggatactcaagtcctttatattaaatggcacagtatttagatataacccatgtgcatcctctgatatgtttaaaatcatctctcgattacttataatactgaatataacgtaaatgctatataaatatttgttatactgtatgttttcatttgtattatttttgttgtattgttactttcgatttttttccagtatttttgatctgccgttggttcagtctggagatatggagcccactgacacagagggacagctgtaa

SEQ ID NO: 353710 - DNA, 575 bp, Homo sapiens
agcataagttcctctaagggggatctgaagtgaccgtcaatagtaagttcttaaacccctccttttttagggatctgattgtctaagacactaatattgccaaagcagaatgtgtctctgttaaacctgaggcaaaggtgaaactgctttcagggttagttcatttgctaccacgctatgatgtaaacgctcatgtcacttaaaaaaagcagcacacatacagataataaagacagatgacatttgaagaggaagataaagcaaaagataacatttcaggctctccccaaaagaaggactaaacaaagattaaaatgcattagacacagtcaatatttttagaaaagtgtgagaattaaatacatgactaaaattrtttatctataaagcattaattcatgaacatacttgaaaacaggataattttactcaaatctattaagaaattcaaaagtgactactttaagatttcatgtgctattttcagcccaaaataaaatttcatgaacaagttataaacccttgaaaatgcattttttaaaaatttgagtgctgatatcccactataatttcat

SEQ ID NO: 353711 - DNA, 247 bp, Homo sapiens
tgaggttctgaggatccaacactctgggaaatgggagtaggcaggttcttctggtgggaagaatatcaggggtggaaagaatattcattaaatggytatgatgtacaaggccaccctcatgggcatgcggtctgtgcagtcacatagactgcatgcttagaagggccccatgctttcatttaacgctctgctggtgctgtcttgaaatttttagcaactttttaacaaaggcatctgcactttcatt

SEQ ID NO: 353712 - DNA, 577 bp, Homo sapiens
actcaatacatgttagatattattttttatccctaaagcatttcaggtagcttaaaaaatatactagaaaggctttaaaaaaataagaaaaaagatttaggcaaaaggtagaaaataatgaaataaaactaaaaggagttaaaaatttaatattttaaaaattaatattacttaataaatataaaatytctagctctcaattgaaaagaagaaaatgtggttggatataacatctaaatgcctataaatttaaaaaccatcaaccaaaagtcatatcctgacctaaatgtttccccaggactctcataaaggagtcattgggatatataacttatttattagaaactgtaaaccgttatgtaatctccgctcttaaataccttgaaaattaaatttctaaatattgagcacctaggggtctaggtttccttaagcatattttttgttttctaaactacagagatcaagcacagttatatgataaaaatactccaaagcaggagcttatatatgccccactgagttataggtaaacagatcaacagctagacagagctctaatgcttttgaagttaac

SEQ ID NO: 353713 - DNA, 563 bp, Homo sapiens
actggtacaccaccagcaatatttatgacttctactactctttggaaaatattagaatagaaaaattatactttgacatacatagtcacattaaaacttttttattttttatttttatttttgttttatttttttttaagttcagggatacaagtgcaggtgtgttacataggtaaactgtgtcataggggtttgttgtagagatttaaaaatgtgaataatcatctctaatttggaaatgaaaattatatttccttgctaaatgaaaaacaagacgagacactttttgttgctgttgttttctttttttcggagatgggggtctcactatgttgcccaatccgtactcgaacttccrgactcaagcaatcctcccacctcaccctcctgggtggctgggattacaggcgggagccactgttcctgatttagaatggacattttgaggagcacatcagacactgtgtctggccagaatcattttaaaattttcagctaagattactccatattccacatgcattatgaattccaaacttaaacgactgtgagattgcgactag

SEQ ID NO: 353714 - DNA, 564 bp, Homo sapiens
ctatgggcaaaatatgtgtaaaggatatactgtgtgtctggtactcttctgagtggtttgcatgtgttaattcatttaactttcatggtaatcccatgaggcacttttatagtaaggaacataattcattctgagagaaaaaatgcccttttgttyggccataattattaataagacttttgcttataaagggcaagacaatagctcaatctgggaggagggaaataaaacaaaggtagttaaagtgaaggatgatgtaaacatttggcctctttagagattagcgtttatgttttgataattgatttttcatctcctataagagaactgggtgggggtttggggaagaataaactgataaatggaaaatgtctttaaaaaatcaacaaaactttagacctagtatggtggcttatagctatagttctagctatgggaggccatggtggaaggattgcttgaggccaagagctcaagaccagcctgggaaacacagtgagatcctgtctctacaattttttttttttaattagctaggtgaggtggcacacacttgtaatgcta

SEQ ID NO: 353715 - DNA, 636 bp, Homo sapiens
tgcttcccctcctacaggaaagattgtgaatgtcactgcctccagtgagaaactgttctatcgagacttaatttcctcagtactgataatgtaaaagcgatctggcagagtaaattagtgtatgattccaaagcacaaattttggatcatctgccatacttctgacataaatcgtaagagtcaaatatttttcactaacaagaatgtaaaaaggcctatttgaaatggcacagcacaaacctgttttatccactgaagcaaactttgtatggtgttatggaggcataacacctasggtagtgcttctaaaacactgaaatatgtaaaaatcagcagataacgtaaaaagtagagtctgtgcagttaggaagggatgaggtctgaaagtttgaatttttaattatcttctgtttgtagcagatgctgctagtccagagacctctatggggacaattttcatctatgaaaaatctctgttagggtgaagttatcctgaacttcaggactgattttcagtattaataaagagtaaaatgtagggaagggaatagaatttcaatctagttgggcaagtagattacctgttcattcaacttgatatatattcttggccaatctgttacatattgcttagcc

SEQ ID NO: 353716 - DNA, 647 bp, Homo sapiens
catgtacccaccctgatggctcttagccaatgcctgcctgggctggattatgaaactccagcatgcttgattcagattgagatgattttgaggggtaacttccactccagcatgccccactgggattggactgtatttttcctcatcaaaccttttgcttgaggtcatgcccatccttggcttcttccctactttattttccttctttttgtcccttataagtttcctggagatcccattcttaatgaacaatttgcacacaaattctttctcagtatctgatactggttatcctcacctaagacaccaaccaatagtgcttgatatcagagctcaagctcttacacatgatccaatttgagattcttcctaaaaaggtgccaattattcttccttataagagaaaaccttaattataggcaaatgtaattagatggataatgtgcacacacattccttcctttacgtgtatttattaagtatttaatatgagccagatttaatctaagtactggtgatacaatgttaaatgagatagcaaagtctctgttttcatggctttacattccaatactagaatataagtaaaaaagtgaaaaaaaaggaacaagrtaattgctgataggatcaatggtatgaagcaagta

SEQ ID NO: 353717 - DNA, 680 bp, Homo sapiens
tgaaagcagaatggctgagaaaataagactggaaacgactaactgcaaaagtattttattttcaggaggattaactgcttctggggtggctgagtgtggtagaggaaaaacagaagaaactccaaggtgaaattagaaatcttagaagagctcttctttctcccatagaggtaacacagtatttccaagaaattattgatagtaggaataaggatttcccccagacggaaaggagacattgatgtactgcggrcatcccaacttctacctcatcatgcgtttctgagtttcttccaccatgaccctgatggttttggttactctctccttcccactagttacgtggttgctctgcttttagttgaagttgtgctgactttgggataggtgtagggttaaatggtatcaagaggacattcctatttattgacctacaatgtggtttctgtacctgagcaaaagacatattttttctctatatttgagttggtcttttgagaccggcaaagctgtggaaacaaagctttgcttaaggaaaatggccacaatctattgttagaaagaagcctcaagtaccatgaaaatggaccacacaggtcagggatttctcaaaatgtttcttttcccaggaaaatattgaaactaggactattgtggaattacacagtttatgattgcca

SEQ ID NO: 353718 - DNA, 594 bp, Homo sapiens
gagcatgcaggcttgaattctcttttgtataacccaagactaaagtcctgtgtgcttacacttgtgaattctccattacctctctcaaacctctccactaggcagagagtacagtctattccacccaatttactgctcacttcatttgcatggggctttttccttgtaatattattgacaggaggcagaggtttatwaccgtggtgctagttttgcacagcaaacatatgatcacctttttagagacctttgccctgtttgactctgaccaaacccttcctattttaacatatttttgtgattctaggaatgtgaatatagttctccaaataatttagacacatcacagctaaactatttccaacttggcacttttatcaacttgaaattattttcaactgcaacaagtctgaaattgctaattcaatcagtatacatacttgcaataacttaacacacacagtataccaactgtcttcactgttgtcagaacaaagtataggcagaacatcctggtgtcaacatgaattttaccacatgctttctttctatgtaagattaaataatattttttctttattttgttaatgtggt

SEQ ID NO: 353719 - DNA, 594 bp, Homo sapiens
gagcatgcaggcttgaattctcttttgtataacccaagactaaagtcctgtgtgcttacacttgtgaattctccattacctctctcaaacctctccactaggcagagagtacagtctattccacccaatttactgctcacttcatttgcatggggctttttccttgtaatattattgacaggaggcagaggtttataaccgtggtgctagttttgcacagcaaacatatgatcacctttttagagacctttgccctgtttgactctgaccaaacccttcctattttaacatatttttgtgattctaggaatgtgaatatagttctccaaataatttagacacatcacagctaaactatttccaacttggcacttttatcaacttgaaattattttcaactgcaacaagtctgaaattgctaattcaatcagtatacatacytgcaataacttaacacacacagtataccaactgtcttcactgttgtcagaacaaagtataggcagaacatcctggtgtcaacatgaattttaccacatgctttctttctatgtaagattaaataatattttttctttattttgttaatgtggt

SEQ ID NO: 353720 - DNA, 483 bp, Homo sapiens
aaaaataaaaaagtatgtagaaaaaaattaagtattyatacttactacctaaatgtgggacaaacatttttatgggtccaggaaattcaggaactgtaaaagatagatgtacataaataaatataaatttatgtctttgtatagcaaaagatagcaaagtcattagataggtcatagatctgtaaaatgaagttgcaacacagatacagatacactttaaagtctacataatataaagaatatttaggattcattctggcaagaaacataattcaatagtataatgaacaaagaatgtaaattggcaattcttagaaacaaaaccatatgttagaatccttaaattcacaattactagaatacatccaaatataggaaaggagaggaaagtgtagatgaataaaaataaaataaggagacaaaaaaatacagaacaaaaatcctctcagaacatttgatatgaatttgagtacataaaatttc

SEQ ID NO: 353721 - DNA, 569 bp, Homo sapiens
ttacaaacagcatctcctaatgaggaataaaggaaagtttctctgcaggtgtctgatcatgttttcactctgctctaacatgaccatcaaaaccctaggggagaagagggatgaatatcaaattctaaagtgtttcttcttacctgcagagtttactccatttaggtttactattaggtttctaagccataatacattaattcactgtgagaataaaaaatagtcaaattgcccttttagaagtttaggctctaaggttaccccccaaattatatgatttggtgattttatttaattatattaaccgatagctccaacctatctgacaaattaaacrtgtctggatatcaggttgttgaaataaaatctcaattttattgaaatgttaatgaaaaccagttctgaggctttaagtgacttatccaaggacacataggtagtaagtagcatggaggaatttgaacccatacctgcccaaaacctaagttcaggctgtacagctctccacctgcatcaacctgcggtagaaagtccagagaagcctggcaaaacaactaaaaaatgcacct

SEQ ID NO: 353722 - DNA, 674 bp, Homo sapiens
tctgtgtctctgccaagctgaactgagcattgtcagttatcatagcaattgtgttgctcatcagcagaattgagacccaaagccatttccatagttttcagtagctaacrcttatccttttctttctaaattgtctctgacatcaattgccctgcaggatttccgtgtgggtttaggggattgaacagccaatgaattcaggctgttcttatagcatgcaatcattacttgtgtttagctttcataacagaatcttatccaaaaccatctcaaagatgccaaaaccaatctgaaaccacttcctaggtccattgcataacaagtggatatgctcttcccaccacatgatgaagagcgctaggcagctagatatctgatcatatgaatggtgaaagtatttgtctcgctgttatatttaagctacaaaacttgcaagatttctggttccacattgtttattgaacatttttctattcacattcattgctatttcttctttaatgcctgagaagaggctattgctatctcttttccctcacatcctagagggaggctaattcattagccctcacttttaaatgcactgcttaaagtacagtgttattcactaggactgttctaccatagtttaaagttaccgttagtaagattttgccatttttctaagtgtttgc

SEQ ID NO: 353723 - DNA, 674 bp, Homo sapiens
tctgtgtctctgccaagctgaactgagcattgtcagttatcatagcaattgtgttgctcatcagcagaattgagacccaaagccatttccatagttttcagtagctaacacttatccttttctttctaaattgtctctgacatcaattgccctgcaggatttcmgtgtgggtttaggggattgaacagccaatgaattcaggctgttcttatagcatgcaatcattacttgtgtttagctttcataacagaatcttatccaaaaccatctcaaagatgccaaaaccaatctgaaaccacttcctaggtccattgcataacaagtggatatgctcttcccaccacatgatgaagagcgctaggcagctagatatctgatcatatgaatggtgaaagtatttgtctcgctgttatatttaagctacaaaacttgcaagatttctggttccacattgtttattgaacatttttctattcacattcattgctatttcttctttaatgcctgagaagaggctattgctatctcttttccctcacatcctagagggaggctaattcattagccctcacttttaaatgcactgcttaaagtacagtgttattcactaggactgttctaccatagtttaaagttaccgttagtaagattttgccatttttctaagtgtttgc

SEQ ID NO: 353724 - DNA, 674 bp, Homo sapiens
tctgtgtctctgccaagctgaactgagcattgtcagttatcatagcaattgtgttgctcatcagcagaattgagacccaaagccatttccatagttttcagtagctaacacttatccttttctttctaaattgtctctgacatcaattgccctgcaggatttccgtgtgggtttaggggattgaacagccaatgaattcaggctgttcttatagcatgcaatcattacttgtgtttagctttcataacagmatcttatccaaaaccatctcaaagatgccaaaaccaatctgaaaccacttcctaggtccattgcataacaagtggatatgctcttcccaccacatgatgaagagcgctaggcagctagatatctgatcatatgaatggtgaaagtatttgtctcgctgttatatttaagctacaaaacttgcaagatttctggttccacattgtttattgaacatttttctattcacattcattgctatttcttctttaatgcctgagaagaggctattgctatctcttttccctcacatcctagagggaggctaattcattagccctcacttttaaatgcactgcttaaagtacagtgttattcactaggactgttctaccatagtttaaagttaccgttagtaagattttgccatttttctaagtgtttgc

SEQ ID NO: 353725 - DNA, 656 bp, Homo sapiens
ttctttctcccccatcatctaccttccttctggaaggtagggaatttgtctccatcatctcaacttgtcatcattaggtcactctttccctctaaacaccacttcctgtgcctcactgctggactgccactatggccagggatcatgatctaattcagcacataaaaagcaattcataagtatttgttgattatctaatttggctgatttcatgtacttgaatacaaaacttgggacatggcaatatgttatgtgttgaaactgtgtgctccgtaagtgtaaagaccatgtcttatttatcgttacagccatggcacytgacatagtgtttggcacacagtagaaggaggcaaaaaactagtaacttttaaagcaaattgaccattttaaaagaatggagtgtttgtgggctaggtacagagattacagtcatgactgtgaagctatccctgacagtcctaagaaaacatgacggccctgaatgaatataaaacatgtccaaagttttgtcttcaggtacactgttgctcctttctgaaaccttcattttctcacattaacttaaacactgcatgcagatgggggattttgtctacccatgagagtttgacaaaatgtcaacccatgagagggctacaaaagtacagatgttgtca

SEQ ID NO: 353726 - DNA, 541 bp, Homo sapiens
tatgcctttctccaaagatgattttgagggctccaaatttaaaggagaaagagcaggatattgagaaatacacaattttcatgtaagaggtgggtagggcaaaatagccactcatgcctttgtctggctcagtgaatcagcattttttacagaagatgacatagacaaatggggtagaggaagaatgcaaggactctgcactttacataagataacatagacaaaatggggcagggtgacgatcagatatgcatttgtgtctggtgggcaggggggtgactgctcctgtaaaaataagctatcaatttacattgccatggtgaaattttagcagaaacagcttaaggatcttgcagctcactagggatttccttgtgggcaaaatatgggggagccgtttagcttttygtcttgtaaccatttcatttaggaaacaaaagggggtggcaggtttgcatgacatagttcccagcttgactgttcccttgggcttaatgagtttggggttccaagatttaatttcctttcatccctagtaaat

SEQ ID NO: 353727 - DNA, 636 bp, Homo sapiens
taattttttatttttattatttatttagttagttatttttgagacagagtcttgctctgtcacccaggctgcagtgcagtggcatgatatttggctcactgcaacctccacctccacagttcaagcgaccaattcttgtgcctcagcctcctgagtagctgtgattacaggcatgtgccaccacgcccaactaatttttgtatttttagtagagacagggttttgccatgttggccaggctggtcttaaactcctggcctcmagtgatctgcctgccccagcctcccatagtgctgagattgcagacataagctaccatacccggctgtattaattttataataaaatgtttttaaaagtaaagtacattggatctttacttggtagaatactatctaccaagcgcttaaacataatatttatggctgtgtatcttctataatctgatattttatattaatcttatatccaggaaatgcattgctaatctttataacttcccagattggtttctgcatacatataactcttcctccctatataatgtagttacctgtgtaacatatgccaactacttcaaatgtataaaatgattgacaggataaatagaaggtttaaaagagggcaaaaaaaata

SEQ ID NO: 353728 - DNA, 591 bp, Homo sapiens
tccgcatattacttgacttccctcagcatcagttttctcatctgtgaaactggaataatagaagtacttactacagggtttccatgatcgttaaatgggatcatatggtgtctggcacatacaaagggcaaaaagtaagttagctctaattgctagcattctcactatatatctgcacacccatgttggccagacttattcagcaaaacaggttacaccaattcccacaaggccagtgtatcacttgcaggtttccccagtctctgggtaagtaagycacatggaaggcaactctagcagcaagggggtgaactggggaagttctgtcctgagtcccagctattcctgtgccgccatcttccatctcactttctcaggacccagataaaaaggacacaagttccatggctcatgccactgtatagacactgcccttctaaaacaggccctctgtagttaattgtgtacccatgtgtgagttgctagattgtgaacttaaaggagggaccaaatttcctttctttttgttttcatttggtcatttgccttgtactatgcctggaaaagaatggttaataaaggatgaaagaa

SEQ ID NO: 353729 - DNA, 591 bp, Homo sapiens
tccgcatattacttgacttccctcagcatcagttttctcatctgtgaaactggaataatagaagtacttactacagggtttccatgatcgttaaatgggatcatatggtgtctggcacatacaaagggcaaaaagtaagttagctctaattgctagcattctcactatatatctgcacacccatgttggccagacttattcagcaaaacaggttacaccaattcccacaaggccagtgtatcacttgcaggtttccccagtctctgggtaagtaagccacatggaaggcaactctagcagcaagggggtgaactggggaagttctgycctgagtcccagctattcctgtgccgccatcttccatctcactttctcaggacccagataaaaaggacacaagttccatggctcatgccactgtatagacactgcccttctaaaacaggccctctgtagttaattgtgtacccatgtgtgagttgctagattgtgaacttaaaggagggaccaaatttcctttctttttgttttcatttggtcatttgccttgtactatgcctggaaaagaatggttaataaaggatgaaagaa

SEQ ID NO: 353730 - DNA, 591 bp, Homo sapiens
tccgcatattacttgacttccctcagcatcagttttctcatctgtgaaactggaataatagaagtacttactacagggtttccatgatcgttaaatgggatcatatggtgtctggcacatacaaagggcaaaaagtaagttagctctaattgctagcattctcactatatatctgcacacccatgttggccagacttattcagcaaaacaggttacaccaattcccacaaggccagtgtatcacttgcaggtttccccagtctctgggtaagtaagccacatggaaggcaactctagcagcaagggggtgaactggggaagttctgtcctgagtcccagctattcctgtgccgccatcttccatctcactttctcaggacccagataaaaaggacacaagttccatggctcatgccactgtatagacactgcccttctaaaacaggccctctgtagttaattgtgtacccatgtgtgagttgctagattgtgaacttaaaggagggaccaaatttcctttctttttgttttcatttggtcatttgccttgtactatgyctggaaaagaatggttaataaaggatgaaagaa

SEQ ID NO: 353731 - DNA, 627 bp, Homo sapiens
ttccactggcaccaagatgctgagccaatttaaatgcaaagcaaaaaacttgcaatgtttgccrgactctttaaaatgtaattatagcaacccattcaaggatcagtttaacgtataagcaacttggagaagactgctgatcccattcaaacattttacattccacatacctacgcaatgacattacctggaggatgtactttcttaattaaaaaaaaaagttttcccctcacattttgaaaagtatgttgttattaaatggatttgtatctttaatttttgaattcttcaattttctcgaccgatattgtactaagtgatggtactgtagaataatatctcaggtatgcttagtgctacacagtaagtctccattctccccctgccttctcccccaaccctgctgcaaaaccaacctggtaatttctgcccatctcagcctttatctgtgcccagggagaatggcttctaccaactgtgtcacctaagctcccttgctttctggcttccagttgggtttggccagtggaaggcactgaaatgaagtcagataactgaaggagagagagattgaggtattattaggccctactctcttgcaacagggtggcactttagcaggagttg

SEQ ID NO: 353732 - DNA, 583 bp, Homo sapiens
tacactttacagtacaacagagaaaccacacaacaccttaaccaagttatgaacgttaacatcataaataaagtgtaaacacacatgacgtacytacaaatgtgacagcctaagaaggacatgacatcatgtatttagcaatccagccagtaagtacgaaaccagagtcatatgataaggaaacatcaggtgaaccaaactgaggacagtctataaaacaactagcttgtaatcttccaaaatatcaaggttaggaaagaggggaaaaaaaaggctaagaaaattagcctttagattgaattaaatgagatttaggaaatgtgataacttaagtgtaatacatgatcctggcccagattctgtactagaagaaaaattgctatgaatgctattattgggataattgaagaaaccggaatgtggactctacattagataaaattagcatgacaatattaaatttcctgaatttgataactaggttgtggttttgtaggaaaatacccttgagaaatatacactaaagtattaagggataaaaaataatgatgtatgcaatctattctcaaatggttcagcaaaa

SEQ ID NO: 353733 - DNA, 583 bp, Homo sapiens
tacactttacagtacaacagagaaaccacacaacaccttaaccaagttatgaacgttaacatcataaataaagtgtaaacacacatgacgtacctacaaatgtgacagcytaagaaggacatgacatcatgtatttagcaatccagccagtaagtacgaaaccagagtcatatgataaggaaacatcaggtgaaccaaactgaggacagtctataaaacaactagcttgtaatcttccaaaatatcaaggttaggaaagaggggaaaaaaaaggctaagaaaattagcctttagattgaattaaatgagatttaggaaatgtgataacttaagtgtaatacatgatcctggcccagattctgtactagaagaaaaattgctatgaatgctattattgggataattgaagaaaccggaatgtggactctacattagataaaattagcatgacaatattaaatttcctgaatttgataactaggttgtggttttgtaggaaaatacccttgagaaatatacactaaagtattaagggataaaaaataatgatgtatgcaatctattctcaaatggttcagcaaaa

SEQ ID NO: 353734 - DNA, 562 bp, Homo sapiens
gaggctacaattttgaacaaagcagatggtgtctctttttcatagatatgtgctttttcatatatatataatttatttttatgtgacaaataatatttgtgcacatttagaatgctatgtgatttttttttttttttttgagacaaagtctcattctctcacccaggctgaagtttagtggcaagatcccagctcattgtagcctagaagtcctaggctcaaacaatccttcccttcagtctcctgtgtagctgggactacaagcacgtgccaccacacctgcctattttttttttttttctctagagaataggtctcactatgttgcccaggatggtcttgaactcatgggctcaagcaattttcctatctttgcctcctaaagkgctggtattacaggggggaaccactgggcctggcctgatgttttgatctatttatatattgtagaaaggtgcaattaagctaattaacacatgcattgccttcccaatctatcatttctttttctgataaaaacattaaatacctgttcattgacctcagagatcttatagtccct

SEQ ID NO: 353735 - DNA, 562 bp, Homo sapiens
gaggctacaattttgaacaaagcagatggtgtctctttttcatagatatgtgctttttcatatatatataatttatttttatgtgacaaataatatttgtgcacatttagaatgctatgtgatttttttttttttttttgagacaaagtctcattctctcacccaggctgaagtttagtggcaagatcccagctcattgtagcctagaagtcctaggctcaaacaatccttcccttcagtctcctgtgtagctgggactacaagcacgtgccaccacacctgcctattttttttttttttctctagagaataggtctcactatgttgcccaggatggtcttgaactcatgggctcaagcaattttcctatctttgcctcctaaagggctggtattacaggkgggaaccactgggcctggcctgatgttttgatctatttatatattgtagaaaggtgcaattaagctaattaacacatgcattgccttcccaatctatcatttctttttctgataaaaacattaaatacctgttcattgacctcagagatcttatagtccct

SEQ ID NO: 353736 - DNA, 571 bp, Homo sapiens
agtaaagaccattaactcctaatttttccatcttccatccccaaattctatcagcttgtctgaaaaacacactcccatgtactcccacaccacaaccaaaataactatataaaaaataagtacctagaagttgaaagggtaaagacgtaggaatacaaaaaaacaaaaaacaaaaaacaaaaaaaactgatactattctttctataattctggaatttaaacttattttaatttaataattccctcagaaatgttaaatatgaaactckttctcatctctagctctcagagaatgaaaacatgatttccagttatgttatttcattataaaaatgttagcataaaataattagaatatctccaaggcatttttaattttgtaattctaactctacggcccacagagtttattatactgtaatagaacctgtatattgaattgtgcctattttttcagtgtgtgtgtacatatatatgttgggactagcctactgattgattctaaaaacttccattctatgaaatttaattcagtaaatacttatcgatattcttatgacaggtcctgtac

SEQ ID NO: 353737 - DNA, 588 bp, Homo sapiens
tatataacttctccattctgaattagacaaatatttttagatacaataattacagttcttccttttacttcctttaaactttaccaacctgtgacattctaatttttaaaattgtaatagttagctttctacacaccatttaggtcatctgcctacatcaaaaatgcatcacattgaactttgctgattaatggcatttataccatggattgccatgacaaatggtgcctcgctgttgtcatgcagtctgcatgaccaacgaacaggcaatgaagatataatcataggtatcaccaggtccagattagatggattagacagtataatactrcttgcataatactgtaggattggctcaaagtttaagcttaattttctctattatttatagatatactaaagtgagaactgcttattaaaaatctggaaaagtgtttccatgataccatgtttctcacatctccagaatacagccttaccagtagacatttgtatactagaacatattttaactgaaagggattctagagagcatttagattctctgtgtcattttattgtaaaaagaaggcctacagagaagaagac

SEQ ID NO: 353738 - DNA, 568 bp, Homo sapiens
tgataaacaccaaggaatatttttatatcttcagggtttttggccccagtattcactatttacccaaatcttggcaaccttagattgtcacatctatagctaaccattggttgaatagaaaggcttatccattaatttaaaaataaatatacttaaaaatcttttcacatgataacatatccttgctctagataaaataacaaggccaaggtacagcagtatatgttgattctatgtcaatagattaggactttattaatcttccaataagtggccaaatgaaagttctcattttatgtgaaagaggctgtagtggaaagaagctgttcactaaattattattgacttgcctattatttttaataggcttagaaaatcaaatcagattcttatagaattttgacaggaagaaagtatttgccaataaataaaccctagactatgaagtaatattattctttagtttggctgataagacaaaattytaatatctttacattatagaaccatataattcctaaatgtccaatatcccaagaactactatacttagaaggaaatgtaaaga

SEQ ID NO: 353739 - DNA, 585 bp, Homo sapiens
ggtctcaaaaaaaaaaaaaaaaaaaaaaagatgccaaagcaagtataacaaaaacacatacgacaaatgggacctgattaaactaaagagttgctacacagcaaaagaaactatcaacagagtaaacaaacaacctacagaatgggagaagatatttgcaaattgtgcatctgacaaaggactaatatctagcatctataaggaacttaagcaaatcaacaagcaaaaaacaaccccattaaaaagtgggcaaaggacacaaacggacacttttcaaaagaagacatacacatggcgaacaagcataygagaaatgctcaatatcactaatcattagagaaatttagagaaatgcaaatcaaagccacaatgagataccatctcatggcagtcagagtggctattaataaagtcaaaaaataacagttgctggcaaggttcagagtcaaaggaatgcttgtacactgctggtgggaacataaattagttcagccattatgaaaagcagtgtggcaacttctcaaagaactgaaaacagaagtaccatttgacccagcaacctcattagttggtatatacccaaag

SEQ ID NO: 353740 - DNA, 557 bp, Homo sapiens
actggcaaatcttggatttggcaagtttcttagatatgacatcaaaagcatacacmcacacaaagacaatctggacatcatcaaaactaaacaaaaaaataatgtgcattaaagaatacaatcaagaaagtgaaaagacaatctatggaatgtaaaaatatttgcaaatcatctatcctaccaaagactagtacctagaacgtatatataaaaagtcttacaactcaataataaaaagaaaattcaagtcaaaatcaggcaaaagctatgaatagaaatttcgccaaaatgaccaataagcacatgaaaagatattcaacattatttgcctttaaggaaaggcaaaattagctgggtgctgtggtgtgtgcctatagtcccacctactctgaaagctgaggttggaggatggaggatcactagagcttaggagttcaagaccagtctggttaaaaagtgggaccctcatctcaagaaacaaagaaaaaaaaatctaaaccacaatgagataccacttcacaccacagggaggatggctgtaatcaaaaagtaaaaaa

SEQ ID NO: 353741 - DNA, 557 bp, Homo sapiens
actggcaaatcttggatttggcaagtttcttagatatgacatcaaaagcatacacccacacaaagacaatctggacatcatcaaaactaaacaaaaaaataatgtgcaytaaagaatacaatcaagaaagtgaaaagacaatctatggaatgtaaaaatatttgcaaatcatctatcctaccaaagactagtacctagaacgtatatataaaaagtcttacaactcaataataaaaagaaaattcaagtcaaaatcaggcaaaagctatgaatagaaatttcgccaaaatgaccaataagcacatgaaaagatattcaacattatttgcctttaaggaaaggcaaaattagctgggtgctgtggtgtgtgcctatagtcccacctactctgaaagctgaggttggaggatggaggatcactagagcttaggagttcaagaccagtctggttaaaaagtgggaccctcatctcaagaaacaaagaaaaaaaaatctaaaccacaatgagataccacttcacaccacagggaggatggctgtaatcaaaaagtaaaaaa

SEQ ID NO: 353742 - DNA, 485 bp, Homo sapiens
gggtgacagggataggggaggttcctttagtgaagaagtctggatcctccagtctcccattaatgtttccaattgcctgttttctgggtgctctgtggtccttcaacactggaatctgagcaaggaaattgtgaaccattctttcagcctctacaatgtgccagtattattcccctagcaggttcagcttcacattcrctcatatcattgctataaatactaagctgagtaccagcctaggtggtccagcacagaaacactctactacactgccaagttttggcaagctgccagtcagactcttagctaccctggggcctataatacacaggaaagggtaagagtgaattggaaatataaaatttcaggctgtgcttttaaaattttaacactcagctgctacggctgagtccaagccaggatgatacaaggaaaagtatgagagggcctgcatacccagggtctcaaatgaggatagggttggg

SEQ ID NO: 353743 - DNA, 571 bp, Homo sapiens
tatactatctggccaatagccagagaagaattgagatctcccaacaaccatgtgactgaacttgsaagcagacccttctttcccagctgaatcttcttgagatgtctggagccctggctaacagcttaataacctcaagagagaatctgggcaagaacgactcaggtaagccattcctggatacctgacccttgaaactatgaactaataaatatttgttgatttaaagctgataaatttgaggttagttgttacacagcaatagatagcgaaagcaaccatgataagaaaagttatatttaagttgtagaatttcaggtttcttttagaattacctccaatcaatatcctctagtaaaactggatttatcttaagcgtagtacaaacattaaagataaaattacatttcagtctttactttttattttatttactgaaaagagtggtattgcacattctgtaatataagcaaatagcgtttctacatatgataagtacatttcattaactagcagggtatttgaataccatttacaacattgtttctgaaaaaatgcattccaagttttg

SEQ ID NO: 353744 - DNA, 567 bp, Homo sapiens
aactgaaagcctctctgccactgtctctgcagtggaactatccttgctacgctcagactaacaaaggagcaaagaccataagcttctcatccatacctcgaacagtcaatgcaaggagaggaggccagcctgtctcccatgggtcctaaacacccccattacttgttaccagacagggaactcctggcttcagcccacaacacaggccctccatcctgaccaattgctgacccatatctctctggaatggagccccaggagtcaagccagctgatgtggagaccagargctttggtgtaggagagtctgtagtggagtgtggccagggtcaattatccttctaggctcaacttactcccataagactttagtcctaggggaattgtcagatctgatctctgtggggtagtcttgaacatcagatggggctggtccaacctgatggttggtctgctggcctcacttggggcaccagcatggccacgtctgcttacagggcagtctcaggtgccctgggggcccacactatagcttctgtgtctgtggacctcacctgattggtggaga

SEQ ID NO: 353745 - DNA, 503 bp, Homo sapiens
aggagagtctgtagtggagtgtggccagggtcaattatccttctaggctcaacttactcccataagactttagtcctaggggaattgtcagatctgatctctgtggggtagtcttgaacatcagatggggctggtccaacctgatggttggtctgctggcctcacttggggcaccagcwtggccacgtctgcttacagggcagtctcaggtgccctgggggcccacactatagcttctgtgtctgtggacctcacctgattggtggagagctggttagctttctttgagcccatggcaattccccacattattttgctggcatgtatctgcatgggtgggttttgcatcacttgccccaccagcatgtgtgagtgcagtgtgcccttccacccccaccaaccaccattacagatggagccttgatgcacagagccaggaagccccacccctgtcagcacttcacccttgttctgacattgtgcagagatcaggggatcttccc

SEQ ID NO: 353746 - DNA, 574 bp, Homo sapiens
attaagtgatgtctcactaaataagcatttttttctgaaatatcatctctgatgttatccaaattgctatttttactttttaaaaaaatctacatggggattaaaagtatattcaaataagccagagaataaatttgaccttttctttgctgctcttgaatggaaaattgtctttaatataacaagtttttaaaataagtaaataaatggtttttgactataatagaagctactttccatcataagaaattatttttcttcataatattcagataaaactttgggattatcaaccagtggcactaatcccattgagtaaaaccagtgataaatattaatggcacactcatttgtgctatgcagaaataccattaaagaacaaacttccccaaataaattctactcytaaacttcaatgtttttgcaattccttatctagttccttgcttctttaagtacatctaatcatgagactcagactggcctcaaaggaatttgattaatcaaccttcacgtctcaattcaatgataatctaatatgtaaagtaactatcaaagttatccttgatgtttc

SEQ ID NO: 353747 - DNA, 468 bp, Homo sapiens
tcaaagtactgaaagaaaaaaattgcgaggtaagatagtatggccagcaacactgtccttcagaaatgaagaacagttagatagacagtccccaaaaaatgttgacggagttcatcatcacttaacctgccttacaagaaaagttaaagagacttctttccgttgaaacaaaaaagtgctaggaaacagcatgaaaacatatgaaaattaaaaactcactgaaaaagaaaaatatatagtcaaattcagactatattaatactgtaattgtggtacataaaacagttttaactatagttttgaagttaaaaacaaaggtattaaaataagtacatataaaataatttttaatagatacacaagataaacagatgaaaactgtgatgtcaatagcataaaataaggaggagaggaagaagaagtgtaggrttttagtaggcaattaaagttattatcagtctaaaattg

SEQ ID NO: 353748 - DNA, 468 bp, Homo sapiens
tcaaagtactgaaagaaaaaaattgcgaggtaagatagtatggccagcaacactgtccttcagaaatgaagaacagttagatagacagtccccaaaaaatgttgacggagttcatcatcacttaacctgccttacaagaaaagttaaagagacttctttccgttgaaacaaaaaagtgctaggaaacagcatgaaaacatatgaaaattaaaaactcactgaaaaagaaaaatatatagtcaaattcagactatattaatactgtaattgtggtacataaaacagttttaactatagttttgaagttaaaaacaaaggtattaaaataagtacatataaaataatttttaatagatacacaagataaacagatgaaaactgtgatgtcaatagcataaaataaggaggagaggaagaagaagtgtagggttttagtakgcaattaaagttattatcagtctaaaattg

SEQ ID NO: 353749 - DNA, 540 bp, Homo sapiens
gacaacccacagaatggaagaaaatatttgcaaactacctgtctgacaaagggttaataagcagaatatataagagctcaaacagttacacaggaaaaagcctaataatcttattttttaaatgggcagaaggtctgcatagacatgtatcaaaagaaaatatataaatggcaaacagatagatacaaatgagaaatatcatttctcaaaagaagatrtacaaatgccaagctgcttaacatcatttgattatcagggaaatgcaaaacaaaactacaatgaggtatcatctcaccccttttggataaaatccattttgaaaaacagcaaaatggcttttatccaaaagacaggcaataacaaatgctggtgaggatgtgcagaaaagggaaccctagtacactgtaggtgggaatgtaaatcagcacaaccactatagaaaacagtgtgaaggtttctcaaaaaccgaaaatagaactaccatatgatccagcaaccctactgctaagtatacacccaaaagaaaggaaatcaatatat

SEQ ID NO: 353750 - DNA, 540 bp, Homo sapiens
gacaacccacagaatggaagaaaatatttgcaaactacctgtctgacaaagggttaataagcagaatatataagagctcaaacagttacacaggaaaaagcctaataatcttattttttaaatgggcagaaggtctgcatagacatgtatcaaaagaaaatatataaatggcaaacagatagatacaaatgagaaatatcatttctcaaaagaagatgtacaaatgccaagctgcttaacatcatttgattatcagggaaatgcaaaacaaaactacaatgaggtatcatctcaccccttttggataaaatccattttgaaaaacagcaaaatggcttttatccaaaagacaggcaataacaaatgctggtgaggatgtgcrgaaaagggaaccctagtacactgtaggtgggaatgtaaatcagcacaaccactatagaaaacagtgtgaaggtttctcaaaaaccgaaaatagaactaccatatgatccagcaaccctactgctaagtatacacccaaaagaaaggaaatcaatatat

SEQ ID NO: 353751 - DNA, 557 bp, Homo sapiens
aacttgatcttccaagtggccctagctmttttacaataaacctttcccgctcacttactcggtacacctggagagaaaagggaagtcagtggggtcgatgtacgcgggggaagaagaagaaaaagaagtgagaagctgtccaccttttgattgttctattcccttcatttataacccccctggaaaggtacatccccagttttccaaggatttccacgtcgtttactcttcttttttccaaaatagtttcaagtttattcagaatccgtttttattgaggtttcctagtgaagcataaacgcagattacttaacataaaattatccccacctttcaaaagggcgaggtagggccatttggggctggcgttttctaatgataatgactgttcctccttctgtctctgctcccacttttaaaagattcggattatttgtccactgttcagcctgcatttcaaaatagacgatttaaaaaagagtgagaacacagtctgtaggcacagcacttgaggactgccggagttgaaaagctcagggaaagaaccgcaattcaaa

SEQ ID NO: 353752 - DNA, 632 bp, Homo sapiens
aggagtagcataggagatctttcttgggatggaatagttctgtttttgttttttttctatttctctggtggctatacagaaatacatatgtgataaaatgttacagaactgtacatcataccaatgtcagtttcctggttttaatgttgtactatagttatgtagggtgtaatcattgggggaaacaatgaaaattacaaagaaccattctgtatatttgaaccttcctgtgactatctatttcaaaataaatagtaaaaaaaaattaaaatacatatgtaaaaccaatggagaagccaaaaagggattgtaataaaaccagaggagataactactgccacaggcctaaacagacagtttatgtccctgggtaatatttaagaaaaatatcctctcattgttttgttgaacagtaatgcttatttccacatgtctaaccataagaggactcctgtgagataaaggcattctggagatgaatggtggtaatgattgcacaatcatgtgcatgtgcttcatggcacagagctgtacacttggcartgtttgaaatgatattttgtcttgaatatattttactacaaacacaaaatagtgctcctttgggttccacctctggcagctgggaattg

SEQ ID NO: 353753 - DNA, 419 bp, Homo sapiens
gctgagaatggtagaggaggccgtgtgctaaaaccagtccgccccctgctgctccctagggcagcaggagagcccctgccaacccagagaggggcycaggagaagatggggacccctgcggaacaagctcaaggggagcgaaacgtgcctccacccaagtccccactgcggctcatagccaatgccatccgaaggtctctagagcccctcctttccaactctgaaggcgggaagaaggcctgggccaagcaagaatccaaaactttgcccgcacaggcctgcactcgctcattcagccttcggaaaaccaattccaataaagacggggaccagcattcccctgggagaaaccagtcctcagcctttagccctcctgaccctgccctccgcacccacagtttgcccaatcggccatccaa

SEQ ID NO: 353754 - DNA, 419 bp, Homo sapiens
gctgagaatggtagaggaggccgtgtgctaaaaccagtccgccccctgctgctccctagggcagcaggagagcccctgccaacccagagaggggcccaggagaagatggggacccctgcggaacaagctcaaggggagcgaaacgtgcctccacccaagtccccactgcggctcatagccaatgccatccgaaggtctctagagcccctcctttccaactctgaaggygggaagaaggcctgggccaagcaagaatccaaaactttgcccgcacaggcctgcactcgctcattcagccttcggaaaaccaattccaataaagacggggaccagcattcccctgggagaaaccagtcctcagcctttagccctcctgaccctgccctccgcacccacagtttgcccaatcggccatccaa

SEQ ID NO: 353755 - DNA, 419 bp, Homo sapiens
gctgagaatggtagaggaggccgtgtgctaaaaccagtccgccccctgctgctccctagggcagcaggagagcccctgccaacccagagaggggcccaggagaagatggggacccctgcggaacaagctcaaggggagcgaaacgtgcctccacccaagtccccactgcggctcatagccaatgccatccgaaggtctctagagcccctcctttccaactctgaaggcgggaagaaggcctgggccaagcaagaatccaaaactttgcccrcacaggcctgcactcgctcattcagccttcggaaaaccaattccaataaagacggggaccagcattcccctgggagaaaccagtcctcagcctttagccctcctgaccctgccctccgcacccacagtttgcccaatcggccatccaa

SEQ ID NO: 353756 - DNA, 419 bp, Homo sapiens
gctgagaatggtagaggaggccgtgtgctaaaaccagtccgccccctgctgctccctagggcagcaggagagcccctgccaacccagagaggggcccaggagaagatggggacccctgcggaacaagctcaaggggagcgaaacgtgcctccacccaagtccccactgcggctcatagccaatgccatccgaaggtctctagagcccctcctttccaactctgaaggcgggaagaaggcctgggccaagcaagaatccaaaactttgcccgcacaggcctgcactcgctcattcrgccttcggaaaaccaattccaataaagacggggaccagcattcccctgggagaaaccagtcctcagcctttagccctcctgaccctgccctccgcacccacagtttgcccaatcggccatccaa

SEQ ID NO: 353757 - DNA, 530 bp, Homo sapiens
atggactaaactgtggttgatcttgtctttaaaaacaaacaaaaaaatctggtgctggtaaatatggggagagggcaggggatgatgaagaggacaagagatgaggatgcagrtgctttccgttggagggaggggatgcgtactgggttgtgtgttggggcacccgtagctagggttgttgtttcagacaaccaggaggtaaaagaatcctcctgtgatcgggtaggttaggatttacggggctgattgggctgtatgcctgggtttgaggtgagcaggtggcctgcagcacttccccctgcatccaaaatggtagaaaggctaggatttaatatgggcctgcgatggaagccccctctgagagggtagatggctccctgcagaagcgatctatggtcaatgggacatggctccctggttctgacagaactagccatttggagaaggctcccgtggctgaagactggtagcagagaggtcttaccccagaaaaggatgggggagcctaggtggaccctagcccagcgaca

SEQ ID NO: 353758 - DNA, 554 bp, Homo sapiens
tgaggtcccatctgtctaagttcaagggatcagacacccccagcaagcctgcatccatgtcctctgcaggccccaaagccacacacatggtctggagtgaccattccaaaggtgctgtaatgttgggcttcctaatcagaaagggagcaaggagctcctgggctttgtttgcaccagtctgccaggcactcctttccctgctcagccctatttagtgcctgtgctttygctggaagccagtgagttagccttaggccctgaggatgggcactgctaccaggaataggggagctgtggtgagcccgtcatctgctttgcagttccctggactccctgctttatgtttgaggctttctcttatcagtttagatgtgacctcccaagggcagtcttgggttttgatggaagtcatcatttcacccacacacaagttactgttatttggtgtggtgatggatatcaacccctgcccagaggccctgcagcctccattgctgctctctctggccacatctcccagaggctgggttcagaagctggggaggacctagagc

SEQ ID NO: 353759 - DNA, 554 bp, Homo sapiens
tgaggtcccatctgtctaagttcaagggatcagacacccccagcaagcctgcatccatgtcctctgcaggccccaaagccacacacatggtctggagtgaccattccaaaggtgctgtaatgttgggcttcctaatcagaaagggagcaaggagctcctgggctttgtttgcaccagtctgccaggcactcctttccctgctcagccctatttagtgcctgtgctttcgctggaagccagtgagttagccttaggccctgaggatgggcactgctaccaggaataggggagctgtggtgagcccgtcatctgctttgcagttccctggactccctgctttatgtttgaggctttctcttatcagtttagatgtgrcctcccaagggcagtcttgggttttgatggaagtcatcatttcacccacacacaagttactgttatttggtgtggtgatggatatcaacccctgcccagaggccctgcagcctccattgctgctctctctggccacatctcccagaggctgggttcagaagctggggaggacctagagc

SEQ ID NO: 353760 - DNA, 554 bp, Homo sapiens
tgaggtcccatctgtctaagttcaagggatcagacacccccagcaagcctgcatccatgtcctctgcaggccccaaagccacacacatggtctggagtgaccattccaaaggtgctgtaatgttgggcttcctaatcagaaagggagcaaggagctcctgggctttgtttgcaccagtctgccaggcactcctttccctgctcagccctatttagtgcctgtgctttcgctggaagccagtgagttagccttaggccctgaggatgggcactgctaccaggaataggggagctgtggtgagcccgtcatctgctttgcagttccctggactccctgctttatgtttgaggctttctcttatcagtttagatgtgasctcccaagggcagtcttgggttttgatggaagtcatcatttcacccacacacaagttactgttatttggtgtggtgatggatatcaacccctgcccagaggccctgcagcctccattgctgctctctctggccacatctcccagaggctgggttcagaagctggggaggacctagagc

SEQ ID NO: 353761 - DNA, 554 bp, Homo sapiens
tgaggtcccatctgtctaagttcaagggatcagacacccccagcaagcctgcatccatgtcctctgcaggccccaaagccacacacatggtctggagtgaccattccaaaggtgctgtaatgttgggcttcctaatcagaaagggagcaaggagctcctgggctttgtttgcaccagtctgccaggcactcctttccctgctcagccctatttagtgcctgtgctttcgctggaagccagtgagttagccttaggccctgaggatgggcactgctaccaggaataggggagctgtggtgagcccgtcatctgctttgcagttccctggactccctgctttatgtttgaggctttctcttatcagtttagatgtgacctcccaagggcagtcttgggttttgatggaagtcatcatttcacccacacacaagttactgtyatttggtgtggtgatggatatcaacccctgcccagaggccctgcagcctccattgctgctctctctggccacatctcccagaggctgggttcagaagctggggaggacctagagc

SEQ ID NO: 353762 - DNA, 594 bp, Homo sapiens
acactcagtaaatactaatagcatgatttttatagcrttcgtatattattatattttaaattagcatgattatcacattttactaaaatctattatgatttttgtgtgtaggagtatatattatacatacacacacagacattctgtatctacaaaataaatgttcaaattgggctatttttactcgtttgccttctctgagcatacacatcaactttctgtatactaggatgaggattagagcatgctagacatttctttttaatgctggaataaataaatatgaaatttaaaaattgtcgtagctagcttggtgcctacaggctatttttctggaattctccttaggacctaaaatcctaaagatcttcatccttggaagaaaattttactctcagaactcaacttattccatatcatgtcatctctgtttccatgagatgactaccagattgactgtcaatcactctgaatggggattccagaccttttggacgggggattcttcatggggcagctaggatctttctggaaaggctctagggaagaggtggtggggatcaatggtaactgtcatccagagattgtctaact

SEQ ID NO: 353763 - DNA, 596 bp, Homo sapiens
ttacaagttagagtatattaattttggtggctggtctgcaaaacttccatttggttgcttttgaggccactctcccgtcttgactcttttagtctscagccccttgttgatctgcatctgtcacccacacaaggacaatcatgggaaaaaggcccataaacttaacaggggaattaaattaccaaggatataaagggaatgaatggaatccatcttctgtctggcttggcacacctccgaaacatcacaagctggccagatttcttttgctataactcaaactagctctctcttttctttttttttttttttttttttcatatttggggatgaggaagattttcagaagatgctttacaattttggtttctatcatttaaatttcaagcagtaaaaattagacaaattctttaaaagaagatgtgtgtggatacttagtaatattttgtaaaatgatatgagtagtgtttactaaatgcctacaacctaggcaatactccggtagagactttgcctatcaacacttctaattctcaaaatgacctgataatatggggattattatcttcacttttcagataaaaaatctaggacca

SEQ ID NO: 353764 - DNA, 545 bp, Homo sapiens
aataccacttggtcatgatgtgttattactttgtcttattactttacatgatgtcttattactttttgattatgtttgataatttatttaacatttttgcatttaattcataggtaatattggcctacagttcattgatatcacttttatatgatttctgtatgtgctaattacaataacttagggtaaatatattttcctggcttgcttagcatggagagctacattcatttatattcatcagaaaatagtatgacttccttgccttggaacagaatgggaatgtacagaatggaattaggttagagttagcrctggaagtagtgcctgcacctatttcttagaagagttttgtgtttctttcaagtgttcttaggtcagtatcctaagaatgtaaagattttacctagcctatcagattagacccatcagtcttttttttttagtttccttgctcagtccaccaaacacacactcacatatatgcactgacactgttgcctccgcatttaacttgggggtgcacacttccatgcaatggagag

SEQ ID NO: 353765 - DNA, 555 bp, Homo sapiens
ttactttataaaaattgaatcattcattattgtggtaggcagaattctaaaaggaccccatgcttcctgctccctagcgtgcttgctgtgtagaatctagtcctctagactgggcatggtggctcacaaatgtaatcccagcactttgggaagcagaggcgggtggattacctgaggtcaggaattcaaaaccagcctggccaacatggcaaaaccacgtctctactaaaaatacaaaaattatctgggcatggtgrcaggtgctgtaatcccagctacttgggtggttgaggcaggagaattgattgaacccaggaggcacagtttgcagtgagctgagatcacatcattgccctccagcctgggcgacaagagcaaaactccatctcaaaaaaaaagaatctagtcctctggaatacggtgggaacataaatatgatggatttcatttcatcccatgattaagttaggggattgtgcaaatatagttaagccccaaaacaattcactttgagttaatcaaaagagagattgtcctgggtgggcctaactcaat

SEQ ID NO: 353766 - DNA, 555 bp, Homo sapiens
ttactttataaaaattgaatcattcattattgtggtaggcagaattctaaaaggaccccatgcttcctgctccctagcgtgcttgctgtgtagaatctagtcctctagactgggcatggtggctcacaaatgtaatcccagcactttgggaagcagaggcgggtggattacctgaggtcaggaattcaaaaccagcctggccaacatggcaaaaccacgtctctactaaaaatacaaaaattatctgggcatggtggcaggtgctgtaatcccagctactygggtggttgaggcaggagaattgattgaacccaggaggcacagtttgcagtgagctgagatcacatcattgccctccagcctgggcgacaagagcaaaactccatctcaaaaaaaaagaatctagtcctctggaatacggtgggaacataaatatgatggatttcatttcatcccatgattaagttaggggattgtgcaaatatagttaagccccaaaacaattcactttgagttaatcaaaagagagattgtcctgggtgggcctaactcaat

SEQ ID NO: 353767 - DNA, 555 bp, Homo sapiens
ttactttataaaaattgaatcattcattattgtggtaggcagaattctaaaaggaccccatgcttcctgctccctagcgtgcttgctgtgtagaatctagtcctctagactgggcatggtggctcacaaatgtaatcccagcactttgggaagcagaggcgggtggattacctgaggtcaggaattcaaaaccagcctggccaacatggcaaaaccacgtctctactaaaaatacaaaaattatctgggcatggtggcaggtgctgtaatcccagctacttgggtggttgaggcaggagaattgattgaacccaggaggcacagtttgcagtgagctgagatcacaycattgccctccagcctgggcgacaagagcaaaactccatctcaaaaaaaaagaatctagtcctctggaatacggtgggaacataaatatgatggatttcatttcatcccatgattaagttaggggattgtgcaaatatagttaagccccaaaacaattcactttgagttaatcaaaagagagattgtcctgggtgggcctaactcaat

SEQ ID NO: 353768 - DNA, 554 bp, Homo sapiens
ctttaaccattaaaaatgtatcatctgaacagagacatactatatgtgtaaaatatgcatcagattctgaagacttagtatgaatgaaataatgtaaaacatctcattartaattcttggctcagtgcagtggctcatgccaaatgatgttgcataacttttcacatgcttatttagatattcttctgtcagaagtctctgttgaagtcttttgcccatacttttattgtattattagcccttttgtcattgatttgtaatctgtatagattctggatataagtcctttgttagatataagaactttgagaggctgaggaagaggattgcttgagtccaggagttcaagaccagcctgggcaacataaggagaccctgtctctatagaaactaaaaaaattggccagagatgttgacacatgctcatagtcccacctactcagcaggtgtgaggatcacttaagaccaggaggtcgaggttcagtgagccacgattgcaccactgcactccagcctgggcaagagaccaatactggtcacaaacaaataaacaa

SEQ ID NO: 353769 - DNA, 628 bp, Homo sapiens
tttttattgctagtagaatttcattgtatggatgcaccaacatttgtttatccatttaccagttgatagacatgagatggggtttagtttttgaatgcgaataaagcttctatgaacattaatgtacaggtctctgtgtagagacatgtttccatttgccttagccaagttcctagctatggggttgtttggtcatttggcaagtgcatgttgagttttatttttaaacttgtcaaattattttccaaagtgacatgccatacaaccatgcacaagagtttcggttactgtacatccatgctaacacttgacattgtcagactcaaattctagccatcctaatgcctatggtagtatctcattgcaattttaatttgcatwtccctagtgactaatgatgttgagcttcttttaatgtatgaattttttatttgtatattttttggtaaagtagctttcaaatcttttgcccatttttaaattgtgttgtttcttagttttgagttttaagagttctgcatataaataaatcctttatcagatatatgtttgcaacattctttcctagtcagtggattgttgtttcattttcattacagtatctttcaaagagcagaactttttaata

SEQ ID NO: 353770 - DNA, 628 bp, Homo sapiens
tttttattgctagtagaatttcattgtatggatgcaccaacatttgtttatccatttaccagttgatagacatgagatggggtttagtttttgaatgcgaataaagcttctatgaacattaatgtacaggtctctgtgtagagacatgtttccatttgccttagccaagttcctagctatggggttgtttggtcatttggcaagtgcatgttgagttttatttttaaacttgtcaaattattttccaaagtgacatgccatacaaccatgcacaagagtttcggttactgtacatccatgctaacacttgacattgtcagactcaaattctagccatcctaatgcctatggtagtatctcattgcaattttaatttgcatttccctagtgactaatgatgttgagcttcttttaatgtatgaattttttatttgtatattttttggyaaagtagctttcaaatcttttgcccatttttaaattgtgttgtttcttagttttgagttttaagagttctgcatataaataaatcctttatcagatatatgtttgcaacattctttcctagtcagtggattgttgtttcattttcattacagtatctttcaaagagcagaactttttaata

SEQ ID NO: 353771 - DNA, 609 bp, Homo sapiens
gacatggaaggtaatgccaggaattgggaagaaggggggtcatctctagtgatgatttgttgtattataacttttttttttttttctttgagacagagtctcgctctttcaccctggctggagtgcagtggtgtgatctcggctcactgcagcctccacctcctgggttcaagtgattcttctgcctcagcctcccaagaagctgggactacaggtgcacaccacacccagctaatttttgtatttttaatagagacagggtttcaccgtgttgaccaggctggtctcgaactcctgacttcaagtgatccacccacctcsgcctcccaaagtgctggaattacaggcctgagccaccatgctcagccttattacaactttttaagttgatgcatatactgagattcagggcaactaagtaatttgtccactctacctgactacaaagccctttttatatagctactgtgtctgcattgaggccaggtatgaatgataaattgtaaaaacgtaaaaattattttaaaagtgtaaaaaatttatcaagcacattctgtgcaccagggactatgctgggttctgtgaaaataaagatggataaggtcatag

SEQ ID NO: 353772 - DNA, 609 bp, Homo sapiens
gacatggaaggtaatgccaggaattgggaagaaggggggtcatctctagtgatgatttgttgtattataacttttttttttttttctttgagacagagtctcgctctttcaccctggctggagtgcagtggtgtgatctcggctcactgcagcctccacctcctgggttcaagtgattcttctgcctcagcctcccaagaagctgggactacaggtgcacaccacacccagctaatttttgtatttttaatagagacagggtttcaccgtgttgaccaggctggtctcgaactcctgacttcaagtgatccacccacctcggcctcccaaagtgctggaattacaggcctgagccaccatgctcagccttattacaactttttaagttgatgcatatactgagattcagggcaactaagtaatttgtccactctacctgactacaaagccctttttatatagctactgtgtctgcattgaggccaggtatgaatgataaattgtaaaaacgtaaaaattattttaaaagtgkaaaaaatttatcaagcacattctgtgcaccagggactatgctgggttctgtgaaaataaagatggataaggtcatag

SEQ ID NO: 353773 - DNA, 578 bp, Homo sapiens
cctcctctctgcccagtctgcatgacatggaagtggattttgcagcagcagtgagctcattatgcttctcccagaaagttctcttaaaggaagatctgaccggtccatctccattggctaccacagtgggccacaagaagttcagggttgataacaagaagcagggaccttggcccatgtagtagcagatgtagtaaaaataacgccagtaaccgggtataacaaagygaccccagcacctataggggtgatgtgtgatacacatgcagatggcaggtggaggctggaagaggaggccccaccaggtcaaacccaggaacctagtctcggccctcaccctcttcaagtctctgttgcagtgaacacctttgacctttctcttttctctcaaaacatcccttgcttgtctctgtgctggtgcacttcttgttttgttcttccaacctttggatggcttcttccctggctaccttttttgtttggcttctaaatgtaggtatttccaggcttctgtcttcaaactgtttctttatctatagccttcctttagggatcacacaacttcagctctcacctct

SEQ ID NO: 353774 - DNA, 544 bp, Homo sapiens
ctcagacccttcttctctgcccaaccatgaagtactgtcttatgtttatacatagggatgcyctttaagctggcttctttccagaattctgaacaagggcagggcaagagtcctttgcccatccaccaatgagatatgacattacctgtcccctttggggcttctaaggcccagaatggagagaccgagcatggggctctaaccctctgcccctcctgcctctcttctttcttcttaaaacttgaggtgcagtgggatggtgtttctttgtctccctttcatcagacctacctgcttcctggcccagacctcagagctaagcctgatgaaggaagtggcaccctctctactctgggaggaggctccccacccagtcctccgtgtgttagacacaggggctctaggaatttagaaagtcttctcccaaggcaattgtctgcttgacaagacttaaatctggcttcagaatcctgttttctgtgtccaaagctcattactacttgtttcctactctgtcctttcattttctaacaatcctatctcc

SEQ ID NO: 353775 - DNA, 578 bp, Homo sapiens
actctctctggtggcatctgcaactgaggtgtgtgctggtctcatccgtagcctgcccactctctcggggtgcctgagagcctgcgggcattcctggctcacccagcctcacctcagcacatccttcattcagcatggctagacagtctctcctgtggggtcactctgccccatgggggaaccctgtggcaggtccactagccagctgtctctggtaacagtggggcaagtggacccttctaggctccgcccatgccgcatacagcacaccaagatctggggggccacactcagacccttcttctctgcccaaccatgaagtactgtcttatgtttatacatagggatgccctttaagctggcttctttccagaattctgaacaagggcagggcaagagtcctttgcccatccaccaatgaratatgacattacctgtcccctttggggcttctaaggcccagaatggagagaccgagcatggggctctaaccctctgcccctcctgcctctcttctttcttcttaaaacttgaggtgcagtgggatggtgtttctttgtctccctttcatcagacct

SEQ ID NO: 353776 - DNA, 544 bp, Homo sapiens
ctcagacccttcttctctgcccaaccatgaagtactgtcttatgtttatacatagggatgccctttaagctggcttctttccagaattctgaacaagggcagggcaagagtcctttgcccatccaccaatgagatatgacattacctgtcccctttggggcttctaaggcccagaatggagagaccgagcatggggctctaaccctctgcccctcctgcctctcttctttcttcttaaaacttgaggtgcagtgggatggtgtttctttgtctccctttcatcagacctacctgcttcctggcccagacctcagagctaagcctgatgaaggaagtggcaccctctctactctgggaggaggctccccacccagtcctccgtgtgttagacacaggggctctaggaatttagaaagtcttctcccaaggcaattgtctgcttgacaagacttaaatctggcttcagaatcctgttttctgtgtccaaagctcattactacttgtytcctactctgtcctttcattttctaacaatcctatctcc

SEQ ID NO: 353777 - DNA, 596 bp, Homo sapiens
ccagggcctgaattctattattaggcaatatgaggaggcacctacctacctgcctacctatgaaaactgtaccacttctggatatttatctatttttatttatttgtgtattggtgagaattgataatatcatttcctcataattcaggttttcaggtgttataatttggagaagacctattagcactaagaaattggtacataagctatttaatatacaaataacccagatgtttggggcagtgagttgtatagtattaaagatttcagctatcaggcatttagaggtaagattatggatgcacaagaatatcaactcattataagaaaaagatttataacttcagttttcattctagaatatgcagcaatattcagkccccagtcttttctgtcagttgcataaaagtgcatcctttgatgcctgcatacacttaacagatgatgttcaagcgtgtcatgtttgagttgttattgtgcaaaagaattaattgccacttattttaatttgttatatttccatcctaaaggatgaatctcccaagagggccaagagagaaggtggtttggcccctagtattctgttaatagatgag

SEQ ID NO: 353778 - DNA, 596 bp, Homo sapiens
ccagggcctgaattctattattaggcaatatgaggaggcacctacctacctgcctacctatgaaaactgtaccacttctggatatttatctatttttatttatttgtgtattggtgagaattgataatatcatttcctcataattcaggttttcaggtgttataatttggagaagacctattagcactaagaaattggtacataagctatttaatatacaaataacccagatgtttggggcagtgagttgtatagtattaaagatttcagctatcaggcatttagaggtaagattatggatgcacaagaatatcaactcattataagaaaaagatttataacttcagttttcattctagaatatgcagcaatattcaggccccartcttttctgtcagttgcataaaagtgcatcctttgatgcctgcatacacttaacagatgatgttcaagcgtgtcatgtttgagttgttattgtgcaaaagaattaattgccacttattttaatttgttatatttccatcctaaaggatgaatctcccaagagggccaagagagaaggtggtttggcccctagtattctgttaatagatgag

SEQ ID NO: 353779 - DNA, 408 bp, Homo sapiens
gtagatatatacaaatatcaaatctatttggctgcagagtaataatccatttccagaaacaatacattcagcttcagcaactctgtggtaataagtttcacttcatcatattggatttatgctatttttcwtggttttagaaaatctatgaaggattaaaacagttattttattctgaaaattatactttttattatacccaaattattgatgtgttcattatcaaacagtacaaacagtacactaaaacatctctatgatatacatatagaggcttattttgctgtataaaattgtcaatgattaaaaaaagacaatgacatctttattacttatttactcaggtaaaatgtgagtttttcaaatctgacaacattaaaaatataattttaaaatttttatctgcaa

SEQ ID NO: 353780 - DNA, 408 bp, Homo sapiens
gtagatatatacaaatatcaaatctatttggctgcagagtaataatccatttccagaaacaatacattcagcttcagcaactctgtggtaataagtttcacttcatcatattggatttatgctatttttcttggttttrgaaaatctatgaaggattaaaacagttattttattctgaaaattatactttttattatacccaaattattgatgtgttcattatcaaacagtacaaacagtacactaaaacatctctatgatatacatatagaggcttattttgctgtataaaattgtcaatgattaaaaaaagacaatgacatctttattacttatttactcaggtaaaatgtgagtttttcaaatctgacaacattaaaaatataattttaaaatttttatctgcaa

SEQ ID NO: 353781 - DNA, 408 bp, Homo sapiens
gtagatatatacaaatatcaaatctatttggctgcagagtaataatccatttccagaaacaatacattcagcttcagcaactctgtggtaataagtttcacttcatcatattggatttatgctatttttcttggttttagaaaatctatgaaggattaaaacagttattttattctgaaaattatactttttattatacccaaattattgatgtgttcattatcaaacagtacaaacagtacactaaaacatctctatgatatacatatagaggcttattttgctrtataaaattgtcaatgattaaaaaaagacaatgacatctttattacttatttactcaggtaaaatgtgagtttttcaaatctgacaacattaaaaatataattttaaaatttttatctgcaa

SEQ ID NO: 353782 - DNA, 616 bp, Homo sapiens
ctggatgaattaatcaataacaattaattgaatatttcttttatggacaggcatgttatattgttggttgctgctaaactattgcctctctttccttcactccattaacacttttatataactggagttttgaaattatgtatagaattctayactttattgtctcaaatcacttggttggataaagccttttattctaggatgaagctattatatatctaaatttataataactatggttggaatgtttcttaaattttctttcaatgtcactaaaaaaaaattaaaacatgatttttatctggaaataaatttaaagtagtttgacagtcttgttagggggttcgattgtgactggccagaggccaagcagttgtcaaatggatattggcagtagataaaaaagttaaatctcttgcaatttcttttcttgtctctgaacataaatattattcttcttttctcagcttaaatgcacagattttaagaacaaagtactgttttgtagggaggaaataatgagtcatcaaatcattacaacaattctttatgaacaaatacaactatcttgcaacttaaatttcagtcttattattcatggattaattaactaatt

SEQ ID NO: 353783 - DNA, 521 bp, Homo sapiens
ttgacagtcttgttagggggttcgattgtgactggccagaggccaagcagttgtcaaatggatattggcagtagataaaaaagttaaatctcttgcaatttcttttcttgtctctgaacataaatattattcttcttttctcagcttaaatgcacagattttaagaacaaagtactgttttgtagggaggaaataatgagtcatcaaatcattacaacaattctttatgaacaaatacaactatcttgcaacttaaatttcagtcttattattcatggattaattaactaattttttctgtgccaactaaaaaacgtttttttttttttttaaaaaaggcaggagttttcttaaactatactgttttatttttctgatgttagatgtctgtacatgttattgtgagcttaaaaaatatttgactttcaagactaagtattagaaaaaggacrtataacatgacattactttcctatttcagtgtgagttccctggcaattcaaagtggaaacccacagggt

SEQ ID NO: 353784 - DNA, 486 bp, Homo sapiens
caaggagaaaggacttacaaaaaaatgaaaaagaatggttaggagttcaagaacaatagaagctaagagaacagagtttttcaggtaggagtgagtggcaaacagtgttcagtatagtaagaggagaataggraaaaaaatgaattgattcaattcaattttaaatgtgtgcttcagtgatttttagaaaaagttttagtggagtgttgataactaaaaccatatgtcagtaaatttgggagtgattattaatcatgaaaatagaattggcatgtttcatctactttgggcccagaaaagagggctcttactccaggccagaagaggattatttgttaataatgtatttatttttctttacgaaggaagagactttagcatgcttatagtacaagggcacagatccagtggggagagagagagaaaggaggtaatttatgagatagagcagatccacagcattggccttgagcagagggagagccc

SEQ ID NO: 353785 - DNA, 486 bp, Homo sapiens
caaggagaaaggacttacaaaaaaatgaaaaagaatggttaggagttcaagaacaatagaagctaagagaacagagtttttcaggtaggagtgagtggcaaacagtgttcagtatagtaagaggagaatagggaaaaaaatgaattgattcaattcaattttaaatgtgtgcttcagtgatttttagaaaaagttttagtggagtrttgataactaaaaccatatgtcagtaaatttgggagtgattattaatcatgaaaatagaattggcatgtttcatctactttgggcccagaaaagagggctcttactccaggccagaagaggattatttgttaataatgtatttatttttctttacgaaggaagagactttagcatgcttatagtacaagggcacagatccagtggggagagagagagaaaggaggtaatttatgagatagagcagatccacagcattggccttgagcagagggagagccc

SEQ ID NO: 353786 - DNA, 570 bp, Homo sapiens
tatattttgtgggaggagtaaggataaaaatagtattttactgaggtttttgtttggttcatgacttaaataagctgcacagaatcttagggaaggcatgrgaaggcctcaaacaaatatttgctgtccatcagtcatctgcagcaacaggatgattgtagacttaaagtcctacaacccaaaaagctattttatgagacaggacctgatggcttctatgctggtcaattattttggtgctattagccaatttcttgttttgatgtgctcttctctctattttagtggctagaaatccacagattctatttcccagactcccttaaaaattagtttctgtttcagttctgccaatgaaaggcactgttgggagattgaagaaaagagagacagaagagtgactttcttcatcttcccagtttccagtgtcatcttcagcagcaggggagcaggattagcattaatgacaggagacacaatgccagaggcctgggagggcaggtcctagtgctaacagcaggaacttgtaacagcagtgacctcaagagctgggaaagatctgcttctctt

SEQ ID NO: 353787 - DNA, 570 bp, Homo sapiens
tatattttgtgggaggagtaaggataaaaatagtattttactgaggtttttgtttggttcatgacttaaataagctgcacagaatcttagggaaggcatgagaaggcctcaaacaaatatttgctgtccatcagtcatctgcagcaacakgatgattgtagacttaaagtcctacaacccaaaaagctattttatgagacaggacctgatggcttctatgctggtcaattattttggtgctattagccaatttcttgttttgatgtgctcttctctctattttagtggctagaaatccacagattctatttcccagactcccttaaaaattagtttctgtttcagttctgccaatgaaaggcactgttgggagattgaagaaaagagagacagaagagtgactttcttcatcttcccagtttccagtgtcatcttcagcagcaggggagcaggattagcattaatgacaggagacacaatgccagaggcctgggagggcaggtcctagtgctaacagcaggaacttgtaacagcagtgacctcaagagctgggaaagatctgcttctctt

SEQ ID NO: 353788 - DNA, 570 bp, Homo sapiens
tatattttgtgggaggagtaaggataaaaatagtattttactgaggtttttgtttggttcatgacttaaataagctgcacagaatcttagggaaggcatgagaaggcctcaaacaaatatttgctgtccatcagtcatctgcagcaacaggatgattgtagacttaaagtcctacaacccaaaaagctattttatgagacaggacctgatggcttctatgctggtcaattattttggtgctattagccaatttcttgttttgatgtgctcttctctctattttagtggctagaaatcyacagattctatttcccagactcccttaaaaattagtttctgtttcagttctgccaatgaaaggcactgttgggagattgaagaaaagagagacagaagagtgactttcttcatcttcccagtttccagtgtcatcttcagcagcaggggagcaggattagcattaatgacaggagacacaatgccagaggcctgggagggcaggtcctagtgctaacagcaggaacttgtaacagcagtgacctcaagagctgggaaagatctgcttctctt

SEQ ID NO: 353789 - DNA, 498 bp, Homo sapiens
taagcactgatcatattaggactggctgaataagatagacaaaatccctgttctcaaaaaaaaaaataaaaagcaagttaagaaactttaaatgaccaattagatcctcacttatttaactaagttactattaatgacaagaaggaggatggcamaatattacaggattacaaaatagtatattggcagagattagagatttaacaggtaaggattgcctttaaaaaggtcattcaataaacatcaaaggaaatgtaggcatttgtaagtgctacataaaaaaagagccttaaatataagacatgtaatacttaaagttgctcacagaaatcgtgtgtgattggggctcagagagaaagggaatggctcacagtgagcattaaggcaggctggagatagatgatggaagtccttttgggccatgttggatattctttatttctttttaaaagtttgtttttcctagtagggaaaggtttactgccaattctgtagtgc

SEQ ID NO: 353790 - DNA, 614 bp, Homo sapiens
cctgttttgacctgtgaaattctgaagtctgtctattgccagtggatcacaatgccttagcttaaagcaggtacagaaaaaagttaaaatcacaatgtggttcagttattttgtaggagggttaaaagcttaaatgtgctccatccagtgtcaactgcacatacatcttggaaattaagtgttctgccaaaagagttggcactcacattcacaaaagagacacaatttttgctttgcttcaccacacttactttaaaaatgtacactagaagaggttcagcaattccactcagtaaggagctacacgtgctttaataaatcaaatgcttggtgrgcatcttagcttgaatatgttaaccttgagaaattacaagtcatgaaggccttgaaaaagtatctaaaagtaaaagacaagaaacaaatataattttctcttttatttcaagctcagaattccatatctatcaaatattaaaacagcattactttaaaatgcccaaatgaaaaaacagactatcttgttcctacttcattgccattctgctatataacatgaccacatgttcacaacatgtcaagttcattttaatatcattcctcacatctttttctcc

SEQ ID NO: 353791 - DNA, 614 bp, Homo sapiens
cctgttttgacctgtgaaattctgaagtctgtctattgccagtggatcacaatgccttagcttaaagcaggtacagaaaaaagttaaaatcacaatgtggttcagttattttgtaggagggttaaaagcttaaatgtgctccatccagtgtcaactgcacatacatcttggaaattaagtgttctgccaaaagagttggcactcacattcacaaaagagacacaatttttgctttgcttcaccacacttactttaaaaatgtacactagaagaggttcagcaattccactcagtaaggagctacacgtgctttaataaatcaaatgcttggtgagcatctyagcttgaatatgttaaccttgagaaattacaagtcatgaaggccttgaaaaagtatctaaaagtaaaagacaagaaacaaatataattttctcttttatttcaagctcagaattccatatctatcaaatattaaaacagcattactttaaaatgcccaaatgaaaaaacagactatcttgttcctacttcattgccattctgctatataacatgaccacatgttcacaacatgtcaagttcattttaatatcattcctcacatctttttctcc

SEQ ID NO: 353792 - DNA, 596 bp, Homo sapiens
aaaacaccttcaaagagaataagatagtttctctatatatttattcacaatttttactttgcatcctcatttttgttttgggcaagcactgttctatgccatgaaattatagcattgaacaaaactaatctaatgagaggagttattttaaataaacccatcatgaaattccttcctagggcgttgacatttgaacagtgactgagaagaygggaaggagcaaatcacatgaagatataacaaagggcatttcccattggtcagagcagccactgtcaagattggggtagggttgacttcgtttcattgagaagcatcaacagtactcatgtggttagagtggagtgaatgagtgagtgaaaaagcatcgagaaccattaagtgtaaggcttttacaatgaaaactgaagactttttatgttattcacaatgtgaggagaagccttcctagggttttggcttgatagtgagtgacagtgattaaatcttgcagaatactatcatcatatatttttcctttttaaatacatctttaacagctttgtggagaatatactatgggagttataaataaactagagagaacaattagaaaa

SEQ ID NO: 353793 - DNA, 596 bp, Homo sapiens
aaaacaccttcaaagagaataagatagtttctctatatatttattcacaatttttactttgcatcctcatttttgttttgggcaagcactgttctatgccatgaaattatagcattgaacaaaactaatctaatgagaggagttattttaaataaacccatcatgaaattccttcctagggcgttgacatttgaacagtgactgagaagatgggaaggagcaaatcacatgaagatataacaaagggcatttcccattggtcagagcagccactgtcaagattggggtagggttgacttcgtttcattgagaagcatcaacagtactcatgtggttagagtggagtgaatgagtgagtgaaaaagcatcgagaaccattaagtgtaaggcttttacaatgaaaactgaagactttttatgttattcacaatgtgaggagaagccttcctagggttttggcttgatagtgagtgacagtgattaaatcttgcagaatactatcatcayatatttttcctttttaaatacatctttaacagctttgtggagaatatactatgggagttataaataaactagagagaacaattagaaaa

SEQ ID NO: 353794 - DNA, 553 bp, Homo sapiens
aatttacatactataatgttcttgggttttaataagtcctaataaataaaactaaggatgagaatggttatcccacaagaataaaaataaactatcatttcatttgcttatgatttgggaagttgttctgttttgcttcaaatgacttgttagggtttctgcaactcgaatttaaaaggtacaggggttattcagcaaaaagttcagaaagtttattygatcggtaaattttgtttattatgtatcaaagggagtgaatctatgttaaactgttcatttaaaaagatatgagaagaaaaaggagaaagaggagagaggaagaagacgaagtgaagctagtgactctctttccaaatcctgctataatataaaattatattaaaagtattatagtattacaccactacctacatcaataaaatgccagtttgacacattatgagaaaaaatcagctacactttaataaatccaactctctagaaataaaagaaagtgaaaagtatatagtgtgcctcatccacaagaaatcatcagagaccacagagccatgat

SEQ ID NO: 353795 - DNA, 553 bp, Homo sapiens
aatttacatactataatgttcttgggttttaataagtcctaataaataaaactaaggatgagaatggttatcccacaagaataaaaataaactatcatttcatttgcttatgatttgggaagttgttctgttttgcttcaaatgacttgttagggtttctgcaactcgaatttaaaaggtacaggggttattcagcaaaaagttcagaaagtttattcgatcggtaaattttgtttattatgtatcaaagggagtgaatctatgttaaaytgttcatttaaaaagatatgagaagaaaaaggagaaagaggagagaggaagaagacgaagtgaagctagtgactctctttccaaatcctgctataatataaaattatattaaaagtattatagtattacaccactacctacatcaataaaatgccagtttgacacattatgagaaaaaatcagctacactttaataaatccaactctctagaaataaaagaaagtgaaaagtatatagtgtgcctcatccacaagaaatcatcagagaccacagagccatgat

SEQ ID NO: 353796 - DNA, 589 bp, Homo sapiens
gctttctcctactgaaggaacaggattgctctcaccacttggttccaaagacagaaagcttgtgtcaaagcgacctgtcacagctttcacgatttggaacaggtgaagaggaagctattactgagacaaaactttggatgattatcctacaatagagcagctttcttcaaatacactcctatatataaaataattgttcaattatggaaaacatccatggatatagtaaatacggtgatttkgggaataacgaaaaatatcatatgacaccaaaactaaccatgtcttgctatcatatactcctttctatctaataaaatggggacatgttatagcagctttttcctttagactccttttgtcatatcctctttacccattgtctgtgctctctcagatgctaattagacattaagtaatagtcatttccaccctcaacaattatttattgaatggaatatagaagagatgagaacaaacacataatatttaatatgtacctgataccgtgcaagacatttaaaattattttacagaaaccctgcacaataggtatcattaaatgggggaaattgagaatgtaaaaggt

SEQ ID NO: 353797 - DNA, 622 bp, Homo sapiens
acagtatcatgattagagaaattgaaaatgacattatatatgaatgataatttatgagaactatttaagtatcaaagaaagtcatagctattatatatcaatactaacaatatttctattattgatactgctcttacatcttcccacacagtaagaggaaaaaaaaaaagaaaagaaataggaaaaaaaaaagacattaaaaagtaaacaaaaacaaacaatcaaaaaactatccggcagctctctttaacccaattttacaatgagtattctgaggttcaagtaggttaagtgtatggcccaaaatctcagctaatatgtggtgattgtacagaagtatccccacatatttcactgactatataataatttgaatccacatttccamcttctataaattaaggtctttcttcataaaactctagcattttctcaaattattttcaaatattctatacatttttaaaaaagtcatacctggctgtccttggaggaccctgattcccacacaggccacgttgaaggttttgttgttgttgttttttaaatcccttaatgcaatactccatgtcttataaggcaaattagtgtcctcatttctccaaatgacttattacactaa

SEQ ID NO: 353798 - DNA, 528 bp, Homo sapiens
tacctggctgtccttggaggaccctgattcccacacaggccacgttgaaggttttgttgttgttgttttttaaatcccttaatgcaatactccatgtcttataaggcaaattagtgtcctcatttctccaaatgacttattacactaattgttccttttcctttaaaaaaaacaagtgtgtacagtgactcacaaccataatcccagctatttgggagastgaggctggagaattgcttgacactaggagttgagaaaagcctggacaacacagcaagatcctataaataaatttttttaattagctgaagccaggaggattgcttgaacctgagagttgaaggctgcagtactgcagtgagctatgatcatgccattacactccagcctgggcaacagagtaagcccccatctctaaaaaaaaaaaaaaaaaaaatagcctttttttccagcaagctgtaacagatgttggatgaaccacctagattccagggagaaatcattttccaagttgccaggactagtgat

SEQ ID NO: 353799 - DNA, 528 bp, Homo sapiens
tacctggctgtccttggaggaccctgattcccacacaggccacgttgaaggttttgttgttgttgttttttaaatcccttaatgcaatactccatgtcttataaggcaaattagtgtcctcatttctccaaatgacttattacactaattgttccttttcctttaaaaaaaacaagtgtgtacagtgactcacaaccataatcccagctatttgggagagtgaggctggagaattgcttgacactaggagttgagaaaagcctggacaacacagcaagatcctataaataaatttttttaattagctgaagccaggaggattgcttgaacctgagagttgaaggctgcagtactgcagtgagctatgatcatgccattacactccagcctgggcaacagagtaagcccccatctctaaaaaaaaaaaaaaaaaaaatagcctttttttccagcaagctgtaacrgatgttggatgaaccacctagattccagggagaaatcattttccaagttgccaggactagtgat

SEQ ID NO: 353800 - DNA, 534 bp, Homo sapiens
tttgaattttttattttcaactttttaattttttcaatctaaagtatgtttattgtagacagtaatggatcatgtgttttgttcattctgccaatgttgttttaattgtagtgtttaatacatttaaatttaatatagttactgataagtttagattcacatctrttattttgctatttgctttcaacatttgatatatctctatctatttctccattacttctttattttgtgttcagtagatgttttatattatgccatttaaattactttatttttttttactatatatttttatttactgtcttcatggttgcctggggattaagttagcatcttaaagtaaactactagtactaatgtattttcaatagtatacagaaactctgatcccatctctttcctttctgctattattgccatataaattgcatctttatacattaggagaccatcaacatacttttataactattacttgtattatacttgcattttaaattaggagaagaaaataattacaaacaaaaatgt

SEQ ID NO: 353801 - DNA, 534 bp, Homo sapiens
tttgaattttttattttcaactttttaattttttcaatctaaagtatgtttattgtagacagtaatggatcatgtgttttgttcattctgccaatgttgttttaattgtagtgtttaatacatttaaatttaatatagttactgataagtttagattcacatctattattttgctatttgctttcaacatttgatatatctctatctatttctccattacttctttattttgtgttcagtagatgttttatattatgccatttaaattactttatttttttttactatatatttttatttactgtcttcatggttgcctggggattaagttagcatcttaaagtaaactactagtactaatgtattttcaatagtatacagaaactctgatcccatctcyttcctttctgctattattgccatataaattgcatctttatacattaggagaccatcaacatacttttataactattacttgtattatacttgcattttaaattaggagaagaaaataattacaaacaaaaatgt

SEQ ID NO: 353802 - DNA, 569 bp, Homo sapiens
gatgactaccctgaaggagtctaggactagaagttcctagtttgggcatgagatgaagctagaataggagaaagtggacatgtaagcactcaaagtccattctattaccacatgactaagattctctatgtactgctgtgatatattttcaaattctgtttcttcatatatcattgttcttatttgggtgttcagtatagtatatctggccacagcctaacacaagaaactattaaagtccccatattttatttattcaawtgtatgtaatgtattatattaatgtattgccttaaagctaagtgagcttttcattcttgatagagtctttacgtggttagggtagatattgtttaatttataatccaaatattttataaaagattttgacaacaaaagcattttaattttaggatttctcaaattttacatatttgtgttaaaatttggcagcaattggcattagggtttttctagcttctgaaataaacttgtattttttcaccatagttgatgctctggaatagatgctaggatatgggaaatacctataccttagaaaaactgta

SEQ ID NO: 353803 - DNA, 569 bp, Homo sapiens
gatgactaccctgaaggagtctaggactagaagttcctagtttgggcatgagatgaagctagaataggagaaagtggacatgtaagcactcaaagtccattctattaccacatgactaagattctctatgtactgctgtgatatattttcaaattctgtttcttcatatatcattgttcttatttgggtgttcagtatagtatatctggccacagcctaacacaagaaactattaaagtccccatattttatttattcaattgtatgtaatgtattatattaatgtattgccttaaagctaagtgagcttttcattcttgatagagtctttacrtggttagggtagatattgtttaatttataatccaaatattttataaaagattttgacaacaaaagcattttaattttaggatttctcaaattttacatatttgtgttaaaatttggcagcaattggcattagggtttttctagcttctgaaataaacttgtattttttcaccatagttgatgctctggaatagatgctaggatatgggaaatacctataccttagaaaaactgta

SEQ ID NO: 353804 - DNA, 604 bp, Homo sapiens
gctttcattttggatgattattttctgagtcttagtacccatagttacaagttccacacatggccatctttacattaacactgcagtgcttcagtgctaaccaagtgataacttccctcaggtgttctgtgacctttattttcttctaaatttatctttgaccttggttggttttttactgtaaagggctagtataacctgaactctaatattcatgttagtccagcttaaatttacaagacgtgtgtgtgtgtgtgtgtgtgtggacttggcatatgtgtcttattttcatatttwactatttatatttaggtcatacttatatccatagaacattaagtttgctaaaagctattactatgcttttatacttctttgcattattagtctctgaacaaatgcttttaaatgtagttcattccaaatatagatggtagagttaaacaaaatctttagtgctgttaaaactctgagatgggaaaataggacttctgattccagaagtggagtgaggtcttccacaaacccatccctccaaaaaagcaacagaaacattgacaaaacattgccaaaaataactttttcaaattctagaaattagcca

SEQ ID NO: 353805 - DNA, 556 bp, Homo sapiens
aaactttcaatcaggtataatagatgttttaagattgtacatttcaaatacttagagaaattgtcaaatttaagtttagaaatgtcttaaatagcttttttaaaaaatacagaggtaacgtgtacattattgggaatctggaaatcacaggaaattgcaaataagaaaataaaagtcccatattaccaccactcatgagtatccatccttagtaaattaaattttcttccagtatttcttctatatatgaaatatcatgttaaattgaattaccatactatctagcattgtgacgagataaaaatcacaattacgataaaaaaatttctatgtaaattttttrgcataaatcagtttctatttccctaggatagatatctagaagccattttgggggggcgggggcagtaggaaatgcatgcatgtagagaacggtaaagtaggtagcgcagccttgcagtgtcttcctactctttatcagttgtgttcttggtcagcctgaagcactgactttcttctgttttttctttacttggcaacaatgcattctgtgcca

SEQ ID NO: 353806 - DNA, 556 bp, Homo sapiens
aaactttcaatcaggtataatagatgttttaagattgtacatttcaaatacttagagaaattgtcaaatttaagtttagaaatgtcttaaatagcttttttaaaaaatacagaggtaacgtgtacattattgggaatctggaaatcacaggaaattgcaaataagaaaataaaagtcccatattaccaccactcatgagtatccatccttagtaaattaaattttcttccagtatttcttctatatatgaaatatcatgttaaattgaattaccatactatctagcattgtgacgagataaaaatcacaattacgataaaaaaatttctatgtaaattttttagcataaatcagtttctatttccctaggatagatatctagaagccattttgggggggcgggggcagtaggaaatgcatgcatgtagagaacggtaaagtaggtagygcagccttgcagtgtcttcctactctttatcagttgtgttcttggtcagcctgaagcactgactttcttctgttttttctttacttggcaacaatgcattctgtgcca

SEQ ID NO: 353807 - DNA, 605 bp, Homo sapiens
caaataaaaaccaaaagagagcagaggtagctatatttatatcagacaaaaatagactttaagtcaagaactataaaaaatgacaaagaaggacattatatcattataaagggatcagttcttcaaaaagatacgacaattgtaaatatatatgcacccaacatcagagcacctacatatataaaaacaaatattaaaggatctgaagggagaagaggactgcgctatagtagatgcctttcaacaataaacagatggctgagacaaaatattaatatgaaaacattggacttgaacaacacgctagaccaaatgtacctaactgacatttacagaacattccattcagccgcaacagaatacacattcttctcaagcacacacagataattcttcaggattaatcacatgttagggcacaaaacaagattcagcaaatttaagaagattgaagttatatcaagtatcttttccaacyacaatagcatgaaactaggaaccaacaacagaggaatttaagaaaattcacaaacacgtgaaaatcaaacaacatgctcctgaatgaacagtgggtcaataaagaaattaatacagatatttaaaaa

SEQ ID NO: 353808 - DNA, 605 bp, Homo sapiens
caaataaaaaccaaaagagagcagaggtagctatatttatatcagacaaaaatagactttaagtcaagaactataaaaaatgacaaagaaggacattatatcattataaagggatcagttcttcaaaaagatacgacaattgtaaatatatatgcacccaacatcagagcacctacatatataaaaacaaatattaaaggatctgaagggagaagaggactgcgctatagtagatgcctttcaacaataaacagatggctgagacaaaatattaatatgaaaacattggacttgaacaacacgctagaccaaatgtacctaactgacatttacagaacattccattcagccgcaacagaatacacattcttctcaagcacacacagataattcttcaggattaatcacatgttagggcacaaaacaagattcagcaaatttaagaagattgaagttatatcaagtatcttttccaaccacaatagcatgaaactagraaccaacaacagaggaatttaagaaaattcacaaacacgtgaaaatcaaacaacatgctcctgaatgaacagtgggtcaataaagaaattaatacagatatttaaaaa

SEQ ID NO: 353809 - DNA, 555 bp, Homo sapiens
aaatgaattggtgtgatacagtacattaagagaacaaatgacaataatatgcccatatgatcatctcatttgatgcagaaaagcatttgacaaaattaaacatcttttcatgatagaaactctcaccaaattaggtatagaaggaatgtatctcaacacaataaaggccatctatgagaagcccacagctaatattacactcagtggtgaaaagtttagacttcctttaaatctggaaaacaaggaggatgcccactgttacacttctattcaacatagtattggaagtccttctcggaccaagtaggccacagaaagaaataaaatgcatttaaataggaaagaaggaagtgaaattgtcactgtttgctaatgatatgatcttatatttagaaaaccctacagactccaccaaaaacttgtcagtgmtaataaatgaatacaataaagttgcaggttacaaaatcaacacacaaaaaatcagtactgattctatacactaacaacaaactatctgaaaaagaaaccaaaagcacaattccatttataataact

SEQ ID NO: 353810 - DNA, 550 bp, Homo sapiens
gtgtgttttttttttctcatttgtaaaatgaggacaatrggagagttgtggggtgtttagagaattaaacgactattgtattagagggaaggggagaaagggacagaaagtgaagaaaagaagggagagaggaacaagtcaggaaggaaaaccagatcagctgatgaagacaactcagcacaaaaggcagacgtgataatattggaatttctggctttaataagaagctactagtatagaggaccttgctgaacagtgtagttgtgtctaagaggggctctacctttatattgctctttttccttttcctctgcttaacattcagcaagggtaactttaatgatttaaacaacaatggaaaatggaggagagaaaatgaagaaaatgtccactatgcaatgaggaatttttttaaagggatggttccaactggaatggagtgaatggtgttgttggaatagtgccctcagcaggcagagagtatacatatctatagtgtataaatatctcaaaattatttcaccatgtgatatcgtttattcccttttat

SEQ ID NO: 353811 - DNA, 587 bp, Homo sapiens
cacaaccacatattaacttacctatatcccttcctaaatgaggagctgcttgagtggaaaactataattttttcagtgttgtrtctcctgttgcttgggttcacatggtttgtgatatttacctaacaatatttatggaatgggttagtgaataatcagagaatatcacaactataggacatgtgatacatagatacaaagcctagggggtacatttaaattcttatcagagtactctaggcaaggttttaattttcatttacatattgtatctgaaataagggagccaggatatagaataattgagacctcaaagtcagacatatctataattgaatcctttctctgacacttactctctgtttgactttaggcaaattatgaaatttttctccttctattttctcttttgtatgataggagaaatagcagtgtcttcctcaaggggatcttatgtggattaaataaaataatacatgtggcctttgataaatgctcaaaaattgtatatacttattttattagaagtagcagtattaagtgaatcttttatttatacaggacaaatataaaacttcatatttgcc

SEQ ID NO: 353812 - DNA, 571 bp, Homo sapiens
cattttttccaatagcttgggctcacttcagatctctgtgtcaaaatttggtagttctagaaatatttcaaactttattattattatatctgttatagttatctgtgattaataatcagttatctcactatcgtaattgttttgggcaccaagaacgatgcccatataagatcrctaacttaattcacactatgtgttctgactactctactcactggctgttccttggtctctctctctttctccttgggcctctctattccttgagacacaatattgaaattagaccaataaatatccctaaaatggcctctatacgctcaagtgaaaggaagtgtcacacatctctctctttaaagcaaaagctagaaatgattaagattagtgagggaagcatgtcaaaagccaagctaggccaaaagcttgacagttagccaatgtgtgaaaggttcttgaagaaaatgaaaaatgctactccagtgaatacatgaatgataagaaagtgaaacagtcctacatctgatatgaaggaagttttaatagtctggttagaagatcaaaccagccacaa

SEQ ID NO: 353813 - DNA, 598 bp, Homo sapiens
tgttctgactactctactcactggctgttccttggtctctctctctttctccttgggcctctctattccttgagacacaatattgaaattagaccaataaatatccctaaaatggcctctatacgctcaagtgaaaggaagtgtcacacatctctctctttaaagcaaaagctagaaatgattaagattagtgagggaagcatgtcaaaagccaagctaggccaaaagcttgacagttagccaatgtgtgaaaggttcttgaagaaaatgaaaaatgctactccagtgaatacatgaatgataagaaagtgaaacagtcctacatctgatatgaaggaagttttaatagtctggttagaagatcaaaccagccacaacattcccttaattcaaagcctaatccagttcaaggcactaactttaattctgtgaaaactgagagaggagaggaagctacagaagaaaakctggaagcttgcagagacttgttcatgaggtttaaagaaagaagctgtcttcataacataaaagtgcaaggtgaagcagcaagtgctagtggagaagctgcagcaagttatccagaagatctagctaaggt

SEQ ID NO: 353814 - DNA, 484 bp, Homo sapiens
agctgttgttattatttgcagagaaataaagttaaataaaaaattataagatggatttamaagttattaccacttgattcatgtcagtaatttcagtggtaggaaactgtatgtagtagaaaaaaaaatagtgattttagcaaaagtttcagttaaagaaaatcaaactggcaactgaaaacctatttatgctctttccttcttctccacttcagttttttttcccccttacatgagatgagagtctcaactcagaggtatagaggaaggaagaaagggggaggaaagatagtaagtctacatagctagtaaagtagaacagcgctgaaatggaatatccaaacaactgtcaaaagtataaggagccctttttactaacaagatgctaccaggcctgagctaacacagaagagtatacccagcatgaggagctgctttgctttgacaggtctgatttatgaaacagatgatttgttatttattg

SEQ ID NO: 353815 - DNA, 602 bp, Homo sapiens
tctaattggctgttgacatggcacctggcctaccagatggtgatgaaatctccagagggctctgtctgcagcaggctgaggttgaggcggacgccatggccaatgggcacggtgatcagccagacacagtcctgggagctggagtacgggctagggaaccccggggagtacacagtgccgttggaagaagtgatgttcccgccacaagggactgccagggagggaacacaaacgtaagtgcagggcctcggtacccacctgagaattcagatgccttcctgaggaaatcccagctcccagaactaatcatcctgtcagggaggttgggtgggatgcggaaggggaggccaagctgaggatggctgcacctggttctacccaccagtccccacacagaacaccctggctggctctcaatcatcactgcakgcccctctgtgggtctgcctcagcctccctctttctctttcttatgaagagaactgccaagaagaaaggatgccctgaagctgtcccctctcccttcccaggaatgggagggagcagacgttagggtcagagctgcagtgcttttgctgggaagagctaagaaattaggaaag

SEQ ID NO: 353816 - DNA, 545 bp, Homo sapiens
aaaaaaaaaaaaaaaaaaaaacacaggaaactcatttgctgcttttaccacatgaggacacagcataaagacagctgtccatgaaccagtaagaaggcccataccagacatcaaaattgccagtcccttgaacttggacttcccagcctctaraactgtgataaataaatttctgttgtttagaagtcacccagtctatggtaatttgttacagcagcctgaatggattaagacagccattcagtcccagctcagaccagagcccaaggcttcactgaccacaggagcaggcaagggtctggggcaagagaggaggaactgctgtgcccagatcggcaggctcaagtgggagaggcactggactaggggatgagtgagcaagagaggcacattccatgcctcatagaacttttggtaagttgtggaatatatcctacatataaaaatgtatgtcacatgtatgtgcagtttaaagagtaataaaatgcacaccatcattgagcataagaaaaagcacacctaagcttttgaagctgtgttctttc

SEQ ID NO: 353817 - DNA, 585 bp, Homo sapiens
agtaaagacactggaaccattccagactaaaggagaccaaagagacatgacaatgaaatgcaacatgtgattctgaactggatcaataaattatcaaggaatttatcggaaaaacaggtgaaacttgaatgagatgtgaagattcgatggcagtaatgtgtcagtgttaatttcccaatgttgatggttgttttgtggttatgtgagagaatgtgctagtttgtaggaaatacactaagatattctggggttacagggcaacatgttggcgacttacttgcaaacggttcatggaaaaagatttttgtactatacttccaacttctcctakacctttgtggctgctccaaattaaaacttttatttccaagggaagctagatactaaaaaatagcaagactgaaaagaaacaaaatagcgtaattttcatcatcacaagaatcagcgagagcagaagcaacactgtagaaaaacaatgcaaagatgaggaggacaaacctgaaaatctcaacccaaatagggagaagggcagaggcgtgaaaatggtagagagaagatagaagataagaaataaggagacccagt

SEQ ID NO: 353818 - DNA, 561 bp, Homo sapiens
atgttcctaagggcaaggtaaataggaagccaagaagagcagccaaaacaagtataactatatgaacaaaayagatcattagtagctaactgcaggatgagaaaagctgcccccagcagaaaggtgcaatcctttgcccagtttgcagacttgagccaggtttcatttcccaagaggctgggtccctatgaaaaaagaccccgcacaatgacaataattgtatatagtagttgttcctaccgttcttcccccaaaagacctactactgtttactcagaaaacagaatattatagaaaatggaatgttcagatatatcaaagacttctggatacaggatgttaattgatgttgatgactggggatccaaagcactatcatagctactctgccagaggagtggtgtatgaagggtggttttgggaataaatggagtcctggcccaggtccgtctcacagtacacacttaacaaagtaggagcctcaattgtagcagctgtgtgaggcgcatatctttattagaacagattaacacagccttggttacatagaatgtagctgtt

SEQ ID NO: 353819 - DNA, 561 bp, Homo sapiens
atgttcctaagggcaaggtaaataggaagccaagaagagcagccaaaacaagtataactatatgaacaaaatagatcattagtagctaactgcaggatgagaaaagctgcccccagcagaaaggtgcaatcctttgcccagtttgcagacttgagccaggtttcatttcccaagaggctgggtccctatgaaaaaagaccccgcacaatgacaataattgtatatagtagttgttcctaccgttcttcccccaaaagacctactactgtttactcagaaaacagaatattatagaaaatggaatgttcagatatatcaaagacttctggatacaggatgttaattgatgytgatgactggggatccaaagcactatcatagctactctgccagaggagtggtgtatgaagggtggttttgggaataaatggagtcctggcccaggtccgtctcacagtacacacttaacaaagtaggagcctcaattgtagcagctgtgtgaggcgcatatctttattagaacagattaacacagccttggttacatagaatgtagctgtt

SEQ ID NO: 353820 - DNA, 561 bp, Homo sapiens
atgttcctaagggcaaggtaaataggaagccaagaagagcagccaaaacaagtataactatatgaacaaaatagatcattagtagctaactgcaggatgagaaaagctgcccccagcagaaaggtgcaatcctttgcccagtttgcagacttgagccaggtttcatttcccaagaggctgggtccctatgaaaaaagaccccgcacaatgacaataattgtatatagtagttgttcctaccgttcttcccccaaaagacctactactgtttactcagaaaacagaatattatagaaaatggaatgttcagatatatcaaagacttctggatacaggatgttaattgatgttgatgactggggrtccaaagcactatcatagctactctgccagaggagtggtgtatgaagggtggttttgggaataaatggagtcctggcccaggtccgtctcacagtacacacttaacaaagtaggagcctcaattgtagcagctgtgtgaggcgcatatctttattagaacagattaacacagccttggttacatagaatgtagctgtt

SEQ ID NO: 353821 - DNA, 582 bp, Homo sapiens
acagttctgctaaaaaattaaaaattaaaaaagggaaatagtactcagtcaaggttgactattgaatgtttgagttgcatttgattagattttcatttttcaagagaagacagaaatctggattttaatgtaaaatttcttgattttaaaagattgyggagtaattcaaaatttgttataaagcaccgtgtaggccaaaaaacaaaacaaaacaaaaacctctgtctttggatgggacatagtcgaggaggttgccattttgtgatctggcctaaaagttgttgtttttagagctttggaatcaagggacattcatgcaaactttctgacaggttttccatctaaaagggagtggaccaggccattcctaagttccatggtggtttgtggaaacatcttagggcacaatggttatcaatgctgagagcagtttcagcacctgcctcctcttctgaaatcctccaacctccatgtccatgtttttttttttttttccccctcattactttgcttttagctcactccttgcaggaatctttccagctgcctacatagcccttccttacacccgcctccattgcc

SEQ ID NO: 353822 - DNA, 582 bp, Homo sapiens
acagttctgctaaaaaattaaaaattaaaaaagggaaatagtactcagtcaaggttgactattgaatgtttgagttgcatttgattagattttcatttttcaagagaagacagaaatctggattttaatgtaaaatttcttgattttaaaagattgtggagtaattcaaaatttgttataaagcaccgtgtaggccaaaaaacaaaacaaaacaaaaacctctgtctttggatgggacatagtcgaggaggttgccattttgtgatctggcctaaaagttgttgtttttagagctttggaatcaagggacattcatgcaaactttctgacaggttttccatctaaaagggagtggaccaggccattcctaagttccatggtggtttgtggaaacatcttagggcacaatggttatcaatgctgagagcagtttcagcacctgcctcctcttctgaaatccyccaacctccatgtccatgtttttttttttttttccccctcattactttgcttttagctcactccttgcaggaatctttccagctgcctacatagcccttccttacacccgcctccattgcc

SEQ ID NO: 353823 - DNA, 582 bp, Homo sapiens
acagttctgctaaaaaattaaaaattaaaaaagggaaatagtactcagtcaaggttgactattgaatgtttgagttgcatttgattagattttcatttttcaagagaagacagaaatctggattttaatgtaaaatttcttgattttaaaagattgtggagtaattcaaaatttgttataaagcaccgtgtaggccaaaaaacaaaacaaaacaaaaacctctgtctttggatgggacatagtcgaggaggttgccattttgtgatctggcctaaaagttgttgtttttagagctttggaatcaagggacattcatgcaaactttctgacaggttttccatctaaaagggagtggaccaggccattcctaagttccatggtggtttgtggaaacatcttagggcacaatggttatcaatgctgagagcagtttcagcacctgcctcctcttctgaaatcctccaacctccatgtccatgttttttttttttttyccccctcattactttgcttttagctcactccttgcaggaatctttccagctgcctacatagcccttccttacacccgcctccattgcc

SEQ ID NO: 353824 - DNA, 577 bp, Homo sapiens
tgtgcagacacacacacacacacacacacacacacacacacacatgcacagaggggaggactgttctttgacacgggccaccccatcagtcattttgagcaggtgacatctacttacagagacactgggggcggggacggtcccatgtgccatctccctggcagctgagcactggggtgcccaggaggtagaagccgtggttgcaccggtaagacacagtggtgccgaagctgaacctgtgcgggccgctggcgtggacctgacgaacactattttcttggtgtccaggatctgtacagttgatgactgcaattgaacagaagtccaaacaggcatggattcccagtatagtaaaatcttccgagcaaaactaggcaatgaagcagaccctgtcgggagggtgagctggtcccaaggttgctggacttctcccctcaccttggttacctggtcagaagagtcatccttccatgtccagctagacatcacctccttagagaactcctcccacctcttcccagattgattactcyctttctggtactcccttgcacaaatcgctattgctgactttacc

SEQ ID NO: 353825 - DNA, 581 bp, Homo sapiens
attgaacttattttttctttctaactgcatgtccatgccctttaacccacttctcttcatcctccccctcccctgactcacccttcccaggctctattatctgtttttccactctctacctccacgtgatccccatgtattttcaatttaagaagttattttcacagctctaactctaaaagtctagaatcaatgaccagatcagtggcaatgagtactcttactgcctggattgtggtccattctccattaaaagaaactagactctctggagaaatggctaattcccgggctggtgcaggaaatatacaagacaaatatggaggccgggcgcggtggctcacgcctgtaatcccagcactttgggaggccgaggcgggtggatcacgaggtcaggaggtcgagaccatcctggctaatacggtgaaaccccgtctctactaaaaatacaaaaaaaaaaaaaaaaaattagccggtcgtggtagcaggcgcctgtagtcccaggtactcgggaggttgaggcaggacaatggcatgaaccygggaggcggagcttgcagtgagccaagatagcgccactg

SEQ ID NO: 353826 - DNA, 458 bp, Homo sapiens
acattatggaataaataaatcaagctaattaacatacccatcatctcacctaattatcatttttttgtgatgagaacatttaaaatctactcttttggccgggtgtggtggctcacacctgtaatcccagcrctttgggaggccaaggtgggcggatcacctgaggtcaggagttcgagaccagcctgaccaacatggtgaaacctcatctctactaaaaatacaaaattagccaggcatggtggtgcatgcctgtaatcccagctacttgggaggctaaggcaggagaattgcttgaacctgggaggcagaggttgcagtgagccgagatcacaccattgcactccagcctgggcaacaatagcaaaactccatctcaacgaaaaaactactctttcagcaattttgaaatgtacaatacattcttattaactatagtcactatgccatgcagtaga

SEQ ID NO: 353827 - DNA, 604 bp, Homo sapiens
catccatcaatcacactcacaccttgggggctcgtctacctcccatcagtcaagcattccactggagctctttcctcaatgccatgcaccatacctgagcagtgagggagggagccagtccagtgtccatccagcccacacatgcgggtgctgtttcccaccagagtacgcttgccgatgcagctgtaccgcaccactgctcccacagtataactgtctccagacatctgggagtgaggcggggagcccggatggccacaggacaccactgtgggggaaaagcaaacatctcaatgactctgcacagggatggctcaccatcacacaatccatgctaggcttctttaagcaagaggctgggaagaagagaaacccaagggtatctgttgaagcaaacttcctgctggcatgcccacctggcgttggcagacaatgtccactcaggggacagttttccatatctatgaaatgaggaataataccttctcagcatgtagcagatatacaataacattagattgttttctctcttgcctsttatgcttacctctccctatttcctcatactcatgatgtctctgggcaggaaggtggtatgcagagt

SEQ ID NO: 353828 - DNA, 612 bp, Homo sapiens
ctgcaggcctgggttttctattatttattcttctggttaatctgcatttttttgatttaggcaatcactgttatgcttagctgcctggaagtaatttggrtaattcttcactttttaaatttccctaaagtgagcctttatgtaaagtgcaagttttccttcttaatttttgtaaggcagtttttttattttaattcttcttttggctttttatatatgggatggggccataaaataatgagaacttctcaaaaaacaatgcctgaaattagtcttaataacttcttaagggttacagaaagcaagacccaagccagatattgtagcttgtgcttgtagtcccagctattcaggaggctgaggtcggaggatccattgagcctgggaatttgaaacaagcctgggcaacataatgagatcccatctcaaaaataataaaaaataaagttccatctgtattcagtcactctttcagatgtgtctaaataaaacatgtttagtttcacccagaagaacatgcagatgccctcaggaaattggtgcacgatgtatacaaagagatttaggtaataaataatagagactgtcggggtctgggtggagaatgtctgc

SEQ ID NO: 353829 - DNA, 562 bp, Homo sapiens
tttaaggaactggctcacacaattgtggaggctggcaagtccaaaatcaccagcataggctggcagggtagagacccaggaaagaatcacagttcaagtctgaaggcaggctgctagcygaattccctcttcttccagggatagcaggctgccttttctctcaaggccttcaactgattggatgaggcccacccacattatggagggcctcataatctatttcactcaaagcctcctgattgaaatgttatctcatctaaaacataccccttcacagaaacatctagaataatgtggactaatgtttggccatatgtctaggtatcacggcctaaccaagctgacacgtgaagttaaccatcacatggccatgctgcttgagacggttgcctacactaattgcctccacctctcccctctcattagcagcaaaggccacttctctgctctagccagaaagaacttccatcccagtcaacagtatctctggtcctaggccatgttctagaatgctcagagcctctgctacccaagagctgcagagcaggaatctgagaagtgc

SEQ ID NO: 353830 - DNA, 493 bp, Homo sapiens
caatgtctgtcagattttgtgacaaagtgaacatgttctaattgcaagtaccattttaagaccaaactctcaatggcagcaaggatgatgcacagcgggcaaagatgacttgttgctagagttttacctgaagatgatggttgaagctccaggggtaaatgaaagttctaaggggaatcagtagaagacacagtgaagggtcaagggacatggaagaagacactgagtggttacagaggcaggagaataaccacaagggtggagaggcacacaagcccaaakagagttgagtaacacatcaaatgctgcagataaggacaaaatgtcactgggtttaacaataaggaagggggtcactcatgacccctaagggcagttttcaaaatggcagatacaggatgctgactgcaaggcattgaggagaaactgggaggaaggcaaacggaaacaagcagagacttcctgccaagaactttggctctcaagccaaaag

SEQ ID NO: 353831 - DNA, 579 bp, Homo sapiens
aagtcaaggctttctattcggggcttactaaggacatcaaattttcattgtgacgaaaatacagctacggatttaaaattttaagtctacattatctccacaaaaacattttgtccccaaatgtacacacacaatcatactaggccaaagaataatacattctccaaagtagcaatgagagagcactctccaagcacagattaaaacaaagccatcacagaaacaacagacatctaaacaaacaaaaaacccaatacaaggagaaaaaaactattctattctcctaaataattgttttaaaaaacataaatcctaatacgagactgtgttgaamgtaatgaaaaggcctggggtggggaaggtgtataatgaatgaaaacagaaaccttacaacgtatcaaatgttacggaatctgatgaaggttgagaacagagaaaaatgtaagccctaaataattaacataagtgaactacatattgaaatgagaaaaaaaaaacacccaatctgtttgaaaaatgattacaaaatacttcactaataatgaatgcattaatagaaaaaatagaagtgaaattcaa

SEQ ID NO: 353832 - DNA, 579 bp, Homo sapiens
aagtcaaggctttctattcggggcttactaaggacatcaaattttcattgtgacgaaaatacagctacggatttaaaattttaagtctacattatctccacaaaaacattttgtccccaaatgtacacacacaatcatactaggccaaagaataatacattctccaaagtagcaatgagagagcactctccaagcacagattaaaacaaagccatcacagaaacaacagacatctaaacaaacaaaaaacccaatacaaggagaaaaaaactattctattctcctaaataattgttttaaaaaacataaatcctaatacgagactgtgttgaaagtaatgaaaaggcctggggtggggaaggtgtataatgaatgaaaacagaaaccttacaacgtatcaaatgttacggaatctsatgaaggttgagaacagagaaaaatgtaagccctaaataattaacataagtgaactacatattgaaatgagaaaaaaaaaacacccaatctgtttgaaaaatgattacaaaatacttcactaataatgaatgcattaatagaaaaaatagaagtgaaattcaa

SEQ ID NO: 353833 - DNA, 569 bp, Homo sapiens
taaataccattaatcattaggaaaatataaatcaaaaccataataaaatactactttatacccacaaggacgactataatttttttaaaaagggaaaataaatgtttgcaaggatatggaaaaattggaaccttgtacattgttggtgggactagaaatggtttggccctgtggaaaacagttttgcaaaaaggttacacagacttgccatataacccagcaattacacctctaagtatgaacctaaaagaactgaaaacagggactcaagtacttacacacccatgttcayagcagccttattcataagaattaaaaggtggggaaaaaatcaaaaatctatcaacagatgaatggataaacaaattatgatatatccgtaccatggactattcagccataaaatggctaagacattacaacatggatgaatatactaagtgaaagaagccagacacaaaaggtcacatattgtatgagaacatttattttacatgtggtatctagaattgtaaattcagagactgaaagcagattaatgattgtcagggatgagagagaggagagaa

SEQ ID NO: 353834 - DNA, 557 bp, Homo sapiens
ggaggttggcatattccctggactgagaagagaccagtggggctggaacatagtgttcaagggtgagtgacaagaggtggggctttacagcaggaaaagcaagatcgtgccaggccctgcaggccatgataacaagaatgccatgacgagctcaggcaggggtatgccaagatgtgatcacacttgaaagagattactctgctatgtaaagaactgacaatgggcaacaaataccaaggcattcttacttcctagttagcctatatggaaaccataaagaaaaagatttgacaacctaaaattaaatatttatatacatttaaaagcagtakaaaaattcaaagaaattatcaaaacaactaacatacttttataataaaagacatttaaaaattttaaatctttaaaatctcgttgctgcaagtcagtaacaaaaatagcaaatacccctctggagaaatgggcaaaggatatgaacagaaaactcacaaaggaatataaatggcatatgaaaagatgttcatctgtctataaaactggtaaggtttttttgtttg

SEQ ID NO: 353835 - DNA, 545 bp, Homo sapiens
atcaaaacaactaacatacttttataataaaagacatttaaaaattttaaatctttaaaatctcgttgctgcaagtcagtaacaaaaatagcaaatacccctctggagaaatgggcaaaggatakgaacagaaaactcacaaaggaatataaatggcatatgaaaagatgttcatctgtctataaaactggtaaggtttttttgtttgtttgttttaaactccactatccaatgttaagggtgtgggaaaagagacctctcgcatactggtgatggaactgtaaatcggttcagtcttccaggcaatgtgtattatatattaaacctctttcctaattttataagaaaataattcagagcagcctcacaaatacagttagaagaatgtacattaatgcatatgtccaaagtgagatttgttaaaatacattcctgaaacagagtcttcatcaacctttaataattacacagcagtgactactgataagcagagaggtttataattttcaactgagaaaagcagggtgcatttctgtatttaagaa

SEQ ID NO: 353836 - DNA, 545 bp, Homo sapiens
atcaaaacaactaacatacttttataataaaagacatttaaaaattttaaatctttaaaatctcgttgctgcaagtcagtaacaaaaatagcaaatacccctctggagaaatgggcaaaggatatgaacagaaaactcacaaaggaatataaatggcatatgaaaagatgttcatctgyctataaaactggtaaggtttttttgtttgtttgttttaaactccactatccaatgttaagggtgtgggaaaagagacctctcgcatactggtgatggaactgtaaatcggttcagtcttccaggcaatgtgtattatatattaaacctctttcctaattttataagaaaataattcagagcagcctcacaaatacagttagaagaatgtacattaatgcatatgtccaaagtgagatttgttaaaatacattcctgaaacagagtcttcatcaacctttaataattacacagcagtgactactgataagcagagaggtttataattttcaactgagaaaagcagggtgcatttctgtatttaagaa

SEQ ID NO: 353837 - DNA, 601 bp, Homo sapiens
ttggtatctcactggtttaagttctgaaccagtgtgggtttaccagctatgtgaacatgggcaagtcatttctttctttcttttttttttttttcttgagaccaagtctagctctgtcacccaggctagagtgcaatggtgcaatctcagcacaatgcaacctctgcctcccaggttcaagcaattctcctgcctcagcctctctagtagctgggattacaggcatgtgccaccacgcccagctaatttttgtatttttattagagacggggtttcgccatgttggccaggctggtctcaaacttctgacctcaagtgatctgcctgccttggcctcctaaagtgctggcattacaggagtgagccactgtgcctggctaatttctctgagcttcaattgtcctgtgtgtaaatgaggataataaaagtaccaagggttatgagaataaattaayatatataaaatgcttggtatttagcttggcacagcacaagcatgcaataaatgttactcaagttgcaaaaatagagaaagctaacacaacaacacatgcacatattctaaaaacttggaaaataatatagtacaattttaacattg

SEQ ID NO: 353838 - DNA, 601 bp, Homo sapiens
ttggtatctcactggtttaagttctgaaccagtgtgggtttaccagctatgtgaacatgggcaagtcatttctttctttcttttttttttttttcttgagaccaagtctagctctgtcacccaggctagagtgcaatggtgcaatctcagcacaatgcaacctctgcctcccaggttcaagcaattctcctgcctcagcctctctagtagctgggattacaggcatgtgccaccacgcccagctaatttttgtatttttattagagacggggtttcgccatgttggccaggctggtctcaaacttctgacctcaagtgatctgcctgccttggcctcctaaagtgctggcattacaggagtgagccactgtgcctggctaatttctctgagcttcaattgtcctgtgtgtaaatgaggataataaaagtaccaagggttatgagaataaattaacatatataaaatgcttggtatttagcttggcacagcacaagcatgyaataaatgttactcaagttgcaaaaatagagaaagctaacacaacaacacatgcacatattctaaaaacttggaaaataatatagtacaattttaacattg

SEQ ID NO: 353839 - DNA, 585 bp, Homo sapiens
ttgagatataatttttgtatcatacaattcacccatttgaagcatataatccaatagttttaagtatgctcatggagttgttatgatcaccacaataaattttagaacttttttatcacatgaaaaagaaacacaaccattagcagtcatttgccatttctccccaccacatcatctatcttctcctctcacaaatccctgcctccaggcagtcacttatgtactttctgtctttatatttatgcttatttgggacaacgttttaaaatatttctcttatctgactgtaattatatattacttgaccaacatctctcctcccctctaaccacttattcatctggtaactatcattctaatttctacttctatgagatcagcatttttagatgccacaatatgagtgagatcacatggtatttggctttctctgcctggttyattttacttaacataatgttctccaggttcatccatgttattgccaatgaaaagattttattctttttaatttctgaatagtattccgttgtatttgtataccacatttgctttatccattcatctgtaaataggtacgtaggt

SEQ ID NO: 353840 - DNA, 585 bp, Homo sapiens
ttgagatataatttttgtatcatacaattcacccatttgaagcatataatccaatagttttaagtatgctcatggagttgttatgatcaccacaataaattttagaacttttttatcacatgaaaaagaaacacaaccattagcagtcatttgccatttctccccaccacatcatctatcttctcctctcacaaatccctgcctccaggcagtcacttatgtactttctgtctttatatttatgcttatttgggacaacgttttaaaatatttctcttatctgactgtaattatatattacttgaccaacatctctcctcccctctaaccacttattcatctggtaactatcattctaatttctacttctatgagatcagcatttttagatgccacaatatgagtgagatcacatggtatttggctttctctgcctggttcattttacttaacataatgttctccaggttcatccatgttattgccaatgaaaagattttattctttttaattkctgaatagtattccgttgtatttgtataccacatttgctttatccattcatctgtaaataggtacgtaggt

SEQ ID NO: 353841 - DNA, 608 bp, Homo sapiens
gacgtctttcacttcatcatttaaaattgttagctattttacatatttgtcgctatcgaaatgggatcgctttttcctgatttctttttcagacagtttgttattaacacatagaaacactactgatttttgtatgtttattttgtatcatggaactgtattgaatttgtttattagttataatagcttttaactggagtctcttaggttctttgtatatatgtcatctacaaacagggacagcttaacttcctcctatctaatttagatgacttttatttctttatcttgcctagttactctggctaggacattcagtacagtgctgagtagaagtagtggaaatggacattatggtcttgttccagaactcagaggaaaagctttaatgtttccttgttcaatgtgatgttagctgtgggtttgtcatgtatagcctttattrtgttgaggtacatttcttctgtttctaatttttgaaggtttgtattataaaggcatgttgaattgtgtcaaatactttttctgattctattgaaatgattatatagtttttgtccttcattctgttaatgctatgtatcatgtttttcaatcagtgtatgttg

SEQ ID NO: 353842 - DNA, 355 bp, Homo sapiens
tttgtattattttgagtgttactttgcaacccaagaagatcgtttctgatagctttcatgcacccaacagtaagttattagacaccttcacgaataatggaggaaaaatgyatatctttcttatatctaagaaatagcataccaaagacaaatagatcaaaaagttgtttgctaaaatttgatgttattgtactaccaatgaaacaataaacatacatacatcttatgtacttttgggtatatacatatatacacacacacacacacatatatatgttacagtccttgcctcaatatttgaatatgtctgtaaacattatgaagcactcaaaagggcagactcacctctatttaa

SEQ ID NO: 353843 - DNA, 355 bp, Homo sapiens
tttgtattattttgagtgttactttgcaacccaagaagatcgtttctgatagctttcatgcacccaacagtaagttattagacaccttcacgaataatggaggaaaaatgtatatcttycttatatctaagaaatagcataccaaagacaaatagatcaaaaagttgtttgctaaaatttgatgttattgtactaccaatgaaacaataaacatacatacatcttatgtacttttgggtatatacatatatacacacacacacacacatatatatgttacagtccttgcctcaatatttgaatatgtctgtaaacattatgaagcactcaaaagggcagactcacctctatttaa

SEQ ID NO: 353844 - DNA, 487 bp, Homo sapiens
attacaattagtacagctgtaatatattttcttgttttgtgtttacattatattatattgtatccttttgctttttaagctttccatgcccttatctataagaaacwtatctttaaagaaacatgaagttatgttttgcattttgttttcagacatagtgtttttcccgaactatttgccattttattcatcaatttttcacattcatttttttcattttacttaattactctacaaaataatttttccactttctcagtgaataatttgtgagttatgcatttttaaaattgtgttaacaattttttaatatatattgcaacatgaatattttaacaatattaattcttctaatccatgaacacaggatatctttcaatttctaatgttttcttcaatttcttttatcagcattttatagttttctatatatagaacttttaccttttggataaatttataattaatttttttattagttaatgaa

SEQ ID NO: 353845 - DNA, 487 bp, Homo sapiens
attacaattagtacagctgtaatatattttcttgttttgtgtttacattatattatattgtatccttttgctttttaagctttccatgcccttatctataagaaacttatctttaaagaaacatgaagttatgttttgcattttgttttcagacatagtrtttttcccgaactatttgccattttattcatcaatttttcacattcatttttttcattttacttaattactctacaaaataatttttccactttctcagtgaataatttgtgagttatgcatttttaaaattgtgttaacaattttttaatatatattgcaacatgaatattttaacaatattaattcttctaatccatgaacacaggatatctttcaatttctaatgttttcttcaatttcttttatcagcattttatagttttctatatatagaacttttaccttttggataaatttataattaatttttttattagttaatgaa

SEQ ID NO: 353846 - DNA, 583 bp, Homo sapiens
aatgtatgtactagctttattattttttgaaaagctactcactcatgtaaataatgaacaaaaattctgtgaaaacaaagttcttatcttgctgtttttcttcacagcattggaaagtatccagctagacatgagaggatgtgactggaggaagacagcaatgtgtawaggaacatggccaattattaggaaattacagaaattctagagcacattctatgattggtaccaaagagctatgggtaagtttgtccaaataatcagatctcttatttccattcacacaatctaatgcaatgtcaaaagagctacataggcagtttgtctaaactagtggtttctaagcctgacagatagcatcccagttgtaatagctttacagcctctgtgatcagaaatgaatttaaagtaagtggccttaaacaagaccattaacagtatgagccgaaggagagaataaagacagacacttaattatgtggcaggagcatctgaatggaccaacagagcgcgattaactctgatgaagaggttgaaatatattatatgttaaagcacaaggatataagattcattttggata

SEQ ID NO: 353847 - DNA, 519 bp, Homo sapiens
gcttttgcaaaacttgtggatctacatttagaaaatgaaatrtagattatagatcccttttagactttgtcctttaaatttttattgaggtattctatgctcatgtaagaggatttggcccaaggtgaacttaattatctttctaacacctaatgattttgccttttctcagttgtcttatctacatttgtcttaatctgcccaaataaaaaagtttcagcagatggggagaaaagaaagttcatccagtattaaataaaaatgtttgccttattttcatagtttatattttaaacttgcaggcctctagaaggcaatagctttattctgttgttccagtcacaggccttcctgaggcaatatatgcttttttccttgtagcaaaggggaaatctttgtgaaaattacgtttgttggggtaaagtaataaggagaaatgcattgacagggaaaacacctgcttcccacagcttatattgtgagctctgttgtcaaaagatgactagtcccttctttttc

SEQ ID NO: 353848 - DNA, 581 bp, Homo sapiens
agttgctaataaaaggaaaaaaataatagattattggtagaattggtagaataaatctttaacatattcaactgaaccttaaattttattcagaggtttggatccagattgaagaaagcatataaagatctaaaaagcagtaagaaaaaaaaaaaaagcattcaacaacggatctaacaatcactaaattaattaatcactgattcagctagaggtgggaataatgatggaaaagtagagtcattctgatgataatcagattattagaataacttattagaacttggttagaactaagttctattattttggatgttcttgtttcyatctgcttatttggttacttgtgtctgtgtgtgttttacccatatttttaataaagaagcaacaagccaaagatcactgatgaactctcctatttctctatgtctctttgacttctgtaaaaacaaatataagtgaaaaataagaggcttaattctatttattaacagtaaggtaaaagatttctgtccctcccctttttcttagagcatttactttagaaaaccaaaaattgtaagttctttctcttctctttg

SEQ ID NO: 353849 - DNA, 564 bp, Homo sapiens
ccactttggcctccctcccatgcttgttggaatccaaagtctgaagggggtcaaggcagcagggggctggcctgttagtgctgccctgagcacatacacgcccagccacgtggtgacagagcccaggcttgtcctcaaatttgctacaaaatcagagagggcaccatgagtggagagaagccaggcagcagcagcaggttctgccatcacagataatttcctgtgtacttttgacatgcctgcattctttttcttttttgagaaattccttgttttttggcagtaccagatgatctagatttatcttgacttatctctacccctgccctagaagtaaggactttkcagggaactcttatgtttcttttacagaagaatatttagaaaccaagatctgggcaccgggtataccaattgctataatcatgatacttctagactttcttaacacacaggcctagaaaattagaatttttcatgtacatatacacacacatacagacatatataatatgtacatatgtgtgtgtgtttgcatgtgtgtatgattatattggtgcctcc

SEQ ID NO: 353850 - DNA, 583 bp, Homo sapiens
aaaaacattatgaagtgattttcaccatcatatcagtttgaccttttcaatattccacgtcttgattgagtagtcattcagttcactccctgaatgttagtgtagacatgggagaaccagttaattagaatacattgtttcaaaggtcacagagtatttttcaatatattgttttacattaaatattgagaaatacataaaaagtaaatgctaatatttgctttgctttaatatgagtaggaaggaaatttttgaatacatatatacactaaatgatagtataaccatgtatatatctgcccacgtttctgtatatgcagtctgattacattaaactaaatagaaatatacactgaaagctctatgaatgataaattaartaatatgtaaactactttctatatttaaaatattcaaatatattaagtatatttataataaagtagtattaattaatactgcattacgtatttctcctcatttgctagagactattattcaactaaacaaggaggcctagactactgatgaactccagtttcaaaatgagaatgtgagtggataagccaaacatttttaagca

SEQ ID NO: 353851 - DNA, 596 bp, Homo sapiens
ataggtacatgtaaataaacaggtaaataaaactaaagtatacaaatattttggttcgttttactgtttgccttcatcttatttaaatgacaactacattaaaaataattacaaatgtgtttataggcttataaatgcataaaattgcaatctgtttaaagacaataagatgatgcagggggagagatctgaactataatatgtaaatattttcaatactattgagattgttagtattattatgaacttgattgttttaaattaagatgttaattgtaattcccagtgatacaactaagaaaataactcaaaaatatgctaaaagaaagaaaatggggctgggtatggtggctcatgcctataatcccggcactttgggaggctgagatgggcraatcacttgaggccaggagtttgagactaccctggccaacatgccaaaaccctgtctccactaaaaatacaaaaattagccagccatggtgatgcacggctgtatcagctactcaggaatctgaggaacaagaattgcttgaacctgggaggcaaaggttgcagtgagccgagactggccactgcactccagcctggctgac

SEQ ID NO: 353852 - DNA, 589 bp, Homo sapiens
ggcaaatccactgtactgtgctgatggggggacctttccttgtctggaccatttggattctccaaatgctgcaggctggaacgattgagtcaaccaaatggcagagatgatacccatgcctccctctgggactccatcaggtcttagggagggtccacactattgctggtagctggctggaatttgaaaccaatgtgtcttatcttgtgaggtgctgtggaawtggggccagaagaatgatgctacttggatccctggattccacctctttcctatgtgtgggcctcccgccttacctgagttacagacatgtttgctgaggatcccagggccagattatgtaaagttcctgggtctccgtgtgtgcctgagcagcagctctgccaagactccacacggctctgtgtgttggaccaaacactctggtggggtttgctcacaagggtatctcctgatccatgggttgcaaagatctgtgggagaagcgtggtttcctggggttacacaatcactcaccacttcccttggctccgtgtcactcctgggtgggctgtctctccaccatgcttttcttcattttctgtgtgtc

SEQ ID NO: 353853 - DNA, 590 bp, Homo sapiens
agaagcgtggtttcctggggttacacaatcactcaccacttcccttggctccgtgtcactcctgggtgggctgtctctccaccatgcttttcttcattttctgtgtgtcaagttgttcccctaatcagtctcaatgagagaacctggatattttagttgaaggtactgtattcattcacccattttgttcccatccatgaatgctgcagactgcagctgcttctaatcagccatcttggcccctccccttctatttttctttttcctttttgtacttttgttctttttgcatacttgattattttgattggctgttaaacacttcgtctgagcatgtgtagcattcatttgaggatctaaatgatgctatattcttcccaaaagaagtgatattttcttttggccaggagttatgataaggtcgcattaacttttttgaatcaataattgaattgatttaaatctgaagtttaatatttgttagtgctgagcttttgaatggattgctatccmctctacaatgtggccctttttgacgtatcctaaactctgattttcattttctaagccccaggtgatggttgaaagcc

SEQ ID NO: 353854 - DNA, 534 bp, Homo sapiens
gggcaatagcccaccagggagcaacatggaaccaagcgaactgccagccaagggaagtgatgastgaatgtgtgacccagggggaaaaccatgcttctccctcagatctttgcaacccatgaatcaggagatctcctggtgaactcacaccatcagggcctcaggtcagacacacacagctgtgtggagtctcagcagagcagctactcagacttgcacagagacctaggagctttacatagtccctccctgggatccctggcaaaggtggctataactcaggcaaggcaggaggtccacatatacccctaggaatgggactgaatccaggggactgagctatatcagtctgtgggtcccacttccatggcacctcacaaaataagacccactggcttggaatttcaaccagccactggcaacaaggtggagcctgccatgagatgggatagagcccccaagggggatgagtgggccactatttatttgtctcagtcattccagcctgcaggatttgaagggtccaaatggtct

SEQ ID NO: 353855 - DNA, 619 bp, Homo sapiens
gcttctttaagcaggttctgatcccatttttcctgcctgggaactcccaactggggtctccagccacctccttaggtgtatttggtggggcaacaggtcagtatccccctgggagagagcttccagaggaagtggcaagctgccatcttcgctgtttcacagtcttcactggtgatatctccaggtactgaaaaaaacaaggtgactagtgtctggtgtggacccccaggaaaatgcagcagccttacggaagagtggccagacttttaaaagaaaaacaagcaaacaaaaaaaacaacaacaaacacaaaaactccatccaaaggtcagaaacctcaaggatcaaaggtagataagcccacaaagttgagaaaaaatcagtacaaacatgctaaaaactcaaaaagccagagtgtcccctttctacmaaatgactgcaacacctctccagcaatggttcagaactgggctgaggctgagatggctgaaatgacagaactaggcttcaggatgtgataacaatgaactttgctaacctaaaggagcacattgtaactcaatgcaaggaagctaagaatcacaataaaacaatgcagaagctgacagccaaaatagccag

SEQ ID NO: 353856 - DNA, 294 bp, Homo sapiens
ctgtgatcccagctacttgggaggctaaggcaggagaatcgcttgaacccaggaggaggtttcagtgagccaaaatcatgccactgcactccagcctgggaaacagaacaagagtccatytaaaacaaacagacaaacaaacaaaacaaacacagaccagaaactcaataaatgtttattaaacattgagttattacagaatttgtcattaaagagctggaagataattgaaaaaaaaaaaaaaaaaaactctaccagcgttgtttaaggtgttacttttctttttttttttta

SEQ ID NO: 353857 - DNA, 294 bp, Homo sapiens
ctgtgatcccagctacttgggaggctaaggcaggagaatcgcttgaacccaggaggaggtttcagtgagccaaaatcatgccactgcactccagcctgggaaacagaacaagagtccatctaaaacaaacagacaaacaaacaaaacaaacmcagaccagaaactcaataaatgtttattaaacattgagttattacagaatttgtcattaaagagctggaagataattgaaaaaaaaaaaaaaaaaaactctaccagcgttgtttaaggtgttacttttctttttttttttta

SEQ ID NO: 353858 - DNA, 360 bp, Homo sapiens
gccaccatgtatatagttcacactaaaggagtggaaagttacactctgcrttcttaaggtggtgtatctgtaaggtattaaaaattcttcaccataggagacctgtcacttctcccccatttatttatttatttaatcatttatgtatatcagtatggacctaccttgtctatgtcatgcactgttcctagattcagccaattctccaaggagccttggtttcttttacacttttctaatggtattaaaaaccaagatctgagcactacgtgtgctctttgcaattaaagtgccattgtttccaggttctttcagcagacagatcaaggagaaatatgtatatatatgaatccatctaca

SEQ ID NO: 353859 - DNA, 473 bp, Homo sapiens
gtgcagcaggcaaaataggcattgaagccatttctccacctttcctgccaaatttaataagattagttttggttacattttatttttttctaagtattatcaagaatttgaagctatattgctggtagtataagctagcttactcaggtgagaagtctaaagtaagtgatatggatcagcctttcaagccttgatccatactgtgtgctatcacaaataatgttattgaaataaaagtaatttcacaaatatgtattaatagtatctatccaaatatacaaataaaaatcatttatataaaatagcatgggatgttaacgagttaaagtaaaaattagttaagatgatgattccctttgtgccatagaagaatgagctatctggaaaaaacatcagccagtgacktgaacctccttccttagtggttacatattgcgaggaaaggaggaacaataaaaagaaggagagaatat

SEQ ID NO: 353860 - DNA, 587 bp, Homo sapiens
aggctgccataacacagtgctacaaaatgggtggtttaaaacaacagaaacttattccctcacattattgtaggctagaagtccaaaatcaacctgtgagcaacattagtgtcttcagatactaactatgagggacaatctgtttcatgcctctctcctagcttttgatgatggttgacaattcttgtaggtgcatcacttcaacctctgtctygatcttcatattgtgttctccacctatgtttgtgcctttatatggctctgttcttgtaaacatactgatcaaattagattaagggcccactctatgctactatgatctcatcttaaccaatcatatctgcaactaccctattttcaaacaaggggtcctggggcttgtgacttcaacataactgtgttggggcacacaattcaacccgtaacagaggatgatcactatacactgagagatttcagaaaacagtcgtgcagattttgaaactattcaggaaattgcagtaaaatgctgtaaccgaaacttagggtagtaaagtgggaatggaaaggttaataaggcctggatcaaaccatcagggtttagaatg

SEQ ID NO: 353861 - DNA, 587 bp, Homo sapiens
aggctgccataacacagtgctacaaaatgggtggtttaaaacaacagaaacttattccctcacattattgtaggctagaagtccaaaatcaacctgtgagcaacattagtgtcttcagatactaactatgagggacaatctgtttcatgcctctctcctagcttttgatgatggttgacaattcttgtaggtgcatcacttcaacctctgtctcgatcttcatattgtgttctccacctatgtttgtgcctttatatggctctgttcttgtaaacatactgatcaaattagattaagggcccactctatgctactatgatctcatcttaaccaatcatatctgcaactaccctattttcaaacaaggggtcctggggcttgtgacttcaacataactgtgttggggcacacaattcaacccgtaacagaggatgatcactatacactgagagatttcagaaaacagtcrtgcagattttgaaactattcaggaaattgcagtaaaatgctgtaaccgaaacttagggtagtaaagtgggaatggaaaggttaataaggcctggatcaaaccatcagggtttagaatg

SEQ ID NO: 353862 - DNA, 582 bp, Homo sapiens
atttgtgaggactctaaattttgtttttgttttttgttttttcacatacctacccctaaattgattgttgtagccatggaaatggtcactcttttggaaggctctaggttatgtttcaaccctagaactgtagggtgggtcagctgcacatataggaactaaggacaaggagagaacaaactccaagagatgctgccagaaaataataaatatatgcaatagcaatagaactgagaagttcctacaagttgagagagaagctcattttttggcatttcttgtatttgtcccttatactttctaataaagaaatatcatgaatgggatcacttcatattttaacttgaaccaaatttaaatcctaggtatgattcaagtaaaaggaaaatattcctactctgactgaagtaagatattttgaaaaaccctccaaatttagactctactttgtgtgtgtacatgtatatatgtttattattttgacmaaataataagcagaatcaaccttctttactatttttctcattcagctgttatgtattatattgtgtttgtgataaggggcaagatgaattaaaagtt

SEQ ID NO: 353863 - DNA, 555 bp, Homo sapiens
tagctgcattgagggcccaagccaggaggccctgcctggtgatgaacacggggatgaggggcttgcagggaagacagaatggcctcttctccctagagcagctgtggcaggctggaggtatgagtaaagcacttagggtctttgttccttctccagtccaaaggcagcaagggcagtacctctgcagttgcaaaggcggagggactttcagtagcatctgggagcctcaccctggagaaacagagccaytgccaatggaaatgttcatgcaggggtggggcagctctgtggggggcagggctgcttggtgaagagtgggaggtagaggctcacagggaagagagactgagaggctgggctcctctgtctatggtgactgtgtcatgctcgaggtgccagcaaaacattcaggctctttgtttcttctccagcccaaggacagcaagtggtacttctgcagctccagtggcagtagggttttgggttgtctctgggatttctgtaagaattaaagaaagaggaaagaaacatgaaatgcagctcaccagtcaagac

SEQ ID NO: 353864 - DNA, 593 bp, Homo sapiens
tttgactgtcagccaaaggtttctttcaattacttgccatgaaaacctctccatagtgcatctcacaatatggcagcttgatttcatcacagcaagcaagagagaacttctgctagtaagttagaagtcatagtctcttgtaatctaattatgaaaatgctgctgtattcttttggtgaaaactaagttgataggccagcctacactccagggaaggggattatttaagggtatgaataaaaagtggtgaaaatcactgggggccttcttagagtctctgccacaaagattaattctcaaatactttgtagctgacaataatatcatgttttatctgacagtcatgtctttattatattttgggtcagttatcctggcctaaaatcttggagttagtcttgattctagtttcyctctatttgacttcaattttttcatctgtttctatgtcatattgaaaagagtagtcagaaaaccaagttgcagtcctagcaattctaccacctttggagaagttactaaattgggctgcagtttcatctgcaaatgagatctggcattaagtaatctataactatattcagtcctaatag

SEQ ID NO: 353865 - DNA, 614 bp, Homo sapiens
tttttaatttaatggaagcagacttcttaatgagaactgaagggctcagaagcaaagcaacagtaaaaaaagaaaatagaaatcaaggaatctaaataatccccaaattgggcaatcagtccctgagaaatagagaattaactatcattcttttaactataattacagccttattaaaaccaataatcactattgagcaagaacatacagaatattatttgaacttgccttttcatgaagtctcaacacattgattccatatagaagaaaatgttattggtgttkatggtattaaaaataagtaatactgaaatattacaatcttttttagacgaaaatatatgcaaattacggtggagaagggcagaaaaaaacttcgaaatatgtaaagtgctctctacctaagaaaagatttagatcaattaactttttcactttcagcaaaagatggcagattgaacacatgcatttaattctcttctttcccttaagctctatacaattacaaaaaaggacaattttaagtttgagtacattcaaaataacaatggggaagaagagaatacttttataaattggaagtcagaaaatcaagtaagttagttatatagttg

SEQ ID NO: 353866 - DNA, 605 bp, Homo sapiens
ctcatttaatcatcataaacactccatgaaacatgaaaaacgaacagcagggccagaatatgagatatagggaggtaattgagaatttgcttacataaaaaccaaagtacccttgcttagatgttctctagagtcataaaatagtctcattttacagataaaaatcctgagacccagggaagttaaaaggtgtgccaatttcacacagtgtgttattataatcctgattaacaaatgaagaaactgaggcatgaaaggtaaaaagagtacttaatggcaaaggcagacatggagtccttaactctaagtcttgaactttttccatttctacatgctacctttaagtcaaagtttgaactgcccatctgagasccaccagagtggcctaaaactcctctagcctgtcatagaaatttgatttccttccataaagcagttacttaggaaagtcttatttaaaaacatcacccagctataaatgaaaaccttcccaacagggacaaaatggaacatctgccttccttttgcttaatagaacactgcagagctgctctctgcttggataaatgctatttgggttttcttgatttctgaatgagttctta

SEQ ID NO: 353867 - DNA, 531 bp, Homo sapiens
ttacatgttattgcatttagggcccacctgtgtaattcaagataatctccttccttcaaggttattaacttgattacatcatttgcttcagatggtaatattcagtcttttgctgtatcaggtaatattcacagacctcagggattaggttacagacatggctttttgggggacaccgttcagttcactrtagtcattctatctaaagatttgtcaattttgttgttttattcaaagaactatttgtttcatagcttttttccctatataatttgttttctattttgttgatatctgctgtagtctttatatttactttcttttgcttgctttgggtttgttatttttattttagtgtcttaagagaaaagctaagtttacagatttaaggcctttttttcttttctgataaaggcttttaaatctataaaggtctctctaagcattgttttagtactgcagcccataaatttctgcagtttcacttgcttcaaattcttctctaattctttttgtaatttattttttgac

SEQ ID NO: 353868 - DNA, 598 bp, Homo sapiens
tggtgtttttaaggcagtgattattcagacccttagctaggtgagcaaaagagagaggacatgagcgggaggcaggtggcaaacattgttggggccaatgcattggtggttttgatgaagtcaaaaaaatcttgaaatggaaataatagttcgagtgtgccaaayggataaattatggtggtcagcaagtagaatgctgaaatttttggaagtggtttaggtattgttataaagttgggggtagaggtgaaatggagaaaaaagcttgccagagatgaggaggtcaaacagcacagaggccaagatgctgaattgctcatccaggtagatatcaaagtcatcaaggttgtgacccagtgtagaattaaagaggaaaaacagtaaactaggtgctaaatctattggtggatgaagggggaggtcctgggaggtctgtaggggtattaagaaaatctgaagtttggatcttcaagtgtgttgggatttttgaaggaagaaggatgacgaatgatttggaaagccacgtcctgtggcaaacacagtccagatacgaaacaataccattgctgcttcttcctgggcacacagactacatcat

SEQ ID NO: 353869 - DNA, 598 bp, Homo sapiens
tggtgtttttaaggcagtgattattcagacccttagctaggtgagcaaaagagagaggacatgagcgggaggcaggtggcaaacattgttggggccaatgcattggtggttttgatgaagtcaaaaaaatcttgaaatggaaataatagttcgagtgtgccaaatggataaattatggtggtcagcaagtagaatgctgaaatttttggaagtggtttaggtattgttataaagttgggggtagaggtgaaatggagaaaaaagcttgccagagatgaggaggtcaaacagcacagaggccaagatgctgaattgctcatccaggtagatatcaaagtcatcaaggttgtgacccagtgtagaattaaagaggaaaaacagtaaactaggtgctaaatctattggtggatgaagggggaggtcctgggaggtctgtaggggtattaagaaaatctgaagtttggatcttcaagtgtgttgggatttttgaaggaagaaggatgacgaatgatttggaaagccaygtcctgtggcaaacacagtccagatacgaaacaataccattgctgcttcttcctgggcacacagactacatcat

SEQ ID NO: 353870 - DNA, 559 bp, Homo sapiens
ctatacattcaataaaggattaacactgaaaatatataaagagctcaatttaatagcaagaaaacaaataacccaatctaaaagtgggcaaaggacctgaatagacattttcttaaaagaagacatacaartagccaagaggtatattaaaaaatgctcaacttcacaaattatcagataaatacaaatcaaaaccataatgatatattaccttacacctattagaaaggttattaaaaataataacaagtatcgagtaggatgtggaaaaaaggaactctcacagtgagcaggaatgtaaattagtacagccattatgaaaagcgatatggagttttctcaaaaatattaaaagtagaactaccatgtgatccaactatcccactactgagtatatatcctaaggaatagaaataagtgtgttgaagagatatctgcacttccatgtttattgcagcattttccacaataatcaagatacagaatcaacctaagtgtccatcaatggatgaatgaataaagaaaatatggtaaatacacataatggaatactattcgg

SEQ ID NO: 353871 - DNA, 531 bp, Homo sapiens
agttataatatagaaataagaaataatcatgaatttctttcaaataaagtctcaaatcagatttgatttttaartcctatttctgtcttctcagcagctttggtggccaagatagaagtcatttcctacattgtcagtgattattgtctttgatggacacaagatttgtggagtctaaagagaacatacaattctaaagcgttcatgttggagagggaactctgcaatgatcagaaggactgagtcagttttagcataaaaaatgagaactatattaacaatgaggctgactacacagagttttgagctagagactcactctacccaataccattgacatcttgaaatgttagatgaaactgacatagaaaaataatcctggagtttaaagtatgtcttgtcagaccagatggtagtatctggtcactgtcttctacagtgatgggcataaaacctcaaagtgcaccattttaatccatgacataaagattaacctcaataatatagatatcatcttctgcttgcacttgt

SEQ ID NO: 353872 - DNA, 531 bp, Homo sapiens
agttataatatagaaataagaaataatcatgaatttctttcaaataaagtctcaaatcagatttgatttttaaatcctatttctgtcttctcagcagctttggtggccaagatagaagtcatttcctacattgtcagtgattattstctttgatggacacaagatttgtggagtctaaagagaacatacaattctaaagcgttcatgttggagagggaactctgcaatgatcagaaggactgagtcagttttagcataaaaaatgagaactatattaacaatgaggctgactacacagagttttgagctagagactcactctacccaataccattgacatcttgaaatgttagatgaaactgacatagaaaaataatcctggagtttaaagtatgtcttgtcagaccagatggtagtatctggtcactgtcttctacagtgatgggcataaaacctcaaagtgcaccattttaatccatgacataaagattaacctcaataatatagatatcatcttctgcttgcacttgt

SEQ ID NO: 353873 - DNA, 567 bp, Homo sapiens
aagatggggacacatttcattcagtagaaaaacatagcaaaattatcaccagaaaaaaaaatcagagatcagtttacgtatctgttagaaccgaagcctttaggggaagatattaaaagacaaaatgttaatagcaagtgttagtttctattgactgcatttgggaaggtgcacactggctttacagtgatgccagagcaaatcacattcagtagaaactgtgctttgagaaygtattctgcttttcactttcagtatagtattcaataaataaataaagtgaactattcaatacttcataataaaaataagctttgtgttagatgattttgctcaaccgtacattaatgtaagtgttcttagcacatttaaggtaagctaagctgttatgatgtttggtaggttgggtgtattaaatacgtgtttgacttatgatattttccatttatgtcgggtttattgggacataaccccattgtaagtcaaggaagcacctgtattacaagaaataaattcagaagagaattagctgtctcatcagcaggaatacagtgtgccctttcaaca

SEQ ID NO: 353874 - DNA, 566 bp, Homo sapiens
agtgatacaagcatgagtagttagaagctatgatataagcagygggcagatggagttattccttgaatatcaattagcatagtccatccaagttgaagactctgacaattgaatacttcaacttaatggatctgttttcaaattccctttaatggcccttctgtgaccataatatctacttttccagacatcctaagtagaaaccattatggacaatatatgtagaattctctaaggatagcatatggaggggagaatgtgagttgccaaatttagcagctctagagagaatgtttttgaattaaacctgaatctatggggattacagttcatttatgactgacaaaacatatcttcccaattctgaaagataaatcccactgatatacacgtggatttcacagggtttctcaaaaactataaggaaaaaaaaaatcctttccacaaaatgcagttctataactattttggaattatggtaagtcacatgttctttttgcagttttcctcaggttaaatgaggaattttctaagtactgtgccaactgtacttacaacctgagtaa

SEQ ID NO: 353875 - DNA, 631 bp, Homo sapiens
gggtaagaacatcatctaggtcactctcatatgtgattattggatcacataaacattatagtaccatggcctatttatgtatctacctacaatattggatatgaattcttcatagatagraatcatctgattcatctttgaatctccaggttctgacatggagattctcattcaattaaggtttattgaactaaactatataagataaggcaaagctggttataatgcaatattcaaaatggaagcattaaagatattgtaatgtacttcccagggtaaaggacaacctaaggagtagtaggcctggaaaatgggaataaaaatggcatagctaaactatttctggaccatggaccttttgacagtctggaaatgcctttatacttcttctctgacaatgtttcaaatacatagtaaaatacgtaatatgacaaactaaagtatttcttgacgaaaatgtagaaaatctttgtgacctttggttaagaaaatctttctcaggacacaaaaacacaaaccataagccaaaaaattgacaaattggacttagtcaaaattgtaaatgtctgcacttcaaaagaactgttaagaaaatgaaatacaggccacacattgataaaagaaaaactgc

SEQ ID NO: 353876 - DNA, 411 bp, Homo sapiens
ttctctaaactattggaaacctacagatgccagaaagttatttcttaaactaaaacaaaatccatattcatataatttttatcaattggggcatcttttactccccaraagaatatatctcatgcttaactgacattctatggttttcagtgttatctgtcttctacatagtattggaagacagttacatcttccttagttggacacaaggcccacatgtaacctaagagctgagcccattcagctgtcataacacgtatattaggtttgtgttcaactcaaacctatcaagttatttttataagaaaaatcccacaagtcaagtcttgctcctcctgtacttatacagttggttattgaaaaataaaagaaaaaaatgtatcatttttgactctattttgttggttttat

SEQ ID NO: 353877 - DNA, 600 bp, Homo sapiens
tatttcttaaactaaaacaaaatccatattcatataatttttatcaattggggcatcttttactccccaaaagaatatatctcatgcttaactgacattctatggttttcagtgtyatctgtcttctacatagtattggaagacagttacatcttccttagttggacacaaggcccacatgtaacctaagagctgagcccattcagctgtcataacacgtatattaggtttgtgttcaactcaaacctatcaagttatttttataagaaaaatcccacaagtcaagtcttgctcctcctgtacttatacagttggttattgaaaaataaaagaaaaaaatgtatcatttttgactctattttgttggttttattctactgttccaggcttttacaaatatttggaatcccctttctgattcagaaaaactgatatttatttttgtatttatgtattatttactttttattttagagacaggatctcgctgtgtcacctaggctacagtgcagtggtatgatctcagctcattgaagccttaaccttctgggctcaaggaatcctcccaccttagcctcctgagtaactggaactacaggt

SEQ ID NO: 353878 - DNA, 496 bp, Homo sapiens
aaaaccaaacgaaatgattgaagcctgctttcaataacatactaaataattaggactaacctcacttctgaggaaacaaaaccatgccagagatgtgtgtgcacatgcgtgtgtgtgtttaaatttgtttttacttggtttgkgaacatcagagacctattgaagtaggtaagaattatgggacaaaaatcaaagaggaaatgggatttcaacagaagtaaacccagcttttatggctgcactttccccagcaggatctgtcagttctggaataggcaactgtccacccatcaacagagagggtgagcacagctttcaatagaaagacagttctagtgaaacaaaagttcgagttcatggtctggtgaggacttgggagcaagccaagtaaaccactcatactttgagttaggcccctaaagatttatactgtaagagttaagagtgaactagaatagtcctgaaatgagtaaagccccattttgaattatctcaa

SEQ ID NO: 353879 - DNA, 507 bp, Homo sapiens
tgtctttattccattttgatttgatttttgtatatgacaagagacaggagtctattttccttcttctgcataaggatatccagtttcccagcaccatttatttatttttartagaggcagggtttcaccatgttggccaggctggtcacaaactcctgacctcaggtgatcctcccgccttggcctcccaaagtgctgggattacaggcgtaagccaccatgcccagcctagatgatttcttactgctcattaacatcctcttctttcagattgaagaactgttagcatttcttataggataggtctagtgttcatgaaatccctcagcttttgtttgtctcagaaagtctttatttctccttcatgttcaaagaatacttttactggatatactattctaaaataaaatatttttcccttgagaactttaaatttgtcatgccatgccattctctcctggcctgtagggttcccactgagaagtctgctgtcacacatattggagc

SEQ ID NO: 353880 - DNA, 651 bp, Homo sapiens
cagcataatttactccattaagatgttatattttctcatttttcatacttatatggcattatgacttccaggttttaataataatgaagattgtcatgcttttgtctacaactgtcagtaaaattgggcataccaaattgttattacctccttaacagaacaaagtcatcttcaggratatcattatctttttatatttttttattagtttaaccctggattcatcttcataacttccttctcagatactaacttccttctcaggtaaaagcatacctttttttattgcatttcactttattgcatttcacagatattgagttttttacaaattgtaggtttgtgacaaccctgcatcaagcaagtctattggtgccatgtttccaacaacatgtgctcactttgtgtctttatcacattttggtaattctctatttcaaactttttcattattattatatttgttatggtgatctgtgatcagtaatctttttaagtcaattaataaccctacaatgacttctaaggaaggaagaatctcagatctctcactttaaatcaaaagctagaaatgattaagcttagtgaggaagccatgctgaaagccaagataggctaaaggtaggcctcttgtatcaaatagatagccaa

SEQ ID NO: 353881 - DNA, 485 bp, Homo sapiens
taatatacaagatcttggattggatcttgaaccaaaaaaagggcattagtgggaaaactgttgaaattcaaataaagtccatagattagttaacagtataactgttaattgctaagtttcaatcattgctatataaaatgttaacattaggaaaagctgggtgaggaaatcaccatatttaaaacttttctgcatgttcaaaattatttctttaaaaacaagaatttaaattttgaaatataaattattgacaatgatcctgattcaagggttattttactggtgtagaagcaaaagtataagggagtgagcccaaccaccattttatttcacacattcttcacaaattctggaaagtcttcagaatcttccatattttattttgatatcacaatctaaaagtaatataaattagtttactttaaaaatatrcattccttttataagtaagaatttaaactcattttgaagccatcatatcttga

SEQ ID NO: 353882 - DNA, 498 bp, Homo sapiens
ctattacatctggaattaaaaatgaaggttaccagttatagaaaagactttyggactttattcaaagcattttaataatacttagagaagattgatttattaaatgctagcaactctcattttaacattaacttccgaacttcaaggaggttttaaaaaattgaattttaatttttaatttttgtgggtacacagtaggtgtatatatttatggagtacatgagatactttgatacaggcatacaatgtgtaataatcacatcatggtaaatggggtatccaccccctcaagcatttatcctttatgttacaaacaatccaattatactcttctggttgttttaaaacatacaactaaattattattgactataggcaccccattgcactatcaaatactaggtcttattcattctttctattttttgtatccgttaaccatctccacgtcccccccaaccctcccactactcttctcagcctctggtaactatcctt

SEQ ID NO: 353883 - DNA, 624 bp, Homo sapiens
tgcctctactgaatgattacaagcaggacttctttttgaagcgctttccacagactgttcttggaggccctcgattcaaattaggctattgtgcccctccttacatatatgttaatcaaattattctttttctaatgccatgggtttggggtggagtcggaacacttttrtaccagttaggcatcctgaaagactattatacagcagcactttcaggtggattaatgctttttactgcatttgtcatccagttcacaagtttatacgccaaaaacaaatcaacaacagtagaaagaatactaaccacggatatcttagcagaggaggatgagcatgaatttaccagttgtactggtgctgagactgtcaaatttctcattcctggcaagaaatatgtagccaatacagtttttcattctattcttgctggattagcgtgtggtcttggaacatggtatctgctcccaaatagaataaccttgctgtatggcagtacaggaggcactgctctactattcttctttggatggatgacactatgtatagcagaatattctttaattgtaaacacagctacagagactgcgactttccaaacacaggatacttatgaaattattcctc

SEQ ID NO: 353884 - DNA, 548 bp, Homo sapiens
catgtgattgggtagatgccctagcagttctgcacacttcagcgtccaagatgacttgtggactgttttgtttggatctccattcctcaaaactataaatgcggccttaatttttttttttttttaattcttggctcttggctgtcttggaaatgctgactttgtatttaagtatttaggttttcaggtcgtaatagaaaaataattactgtgttcatattaaaagccaaagctttatttatttatttttaagatattgtgtccagagcaaaagtgtagtgtgttgaaagcatgtggaagaaaaccccggmtatacatatacttgtcttcaaggacttaatttgcaggtagaccctttcatagtttggtatcttcacgatttgatagaatatgggaaaacgtgctgttggtccatccatagtttttctcattgaagctcactcattgcgggtcagagtaccacattaagcatctcggaagcatcacttaccgccaagaagtctgagtttcatgtaattaagagtggaggctccagagtcaggaagtct

SEQ ID NO: 353885 - DNA, 541 bp, Homo sapiens
gtgtgtaaggggctgatgcgatattcaggtgcctatgcccagttggaaatacagaattggacctatattacatattgaccttgggagagaagttaagatgtagaatattcaataattttttttaaaagattgttgaagtaataagattggaaaagaatgtcaaggtttatatcttaatgggacaagaagaaaaccgaagaagaaaaggactataaaataaaaagattgacttatatggcttattgaaagtcactgtatcatagatcatgatatgcatcaaacatcatgtgaaaggrcatgtgatgagtagaaattttagagtgtctgagcatgttcgtgagatttgggttgggcaagttatgagttatgagaatattaaagacaggacgtgcccaatagttaattacagtgtttcatattgaaactttctttaatatagaaactttcatatcccataaacaatcataaatagaaccatcaaataaacaatatataatgtaatcatagctttgcgattggttggtctcaagctttactctaa

SEQ ID NO: 353886 - DNA, 541 bp, Homo sapiens
gtgtgtaaggggctgatgcgatattcaggtgcctatgcccagttggaaatacagaattggacctatattacatattgaccttgggagagaagttaagatgtagaatattcaataattttttttaaaagattgttgaagtaataagattggaaaagaatgtcaaggtttatatcttaatgggacaagaagaaaaccgaagaagaaaaggactataaaataaaaagattgacttatatggcttattgaaagtcactgtatcatagatcatgatatgcatcaaacatcatgtgaaaggacatgtgatgagtagaaattttagagtgtctsagcatgttcgtgagatttgggttgggcaagttatgagttatgagaatattaaagacaggacgtgcccaatagttaattacagtgtttcatattgaaactttctttaatatagaaactttcatatcccataaacaatcataaatagaaccatcaaataaacaatatataatgtaatcatagctttgcgattggttggtctcaagctttactctaa

SEQ ID NO: 353887 - DNA, 587 bp, Homo sapiens
ttatactcttttgtgctgttaatacatttttaaaataatatatattattttataatctttaaataataaaaaaataaaaacaaaaacattaaattggctgcaatactcctaccctccaaaaaattcaccaagccattaagtgatttagccactgtatagccagtatagaggtgtagtggatttttgtttttatagtagtacctttatccagaatatatttggaaaaattgtttttctgaataaagaaattaaagtattgatgctttcataggaagagaagggccatattattttttagagttgtattacagttgaaaattactgtgatttgtytggtatattggtaaattttgagctttgataatcagacagtaggatactagaccactgcagtattagattaataggtcatcttttgaaatctttaaaattagttcattttatatagtaaatgagaacatttactgaatttatgtatacattctgaagcttatttgattttttcaaatgcatgtaaaatataaattttagcatatgtgtaaaaatatattagtgtatatatacagatatttatgtatacaaaaatt

SEQ ID NO: 353888 - DNA, 633 bp, Homo sapiens
tattcccttatatcttttgaaacaatttcatgtcttcctttagttaaaccactaacccagctgagttcgtaaactttatccttagcgtcatcatgtactatgtaaattacttgagcaacttctgtaacagtatcatagcaggtcatttctttcatctgaagcttttctatttctgttttacagcttgcctggctttgccagtggcacaggcccaataaccatataaaacacctgatgagtcaatcatggaaaattgtgcactgtcattcatactgtaagaccctaacatgaaactgaaggcaaaagatctaacagcactgtagagtgtatatgcatgtacatacatgtccactctgtttgcaagatgttttagtggagtgttataaccaaagtcagatttaaagttggaaacttcttctcttgctatgtctgctaaagaacaagcatctgcctacaaacytgctgccagcattccaacattccgatccaatgtgctgatcaacattaataagtcgtttgttggaaactccttcataaagtttagaaagcactaattttttagaccccaaagacattgctatgtttatatatgatttcaatcactgtacgatttcccacagccttcatagcccc

SEQ ID NO: 353889 - DNA, 521 bp, Homo sapiens
gcaactcgccctttccaaagggtctcaacaaggtaagtatggaamtaagaaaatgagaattaaaacttccccattgtaatgctttttctttttttgtgtgtgaatagaatttctgggaggtaaaagttatttctcaaaatctttgtattcttcacattacctaatcagatgacttgcagttaattagttttcagaacaaacagtaaataaaatgggagttaagaaaagcatcttataataatcaattttagtgaatgtagtaaaactctctaaatagtatttacattttacacctgctgaggattaaggggcttttgtaagaatttcaggaatcagcaaatagaggagaaaaatattttaggaaggggactcttgcttcccctagaaatttatgccttctctgctgttgttaagactgaccttgtttatatgtgtgaattctgaacatatgattcagcttatttagagatggaggccttttctgtttatctaaaattacctatttaacctcatacttcagt

SEQ ID NO: 353890 - DNA, 575 bp, Homo sapiens
agtaaaaagcccaattatcctaacaaaacacacagatagaggcacacatctcctttcttagataaactacacaatccagagagttgagttcagaattccttccttccctttctgtgtgcctaaagggaaatagttttattgttagtttctatttatgaaagtgatatgttatagtttcctatgttctagcatcatctgacatattgagcatacaaatattaaataactttccttatgtcagagtatgaagtatgctattaagaaaaggatgttccctgacttacatatatatgtgtgtgtgtgtgtgtgtgtgtgtgtgtgtgtgtgtgagcacgcatgctctattcaccaaatccagctgcctttgatagtaatcactaaatagatactaagatcatccttatcaaaaacgccataggtttaaacatttaaatcaaaagatataatgttcatttactaaccattaatgtgcttcaaaaggaaaattgtaaataatataattattaccgartttttctttgcttgtagttcagcgaggtgaaattcagcttttgccctatcatctgaattcacag

SEQ ID NO: 353891 - DNA, 481 bp, Homo sapiens
tcctaatttgccagggacagattcaattaataccagttgttccagcatcccatgccactcaataatagttctggagttttcctttaaatgaatggttgctatcaagcattaacataaattgggatttgtttggtctctttactttcagaaacctrtaattaagaaaattatctcttcaacacgtttgaaatatcaaaggtgccttagacaactctaacagatacaacataaaaaatacttcaattggaggacaaatggagagtcctactgagtgaagcaaaatatccgcaagcaggaataactaggaatagctgactccatctagtttctggcagtagtggaaaaatattcaatgctgttgcacctgccaattacttcattaataatcagttgtgccatgtcctgtgcaatattgcaaagccacgagatggcttttttagtgaaaactgtagtaagctgtcagctatttataagtgaaata

SEQ ID NO: 353892 - DNA, 630 bp, Homo sapiens
taaatacaccaaattttctttatccattcatctgttgttagaaacctaggttgattctggaccttggctatttgaatggtgctgcagtaaacatgggtgtgcagatgtctcttcaatgtactgattttctgtcctttggatacatgtccagtagtgggattgcttgataatatggtaaatctatttgtagatttttgagaaacttcatagtgttcttcataatggttatactattttacatttccacaaacagtgtataagagttctccttcctttacgtcctctccagtatttgttatttttttaagtaatagccatcctaactggactaagatgacacctcattttatttttgatttgcattttcctgatgattagtgatgatagcattttttcatatatttcttggctacttgcatgtattctttcgagaaatgtctgctcagatcattggtcaattttttaatttgactctcttattttttgctgttgagatgtttgaattccctgtatattctgratattaatgtcccatcaggtcaatggtttgcaaatattttcttccattatgtaggtttttgtttcactctgttattgtttccttggctctgcagaagctttgtgtttgat

SEQ ID NO: 353893 - DNA, 575 bp, Homo sapiens
tatcagtggttttttattatgataaaaaacaggattcattcaccttcttaggaatgcatttgagtctacttaattatttagaaaatctcaaagctggaaggtcccagaaaggcatttatttatgttgtgcattgtctctttgatctaccacctactttaatgttgctrtaacaacattatctgtcaaaaaatttactactttgcactagcctataaaatacatgtgataaattataggtgagaatcacgtattcaaaaggtgtttattgactactgattgataacataaccacttcaagaagtagatattaattctgaaaaataaagcctaacaacttgcttacatgataaacctggggcattacaacttgttattaataaatcagaattgggtgatattacagtaacaagaggctagggagataacctgaccagcacgggaattaaccaacagctactccacatgtggccttacagggtctgccagattctcttctttctctcttcctggtatatttctttttcatggagtccatctccagtagctttgtaagacagggtgaaaggttgatcta

SEQ ID NO: 353894 - DNA, 575 bp, Homo sapiens
tatcagtggttttttattatgataaaaaacaggattcattcaccttcttaggaatgcatttgagtctacttaattatttagaaaatctcaaagctggaaggtcccagaaaggcatttatttatgttgtgcattgtctctttgatctaccacctactttaatgttgctgtaacaacattatctgtcaaaaaatttactactttgcactagcctataaaatacatgtgataaattataggtgagaatcacgtattcaaaaggtgtttattgactactgattgataacataaccacttcaagaagtagatattaattctgaaaaataaagcctaacaacttgcttacatgataaacctggggcattacaacttgytattaataaatcagaattgggtgatattacagtaacaagaggctagggagataacctgaccagcacgggaattaaccaacagctactccacatgtggccttacagggtctgccagattctcttctttctctcttcctggtatatttctttttcatggagtccatctccagtagctttgtaagacagggtgaaaggttgatcta

SEQ ID NO: 353895 - DNA, 575 bp, Homo sapiens
tatcagtggttttttattatgataaaaaacaggattcattcaccttcttaggaatgcatttgagtctacttaattatttagaaaatctcaaagctggaaggtcccagaaaggcatttatttatgttgtgcattgtctctttgatctaccacctactttaatgttgctgtaacaacattatctgtcaaaaaatttactactttgcactagcctataaaatacatgtgataaattataggtgagaatcacgtattcaaaaggtgtttattgactactgattgataacataaccacttcaagaagtagatattaattctgaaaaataaagcctaacaacttgcttacatgataaacctggggcattacaacttgttattaataaatcagaattgggtgatattayagtaacaagaggctagggagataacctgaccagcacgggaattaaccaacagctactccacatgtggccttacagggtctgccagattctcttctttctctcttcctggtatatttctttttcatggagtccatctccagtagctttgtaagacagggtgaaaggttgatcta

SEQ ID NO: 353896 - DNA, 496 bp, Homo sapiens
gtggaacctaatgcagcaacatggctacactggattgacccaagaaggcaagcaacagctccttgcagacccaaagcttgcccaatgaccctatcaaggcagcgagagtcctaccttcgcatgtcagagaagagaaagacctacrctggcttgacccagcaaggtaagcagcagctccacacagacaaaatgcctgcccagtgatccaaccaggcaaagaaactcccacttctgtgtattttggagaaacacagaggatagtgcttgatgcaggaggtcaaacagccaatcaatttacaatagacccaatctatagctccacctagacaggtgggcaatccacaatcacacatttctgggaagtatatccttgagttccaccagagcaacaactccatctaaccttgaatccctgcctgcaatgctccccaacttcagatcccaaatagcagaattgcccagtcagggaataaatcatgtgactttctgaccagaa

SEQ ID NO: 353897 - DNA, 496 bp, Homo sapiens
gtggaacctaatgcagcaacatggctacactggattgacccaagaaggcaagcaacagctccttgcagacccaaagcttgcccaatgaccctatcaaggcagcgagagtcctaccttcgcatgtcagagaagagaaagacctacactggcttgacccagcaaggtaagcagcagctccacacagacaaaatgcctgcccagtgatccaaccaggcaaagaractcccacttctgtgtattttggagaaacacagaggatagtgcttgatgcaggaggtcaaacagccaatcaatttacaatagacccaatctatagctccacctagacaggtgggcaatccacaatcacacatttctgggaagtatatccttgagttccaccagagcaacaactccatctaaccttgaatccctgcctgcaatgctccccaacttcagatcccaaatagcagaattgcccagtcagggaataaatcatgtgactttctgaccagaa

SEQ ID NO: 353898 - DNA, 496 bp, Homo sapiens
gtggaacctaatgcagcaacatggctacactggattgacccaagaaggcaagcaacagctccttgcagacccaaagcttgcccaatgaccctatcaaggcagcgagagtcctaccttcgcatgtcagagaagagaaagacctacactggcttgacccagcaaggtaagcagcagctccacacagacaaaatgcctgcccagtgatccaaccaggcaaagaaactcccacttctgtgtattttggagaaacacagaggatagtgcttgatgcaggaggtcaaacagccaatcaatttacaatagacccaatctatagctccacctagacaggtgggcaatccacaatcacacatttctgggaagtatatcctygagttccaccagagcaacaactccatctaaccttgaatccctgcctgcaatgctccccaacttcagatcccaaatagcagaattgcccagtcagggaataaatcatgtgactttctgaccagaa

SEQ ID NO: 353899 - DNA, 569 bp, Homo sapiens
gtttggcttcttctgagggctctcttgttggcttgccttctcactgttttcttatgtcgtcatttctgtatctgcatgtgcacccctgatatctctttgtgtgtccaaatggcctctcatagaaggacaccagttagtttggattagggcccacccaaatggtcttattttgacttaatcacttgtttaaaggcactatcaacaaatgcagtcaaattctgagatacaggggttggccttcaacatgtgaattttggagaaacacatttcattccacaacattgccatagtaaatggaacacaaaaaaaaggcagaggttgcaatcctagtctctggtaaaacagactttaaaccaagaaagatcaaaagagacaaagaaggccattacrtaatggtaaagggatcaattcaacaagaagagctaactatcctaaatatatatgcacccaatataggagcacccagatttataaagcaagtccttagagacttagactcccacacaataataatgggagactttaacaccccccagtcaacattacatagatccacgagacagaaagtt

SEQ ID NO: 353900 - DNA, 525 bp, Homo sapiens
tcacatgatgtgtgaccatatgatgtaaaggaactaaattcttagtaactcatctaactggggaatttatggagcacaaatacttgtaaaggaaatcaggatgagattccaactttgtcccaaaggatatgatatacatttattcttttctccctctcacagcrttatgagcaaaaacctgtctattatgacccttattacgctaactccttacctaaacactattcctttaatccattttgaaactaattttctgtaattccttacttaacatcattcctttaatccataaaattattttctcctgatattaaggatcatctgaaagaactatcacatgaagactgttttttgtctgtcctttttttttccttaaattttctgtggacatcctattcaaattagcaacttattttaccaggtgaaagtctgaattctatgatacaacacaaaacaaatcagaataccatccttgttttcactgagcttacgttccagtaataatgacaatgattgtaataacgg

SEQ ID NO: 353901 - DNA, 525 bp, Homo sapiens
tcacatgatgtgtgaccatatgatgtaaaggaactaaattcttagtaactcatctaactggggaatttatggagcacaaatacttgtaaaggaaatcaggatgagattccaactttgtcccaaaggatatgatatacatttattcttttctccctctcacagcgttatgagcaaaaacctgtctattatgacccttattaygctaactccttacctaaacactattcctttaatccattttgaaactaattttctgtaattccttacttaacatcattcctttaatccataaaattattttctcctgatattaaggatcatctgaaagaactatcacatgaagactgttttttgtctgtcctttttttttccttaaattttctgtggacatcctattcaaattagcaacttattttaccaggtgaaagtctgaattctatgatacaacacaaaacaaatcagaataccatccttgttttcactgagcttacgttccagtaataatgacaatgattgtaataacgg

SEQ ID NO: 353902 - DNA, 592 bp, Homo sapiens
attaatgatctctctactttcttcagctcttttcttctgatcacataatagaggctaatttgcaagaccctccttagcatctttaatgcctgtaggattttgaaattagcagcaggtctaaaatgagaggaatrgtgtgtgtgtaggaaagggtcaattggaaaatgtttcccattgtctaatttttctatctgaatatcatgtgcctactatcctatatataaaatatatacttaacatcaaagaacatgatgtcttcattcaaaactattgtcttcatactattcctgattttatgttggattttgtgaagtatctgcttgaaaccttggttccatttgggaaattcctcaatgtgctaaaatgaaatataactcagatctgttttattttttgcacagactttgaaaatgctgctagtgctgacttcctgatggccacagtctcattaaaatttttgatcaccacagtctatacttaccagttagtcaaatggtgtgaagttcatccttcttgaacacaaaaatattaagcaaatcacgaaaaactagcacactattagaagaactagattaaacagcaagacaaccag

SEQ ID NO: 353903 - DNA, 592 bp, Homo sapiens
attaatgatctctctactttcttcagctcttttcttctgatcacataatagaggctaatttgcaagaccctccttagcatctttaatgcctgtaggattttgaaattagcagcaggtctaaaatgagaggaatggtgtgtgtgtaggaaagggtcaattggaaaatgtttcccattgtctaatttttctatctgaatatcatgtgcctactatcctatatataaaatatatacttaacatcaaagaacatgatgtcttcattcaaaactattgtcttcatactattcctgattttatgttggattttgtgaagtatctgcttgaaaccttggttccatttgggaaattcctcaatgtgctaaaatgaaatataactcagatctgttttattttttgcacagactttgaaaatgctgcwagtgctgacttcctgatggccacagtctcattaaaatttttgatcaccacagtctatacttaccagttagtcaaatggtgtgaagttcatccttcttgaacacaaaaatattaagcaaatcacgaaaaactagcacactattagaagaactagattaaacagcaagacaaccag

SEQ ID NO: 353904 - DNA, 592 bp, Homo sapiens
attaatgatctctctactttcttcagctcttttcttctgatcacataatagaggctaatttgcaagaccctccttagcatctttaatgcctgtaggattttgaaattagcagcaggtctaaaatgagaggaatggtgtgtgtgtaggaaagggtcaattggaaaatgtttcccattgtctaatttttctatctgaatatcatgtgcctactatcctatatataaaatatatacttaacatcaaagaacatgatgtcttcattcaaaactattgtcttcatactattcctgattttatgttggattttgtgaagtatctgcttgaaaccttggttccatttgggaaattcctcaatgtgctaaaatgaaatataactcagatctgttttattttttgcacagactttgaaaatgctgctagtgctgacttcctgatggccacagtctcattaaaatttttgrtcaccacagtctatacttaccagttagtcaaatggtgtgaagttcatccttcttgaacacaaaaatattaagcaaatcacgaaaaactagcacactattagaagaactagattaaacagcaagacaaccag

SEQ ID NO: 353905 - DNA, 554 bp, Homo sapiens
ttcctgtagctgtgaaagaaaaaaatcagtgagcacaaraaaccactccttacgatggctcttaaaactgctgcctgaaaatgacccacaccacatttgcaaatacttaattggctaaagaaagtcacatgacaaagcctgtgcacaacagggcaaagaaatataatcattcaagagaatagtgaatatatagagatgataactcagccttccacaatgaactagccttctctggaatgcaatataaagtatgaatgtctgtgagaacatggttagaagcacagtgtgtttgagtaatctgatgaggaaagagaaagtgagaaaagaaacaatgtgcttcaaaggtgcttgctgtgtggcattgatgtattcatgtatggggagagtgagatagagactgtggaggtaaagaaagaaaaaatgagagactttttagcagtttctgtgtatggcgtacttaggaaagggagaggtgtccacggagaaatttatgaagttgtccaggggagttgtttccattcagctctcctaatttcaccatcagaattaattat

SEQ ID NO: 353906 - DNA, 557 bp, Homo sapiens
acaaggtttatttctcactcgtgcaaaatgtccatcagaaatatttcctgtagctgtgaaagaaaaaaatcagtgagcacaagaaaccactccttacgatggctcttaaaactgctgcctgaaaatgacccacaccacatttgcaaatacttaattggctaaagaaagtcacatgacaaagcctgtgcacaacarggcaaagaaatataatcattcaagagaatagtgaatatatagagatgataactcagccttccacaatgaactagccttctctggaatgcaatataaagtatgaatgtctgtgagaacatggttagaagcacagtgtgtttgagtaatctgatgaggaaagagaaagtgagaaaagaaacaatgtgcttcaaaggtgcttgctgtgtggcattgatgtattcatgtatggggagagtgagatagagactgtggaggtaaagaaagaaaaaatgagagactttttagcagtttctgtgtatggcgtacttaggaaagggagaggtgtccacggagaaatttatgaagttgtccaggggagttgt

SEQ ID NO: 353907 - DNA, 623 bp, Homo sapiens
ttgactcagtaaaatgagtcgactaaattcccctctccagtgtaggtgggcctcattgaattttttgaaggcctaaattgagcagcaacaatamcaacaaacactgagtaacaggatttgctctctctgcctgactgaactggattcaagtcttttcctgcttttagattcaggcttacactggaactatgccatcatctcttattgggtctcccagcttgctaactgctaacttagcctccataacttcatgagccaatgaatctgaattatctgaagaacctagactaatactaaatgtatgtgggatactgtgtctggagggacagttcacataaataagctgcactcattagactccattgtaacaaattaccttttcttgagcaatatctgtacctacttttcttcctttataagactcctctctctaccttttctcttctcttcttctctttttttagttcatctagcaccgtggaatgcctctgcccagggactggaagccaggaattctaagagcagtggtttccaaacttgactaatcaaagcagctgggttgggggacattttaaacaataaaaattaaacattcctaaatttgtaaaatgctgttggccaat

SEQ ID NO: 353908 - DNA, 597 bp, Homo sapiens
ccaactaacatcaaaactgatgggacttttaagctaaatcgtatcccagttttcaatatttgagctcttaaaatgtaattttgatttttaatagtggagatcaatactgatgctctggtacatgcattacatagttgagaaaattcttcaatcttttctgtttctcaaagttgtttaatttcacacgtttcctgacttcctaggctgcattgtaactctccagtggaagacatgtttgtctcattaataccataaggaagtttcagataaatgtactcaatttaaaagtgaggaacttcgaaaactgacactgatatctcctgaaagcacttaaccactttgttgagaagctagaatcaaattgtagtctgcaccaatctttttcctttcaatgcccagagcatgttctgtaccacctactttgatttttgatgagatgttgccttagattttctccaataatatcctaacagctaaatcacatatacttcatagcacaaaaaagaaatactggaaaaatcacctctccattatctattacactttgaytcaaatttaattgactatttactatctatgctaaaaaaattgtaagcc

SEQ ID NO: 353909 - DNA, 458 bp, Homo sapiens
atgtcatttggttagagtccttgaagagcaaaatcaatagtgccagtggattccagttttctctttttacttcactcttcatctaccccagctctctgttacccatggtgaatgtttttctgcaaccgtacagacacaacgtccatgaaaactcaaccaacttcctgtgaaattgaatatcacaatgatgagaataaatatgtatttggtctctgcccttggttcctggyacacaaaatccttggaatctccaaagtaataactgttttttaatatgaaatgattaatggctaagggctctttggctagccatgggatgggggctagttgccaggggaaacaaccatgtgattagaagtttagaactttcagtcccatcccctgaccttccaggaggggagagtgatggaaagttaagttagtcaccaatggccgataatttaatcgagcatgtctac

SEQ ID NO: 353910 - DNA, 385 bp, Homo sapiens
aatgggtcagaagagaacctttgggagtggtgaaatgttcaaaatcatgattgataccatgattatatggatgtatacattaggtaaatttatcaagctctaaaaatgattatgtcttattgtatgtaaattacatccctataaagtatatttttttaaagtggctacttcaacagttctatactaggaacacaacttatttttctatttcaactaaccaaattcaattcaataagtatgggggtgatagtagatgatagttcccacatgccaacccttcaaacaaaaataaaacttttgaagtatrtgtcattattctataagtgaagcattggagactaagcaatataagttatctcacatgaaatcacacaattcctgtggg

SEQ ID NO: 353911 - DNA, 625 bp, Homo sapiens
gcaagtaagtaacactataggtattgtagcccatgaataaaaakaaaaaataaacttctatttcagtacagttaacctttaacaagtgtttccaaatgttaacattcctttcttctttgatgtacaaatcctgctttatttttgttttttatttttcagttactacatcattagagggccaaacctgtacagttgtcccttcttaagagacccagtggatgtctgaaactacaaataatactgagcctgacgtccatcaattgaaacacgtttctgttcatgtcttccacctttaaatgtagtgactcttccatttttactaagcatttatacatgtactatggtcataatttttgcagtttgagttatgacagcaaaactagcacaaatttcttttcttcataattttacacatagtagattcattcttactataaatcttaacaacctcaacatatggtgtttttactttcctgactaagtcaagaacttttaccttttcatgtaaagaaagcactttatgggttctctttgacatatccgaattggcagcatcactattcttgtgctttggggccatcattaagtaaaataagtgttacttgaatgcaagcactgcaataat

SEQ ID NO: 353912 - DNA, 608 bp, Homo sapiens
cacagtacaggaaacaatgagtaaagttgaaagacaacctgtaaatgggaaaatatattttaaactatgcatctgacaagggtttaatatccagaatatataaggaagtcaarcaattgcaaaataaataaataatttagtttaaaaaatgggcaaaagatgtgagtagggcatttctcaaaagaagaatacgaacgttcaagtatatgaaaaaatgctcaatatcactaattgtcagggaaatgcaaatcaaaacttcaatgagatattacctcaccccaatttagaatgattattatcaaaaagacaaaaataacaaatattgatgtagatataaagaaaggagaacacttatactaacttgtgggaatgtaaataatcattataaaagttctgcaaaaaactaaaaacagaactacctatgatccagcagtcctactgctacgtatatatatatccaaaatataggaaatcagtatatcaaagagatatctgcacacccacatttactacagcagtatttacaatggccaagatatgaaatcaacctaagcatccatcaacagataaatggataaagaaaatgtggtatatatacctaacaatac

SEQ ID NO: 353913 - DNA, 608 bp, Homo sapiens
cacagtacaggaaacaatgagtaaagttgaaagacaacctgtaaatgggaaaatatattttaaactatgcatctgacaagggtttaatatccagaatatataaggaagtcaaacaattgcaaaataaataaataatttagtttaaaaaatgggcaaaagatgtgagtagggcatttctcaaaagaagaatacgaacgttcaagtatatgaaaaaatgctcaatatcactaattgtcagggaaatgcaaatcaaaacttcaatgagatattacctcaccccaatttagaatgattattatcaaaaagacaaaaataacaaatattgatgtagatataaagaaaggagaacacttatactaacttgtgggaatgtaaataatcattataaaagttctgcaaaaaactaaaaacagaactacctatgatccagcagtcctactgctacgtatatatatatccaaaatataggaaatcagtatatcaaagagatatctgcacacccacatttactrcagcagtatttacaatggccaagatatgaaatcaacctaagcatccatcaacagataaatggataaagaaaatgtggtatatatacctaacaatac

SEQ ID NO: 353914 - DNA, 536 bp, Homo sapiens
catgaatcgcaaaacaagcaatactccctgcccttatagaccgtatttttttttgagtgtacagaaaatggcactacaaataaataaaatataagacattttagatggtgacagaagcccaaaagaaaaaggaaattattgatggtggagagaagaatgacacaatttttaatagaccggccactgacacagtggtaaatagttgttagacagcaagccatgcaaatatgtgaagagaaagctgtaaagcaccggaaactagtacaaagtcgctgaggtrggatcatgcctagtatgttggttgagcagcaatgaagccagtgtggctgagttgagtgcgcagaggcagaatggaatggctgcctctagggagtgaagggacagcattgaaggatattgtacaggtttattcttttggtctaagaataggagaaattggaaagttttaaacaaaagatgaatgagatctgatctatattttaacatgaccattctggctgctgatttgaaaatggcaggaacatagtaagaccaac

SEQ ID NO: 353915 - DNA, 536 bp, Homo sapiens
catgaatcgcaaaacaagcaatactccctgcccttatagaccgtatttttttttgagtgtacagaaaatggcactacaaataaataaaatataagacattttagatggtgacagaagcccaaaagaaaaaggaaattattgatggtggagagaagaatgacacaatttttaatagaccggccactgacacagtggtaaatagttgttagacagcaagccatgcaaatatgtgaagagaaagctgtaaagcaccggaaactagtacaaagtcgctgaggtaggatcatgcctagtatgttggttgagcagcaatgaagccagtgtggctgagttgagtgcgcagaggcagaatggratggctgcctctagggagtgaagggacagcattgaaggatattgtacaggtttattcttttggtctaagaataggagaaattggaaagttttaaacaaaagatgaatgagatctgatctatattttaacatgaccattctggctgctgatttgaaaatggcaggaacatagtaagaccaac

SEQ ID NO: 353916 - DNA, 488 bp, Homo sapiens
ggtttggccaacgggagatacagacaggagatcacagtgcaggaaaaaaaaagtttgagattcttcttccttgttccctccttgtttcagtgccccatatacttgaaagtactcctcagttcttctctgtaactcctatgaagcccatcatcttcctagattcagctctcacagaagatatgctaatgctatttcttcactccttttttcayccccagagttttctctgttgcttgtcactggttgcctttacaccctttagagattccccaggcctctcttgaacctcggaggtggaggctgcagtgggctgaggtgagtttgcaccattgcactccagcctgggcaacagagtgagactgagtcacaaaaaaaaaaaaaaaaaaaaatcccttaatactgcccatgtctctctaagtagtaccttcattaaatctcatttgaaccatccggaataaattctgttgccttccagaacacaaacgata

SEQ ID NO: 353917 - DNA, 454 bp, Homo sapiens
tagctgaatgcagccgtgtaatgggtgctgggtgattatctgtaaagtatggaaagcaagatgagaatctctttttactccttcccttactgttttctaatctaattgacaaagagctcagggaagtgcagtaaaaattcttctctagtcagtgggtgaatttttttttttttaatgtgagaacaatcaaaaagtatgaaggagaatragctggagtaacctcgatttaagaaaacagtaacactgtatattaaaaaaaaaaagaaagaaagaaaaagaaaagtaacagagataaagtgaggggagaaggaacagatggatgagaccatcagatttcactttccgggaaggaaattcattagtacagtaattcagctctttaattatgaatgggtctatttaattctccaagtttactactgatttcctgaatagcatatgtttctgagttcaa

SEQ ID NO: 353918 - DNA, 559 bp, Homo sapiens
tggttgaactagaaaagaattacactttgccagctacataaataagtggaaatattattcaggttctaaggaaagaagccctataaaaaatttgtgctctttataaataattaaataataaaccattaccatatagaatgccagctagctgagaaaaatcatggtttaagagaaatttcartgctataaaaacgcccatgaatatgttctaggtcaaacataaataaccaaagagtataaacagcacaaccccaactttgtcaaaatatagaaacccagaacacaaaacaaacagaaaaattttaacagcgttaatctcttggatggggaaattttactcttcgtacttttatgcaatttccaaactttctataatgtccatatattaatttcaaaacaagaaaagcaaagctatataggctctctatcttttgagccttctatatttcactccacttttaagttagtgtctattttctttaaaaataaagaaaaatttaatatcgtttactgcctcttctttggttcattgaaatctgagccaaagctcaaaacctag

SEQ ID NO: 353919 - DNA, 559 bp, Homo sapiens
tggttgaactagaaaagaattacactttgccagctacataaataagtggaaatattattcaggttctaaggaaagaagccctataaaaaatttgtgctctttataaataattaaataataaaccattaccatatagaatgccagctagctgagaaaaatcatggtttaagagaaatttcagtgctataaaaacgcccatgaatatgttctaggtcaaacataaataaccaaagagtataaacagcacaaccccaactttgtcaaaatatagaaacccagaacacaaaacaaacagaaaaattttaacagcgttaatctcttggatggggaaattttactcttcgtacttttatgcaatttccaaactttctataatgtccatatattaatttcaaaacaagaaaagcaaagctatataggctctctatcttttgagccttctatatttcactccacttttaagttagtgtctattttctttaaaaataaagaaaaatttaatawcgtttactgcctcttctttggttcattgaaatctgagccaaagctcaaaacctag

SEQ ID NO: 353920 - DNA, 480 bp, Homo sapiens
gggtctcaatgtcagctgagcaatagcagcaagaccctcaggtgctcactgaaagcatcttcatggaatgtcggataatgccatggaattctttgtagttatcgtttttaatatgagtttctataaatcaatccttgagttgccctggttttcaaacattcatgtttaggtagatttaacattaattgatcagcaatcctgattcagcagatctggggaacacacccttccatgagcactccacagcttctaagtgtggtcctcacgccaccttttacgaatcactgttgagctgccgtatgggtttcttagacactygtggaaattgtaccaaagcacattttgaaacatttgcctcagaattatacgaaagctgttgaacgaaaggtgattttggtttcacttttccccactatggaaaagaaaatggagtataatgtcaacctttacgaagccctcactatgtgccaggaactgtgt

SEQ ID NO: 353921 - DNA, 480 bp, Homo sapiens
gggtctcaatgtcagctgagcaatagcagcaagaccctcaggtgctcactgaaagcatcttcatggaatgtcggataatgccatggaattctttgtagttatcgtttttaatatgagtttctataaatcaatccttgagttgccctggttttcaaacattcatgtttaggtagatttaacattaattgatcagcaatcctgattcagcagatctggggaacacacccttccatgagcactccacagcttctaagtgtggtcctcacgccaccttttacgaatcactgttgagctgccgtatgggtttcttagacactcgtggaaattgtaccaaagcayattttgaaacatttgcctcagaattatacgaaagctgttgaacgaaaggtgattttggtttcacttttccccactatggaaaagaaaatggagtataatgtcaacctttacgaagccctcactatgtgccaggaactgtgt

SEQ ID NO: 353922 - DNA, 649 bp, Homo sapiens
aagttgtagacaccataacactttaaccctgaatacttctgcatgcaaattctaagaatagaatattctgacaatattattacatttgagaacattaacaaaaaattcttagtttgatctactatccagtctatattcaatttccccaatggcccacaaagggtcttagggtcttctgtactttggtttttgtttttttttcttaaccagattccatcaagttttacacactatatgtggttgtaaataatctttacttttatctcctaatgaaggaaggtgggtttatttttagttcatcttttcatgaggcttcattcagagataagaaatccatttccccactgtgcatcagcccmggacgtcacttgttttccctgaattagcattgcagccaaaggcccaaaggagcaggtggcaatcactgcaccctccaacccctatctcaggacacctgggcacaaggtggtgctgtcattctgggggtcaatttcctcttccgttttggcccttggatattttcatttcatttcctgagatctcagctactcactaagaattcaatatttaattaaatatttctaagtatttcataggtagccctccccactgccttgtctgtgacctcttttttttacccccagcacct

SEQ ID NO: 353923 - DNA, 581 bp, Homo sapiens
tttatcatgattaaatccacatgtgcccactttaaattttttttttactgtcaattactttaaatccttagttccaaactaaagaagtgattttgaagaaataggacctacacctgcctatacccagacattctactctatcatcatctatggttattgacagcatggcctagacctgcagagggcatccattccagtaagctaatctcagatcaattttcctatagaacatagattgttgatattctcagatgcagaggaaaaatacatttttgttttattaaaattgccaggtcagcagccctagctcactttgtatcctaatacacacaaaccaaggcatgcacttaattttttattatttgaatcattatgctattatttcacaatagcatagtgcctctgagctttgcacttaaatggcgtctgagttcaaaagcacatcatactgagtttgatcctcaagsctccaaatcagaagtctccccgggttggacacaagagcagcgcactcattttagcagctgcacccatcctggagcgcaagcttgccttttatcaggcactgtgaatgcttgaat

SEQ ID NO: 353924 - DNA, 609 bp, Homo sapiens
atttagccggtatataatgtgagatagaagttaatgatattcattgccaggtctgagaacattccctttcatttgaaggatataaacactgaatatttatattttaaagaaaaggatgagttacgctatatcacttttcaataattttatatgaattcaataaacagattatgagtatcataaatctcattttattaaaataatgattatctgctgggtaaagtgacaggttatttaatcaaataaggaaaatatcaatgtttgatctataacacctttttcattgatcatggtgttccatttgtattggtatctatggacctaattttatgatctcccatctatactaaggcacatgggagaacgcactcaagcatcaacagctcacagacatgcctcaccgggaggtgaagtataatagcaaggaatcagaaagcccccattagaaaacctactcctgcctctctgggtccagaggtgagacacacrtgttccccaggcctccttctcctctcacatgtgcttttacagtttcaggattctatttgctttccggaagtccttgggttgcagtgcatctctctttcctatgagccatctccatgtagg

SEQ ID NO: 353925 - DNA, 570 bp, Homo sapiens
cagtattcctattactactatgaccacaattatagcagataatgaagtttttattcactctattcagcttgaatgggaaattctaaggatcacacagaccacctttaagtgaaggttaagagatttatcagaaagaccagctgttctttctacctgcccagtgaccttgtgatgtggggaggggccggtgcttgaaataacgattggccaatgagccaggcatgccactggccatggtggttggttacagagaggcaggtgacgaatgagaccaagcacagaatttttcctagaaaagaagcccaagctggcaggacgtaagcctgggggtctgaaacttggggagaagctacctgggaaagcatataaactctagaaagggcagtacatttaagctcttttgttcactgttgtaacaccagtgcctggtatatgatgcaaaatgcccggcacattattttagtgttcaagaaataacagaataaaaatatattaaatgaatgaatgaagtcaacacrgagcgaagcagagctgagaacaggaggaattcctgtttctgaaacgtcttgt

SEQ ID NO: 353926 - DNA, 549 bp, Homo sapiens
ttgtgccccttcaagtcctagttctctctatatatgtgaatttaccttgactattctgttctctgctctcattggtgcttttggcaccttgccttccatcccaatatcccaggactaacctggtgataacattagatgggaagcaagggctgctatagcaggttctctgatcttgtttccattatggccaggagctcccaccccttttccactggggagatgttatctaagagaatactcctggtcattacattacatacagaaaacaaagatcagaatgacaccagatttcttrctggaaacatacaagccatacaatagtaaaagaacatccatgaagtgctatcaaaaaaaagctgtctacctagaatgctataatcaatggatatattgttgataaataatgacaaaacaaatatatttcaaatatataaaacctgatgaattaataaatggtaggcatgcactacaagaaataataaatgaagggggaagaaaaactatatgatatggaaatctagatctacagaaaggaatttttaaaactgg

SEQ ID NO: 353927 - DNA, 621 bp, Homo sapiens
atttagtttttagtcaaaatcaattttttactctcattttcattttatgcatgttgtcataagtgggaaaaaagactgtcttgtcagaatgattgaatcttccatgaaatgaaagccatttcctgaatactgtccattcaagagaataaaaaggaaggagagtgccatgagcttcagaaacttggcctttacagttatggcaattggaacacttctaccaatctgtatgttttcttatttctgaaaattgtgtaagtaatataagacyaataatgctggcaaatctattgcagtctgataatttgcattgcagtgtgacattggaagacagagaatccctgcctaaaatttacataatcacaactattcaacaagctaattctcaacacaaagacaatttagaaaatgtaaaaaattaatgtctgtattattttaagccccactatttctgctttgtaaaacataaagacatgctgtttcctgggaagttatgtaaacagatcaaatatttaagtatttgattactattaaatatctgggtgatatggtttcactgtgtccctacctaaatctcaacttgaattgtatctcccagaattcccacatgtgttgggagggacc

SEQ ID NO: 353928 - DNA, 603 bp, Homo sapiens
attcttttttcattattatttttcttgtaacatttttaataaatcataaaaaatcataataaaaattaaaaactacttaagatttaacttaagaaaatactatatatctaaatttgtggtatgctgataaaatattgggaagtttatattcctaagcacttttattagaaaataagaaaaactgaaagtaatcatctgatatggtttggctgcatccccacccaaatctcatcttgaactgtggttcccataatttycgtgtgctgtgcaagggacctggtgggacgtaattgaatcatgggggcgggtttttcccttgctattctcatgatagtgaataagtctcatgagacctgatggtttcataaggagtagtttccctacacatgctctcttgcctgcttccatgtaagacatgcctttgctcctcttttgccttctgccatgattgtgaggcctccccagtcatgtggaattgtgagtcaattaaacctctttttctttataaattacccactcttgggtatgtctttattagcaacatgggaacaggataatacagtaaactggtataagaagtggggtgctgctataaggataccc

SEQ ID NO: 353929 - DNA, 586 bp, Homo sapiens
ctaacctagccctaaaactcaagcaaatgacaacagcaaacccacatagtctatgacgtaacatgcccctgaagacctgccctccaccttacctatttggcatatgtcataatgcagcgagagcagaataayagaacagaaaaacgagagtggattaaagtaaaagatttgtttctgtggtaatcgagaggcttctaaaacatgtccactgcccagtagtgggtgcattccagcggaaatccatcatggatggtgtgcgaggcatctcgggccttaggcttatggagatttgttgaatgaatattacatgaaaagatatagtgcatcactgaactgtaggcctgatttttctgagaaatgtttaaaatgtattcccaaagaactgccatataaaaacagggggcttatagcattacaacagaagaaacaaaatataaataaaacgggtctgtcatcattcatgaccttcacgactggcttctggcttctcaaggtggattttcctgctgggacaagctactatatagtcaatgggctaagacacagtttcagacgcccattcgggctcaattctcattacctagtg

SEQ ID NO: 353930 - DNA, 586 bp, Homo sapiens
ctaacctagccctaaaactcaagcaaatgacaacagcaaacccacatagtctatgacgtaacatgcccctgaagacctgccctccaccttacctatttggcatatgtcataatgcagcgagagcagaataatagaacagaaaaacgagagtggattaaagtaaaagatttgtttctgtggtaatcgagaggcttctaaaacatgtccactgcccagtagtgggtgcattccagcggraatccatcatggatggtgtgcgaggcatctcgggccttaggcttatggagatttgttgaatgaatattacatgaaaagatatagtgcatcactgaactgtaggcctgatttttctgagaaatgtttaaaatgtattcccaaagaactgccatataaaaacagggggcttatagcattacaacagaagaaacaaaatataaataaaacgggtctgtcatcattcatgaccttcacgactggcttctggcttctcaaggtggattttcctgctgggacaagctactatatagtcaatgggctaagacacagtttcagacgcccattcgggctcaattctcattacctagtg

SEQ ID NO: 353931 - DNA, 660 bp, Homo sapiens
tatttaaatacttataatttaaaccaagaatttaaattgctgttacctctaggagactcatttatttctaggcactgtcatgcatactgggcattattatgcttttaatttttttctaaactgatggggttaaaaatgttgtgcattattaactcaacatgcatttctctgacaatggagttcaacatctttttatatgtctattataacttttcaaattgccttttctatggattgagtctttactaaatcatgcttgtttgcctttytatcaatttatagaatcctagtgatgtacacactttatttgtatatgttgcaaatatttttccagtacattgcttatctgtgactgtttttgttatcatttgacatttaaaaaaatgtattcagataggtcttttattagcctatttcatagactctttgcttttcaataatacaaatttatcccgaaggattttcaaatttttcatgtttttagagatttttttaacattttattatgtatatggaataagcaggagtttagtgttgttttcttttagatgaatagctaattatgccaataccactcattaagcaatccatgctcccctcctgaattgaaatatcccttttgtagtatattgtttctatatacactcaattttatataga

SEQ ID NO: 353932 - DNA, 618 bp, Homo sapiens
ttgcactatcttaactttgacactaaatatcaagatcaattttrtggatgacaaaaatgcataaggctttgggatgatagtgaaccaatggggcaggtaaatctgctctaataaaggtttcattctgcctatgtattaagttaaatatatactgcagtatattttaagtgctaagtaaattatataaataatgaagtttggggaaaaaaagaagaaatgagatttatttgaggcaatctagtttttaattaattttaattaaaataatatatgacctcatccaacttaagggaaataacttaaaattattacaaataatatgagagttcaggaagatactccgttatagagtagatcttcaaaaagtaataaagtagtagacgtttaataacgtgactgagaatgtaatgaaaaaatcatacaatttcagcaattaattaattaatagctataggaaaacaacagaaaatgtagaaactataagtgcaatgctaaaactttttggatatgttttcttcttaattttgtattatgtctcatgattctggatagaagaaatcgttaaattactccacatttagtgtaacatcatcctacatttcgacaggttttttaact

SEQ ID NO: 353933 - DNA, 554 bp, Homo sapiens
ctaatatgtggatgaactatcttactgttgcatcttaaaacccatgtgtgcttggtgctacatgtatgtattcttttgttgttaaaagcactgttctatggatttcttttaaattagtcttactaattatgctgttcaaatattctaatttttgaaatatacttttctatcaattattatagagkatgggtaaaaatctactatgattgtggattttgtggatttgtgcattgatcctttaaattaaatgaatgttggcattatatatttaagtctgtgttattaagtttatacaagtttaaatttgttatatcatctttctgaatggcagtttatcaatatctcattactttgtcaggtctatactctttcaatacaattaaaacagctttttaagttttcacaaatatttttctggtatagattttttcatccttttgttttctaccttttgtatttttatggttttaattgtctcttcaaaatggcttatagctttcattttttcttaatccagtttgataatttcagacttttattagagtatttagtct

SEQ ID NO: 353934 - DNA, 587 bp, Homo sapiens
atctgaagagtgtaaaaagcaaaaagacatacatagaatgtttttgttaaaaaaaggttggcatttaattcagttgttccaataacacacaaactttgtttttgttgggcacagaacacttaccatgaaatctattcccaaacayattttaagtgtacagtgcagtattgtgaactttgagtataatgttgtgcagcagatgtctagaatgtattcagcgtgtaaaactgaaacttcatgtctgttgctcagcgatttcccagttcccctcatctcctggtaaccaccattcttctcgtcgattctataactctggccaatctagatgcctcatctcagtggaatggtacagagcttgcccttgtgcagcttgctcgttctgcttagcacactgtcttcaaggttcatccctgtcagagcatattacaaactctggctctgtaggggtggataagattaactttcttgagttagttctattcattgaaagtatatgcaatgcccatagtttcccttaggggccatcagaaaactttaaccatcaatactgcattcatctcccaataaaataactagcaactgatcac

SEQ ID NO: 353935 - DNA, 610 bp, Homo sapiens
aaggaaaatctacaatcataggtaaagattttaacacaactctctcagtaattagtagaaccagttaggaattatatctatctgttgaattgactacttcatcattataaaatacctttatgtctcgttatgcttttagtcttaactcatttatacctgaggtggcaactttttgaatttgaaaaatcagacctaggcaatgatcttgagcagcaggagataaataactcccacatgcttagcgttccaataatgaaacayttggcataaatgagtttaagccctattttgcatgttattcaaatatttacaccagcttttttctgcttatttgttgcatggtatatattttcccatccttttgctttcaaatgtacatacttgtaatgaaagatatgtctttatgggagcttacatttgttttttttaaattcagcctggtcattaatttaaaaactgaaatatttgactcatttacatttaatatgttttgttttttttttccttcatcatgactttttttttaaccaattaggtacttaaattttttttcatttccccctatttacttgttaattacatagcatttaatattattgttgaactcaca

SEQ ID NO: 353936 - DNA, 610 bp, Homo sapiens
aaggaaaatctacaatcataggtaaagattttaacacaactctctcagtaattagtagaaccagttaggaattatatctatctgttgaattgactacttcatcattataaaatacctttatgtctcgttatgcttttagtcttaactcatttatacctgaggtggcaactttttgaatttgaaaaatcagacctaggcaatgatcttgagcagcaggagataaataactcccacatgcttagcgttccaataatgaaacatttggcataaatgagtttaarccctattttgcatgttattcaaatatttacaccagcttttttctgcttatttgttgcatggtatatattttcccatccttttgctttcaaatgtacatacttgtaatgaaagatatgtctttatgggagcttacatttgttttttttaaattcagcctggtcattaatttaaaaactgaaatatttgactcatttacatttaatatgttttgttttttttttccttcatcatgactttttttttaaccaattaggtacttaaattttttttcatttccccctatttacttgttaattacatagcatttaatattattgttgaactcaca

SEQ ID NO: 353937 - DNA, 610 bp, Homo sapiens
aaggaaaatctacaatcataggtaaagattttaacacaactctctcagtaattagtagaaccagttaggaattatatctatctgttgaattgactacttcatcattataaaatacctttatgtctcgttatgcttttagtcttaactcatttatacctgaggtggcaactttttgaatttgaaaaatcagacctaggcaatgatcttgagcagcaggagataaataactcccacatgcttagcgttccaataatgaaacatttggcataaatgagtttaagccctattttgcatgttattcaaatatttacaccagcttttttctgcttatttgttgcatggtatatattttcccatccttttgctttcaaatgtacatacttgtaatgaaagatatgtctttatgggagcttacatttgttttttttaaattcagcctggtcattaatttaaaaackgaaatatttgactcatttacatttaatatgttttgttttttttttccttcatcatgactttttttttaaccaattaggtacttaaattttttttcatttccccctatttacttgttaattacatagcatttaatattattgttgaactcaca

SEQ ID NO: 353938 - DNA, 568 bp, Homo sapiens
aacattaaacaaacatgttctaacttcatcttttctcaaggcctggctatatacacacaatatttctgcagtgttgcccttgtgtttgcatatttacccccaaaagcccagtggacatctgtgaaaatgaatcccacrttgggaagctactgtaacacaaacttcgctcaggaagtcagatgtctgcaaacacaagaatgtacctatgtttctcaggtttaaaatcaagttcaactgcaggttgatctgcctttgcagcatcctctgcaggctttattaagatgataaatgctttccagcctgccatgcttagcgaacacatgacacatatgaacacacactatataggctttctagtctgtacagcatatatttatattattaatttctttcaatatttctgtataatgtgtattttctttaatgatttaacctggatatttgctctaagactacctgcccacatcgttacatatttattataataatatatcactttgtaagctgtgtttttgatatttgtttatcattgtaaataatgacacaaaatcatcccacattacacggg

SEQ ID NO: 353939 - DNA, 568 bp, Homo sapiens
aacattaaacaaacatgttctaacttcatcttttctcaaggcctggctatatacacacaatatttctgcagtgttgcccttgtgtttgcatatttacccccaaaagcccagtggacatctgtgaaaatgaatcccacattgggaagctactgtaacacaaacttcgctcaggaagtcagatgtctgcaaacacaagaatgtacctatgtttctcaggtttaaaatcaagttcaactgcaggttgatctgcctttgcagcatcctctgcaggctttattaagatgataaatgctttccagcctgccatgcttagcgaacacatgacacatatgaacacacactatataggctttctagtctgtacagcatatatttatattattaatttctttcaatrtttctgtataatgtgtattttctttaatgatttaacctggatatttgctctaagactacctgcccacatcgttacatatttattataataatatatcactttgtaagctgtgtttttgatatttgtttatcattgtaaataatgacacaaaatcatcccacattacacggg

SEQ ID NO: 353940 - DNA, 518 bp, Homo sapiens
acaacacatcattgtctctcaaaatggtgccctcatgaagttgttcatgaaatttaacaatgttgccatctctccaaaacattttgatacctttcttttggagatgtcccctgaatttacacattgcaaaagatgtcagagaaggaaagtcatgtagaattttagagtggaaaggacatttgagatcacccttattgtgttatagtgatgtagccccttccaccraataggttagctctcagttgatcactttctgattaacaatacttgcctaagtttcactctgggttaaaatgaatttattagtcaaggatgaaagacatgtttccatcaagtatagtgaaaataataaaccaaatattataaaagctattttacaaataggaaataaaaaatgttctgagtaacaaaaatggtcatttttagcagtagacagtaaactgtttggctatataaattctggtgaattttctttaaaaacatcatgctactttatgaccaaccaaatttttgattaa

SEQ ID NO: 353941 - DNA, 495 bp, Homo sapiens
tcagagaagaaaaactggaggctgcatctttagaaggcagccaggcacttctaacctaattagcgttagtcacctctgaaaataaatcccctgaatcctgcagctccaaagtcacccccgccccctctactcctccatacccacaagcacctggtcagaattgagcagcccgacaggaaccttcctgccctgacccccagcaaacarcggtaagagggatttgccacgaccttccaggaaatcaggtaaaacaacaacacagggggtgatgcaagcgatttgctttttctgtgttcaaacttcatgcccacgccaccacaaaatacagcccggaagctgctccagcccggaaggctcccggctcaaacagaaggcacagaaaagaatggagatttgcagatctgataatgagccagttaatgacataaatgatacctcaagaacctcactaaaccatccaggtcctacaatttaatctgtaataaatactcctgc

SEQ ID NO: 353942 - DNA, 457 bp, Homo sapiens
agaatttaaagagaatatagagaatccatagatttcagtgttgaaaactggagtggtttctcactacataaaatgtataacctttatggacagcctcagaattcaggtactggtagtaaaacatagtctcagtgcaaagaacaaatcaagggtttggctatcaacaccctttggtaacacctatgaattcagatattaacaaacttcatgttttctaagtctggtagttgctttcacctgtatacaaggtttcccagaaagcttaaggaacagtcccacgtaaatttgatgcactacaataccatttttaagactagagaaagagatatgtctcccaaagaattgtgagtgtggcttttagcatttraattgacttgaaccgaacataaggaaaatcaatgaggtttttgagagaactcttggcaaccacattaccagcatggactggacaaaaaga

SEQ ID NO: 353943 - DNA, 623 bp, Homo sapiens
gaaaatcaatgaggtttttgagagaactcttggcaaccacattaccagcatggactggacaaaaagagtttgaatctgtttgagagggtcaaaaacacctctgggcacccaattttttacattctgaaagtgaatgagtamgttgctcagtggctaagaaaggcatatccttcaaagccttcttctgaaatcgcaaaggaggatgaccttacagcaagagtggattcagcagctactgcatataatgaaatgcataggtgctccccaggggatctgggacctaatcaaggcatagcctctatcctggggggtgggggtgggggtggggggctggcaatgttagagaccaataggatttaaaattgtgaaggactactgactgctacatgcgaaccaatgagactctcactatttatctcattctgctttattgttcttcatagtactcatcattatttcagggcaagtaatttgctttttgtttgcatcattccccaatttcagtaaaagtgccttgatagcagggactttgcatttcgttttagttttctttttggccattctattcttggcatatgaacaatgtctatcatataggttgtgctcataaagcatttgctatg

SEQ ID NO: 353944 - DNA, 579 bp, Homo sapiens
tgaatgagtacgttgctcagtggctaagaaaggcatatccttcaaagccttcttctgaaatcgcaaaggaggatgaccttacagsaagagtggattcagcagctactgcatataatgaaatgcataggtgctccccaggggatctgggacctaatcaaggcatagcctctatcctggggggtgggggtgggggtggggggctggcaatgttagagaccaataggatttaaaattgtgaaggactactgactgctacatgcgaaccaatgagactctcactatttatctcattctgctttattgttcttcatagtactcatcattatttcagggcaagtaatttgctttttgtttgcatcattccccaatttcagtaaaagtgccttgatagcagggactttgcatttcgttttagttttctttttggccattctattcttggcatatgaacaatgtctatcatataggttgtgctcataaagcatttgctatggagtgaatggaacgactatttttcttgctgaagtatcaatagtcccttagtagttctctcagtgaaggccaatgagtggcaaatgc

SEQ ID NO: 353945 - DNA, 552 bp, Homo sapiens
ttgtacaaaacaggcaaaacctggcctttgtagaatttgtgttctactatatggagaaagacaataaataaatatacaagtaaattcaaaatatgttggatggtgataaatgctatgaagagaactgaaacagtgttgaagggattagtagtgaggggtacagaggaaggcactgatatttgatatgggacaatcaggcaaggtctcactgagaaaatgacattggagcaaagacctgaagttgatgagggatccagcattgtggatatgtggaagtaaggcatttcagatagaggcagtagcaaatatcctgtggtagggcaggcatggtgcctttaaaaaacatggaatgttggtatggggaagggagtaaagaggaaaccaataaaaagtaaggtcattgacgtggcaactggctagctggtgtagggcytggtgactactgtaaagatagtgacttttaatttcagtaagaaaggaagactctgagaagaggaatgagaagatcttgcatttttagactatcaatcattccaaccactgtattgaaat

SEQ ID NO: 353946 - DNA, 574 bp, Homo sapiens
tactgggactacaccagaactagagaaaaggctgctctagacttactctaacaaattttgaaaggatcgagccatgtagaagtaaactaacatcctactagaacaaacctcaacgttattaaggaagatatcaaaatccagatattcaacagtgtaacattcataaagtccaccatccaataaaaattactagaactgggaagaagtaggaaaatgtgactcataactcacagaaacacatcagaatgatagagatgatgaaaatagtcatcagatacttaaaagaactagtattaatatagtaaagtttcaaagaaaacatgaatataacagaggtacaagtagggaatctcaatgaaaaaaatggaagcaatggaaacaaaccaaatggaaattgtagaagtaacaagttcaacatctgacatggacatttctattgctttgtgttcaatttgatcwtatcttcatttcaggatttcctttggttgcgtgcttttaaaaatatcttcattttctattctcatttacatttatgtcttactttaattccttttctatctttatgagtcttttt

SEQ ID NO: 353947 - DNA, 626 bp, Homo sapiens
ccaggagaacattcaagcagggagtcttttcatgatcctcccaaaatgttattcattataaaatagcttgctattttgtctgactatattcagtgtcatttatttattcaaatgtttatatttttaattcatcaaatatttattatttacatactattggccagatagtatctgggaatgagataatacattttcacygctttcaaggaggtactgactggatgcaggctctcatctctcaccaccgccactgctgcctctacctgaacatgctgcccagaagcctgggaattgccccacctatttactatagtctgcatccatgtgcagactatatgcaggattccttgcacaattagggatagaaagatacccttatttcttctccattgctataggatgtttagtctgtcatagtgaagaagggggtataggacaggcacatctagactggcaccacccccctcaatgctggagcatgccacttaggggcctgtggattgccctgccccattcaccatatcttggatctgtgcatttccctcagcagcctgagaatgagcctgcccagccttccagcaccaccagtgcccacacccacccccacacatgccaccaggaaacct

SEQ ID NO: 353948 - DNA, 570 bp, Homo sapiens
catttccatgtaatccgactaactgagagaacaaattccaacagggtttaaagaaacacatcaaaatctaccacttatcaaggtaagaataacaatgtccagcactgaacaaaaaattgctagatgcatgaacaagcagaaaaatgtgatccccaacaatgatakaaaaatccaccaatgtaaatagaacttgaagtgagaaagataatgaaatttttaaatatcataaatattatgaatatactcaaaggtttaaaggaaaatgtaaataatgagaaaaaatggaagatacaataatgagcttaatggaaactctagagctgaaaaagttatatttgaagtgaaaaattcactgtatggggttaatagcaaagtagatagaagaaaagtccaaacaaattgaatacatgacattagatattatccaaaatagggacaaagaatacaaacctcaataaaattaacagagatcctatagatacacagcaataccacgtgggtctaacattcatgtaattgaagtctcagaaatggggagggggatgaaggaagagaaaaaaaatggctaca

SEQ ID NO: 353949 - DNA, 588 bp, Homo sapiens
aaatgttacttttttctcttgagatttgtaaattctccttaaaaagaaaacttcagcatttctaatttattctttcatgtctacctaatattgtttttgaattttttaaaagaattgttttaatttatgattgctttttgtttcacagtttcttaggggttattttagtagatacaattcagtattttatctttttgagattctcaatgtgtttgtgaagtctttttttggtaacgttataattttcatttttatctacattgaattcatctcccagcaattgatttttattttgycagctgtcttttgagcattcatttttaataatcattttcagacatttcttggttgggagtttactacaatctctctgtctctgcctttccttgtctttctctccccaccatttttcgtgtgtgaagttttaagttgactacacatcactttctgcctggggccttcaggccagataatgagctgtcctggaagaatgttacccctgggctgcagggtaattgtgaatattttcaattccagatactcgagtatctgggtagcttggcccagactttggatgcgacgtagagt

SEQ ID NO: 353950 - DNA, 561 bp, Homo sapiens
gtccctgggacagtagattccacttaaatctttcaagcccagttaaatatgagaacatgaggcacttcagagactgaaagaaccaagaagcccatcaaagactatctcctgctctaaggatttgccactccacaccaaattcttttccctgttaatgtatttttaattttagtgactgtagttttcatattttcagactgttggttctgatraaacacctagttgcagtccctaggaaatgcttaatgcccaaaattgcctacaattatttccttttaatgaactttaaatatgagtcagtactaaaaaaaaaaacaaagacagaaatagcagtgtgtgtgtgcatacacacatttataggtacacacacatatgtatatacacatatatatacacacatatatttgtaaaaaaaaataggctagtaggctttttaaatgcaagagtagtttgctctgatagcactcctttggtagtccagctacattgccagttgcttcagagagcaaaagaaacactccatagactgagagtgtttcttctttgacaaaaaaaaaatgc

SEQ ID NO: 353951 - DNA, 566 bp, Homo sapiens
gagactcacatctgaacttgaaacccaactctttcatttaagactacaaaaactcgagaattttaattgtcctcactaagtgtcagttttctaatatgtgatgggagtaagtccatcrctccaatgtcattttgaatattaaaaatttaataaatgtatacaaagtaactgcaacatggttaacattaataaagaatagttgttgtggctaaaataataattaaaagagtatttacataagctagcagcaagtattttatggagacagggcaaaatttagaagtctcaaggaaatatcctttaaagagatgtgatactttgtaatgataatttaaatgaaattaagagagaaatgatcaagtataattttatatattgtaaaataaaaatccaaatgcttccaattatacctgagtagttgctcagtatataatgaaataaaatataatttgataaatcttaactctttttgtaaaacctaaaatatagctttattgcttctttgtttctggagttccttcttttacaattcatattaaactcagaaatttcctgtaactacattt

SEQ ID NO: 353952 - DNA, 566 bp, Homo sapiens
gagactcacatctgaacttgaaacccaactctttcatttaagactacaaaaactcgagaattttaattgtcctcactaagtgtcagttttctaatatgtgatgggagtaagtccatcactccaatgtcattttgaatattaaaaatttaataaatgtatacaaagtaactgcaacatggttaacattaataaagaatagttgttgtggctaaaataataattaaaagagtatttacataagctagcagcaagtattttatggagacagggcaaaatttagaagtctcaaggaaatatcctttaaagagrtgtgatactttgtaatgataatttaaatgaaattaagagagaaatgatcaagtataattttatatattgtaaaataaaaatccaaatgcttccaattatacctgagtagttgctcagtatataatgaaataaaatataatttgataaatcttaactctttttgtaaaacctaaaatatagctttattgcttctttgtttctggagttccttcttttacaattcatattaaactcagaaatttcctgtaactacattt

SEQ ID NO: 353953 - DNA, 562 bp, Homo sapiens
aaactcacaacttgagtgaaaatacaaggccttactagaagaaagcttctatctctctgcctgccctcttcttcctgcctagaagacatctagcatggctggaggggtagaagggatctgcgttcatgaggtgataggtgtagagaactgtgccctgaccagtgctagctcaaggccgaacaccattcatttatggcaccactggaattgtggagtgtggcagtctcagccccaagatcatcaagcctctgaaccaattgtagcaatttcttacctctgaatttgttttaaatgagaaatactggtctttgcagaaattggagtactattttcttctgtaaggtcttttattagggtttcctcttatttgtaccaattgtaatcctaacttaggcacttcctatcacactgtaccattgcatataactttgtttctttgcatacaggatttacccactccctgaatgataaggatcctcckaatcaactttctgagccctgctcaagcactacctatttatgaagtctttcctagaaatttctacctgcaatgtcttattaa

SEQ ID NO: 353954 - DNA, 570 bp, Homo sapiens
gttctaatgagatagccattgacaggtgcctgtataactttaggatggaactggtctccagaaagaccaagccttgattagaagcttggaactttargctctacccagtgacctctgggctggagattgagctctattaaatttcttgagcaggagattcaggagcttctgtattggctaacacatccacatgcctggagggtgacacaccccaactccatagacacagaggctcctgctcttaggatccttctagacctcaccctacatacttctttatttggttgttcattttcattctttataataaactgtaatagtaggcacagcattttcttgagttttgtgaatcatcctagcaaattattgaaccttgggtggtaggggagggacgttgtgcaaaccctggtctttgtagccaagtcaaatggtagtgtgggtgtcagaggcgtttgaactagagcaaatcttgaatagggactaggtaaaataaggctaagacctgctgagcagcattcccagtaagctaaggcattcttagtcacaagatgagataggaggttggcacaa

SEQ ID NO: 353955 - DNA, 606 bp, Homo sapiens
ggtgacattaaccagaatagagaatkttatacaaagtgtgtatttgggacatggtgagaaatgatgatgcagttttgaatgtgaggtaagcatctgttccatgtccacgatgatgtaagcctgaagatgtacacaggaggcagctggtgtgcgggcctatttgctcaagaaaaaacaatgcttgactaaagatattgatgtgtcttcttattcattcaacagtgcaggttctgatcaccagctgcatattaaaatcacctaagcattaaaaaaaaaaaaaacaagctacacctggtcctcatttccaaagattctaatttaattggtcacaggcactagtattttccaagagctcccggagaattacaaaatgaggcctgggtttaaaatcactgctgtacagtaaaatatacaatatatagtatatatagagagaaatatatgatatatattctatatacacagtataatatagtatacatacagtaatatagtatataacatatgtattatatattcagtaatataatattatatatacaactatataaattatccagggaaaaaaggtcctggataattggatgcaattcttctatgatggct

SEQ ID NO: 353956 - DNA, 408 bp, Homo sapiens
gaatgaggaagaaaaaccatatgatcatctcaacagacacagaaaaagtgataaaatttcacatccctttatgataaaaactctcaaaaactagtcatagaagaaacatacctcaacataataaggtcacatgtaacaaactcacagctaacatcacatttaatggggaaaaagtgaaagcctttcctctaagacctagaacaagacaaggatgtcaactttcaccacttctatttagcatagyactagaagttttagccagagcaaccaggaaagagtaagaaataaaagccttctgaaaaggaaaagagaaagtcaaattatccttctttgtagataacatgatattatatttagaaaaaccaaaaggctctattaaaaaactcttagatctgataaacaaattca

SEQ ID NO: 353957 - DNA, 594 bp, Homo sapiens
tgacattagcaaggagaacccttaccctttggcttaggcatataggaagcataagtagatgatcaaaggggtggatgagagtgaggtaatgtagggttgtcaggggaaactgcatccctcatctgaaggtcaaggatctccttcaaggcagccctcagcccagagccccctccataactgcytttacttctcacatcgtcaggcattgggtagcatttaaagtgtcgttactagttactagctattactagtaaggtatacaagttactgtgctggggcactatattatctcttgtggttcccttaaaccctagaaatgcctttctaaaaagtccctttattagactgtctttagtgagtctgccatttgctacctcctgaaacccctactcatagattaccaaatttatattggtttaaatcaatggattttcagatagaagtacgtgtgatttaaatataacatacacatttgctaatcctgaattttctaaattgtaatggttcttggtaaaaactggcattaaataatcactggatagttttatggaatacatttttagatgattaataacataattatcctatttatgc

SEQ ID NO: 353958 - DNA, 594 bp, Homo sapiens
tgacattagcaaggagaacccttaccctttggcttaggcatataggaagcataagtagatgatcaaaggggtggatgagagtgaggtaatgtagggttgtcaggggaaactgcatccctcatctgaaggtcaaggatctccttcaaggcagccctcagcccagagccccctccataactgcctttacttctcacatcgtcaggcattgggtagcatttaaagtgtcgttactagttactagctattactagtaaggtatacaagttactgtgctggggcactatattatctyttgtggttcccttaaaccctagaaatgcctttctaaaaagtccctttattagactgtctttagtgagtctgccatttgctacctcctgaaacccctactcatagattaccaaatttatattggtttaaatcaatggattttcagatagaagtacgtgtgatttaaatataacatacacatttgctaatcctgaattttctaaattgtaatggttcttggtaaaaactggcattaaataatcactggatagttttatggaatacatttttagatgattaataacataattatcctatttatgc

SEQ ID NO: 353959 - DNA, 531 bp, Homo sapiens
tcctgcctcagcctcctgagtagctgggattacaggcacctgccaccactcgtggctaatttttgtatttttagtagagacggggtttcaccaagttggccaggctgtcttgaactattgacctcaggcgatctkcccgcctcagcctctcaaagtgctgggattacctctcactgcattcttaaataaatctttattggagcaggtactatgctataaataagaaaattcaggtatcaacaaaagtagatccagtccctgacaagctagattatagattatggtgtaaaggttatatatttaaggattatcagaacaatttcttgacatagaaatgttatgtattatttacgtgctttaaatgaaggcatatcagaacgataatcaaaaacctataaaggttaaataattgacttcacaaatagtttcttcagcctgtagtaccccattttacatttagatagcaggaacttacttaaataactgagtcaatttatgaggcacctaagcaaagttaacaattatgattaa

SEQ ID NO: 353960 - DNA, 601 bp, Homo sapiens
gattaataacataattatcctatttatgcttattaaggcccaaccttgttttagtgggcataagccttcagatatattacttctcataagttttacaatatttgaggttttatattttaactgctgaatcagtcttaacaaatttcaaaagattaaataaaggatatcaattgatactaaaaatatttattgctatttcacaatttcttaccttagacatgctgttccattctcaggaaatattaatattatactgaaaaaagtattaattcatcctttcactgtattttttatttttttagacagagtttcgctcttgttgccgaggctggagtgcaatggcgtgatcttggctcactgaactgcaacttccacctcccaggttcaagcaattctcctgcctcagcctcctgagtagctgggattacaggcacctgccaccactcgtggctaatttttgtatttttagtagagacggggtttcaccaagttggccaggctgtcttgaactattgacctcaggcgatcttccckcctcagcctctcaaagtgctgggattacctctcactgcattcttaaataaatctttattggagcagg

SEQ ID NO: 353961 - DNA, 593 bp, Homo sapiens
taactcagttttgactgtaaagctcatgcactttctactataccaactgtttccctctaactaaccacagcttccttttgtttttgggagaatataggtagacaaatggaaatgtgaaactgatgtagtaaaggtggtacaacacaggccccagaagagtgattactttataagatcgctgagatagtggaagaactgacactattccaagtcttctggttcccagtcagttcagtttgtgtaccacaacatcctatgacatcatatggctagacctgaacttagatcagcatgttcataaccacgattttaatgccactgccaccaacagagagttgctgaatcccttgatggtatttaattttaccctgaatccattagtctggagtctaaaaaacacaattttaatgaaatagaacaactcaatagacatacttctttgatatatataagagacaggaaaaytttgtcagtttgtattgagtttcccatgcaattagaaccatttctattgtcattatttttcttagaagatctaaagaatttcttagaagttctgctatatgtgtgaccataagaccaaaaccacttat

SEQ ID NO: 353962 - DNA, 554 bp, Homo sapiens
atacaatggactttggggacttgggaggaagagtaggaggggggtgagggataaaggactacaaatatggtgcagtgtatactgcttaggtgatgggtgcaccaggatctcacaaatcaccactaaagaacttactcatgtaaccaaatatctgtaccctaataactcatggaaaaataaaaaaatatgtttttgcaccagataatatcataggtcccttgtcagcctataaattggtgcctcaaatgtgatgtgtcaggtcacttgtcatgtggtctaccatgcattcagcatggactatggacaggaaaggcaacaagtagtaggcatgtctaatataatattagcttctaattttattaaagttggctatgccttcttttattaaaaagtgttgagtgcctgctatatgctactatgctgagttctccatgccaccttctggaaatacaactgtccacaagatggaaaatctctgttcttcactgatttggccyggccgcttcatccttagtttccctcaagcaaatttattcagtgtgtactttatttag

SEQ ID NO: 353963 - DNA, 512 bp, Homo sapiens
gtcataaaaggagaaagatgtggttggctaatgatctacttgaaaggtggagctgtaaacatgggctgatgaattgcatgtgggtttcaagagaragaaagaaggcaaagattactccaagtcttggaccctgagtaacttgaatggagtcactattttccgacatgagctgagattgctagagaagtaggattggagtgagaggtgaagaggatttgaatatattcaaatttaagatattttaagatgttgagtaggtggctaaatctatgaacttggaatttaagaaagacaggtgggaattagtaacacatatttggaagtagtgagtacacaattgcaattaaaaccagcagattggatgagtttcacccttgacatgagtggagattaagaagagggaggtttgagggctgagctttgagggttttcaatgcatagaagctggatagaaaatgaggaaaaaaataacagaagaaattgaaaagtagtgaccaatgaggtgggaaaaa

SEQ ID NO: 353964 - DNA, 549 bp, Homo sapiens
tggtcagcatgtttactacccagttcctaaagatgttccacgaatccctttcatcagcctagaagtctctgatccttcctcttccagaacactatgaatctgtcagaattccatccttgtcactctcaagaactgtgaggagtctaagattgtatcctacttgcaaactaagaatttagtctgccacaatttcatcgatgctgccaaaagaatcgtagggcagagactaattacttgcaacaacagcagtagactatcaacatcttcttgtaccaatttctcaagccccaatttttacagtgcaaggcaaagatggtcacatgatacagtcatattcaatgggtcataytgtaggttgtgttccctcagtttaggtaacatctgttttataatggtcagtaagcaaacctaccctttgctttgaaagtagacattatttttatcatctaaagctgtagttataaaaagacagcccaaagcaaaggcagtcaatgccactgctagttctgagagctccaatagcttccatagagatttctccaagcatga

SEQ ID NO: 353965 - DNA, 616 bp, Homo sapiens
agtcacaccaaaagctgccattactggtttgcttattaactaccttgtttctctacaaaatgggagcttatttattgcaacgaatgaaaccttggcataatagaaattcctaatctatgcacacctgttcctaaaaaaaaaaaaaggaaaatctcttttataaaaaaaaatccccttgtttagaattacatattggaggatataaggctatgcataagtttgttttaatttatgcagctaactcctactgttttctctattttgattacttttaatagtactttcatattgactaattacatctcttaaaattgatcatgctctggtcccttccagctctaaacataattataatctgaacaagctatgttgagaggaatgccaagggttaagggacaaaaggcaagggactagggtcaaagaaacttggttaaaccctaataattactgtataacccttggaaattatttatctgctgattcttagttctcatatatgtaaaayagaaaggaaaataattagcctatagattttttggtaggaatttaatgagataacatattcaaatagagtgcccagcacataatagatgcttaaacatcttaattgcctcct

SEQ ID NO: 353966 - DNA, 572 bp, Homo sapiens
gttgcttccaccacttgagtattgcaaataaggctgtgatgaccatggctgtgtaaatatttcttcaagatcctgctttgaattcttttggatatttacccagaggtggaattgctggatcgtacggtatttctatttttaaagttttcaagaatctttatactgttttccataatggtggcaccattcccaccaatagcatacaagcatttcaatttctccacatctttatcaacacattattttctgttattttgacagcaggcatcctaatgggtgtgaaatgatttttaattgtggttttgattggcatttccctcatgattagtgggttgaacatttttcatagatgtattggccatttgtatattttctttggagaattttctattcaagtcttttgtccatttttagttgtgttacttgttatttgttgttgagttgtagaagttcttcatatattctggatataaagcyttcacatatatatgatttgcaaatacttcctccagttccattggttgtcttttcactctggtcattgttttctttgatgtacagaagtctttaag

SEQ ID NO: 353967 - DNA, 601 bp, Homo sapiens
tgctgcccagtaatccagggaattccccagatcttacccaagcctaccaaggtggtacctctaggagtctgcaagaattacagcattactagttctgcggtatctcccagtgttgatatggcttcagtgaccagagacttcgatcaccacacccaattccatttgaatacctggaaacccttctcaagaaggataggtacaaacaagctgagactgcaagcttaaaataaatacctaacttctaaatacccagatattaacaaacatccacaagcatcaagaacatccaggaaaacatgatctactaaacaaactaaataagtcaccagtgacaaattctagagtggtggaaatagatgaactttcagaaasagaattaaaaatagttgtttgagaaagttcagtgagcatcaagataacacagagaagggattcaaaatcttatcccagaaatttaacaagcagattgaaataattttttaaataatcaagcagaagttctgcagctgaaaaatttctattgtcaaaatgaaaaatgctttcgaatctctgaagagtagaattgatcaagcagaaggaaaagttggtgagattgaagaca

SEQ ID NO: 353968 - DNA, 536 bp, Homo sapiens
gttagagggaaacatatgccagtgcctcaagtctcctcctatattcttgaagacatttcccagagcagcattgctaccttttacaaacctattgatgtttttgattctcttktccttaagagaatatttgatgtccagtattcttctactgttaacagaaatgatcttctgttgtttatggcccaagtttttacagataaatgtatataaggatgaatccttttttagaaggtatgttcccagctattgcgaatctacagaataaaaggaaaagtagataattatctcatccttctagcctgtgtcttgatgggattaatttcctccctgctcattatatataaggcaggtcattacttcctgattgtaagcacctgctgattcactggcaaaaaagtggtagaaatgagaagctgtataaaggcttagaagtggtgaaagtgtgtctgagaagttttagagaaaagattcaatcccaaggggactcaagattctaccttaaaaaaattattttaggttcagcagtacatgttcag

SEQ ID NO: 353969 - DNA, 613 bp, Homo sapiens
ttaggggtctgtctgtatgaatatatcagtttttaatctgtgctatgttaatatggcaaagggaaaatatgtatttttaaaattttgaaatatgtttaatatgataaaatgtgttttggccatctttgttcttcatattttagttaatggaatacaaatactagtatctaataaataccttgtcattccacataaaagctcttatttttgacattaaaaactgaatggcctcattttgaatgcattaggttgttgttttgtagcctgatgggatgtgagacctttttgacccatcatccaaaatatctgttgatgctatcaaatgatgaaatgtcatttatctgaatgactgatcaattttcatagccaratttgtagatggcatttaccgatatgttgctaaagacaactgttggcagcccatgcagcctactctttgcaaccaagtgtatttattatgggctttggaatcccatagacttgggtttgtattctttctcttccattagtgctgtaacctaggacaaattacttaacctctccaagtcctaattacctcattgcaaaatgtgatgaaagtaatctgttttatagactgccatgataattaaat

SEQ ID NO: 353970 - DNA, 587 bp, Homo sapiens
atataaataatatgtaagacttctacttttcatgaattattgaggttctaacctcaatatcccaataacctcctgattgctaaataaatgaatgtctcaraaactgacatgtcattattttacccaaatgagagcactgttcataaagattttaagttcatagcaaatcaaatacgtgttctgaggaaaaaaagaagaaaagacaagctcctaaagttcaatttgatataaaaaccttcaaaagtggctcaaaaaatatttatagttaaaaaatataatttcttctgaactgctatcctactgatgtaagaaatttcaagtaagtttcaagttaaacaccaccaataaaatccatgctctggtccattccattaggtaactctgtcttatggttcagtaatttgaaaaggtcaaagaaacaccagtttgtctattcaccctcatttgttacatcatcacaataattattttaactcaatacttcctaagcttatctaagggtgcgtaaaaccttatatctttatgtaccagcgtgtttccctggcacaactaacatctaataggtaattgagacttactgccatatt

SEQ ID NO: 353971 - DNA, 561 bp, Homo sapiens
atatcataaagcgtaagagcttgttattgcttttaacacttctttctttccaagctgtcagatgccatttctcttgactgccaatatagcaggcttcagcaatgtcctctcttgaatttccatacacctgctctcattacctggattttctaattggttaggtaataaaatgccatgattatacgagatatatctgaaaagtctctacaaggcattatgggtctctcatgttcaaacatgtatgcctaagaaatattaagaagacaatacagtaaaatcatagaataagttatcagtaaattagttgtgagcactgaaatactgatttagtacacttcaatgccatttttagtatttctcagtttatgctatataattaaggtttgtgggtattaaataagtaaaatattgagtacagcccaaactcctgtaagttgatgttagagagaataagtactctattcttccaggtacttttttkgacacagaaacagaagtattgaattggaaaaactatgattccatcccattatggtattttgtactcctaatagcttacaa

SEQ ID NO: 353972 - DNA, 561 bp, Homo sapiens
atatcataaagcgtaagagcttgttattgcttttaacacttctttctttccaagctgtcagatgccatttctcttgactgccaatatagcaggcttcagcaatgtcctctcttgaatttccatacacctgctctcattacctggattttctaattggttaggtaataaaatgccatgattatacgagatatatctgaaaagtctctacaaggcattatgggtctctcatgttcaaacatgtatgcctaagaaatattaagaagacaatacagtaaaatcatagaataagttatcagtaaattagttgtgagcactgaaatactgatttagtacacttcaatgccatttttagtatttctcagtttatgctatataattaaggtttgtgggtattaaataagtaaaatattgagtacagcccaaactcctgtaagttgatgttagagagaataagtactctattcttccaggtacttttttggacacagaaacagaagtaytgaattggaaaaactatgattccatcccattatggtattttgtactcctaatagcttacaa

SEQ ID NO: 353973 - DNA, 582 bp, Homo sapiens
tgtatatacttgatatatttgatgcagttaaaaaaacagatttgataattttattctttggctctaatacattgctttgcacrtattgggctaaaaataaatagttgttttatgataatatgaataaattttacttttatagagaagactttttaggcatacttgtaacattttaaaaatatattactctatcactgaacaattcataaacatgactctctacaaattatttttctgacactcatctgaatactctagcacatttttttttcaataaaataaataccaagggacacctgtgtagctttgaaaggcacaggtaatacctttacagttgtggcagcctcctgctttgcactcagtaaaatctactcttgagagcaaaacccgtaaatgtgttcatctgtaatctcccttgtgatttgaaggatatctcccaagatgacttcccaatggtcctcttcagttctctatttggtcggcacccaaacgccatcacaaatcagtttcatatctccctttcacttcactcagcaatctgacacaaaatgattttgttgttgttattgttattgaaaaata

SEQ ID NO: 353974 - DNA, 667 bp, Homo sapiens
catttttgggaggaagggcattttaacacaagcacatgggtaaagaagacagaaagaaataggcagaatcaaagaatacaaggcttcagttatatagaagaaacacaatcaggaaaattattatacaacatagtgactatagttaatataaatgttaagaaagtagttgtaaagtgttctcaccacarggatgataactgtcaggtctctgatcccaagccaagccatcacatcccctgtgacttgcacgtatacatccagatggcctgaagtaactgaagatccacaaaagaagtaaaaataaccttaactgatgacattccaccattgtgatttgtttctgccccaccctcactgatcaatgtactttgtaatctctgccacccttaagaagcttctttataattttccccacccttaagaaggttctttgttattctccccacccttgagaatgtactttgtgagatccacccctgcctgcaaaacattgctcttaacttcaccacctatcccaaaacctctaagaactaatgataatccaccaccctttgctgactctcttttcggactcagcccgcctgcacccaggtgaaataaacagccatgttgctcacacaaagcctgtttggtggtctctttacacggacacgcatgaaatttggtg

SEQ ID NO: 353975 - DNA, 667 bp, Homo sapiens
catttttgggaggaagggcattttaacacaagcacatgggtaaagaagacagaaagaaataggcagaatcaaagaatacaaggcttcagttatatagaagaaacacaatcaggaaaattattatacaacatagtgactatagttaatataaatgttaagaaagtagttgtaaagtgttctcaccacaaggatgataactgtcaggtctctgatcccaagccaagccatcacatcccctgtgacttgcacgtatacatccagatggcctgaagtaactgaagatccacaaaagaagtaaaaataaccttaactgatgacattccaccattgtgatttgtttctgccccaccctcactgatcaatgtactttgtaatctctgccacccttaagaagcttctttataattttccccacccttaagaaggttctttgttattctccccacccttgagaatgtactttgtgagatccacccctgcctgcaaaacattgctcttaacttcaccacctatcccaaaacctctaagaactaatgataatccaccaccctttgctkactctcttttcggactcagcccgcctgcacccaggtgaaataaacagccatgttgctcacacaaagcctgtttggtggtctctttacacggacacgcatgaaatttggtg

SEQ ID NO: 353976 - DNA, 616 bp, Homo sapiens
gggtcctattccctggtaagggaatttggggatgggaattgggaaggtggargtccacggtaaggcactgttagtttgcacctgtcctaagttctaccacagccacagcaatggtatgaataaaaggtggggctgagggatttataaatggggcataggaattataccttcccaggatattagagcagatatatgattatctttctaattattatatagttatcacctcacttaatgtctggcatatagtaaacactcaataaatctttttaataatcagtacagtatagaaatttctttggcctccaaatttatgggctatcatattatatttgattattattttctgtttaaaaagaaacaatttggagtacacaaaacagtagtttcatctggctcagagtttaatggtatcaaagttttctctcactcacgaggaaaaatacaatgctgccaccttagcttatcaatatcaaggattgaatatggacatttcaatagtattctgaagcaagcaaccctacaccttgccagggtgattgggggcagttaaatagataatgagggagtatatcaaatgacaactgtgtacagacacctgggtaaagaatacatt

SEQ ID NO: 353977 - DNA, 616 bp, Homo sapiens
gggtcctattccctggtaagggaatttggggatgggaattgggaaggtggaagtccacggtaaggcactgttagtttgcacctgtcctaarttctaccacagccacagcaatggtatgaataaaaggtggggctgagggatttataaatggggcataggaattataccttcccaggatattagagcagatatatgattatctttctaattattatatagttatcacctcacttaatgtctggcatatagtaaacactcaataaatctttttaataatcagtacagtatagaaatttctttggcctccaaatttatgggctatcatattatatttgattattattttctgtttaaaaagaaacaatttggagtacacaaaacagtagtttcatctggctcagagtttaatggtatcaaagttttctctcactcacgaggaaaaatacaatgctgccaccttagcttatcaatatcaaggattgaatatggacatttcaatagtattctgaagcaagcaaccctacaccttgccagggtgattgggggcagttaaatagataatgagggagtatatcaaatgacaactgtgtacagacacctgggtaaagaatacatt

SEQ ID NO: 353978 - DNA, 592 bp, Homo sapiens
ttgttatcatttgtcatttttytaatagaaattctaacagatgtgagttggtatctcattgtggttttaatttacatttccctgaatattagagatattgagcattttctcatacagctgttggccatatctctattttttgagatgtctgttcagttcctttgccaactttttagttgggttatttgtttctttcctgttgagttgtttgagttccttatatattttagatattagccccttgttaaatgtatgctttgtaaatattttctcccaatttgcggttgtctctttattctcttttcttgattttttttcctatggctatagtgatttccatgtaataggggaatggttttagttggccaagagtttacaaactcataaacaaacaactagaaagcaaaggtaatttccttacaggacaaattaaaacaaaattagagaaagactctggctcaggttgtgtcatacagccagccataaatccatcactgtggctgtgggggtaaaatgctaatattagctactttgagtcagatatttcagtaatttcccctggtgtcacatgacctatccccacatcccattc

SEQ ID NO: 353979 - DNA, 403 bp, Homo sapiens
gggggtggctttgtctcctgaagataatattggatgatgatggtaatattaatttcctttaacaaagtatgcccttcctttgaggaccagaagagaagttttaaaactgatatggagcacaaaataaatgagaactcagcactgrcataagctttcttaagccacatgagtacttcattacagcacttaccaagagcactatgcgatgactacaccagagcagactagaaacctttactctagaccctctctcatttaactaattatgtgaccttgcacaaactccttaacagtttggagtctcatttttttatttttataaaataccaggaactttcaccaacaagctctgttccggtttaataccatcctttgtttcagaagtaatatacatgaagttttc

SEQ ID NO: 353980 - DNA, 584 bp, Homo sapiens
actatgcgatgactacaccagagcagactagaaacctttactctagaccctctctcatttaactaattatgtgaccttgcacaaactccttaacagtttggagtctcatttttttatttttataaaataccaggaactttcaccaacaagctctgttccggtttaataccatcctttgtttcagaagtaatatacatgaagttttcctattgtgtttaatatctaaaatatatacaaaattgtacattattgtgaacatgaatggtttacacatattctaagctcaaakcatcataggactgttgggcttctcaaaatagaaatatttgtaataaaccctaaaactcatgaatgttacaaataaaacaatactttaataaattatagaatttctttattttttattaatatctacatactgtagtatcaagatggaaaaagaaaatctaaaatagctgggccacatgatgccttatctcctgatcataagtatgctttgaatttagcactgtttatattatttaaatatgcctttctttacctgcaaattttacatctgagggaatatataatttttccctaat

SEQ ID NO: 353981 - DNA, 584 bp, Homo sapiens
actatgcgatgactacaccagagcagactagaaacctttactctagaccctctctcatttaactaattatgtgaccttgcacaaactccttaacagtttggagtctcatttttttatttttataaaataccaggaactttcaccaacaagctctgttccggtttaataccatcctttgtttcagaagtaatatacatgaagttttcctattgtgtttaatatctaaaatatatacaaaattgtacattattgtgaacatgaatggtttacacatattctaagctcaaagcatcataggactgttgggcttctcaaaatagaaatatttgtaataaaccctaaaactcatgaatgtwacaaataaaacaatactttaataaattatagaatttctttattttttattaatatctacatactgtagtatcaagatggaaaaagaaaatctaaaatagctgggccacatgatgccttatctcctgatcataagtatgctttgaatttagcactgtttatattatttaaatatgcctttctttacctgcaaattttacatctgagggaatatataatttttccctaat

SEQ ID NO: 353982 - DNA, 584 bp, Homo sapiens
actatgcgatgactacaccagagcagactagaaacctttactctagaccctctctcatttaactaattatgtgaccttgcacaaactccttaacagtttggagtctcatttttttatttttataaaataccaggaactttcaccaacaagctctgttccggtttaataccatcctttgtttcagaagtaatatacatgaagttttcctattgtgtttaatatctaaaatatatacaaaattgtacattattgtgaacatgaatggtttacacatattctaagctcaaagcatcataggactgttgggcttctcaaaatagaaatatttgtaataaaccctaaaactcatgaatgttacaaataaaacaatactttaataaattatagaatttctttattttttattartatctacatactgtagtatcaagatggaaaaagaaaatctaaaatagctgggccacatgatgccttatctcctgatcataagtatgctttgaatttagcactgtttatattatttaaatatgcctttctttacctgcaaattttacatctgagggaatatataatttttccctaat

SEQ ID NO: 353983 - DNA, 541 bp, Homo sapiens
tataaacttcacaactgcctgctttgtcgtatcattacattcttgacagctcataaatatagtcaagtggtaggttaagactgcagttattcaatttgtttaaattagttgcacaaataaaatctgctggtacatagaaaagcctttccatcaccatatcagtgtgctctgatgatcagtgtgctctgatgatcaggacttaaaaaaaagtataagaaataaacaaaatgatattatagtaaacaaagaattatgcatcttttaattcaatcaaattctctatttgagttcccagtatgataggaaacaaatgctggttagagaaccagatggacaaacagattgaaaaacatgttaaataaaacatgtccactagtgttttctagtatttayacgtctagtcttcaacaattataaattaatcaaactttatcttttccaatattagtcttttaagttaataccttttcatgaccaaattatttctctacattaaatattgtaccatattaaaatgcacaaattatatcattacctcagt

SEQ ID NO: 353984 - DNA, 541 bp, Homo sapiens
tataaacttcacaactgcctgctttgtcgtatcattacattcttgacagctcataaatatagtcaagtggtaggttaagactgcagttattcaatttgtttaaattagttgcacaaataaaatctgctggtacatagaaaagcctttccatcaccatatcagtgtgctctgatgatcagtgtgctctgatgatcaggacttaaaaaaaagtataagaaataaacaaaatgatattatagtaaacaaagaattatgcatcttttaattcaatcaaattctctatttgagttcccagtatgataggaaacaaatgctggttagagaaccagatggacaaacagattgaaaaacatgttaaataaaacatgtccactagtgttttctagtatttatacgtctagtcttcaacaattataaattaatcaaactttatcttttccaatattagtcttttaagttaataccttttcatgaccaaattatttctctacattaaatattgtaccatattaaaatgcacaaattrtatcattacctcagt

SEQ ID NO: 353985 - DNA, 550 bp, Homo sapiens
aagtttatttacaagttctgtgtagaaaagctattatatttctctgttgttattggggtttatccttctctctcttgtttttcagttcttttaaatgcttgctttaggcattcagaacacctgcttgcatggactagcaacctgaggtgccccactctttctgtacagagatattggtgcaggggggcctttacatccaggcagatctccaggtagttggagaacttgctcaccttgatcagaagcctaatctgcccctctcttccatgtctggcccatcttctgtgcatagattgtggtgcagtggggccctctctgtttcatgcccaggcagatctgtagtcattcagagcacctacttgcctggttcagcagcctgagccattccactcttcctgtgcagakaatctgatgtagggcaagggcttctccactccaagtccaggcagatctccaggcattcaaatcacctccttgcccatattggcagtctgagctgccccacttttcctgaacagattgtaatgcagcagggccctctctgcttcat

SEQ ID NO: 353986 - DNA, 553 bp, Homo sapiens
agagcttctcccagtaaacaaaagtcaaatgtgtatatctagttacattggctgcaactggctcttacctataagtgcaatctactggcttatagattgaattgcacagcctaatataaaacctgctcaaagatgttcatagggctatagaagcaatgccaaaataccctacccagtattttctacagtcacaccacctggagaggggatggtgaaagggaaagtaaaagaaaaaataataatattataaaaaaagaaaaattaaaaatcctatccaaacaaaaattattacaaaaatcagaagtaccagtgtctccagatgagaggaaaccggcacaagaattctggcaccataaaaagtatgattgtagtgatatctccaaaggatcacactagctctccagcaatggtccctaaccaaaagagaaattcagaaataacagataaagaactcaaaccatgaattgcacgaagctgaaagagaccaagacaagttttaragtcaacacaaaggaacttctaaataaatccaggaaataaaggaagagataaa

SEQ ID NO: 353987 - DNA, 524 bp, Homo sapiens
tttatttgtttgagctatagaatgtgctgcaattatttaaaaatcacaggcttcttctgtactcagcagctggtacagattttgagaaaaagaagtcatgagtacaaagggacaacacaaacatcaaayatgatgataaatttggcttattcactaccttgatattaaatttacaacaacttaacttatatgaagtatatttgtatttattttttttccaaaaaattattccaatacgagctcaagaatattggttgaaattatgagtactataatattgaagttattatttgcatatgtgaaactaatataaacctttatcatttttcatcaggtacttcaataggatgttggaaaagaagacttccactctaataggatgaaaaaatgatcatttatttacatcattctgatttcttttaattgcttcacaatccactataaagaagattcgctctgaccctaaattttctactttttttcccacttttctctcacataaattaggtgtttcattctttttc

SEQ ID NO: 353988 - DNA, 595 bp, Homo sapiens
tggctttcctccatctttcctatgaccttatcaatgtatgtcccatatattacagccacacccatcatatttttgcagatagggcttttctttctgaagttttgtcatctgtttgttcataaggtcttcattttctgtaaatttttgtcacctaaaagctgccacagtccttctcattatttatattgcattagcttccttttgtataattatttaacttttgggataattatctctaatttcttaatagactttgaaattgagagcaaatactgtggcccatattcctttaytacaatttatattattatttattacatttattttctccagtaagagctcaataaatatttactgtcttgggaagtttcccaaaacagaaaattatttctcaataatatacaatggtgtggggaaattgtcactctcatatactgcttgtgggcagtaaatttagtttagttaaataaatatcattagataggcctctgtgaaaacctctgccccttttcatctcagccactgtgagaagtttctccatttgttcttatggcaaagaatgcataatcctagcacttgactgtgtctctcaata

SEQ ID NO: 353989 - DNA, 620 bp, Homo sapiens
attgtcactctcatatactgcttgtgggcagtaaatttagtttagttaaataaatatcattagataggcctctgtgaaaacctctgccccttttcatctcagccactgtgagaagtttctccatttgttcttatggcaaagaatgcataatcctagcacttgactgtgtctctcaatactctgaaatttctttgagaatgaggacagagaaatgttcttgttgttcagcgcaatccctatatagcattcactgaattaatgtctgttaagtgaattctaaagttacasaaattttctgcttaatttttttattatctgctattacattaacaagaaatattctaagatcatatgatgttggagtgacgaaaatagttattttctaacacacgaactttttgttaacctcattattccttattttatgcagtaaaaatcatctgaatgtacataattttttctttgttttgggggataaattctactttaaattcaactttctatgtcttactacaactagtaaatgtaagataatgaaatttttctcctgactagaagaaataattttatgccaatctaaatacagcacccatccggagggggcaaactgatttcctcac

SEQ ID NO: 353990 - DNA, 570 bp, Homo sapiens
gacacacaaaaaatggaaagttattcagtgttcatggattagatgaatcaatattgttaaaattcccatactatccaaagcaatctactgattcaatagaactcctatcaaaataccaatgatatttttcacagaaatagaaaataataatgctaacatttacatggaaccacaaaagacccagaataaccaaagctatcttgagcaaaaagaacaaaaccaaaggaatcacattacctgacttcaaattatactatagagcaatagtaactaagacagcatggtattggcataaaaacagacacacagaccaatgagacagaaaagaaaacccagaaataaatccacacatttacagtcaactcatttttatcaaacgtgccaakaacatatattggggaaaggatggtctcttcaataaatggtgctgagaaaactggagatccatatacagaagaatgaaattagacccctatctctcaccatataaaaagacatattaaaatggattaaagacttaaatctaagacttgaaaatatgaaactactataagaaaacattggggaaac

SEQ ID NO: 353991 - DNA, 351 bp, Homo sapiens
gcctttgtaacatgcaattatgactactataaacaattttacatgcaaggtatgtaagaacagtaaattgtgttttttttccctgtaaaaggttacaaaaggtttttgcttctttaaaatttctgagtcatcattttggcaaaatatataatttatgggaatctggaattccaaagtcaaacttcagtttcaaaattctctttctgaatgcctggctttttggatggatcagagagcccctgaaaacatccagaaaagaggtaaacagaattatttgacatttttaggyacatgggattgctaaaatgatgttcagtcttctttaggttatatttttgtgaataatgctaa

SEQ ID NO: 353992 - DNA, 516 bp, Homo sapiens
tttatgaaggaaaagtttcagtattctttggcaggctgacaactcacaattacaatgttctttctttctcctcctatttagtactcattctaaggaaggattgggccacctctaaatcattttaagagaaagactagtcccagatttctatagtatagttttccatagattgtgaatttgtatctaggcatgagaaaagtctcacttgatatcatgctacatttccaggratgaaaaactgcaaataaataagccatcatttgatatcctgctacatctccaggaataaaaagctggaaataaataagccgtaagtagagaaatggttaaacaaattccagtgtttcagtgctatgaaatactattcaacagttaacaagtctgaggaagaaacatgtatacttacatggaagaataactatataacataattggtaaaatagcaatttatggaacaaattgaggagtatgttctcattttttgcaaaaatcatatgcacttatattcatgcattt

SEQ ID NO: 353993 - DNA, 516 bp, Homo sapiens
tttatgaaggaaaagtttcagtattctttggcaggctgacaactcacaattacaatgttctttctttctcctcctatttagtactcattctaaggaaggattgggccacctctaaatcattttaagagaaagactagtcccagatttctatagtatagttttccatagattgtgaatttgtatctaggcatgagaaaagtctcacttgatatcatgctacatttccagggatgaaaaactgcaaataaataagccatcayttgatatcctgctacatctccaggaataaaaagctggaaataaataagccgtaagtagagaaatggttaaacaaattccagtgtttcagtgctatgaaatactattcaacagttaacaagtctgaggaagaaacatgtatacttacatggaagaataactatataacataattggtaaaatagcaatttatggaacaaattgaggagtatgttctcattttttgcaaaaatcatatgcacttatattcatgcattt

SEQ ID NO: 353994 - DNA, 516 bp, Homo sapiens
tttatgaaggaaaagtttcagtattctttggcaggctgacaactcacaattacaatgttctttctttctcctcctatttagtactcattctaaggaaggattgggccacctctaaatcattttaagagaaagactagtcccagatttctatagtatagttttccatagattgtgaatttgtatctaggcatgagaaaagtctcacttgatatcatgctacatttccagggatgaaaaactgcaaataaataagccatcatttgatatcctgctacatctccaggaataaaaagctggaaataaataagccgtaagtagagaaatggttaaacaaattccagtgtttcartgctatgaaatactattcaacagttaacaagtctgaggaagaaacatgtatacttacatggaagaataactatataacataattggtaaaatagcaatttatggaacaaattgaggagtatgttctcattttttgcaaaaatcatatgcacttatattcatgcattt

SEQ ID NO: 353995 - DNA, 572 bp, Homo sapiens
tgctagaagcaattcaaataactcccggcattgtgtaacctctgggaaatatttttcatatagcacctcagcaattgtcctttccttgtaagttgttctcttctggccttgtaggattttactctatgcatgcacttactggcattcattcaaagacacaaaaggacctctatccaaatttctgatgctctttcttagtgtagctctcttcacttgcgtaccctgctctgcacctaattctagccacctaggcatttcagaatttcagtctaactcctcgactcagagagactgtatggaatttccttctgtgaaccacagtctggtaattacctcagacagaaagtcttggcaatgtggaccttacctcctttgttcccttttctaaggaatcatagttcatttctgcctgttgttcagtgtctgaaaattgttattgtctatattttgyccatttttctagtattttattgtgggaagttaattctggactgtcttatcctgtcataggtggatgcagaaaaatgcctgttttaatacctatagttaagccaacatcttatggttattta

SEQ ID NO: 353996 - DNA, 542 bp, Homo sapiens
tttgaaagcttagttgtagaaaaactttgcctttggctatgtctgttttcacatgggagaaacaaaatgtttcctttaaagggtagaatggcaacaaattctcaatacataaagttgagaattgtaaatatcaggattttrtcaagtatatagtacatatagtgtgccaactactgtggtagtcactgtacaaaagaaataaaaggtattgtccctgcccttaagaatcttctcttagctgtagattagattgaaatgcatgaaacagccagagaagaacccaagacttacttccttataacaatacagtctttttcctctgtaacttcagaataaattaaattttgtgcctatgcctaactttcactctttgaaagtgctttaatagattctttttggaggaaggagatcagacaatataagttttaaccactgagaaattcagtatcaacaaatatgaaactgcttttagcaaaatagtaatgtttatactttttattaatataattttaaaaacaaaagtctagttagtttttgctatt

SEQ ID NO: 353997 - DNA, 502 bp, Homo sapiens
caggtgtgcaccaccacgcccagctatgttttttttttttttttttttttttggaattttaagcaragtcggggtttcaccatgttggccaggctggtcttgaattcctgacctcaagtaatccgcccgcctcagcctcccaaagtgctgcgattacaggcgtgagccaccgtgcctgaccctgatggtttatttctattatataggcagatctataaaagatctgaagcaaatatgccacaatgttacatttgtgaattcaggatggtgagtaaaaagtgtttattatatcatctgctgcactttatcttcaaaaatttcccaagtagacaaaaggaaaaaagaaaaaaggtagggtgggtgggagccaaacagaaggcttggaaaccatttctgtgctctttgcacagcaaagggagcatgcagatggcgagttaacatacctaggaggctcccctggggtttaatgttgcattgtgtaccctcagaacgactgctcagc

SEQ ID NO: 353998 - DNA, 502 bp, Homo sapiens
caggtgtgcaccaccacgcccagctatgttttttttttttttttttttttttggaattttaagcaaagtcggggtttcaccatgttggccaggctggtcttgaattcctgacctcaagtaatccgcccrcctcagcctcccaaagtgctgcgattacaggcgtgagccaccgtgcctgaccctgatggtttatttctattatataggcagatctataaaagatctgaagcaaatatgccacaatgttacatttgtgaattcaggatggtgagtaaaaagtgtttattatatcatctgctgcactttatcttcaaaaatttcccaagtagacaaaaggaaaaaagaaaaaaggtagggtgggtgggagccaaacagaaggcttggaaaccatttctgtgctctttgcacagcaaagggagcatgcagatggcgagttaacatacctaggaggctcccctggggtttaatgttgcattgtgtaccctcagaacgactgctcagc

SEQ ID NO: 353999 - DNA, 580 bp, Homo sapiens
aggagaatggcatgaacccaagaggcagagcttgccgtgagccaagattgcaccattgcactccagcctgggcaacaaagtgagactccgtctccaaacaaacaaacaaacaaaaaccctcaaaagatattatcaatctgaattcacagcacatttagaggattctacatcatgatcaagttttattcctggagtgtaaggatggtttaatgctggaaaatatatgaagattaatcaatgtaatattccacattaataaaagacaaaactacatgatcatcacaactgatgcagaaaaaagcatttgacaaaagataatacccttttcctggtaaaaacaatcagctaggaataaaaggaaaccacctcaacattataaagccatgtatgaaaaatgcacaacttacaccatactcagtggtgaaagactgaaagttyttcttctaaaatcaggaacaaggtgaggatgttggttcccaccacctctattcaatatactactgggagtcccagctggattaattagggaaggaaaagaaatacaagatatccaaattggaaatgaagaagtaaagctatc

SEQ ID NO: 354000 - DNA, 592 bp, Homo sapiens
aagaataaaacacttagaagtgaaattaaaccatcaagtgaaagacttgtacatccaaacactataaaatggtgaaagaaatgaaagaagacataaataaagaaaatacatcccatgttcrtgaattggaaggcttaatatcgttacaatgtacacactattcaaaacaatatattcagtcctctttaatccctatcaaaattccaataattttttttcaaaaacagaagaattcattctaaaattgatgtagaacttcaagagaccctgaatagccaaaacagtcttgaaaagaaacaaagtttgaggtctctcacttcctgatttcaaaatatattgcaaagctacagtaattgaaacagcatggtactggcataaagatatacatacagaccaatagatttggatagagagtccagaagtaaatcctactgtgcaggaggacaaatctctgcattgccttggatgacccagctctgcctactcccacttgcattcttggaataaccgtaaaatgaaacatcctgaaattagaaggacctgtttggaagactctagacagtgtcatcattccttccagaactgaatattt

SEQ ID NO: 354001 - DNA, 629 bp, Homo sapiens
atgtcatcactcttaagcttagccttacacaaagttctaggacatggacacaatccagccaaattctttgctatggtgtagcaagggtgacctttgcttcaattcctaataatgttctcattttcatctgatacttcatcagcctgtccttcactgtccatatttctatcggtattttgactacaaccacttaaccagtctctaagaagttccaaattttccctagtctttctgtcttcttatgagcccttcaaattcttccaacctctgcccattacccagttctcaagctgcttccacatttttaagtatttttatagcaacaccgcactcttggtaccaattttctgtgttagttcatttgtgttgctataaagaaatgcctgaggttgggtaatttataaagaaaagaagtttatttggctcaaggttttgcaaactgtacaagaagcatggcaccagcatctgcttctggtgaggaccttaggaagctttgactcatggtggaaagcaaagggaaaccagtatgtcacatagtgaaagaggtagcaagggagatatgaggcrcttttaaacaactaggtctcacatgaattagtagagtgtaaatgcattcattaccacaggga

SEQ ID NO: 354002 - DNA, 534 bp, Homo sapiens
gagccaccgtgccaggctggactcttagttttagcttatgttctcatttcccatcataggtaacctctttaaaagacagtcgtgttatttagttgtttcagaactactgattgtactgccactattaaaataattttataaaaacaccttaacaccttcttcatacttacaagttgaggtttaacatttgtatygtatattcaattaatgacaaagggtgtaatttctattcaatttaaaatgttaatatttttaaataaaataattatatttgttgtttaacatattttatagatgtaattataattagtgattataatctttttgagctattttttccatacttgttgacttagaattttattctaatgtaataaattgtgtgcttccatttatacattttcttcaacaaatacattttttcttattttaagcctctctatgttaaaatttactctttttggattgagttaatattatattaattattaatatataatttatcattatatagttaataaaaataataatgtg

SEQ ID NO: 354003 - DNA, 514 bp, Homo sapiens
aataaaatcttttattttttttctattcaaatcattatagtcttttaaaggtaaatatggtagaccttgttttttactcattttcattgttctgtgtgcactaaaagtaatttatctcaatgctaggctctaaaacacactaaacagtgtgcgggcaaatttcagtactactttcaatcttctctggaatactaggtatgatacasaaatctaagggagaaatgatataattttacatacaattctagaaatagtcaccaattagaatgtttaaacagattactttgtcattctttgtgttacaaggatgaaacgagagaatcaacagaacttagagtttaaggatatagccactgtttctgcactcttgaggtcaaatctgtagccgtgcagcttttggcaaataatttatacctctctctgagcttcagtttcctcatttgtaagatgaaaatgaaaataatagatttatctgaatgaatgcatgcaaaaaagttagaataagtataagcac

SEQ ID NO: 354004 - DNA, 463 bp, Homo sapiens
tataacaaattaaagtaaatatagctaaattaaatgtacacattttactcccttaagtaacaactgaaaaacaataacagacatatagctgtaatatggaacttagtataatagaaattcagaaaagtggaatgtagtataacagaaattcaggtaaatgctgctaatgctcccttgagtaacaactgagaaacaagaacagacatatagcaaataagctatgatggacttgtgagtgttagtytggccaggctgaatcacatttcacaaatatatttctatttttctggttagggtggactaccaagaagattctcacatgagggcgcaagggaggcaatagccattttgtagcatacacgtgtgcgcagacacacacacacacacacacactgttgctaatcggctgactcacctcattggtgtgaagcagcagccgtgtctgcaattgctctaccttgcc

SEQ ID NO: 354005 - DNA, 479 bp, Homo sapiens
tcaacacacccagctaatttttgtatttttagtagagatggggtttaactattttggccaggctggtctcgaactccccacctcgtgatctacccacctcagcctcccaaaatgttggcattacaggcacgagccaccacgtctggccttgcaattttcaaataactacaactttaaggtaattctatgtkttcattgctgtgaaaattacacaaatgaaaaaaactctaaattcttataattgataagtatcagattaaatatatatatatatataaaatacacacacacgcaaatatttttacatttaaaagttcaaacaacaatttggattttttattggtaagtggtaatttacagtatttctgcttttcaataccaaaattataccagtaggtatttatagtctctagagagttcttacaacatagatatacacaaaagcactgtagtaggtagactataagctggttcccttc

SEQ ID NO: 354006 - DNA, 479 bp, Homo sapiens
tcaacacacccagctaatttttgtatttttagtagagatggggtttaactattttggccaggctggtctcgaactccccacctcgtgatctacccacctcagcctcccaaaatgttggcattacaggcacgagccaccacgtctggccttgcaattttcaaataactacaactttaaggtaattctatgtgttcattgctgtgaaaattacamaaatgaaaaaaactctaaattcttataattgataagtatcagattaaatatatatatatatataaaatacacacacacgcaaatatttttacatttaaaagttcaaacaacaatttggattttttattggtaagtggtaatttacagtatttctgcttttcaataccaaaattataccagtaggtatttatagtctctagagagttcttacaacatagatatacacaaaagcactgtagtaggtagactataagctggttcccttc

SEQ ID NO: 354007 - DNA, 605 bp, Homo sapiens
acttttgtgggggaataggatgactttctaagaaaaaagtgaacttacaacttttattactttatccaaggcagaaaaatttgagtytatgaaaagactcaaatgtattctttcaatatttgagacactgttgttaagaattattttataaaaacacaaagatgaacgaggccaggcatggtggctcacgcctctgatcccagcactttgggaggccgaggtgggtagatcacctaagttcagacgtttgagaccaacctagccaacatggtgaaacctcatctctactaaaaataccaaattagccaggcatggtggcgggcccctgtaatcccagctacttgggaggctgaagcaggggaatcgcttgaacccaggaggcggaggttgcagtgagccgagatggcaccattgcactctagcctgccgacaagcgtgagactccatctcaaaaaaaaaaaaaaaaggaatgaacttaatttctcacctaaagtgctgttaaccaaggatttgtacatattatacaaaataaatggccataagggacacaaagaccttcgcctattgtggaatgaatactattgtttactagatatttacatttt

SEQ ID NO: 354008 - DNA, 608 bp, Homo sapiens
gttatgaccatacaatggaatactattcagcaataagaaaaaatgtgttatcaagccaccaaaataaatggaggagacttaaatgcatgttactaggtgaaagaagccccagtctgaaatagctacatactatataattgcaatggtatgacatctggaaaataaaaaaattattgagacagtaaaaccatcaatggttgctakgggttgggagaatggaagggataaagataaataggagaatcagaagggattctcaggactgagaaactactgtggatgatattgtaatggtggatatgtaacattatgcattttgcaaaacccatataactgcacaaagagcaaaccctaatgcaaataatagactttagcaaatgataatgaattaatataagttcatcaattttaataaatgtgctaaaccaatgcaagagttaataataggggaaactgagggcagaagaagagggaatatatgggaactctgtaatttctgctcaatttttctgtaagccaaaaactgttctaaaaatgaagtctattcatttataaaaataatcctaaaaataaaaagagaaaatttttaaatagtatttagaactaca

SEQ ID NO: 354009 - DNA, 608 bp, Homo sapiens
gttatgaccatacaatggaatactattcagcaataagaaaaaatgtgttatcaagccaccaaaataaatggaggagacttaaatgcatgttactaggtgaaagaagccccagtctgaaatagctacatactatataattgcaatggtatgacatctggaaaataaaaaaattattgagacagtaaaaccatcaatggttgctatgggttgggagaatggaagggataaagataaataggagaatcagaagggattctcaggactgagaaactactgtggatgatattgtaatggtggatatgtaacattatgcattttgcaaaacccatakaactgcacaaagagcaaaccctaatgcaaataatagactttagcaaatgataatgaattaatataagttcatcaattttaataaatgtgctaaaccaatgcaagagttaataataggggaaactgagggcagaagaagagggaatatatgggaactctgtaatttctgctcaatttttctgtaagccaaaaactgttctaaaaatgaagtctattcatttataaaaataatcctaaaaataaaaagagaaaatttttaaatagtatttagaactaca

SEQ ID NO: 354010 - DNA, 519 bp, Homo sapiens
tataactatgcccctcacttaatttttactttaaattattttaatttggccaagcatggtggctcactcctgtaatcccagcactttgggagaccaaggygggcggatcacctgaggtcaggagttcaagaccagtctgggcaacatggcaaaaccttgtctccactaaaaatacaaaaactatatggacgtggtggcggcggctgtaatcccagctactcatgagactgaggtaggagaatcgcttcaacctgggaggtggaggttgctatgagccgagatccttccactgcactccagcctaggtgacagagtgagactctgtctcaaaaaataaattaattaattaaaataaaataaattgtcttaaataaccatataaatgttattcacatattctgtccttctcagtacaagagtgagaataaaaggaagatcattgaaacattcattgtatttctccttgacatactataaaaaataagatatctttaatttcataccgagtaattttctaaa

SEQ ID NO: 354011 - DNA, 596 bp, Homo sapiens
ttgcttgcactcataactattcatctacgatgggactgccttttgtctaaactactgtaaaataaaatatatctaacaatggatcattacctcattacctcattaaaagcagctctcttattgaagaagaatacattttaaaagacagcattttcataagagaaatgtttttaaacctctgatttggcaggaaaattcaaagcttaaaagcattggttgtatttttgaagcactttttatattaattgttagaaaatgccaaagtcccttgtggtacacaaggcaaaacaagctgattaagaggcttagtattatttttaaattacttaattgccatttaatgaaatagggagctccaacttycacgctacctaataaaatggttcccctgcaaggaatgaattgctggttgcattgaccttgcagagcaagctgggcttagaaaagccacataatacatttctacaatgatggtatagggactgaaagccatattactggaaatgtgcatgttagcatttatatcccttttataattgctgaaatgatggccaacatacattaagaaatgtctgggtattccactgggtgccctg

SEQ ID NO: 354012 - DNA, 533 bp, Homo sapiens
catccttcaatccaatcaagttgacactcaattttaaccatcaaagcttctaataagaaaactacatttcttatctttcttatatctaggtaaagtgtccccccattccctgttttgggtgcctgaaagacactctctttgtttttttattttctttagttagactataatatgatgagctgcaggctttgytgttgttgttgttgttgtttgttttgttttgttttaatatttatccacttggtgttctgaacgttttggatctatgttttgatatttgttagtatttttggaaaaaaaatagaggcctttatttctttaaatattatgttttccttgttgatttatttattctctttttgatattgtaattaggtgtatgttatactgtttggtattattccatagttcttgaatgctctgttctgttcttttattttttttgtctgcattttagcttgaatcatttccattcatttatattcaagttaaattaattctttcttatccatgctaaatttactgatgaaccc

SEQ ID NO: 354013 - DNA, 564 bp, Homo sapiens
ggcaagggtgcaagttaaatcttacatgaatgttggcagacaaagtgagagcttgtgcagatgttttttaaaaccatcaaatattgtgaaacccattcgctatcatgagagcagcacaggaaaggcctgctcccatgattccatcatctcctaatgggtttctccctcaacacatggaaattatgggagctacagatgagattttgatgggggcatagagccaaacaatatcacatagaaaacaagaggatggaggtatttttaggagttgatccagaagcgaaataaatgaaccrttagtcaattaacatggtaatctgcaggatatatgagcagtacattttcatagtcaccaatgcatggggaagtagaggtagcctgggaggtagggtaaggatgagtgggatatcacatcattaaaaaagttcatcaaaatggctttttagtgactgaatgttgtgttcccccaaagtttatatattgaaattttaagccccaagttgaaggtattaggagtaggcttttaagagatgattaggttatattctggatctgacaggaata

SEQ ID NO: 354014 - DNA, 624 bp, Homo sapiens
gccttaatgggtggaatatgaaatatggaagaaattaacttctgtaagaggaagtggtaccaacaaaggcatgaaacaaagatattttatatatatacatattcagtaaattttctagattaattagactgatgttcaaggatcattacatagttgggatttattgtagcccaagatttacatagaggacaataaggtaatgaggctggagatacagtctgctatcatattgtcaagggcatttaaatgccagacaggcatttagattttttagggtgtctctaatgtctgaggatacaccatggagggaaactgccaagtttttctggaaaatattctttggttcttgggtaaaccataggatcaagtcaagtagcagattaatttcattttacagggcattgaaagagaaatcaagccacaaattgaaacaatgttgaaagaaggcaactagaataagagtctacatagtaagttagtacaaaaaaaaaaaaatagataatstgttatctcagcacttttaaaataaagatagtagatctctacaaatgacctaattaaaaatccaagccaagaagccaaaagccattccacaacaactacaaataacaatgacaacaacaa

SEQ ID NO: 354015 - DNA, 574 bp, Homo sapiens
tgtctggcataagctttggacagggaccacaacctaacctagttcaggagtgaaaaaaaaggggggggggggaggagaaggaggagaaagggaggaaaggaaggaaaaaagaaaaactagatgtgtttttagatgcacatttaacgtacatattatagaacatgcaaaccaaatgagtgtttattccttcaataaagttacaagaggttacacacttactctawggattacatgtgaatcatatatgaacttctgtttttgaagccacccctcaagagccaacaggattctttaagtatcccagtggtactaaacccatatcctttgagaatgctttcttagaacgattcacaaactggctctgcaggcttttcaaaacttaagttctagaagttgtacaataaaatgacaggatcgctaaaataagtgtatggcattcgatgtaactgcttgcaaaaacaacatccaattttaatattggcctaatcgtggctaaatattggtataataatagttaactatctgctaagttctattttaaagctttattttatttatcacacaacaaacctgt

SEQ ID NO: 354016 - DNA, 574 bp, Homo sapiens
tgtctggcataagctttggacagggaccacaacctaacctagttcaggagtgaaaaaaaaggggggggggggaggagaaggaggagaaagggaggaaaggaaggaaaaaagaaaaactagatgtgtttttagatgcacatttaacgtacatattatagaacatgcaaaccaaatgagtgtttattccttcaataaagttacaagaggttacacacttactctaaggattacatgtgaatcatatatgaacttctgtttttgaagccacccctcaagagccaacaggattctttaagtatcccagtggtactaaacccatatcctttgagaatgctttcttagaacgattcacaaactggctctgcaggcttttcaaaacttaagttctagaagttgtacaataaaatgacaggatcgctaaaataagtgtatggcattcgatgtaactgcttgcaaaaacaacatccaattttaatattggcctaatcrtggctaaatattggtataataatagttaactatctgctaagttctattttaaagctttattttatttatcacacaacaaacctgt

SEQ ID NO: 354017 - DNA, 603 bp, Homo sapiens
taactactctctgaccccactactactccaacagaaaatgctgttgtctctaacttcaaaatgtatccccagaattcaactctttctcaccacttccactgctactatcctggtaaaaccaccaccacctccaactggtctccatctccactcctggcctgctatcatcaggcaaccagggtgaccatgtaaaagcataaatcaaatcatgtcactcatttgctcacaactctcaaatgagttctcatttcccctggagttgaagtcaaagtccttacaatgttctataagctttattcgatctgataatctctcaacttcatccattttttccttttgttcgctctgctccatgcactccctggcatacatcaaacaagctgatttcagtgtcttcgtatttgctattctttctgtctgaaatgttcttccctcagtttcctgcatggctcaaacctctactcaactgtcatcttacagtgaagttttaaatgcccaccttatttacagtaacagcctcacctcactactgatccccaactccaacccacattyttcattattttcctggtctccctctctacaaccaaatgtcagcttcat

SEQ ID NO: 354018 - DNA, 345 bp, Homo sapiens
tggaaaactgaggttagaaagattaagaatgaggttagagagattaaccygccaaaatcatacatttactgaataactggagtagaacattggatttaagcctttgaatttgcagtgtttgatttttgattcaaatttgaatttagaagttgattctaaagctcatggtcttcaccactgtgctctatcaatcacctcagtgcaaaagaattacattaattgactgtttagtagagtttatgataaacccagaattttaaggtgtatcacttgttccatatattgaagcatttagtttgtttacatttaaaataattactgatacatttgggtttaaatttactg

SEQ ID NO: 354019 - DNA, 604 bp, Homo sapiens
tttacatgaaataaatgcaagtgagaatttaaccatcatagaattacaatttttttgaatgataattaatcatccatgttgtctaatattttattattgtatggtatataccaaaccaaaagataccacattaaataccaggcaaacagcaaagtaatatttccaaaatgaggaagtaattttatggccaataaattacaaatatgataattgttttaaatcattctaatacagtacaaagttttcttgttgggcgtaattctaatccttttgttcaatgatgaatttttttttatctgagtttcagtattcatctttttggatattcctttacagatagggaaactaaaacaattgactctggttgagtaaccaaaatattaacaaaaatgacctagtgccaaagtggaattatagcttctgtgtttcacagagggactgggatacaaactgaaagctttaaggaaaaaaaaaaaaaaaatatatatatatatatatatatatatatatataktaggacgaggggccacaaaaccaactttttttcttaatatgaaattctctctttcagaaaagtttatgtttgggatattctaattatact

SEQ ID NO: 354020 - DNA, 561 bp, Homo sapiens
gtgactgagcgtcctgagttgagcaactccccaccagccccattcctctccctgaaataactagagaacatgctaagtggaactcaaggaatctcagaagatacagaaagaaccaaggttaactacttgttgttactgtgtctccatttacctccaacagctgaagtttgaggaaacataattttataatcaaaatctgaccatgaaggaaactgggttccataacaaatcaataattggaccaaggattaaactaattcatctagcgcataacccataatgttatttatggaaggaaagactcaaatcacaaacaaagcacatgaaaaaggcaaacccttaaatatttgttctactgattacggctctatgatttttatggtacaatgtaaggactrcacacttgttagcccctcaggaaagagtgatctttggtcttctgcatgactcccatactcagctgatatgatctgaaaaaggaacatggctcttcttatccattgcaatcttcacttcttcagtctttcagtgatgtggcttaaagctttctgtttgttgctc

SEQ ID NO: 354021 - DNA, 582 bp, Homo sapiens
tttttataatacattgatagaaataggatgtcaaattgttctccaagtgaatcatacaaattaatcctctcttccatacaatataaaaataccttttaacacatatattaacaagtcttagataaagtgttatcattctttatggtagttatgaatcagatatgtagagaatcttatcctattattattttattttgcatgtataaatctgaatttcttttcaagtattttttggctgttttggggttgactgctaattttctttaccacttttcatcttacttgtaaataagatttgtaggtgttatttatatttaaataatattagatctttgactaatcttttgtaattttttggctggcttttctttttccttcctttttttttttttttctttttgccacataggcatatatatgcttttttattttatgggttccagttttgggttacacttttaraaaatttttctctactctatcattataaaaaatttacttatgttttcttacaacacttccaggattttacttattgcatgtatatctgtaatacttttggaattaattttggtacaaaaa

SEQ ID NO: 354022 - DNA, 580 bp, Homo sapiens
gttgataggtcattctataagtacatagatgaatgaatggatggatggtagtcttgagagaagcactgcatccaggaaaggcaaaactgtatccagagtatatatcgatttcagtaagaacaaactactgcctcttctatgatgaaagtggtccaattgaatcaacttgccaccaggtagctggctgattaccatgggagaatggtgccatatcagtgactcagtgttggtacctgatgctggcatattgggcactcagcagtggctgcagccaagtagtctttgtgggtggaagcccatgttgctgagtccatgcatgacctccatctgtgccacaatagctattttgttcatgaatcgattgggcaatgacagtagtggctggagaaagagactgacatgtcatcttctccactccatcttctccactgctgagtaacacttggattagcactcacatggacacaaatattgatatggtttggcttttagtccccaccgaaatcccaccttgaattgtaataawccccatttgtcatgggatggactcagtgggagttaattgaatcatgggggtggg

SEQ ID NO: 354023 - DNA, 542 bp, Homo sapiens
gcatacatgcaaaaattctaaatgaaatggtaacacattaaatccaataacatataaaagggataatacatcattgccaagtggggcttatatcaraaatgcaagattatcttaacatttgaaaagcaatcagtgtattataatttaccatattaacagagtaaaatgttgaaatcataatcatcccaatagatgcagaaaatcatttcacaaaatccaatttcatttctgattttaaaacaactttcatctaggaatagaagggaacttcttcatccaaatgtatgacatctacctaaacccttaggctaacaagtgttgaaacatcaaattctttcttcctgagatcagaaacatgataagagtgattgctttcaccacttctatttaacattttactgaaagttctagtctgtgcattaaaatttttaaagttcaacttacagtagcatcaagtatattaaatacttaggaataaatgtgacaaaagaggttcaagacctgtaaacgtaaaactataaaatattgctgtgagaagttaa

SEQ ID NO: 354024 - DNA, 686 bp, Homo sapiens
ttgtccattcccaaacacacaccctcactggaaaaactgaaggtctagatcacagtagaaggatttgaccttacctggagctgagtcaatttagagagcctagcgaaacacaggggtagaggaagcagcgggaaaagccctgttggttctctgggtccccagcaaagccatttctgacttttctcacaggagtccttggggagggctgccagaggcactggcataggaccacagggagaaagaaacttccaggtgaactttgtaacaattacaactgaacgcgaagtttcccagccagaatttgggggagggtgtgaatctggttgcagactcaacaggcaaggaggtgcaaaagccctgcttgctttctcagctgggaggctggtagcctggggcaagttctcagccctgctcactcactgcctggaaacagactcagtgctgtttgagggagacgatgggagtgagactggcctttctggttgtgtgggagctgggtgagacctttcccccacttctgtgacaacctgcatgacacagtagaggcagccataatcctcctgggaacataactccattgcctggaaaccacatccccatccccygcagcagccacagcgagctctgcccaaggagaatctgagctcagacatgcctaacccttctgccacttgatggcccttttc

SEQ ID NO: 354025 - DNA, 577 bp, Homo sapiens
taaaaaaaaaaaaagtagcagatattggcaaggatgtggagaaaagggaattcttatacatttttgtaagaatgtaaattagtactgccactatggaaaatggtatggagatttctcgaaaacctaaaatcagaactatcatatgatccagcaatcccactactgagtatctacccaaaggaaaagaagacagtgtatcaaagaatatctgcacttgtgtgtttactgcagcactattcgcaatagcaaagatatggaatcaaactaaatgttcaccagtttataaatggataaagaatatgtggyatatatgcagaatgcaatattacttggccataaaaaaatgaaatcttgtcatttgcagcaatatggctagaactggaggtcattatttaaactgaaataagccagacacaaaaagacaaatatcacatgttctcatttatatgtgggagctaaaatatttgatcccatgaaggaagagaatggaaagatagatagcagagactgggaaggctgactaggacggagcagggagggggacggtgaggctgaagagaagtgaattaaagggtac

SEQ ID NO: 354026 - DNA, 566 bp, Homo sapiens
aattccacctacaatatatatcaccagatcccctttctatgacaaaaaaaaaatacatgtcaatgttagagatggtcagcaaagaaactcaaacttattccaataggtggaactttggcatgacacacttaaaccggtggaaacctgcctgaatacttcacccaacccctccatcaccctctattatgcaagctgcaacatttcaagccaactcccttatttctctggtgagccctgtcaacactgaggtaatagaactggaaaaactcatcacttcaaaaggayagtcaaatatcagaatttatttcatttggtaaaaattctatcattgccaaataaagctaatgcaaatatagtaaaatatgcatgattttgagtaattcttttgttgaaaaggactcttggggagcctcaacttcatcctgcaacagcttaggcattcttttgcccctttgcccttttcatgccccatctcacaagtcatggaagctggggaggggagggtgcagaaaacccaaatgaactaatcggcatgtatttatgcatttagtctactctaattttat

SEQ ID NO: 354027 - DNA, 604 bp, Homo sapiens
tatgtgaggacagatccttgcagagatttccagaatactggaaaagagagctacacacagacacagcacaacagagagggtcctcgctgggttatttacctttgtaatgatcagcacaggcaagtgaggaaacaccccaagaccagggaaaggtccaaggtacactacagtcacagaagaacgggaatattgcctgttcccattagctagggtaaaaaaactyataatccacaaaggaatgggtagagtacacagaagggtcttgccttagtaggggggaatacttaattctaaactgtgcatttctctggtttcacgtaaatcttaaagcaagacatgaaagaatcaaactgtttcaaactattttaactatgtaccagaaaaaatcacaaaatatttatagaaatacaaaaatatctaccacccaataaagtaaaattcataatgactgacatctaataaaaattatcaagcatgcagaaacgcagaaaaatatgatccataatttagaaaacaatcaaaactgagcaggactgacatatattagaattagcagacaaggacattaagtgtgtaactagatttcatgtgctcaaaatgttaa

SEQ ID NO: 354028 - DNA, 604 bp, Homo sapiens
tatgtgaggacagatccttgcagagatttccagaatactggaaaagagagctacacacagacacagcacaacagagagggtcctcgctgggttatttacctttgtaatgatcagcacaggcaagtgaggaaacaccccaagaccagggaaaggtccaaggtacactacagtcacagaagaacgggaatattgcctgttcccattagctagggtaaaaaaactcataatccacaaaggaatgggtagagtacacagaagggtcttgccttagtaggggggaatacttaattctaaactgtgcatttctctggtttcacgtaaatcttaaagcaagacatgaaagaatcaaactgtttcaaactattttaactatgtaccagaaaaaatcacaaaatatttatagaaatacaaaaatatctaccacccaataaagtaaaattcataatgactgacatctaataaaaattatcaagcatgcagaaackcagaaaaatatgatccataatttagaaaacaatcaaaactgagcaggactgacatatattagaattagcagacaaggacattaagtgtgtaactagatttcatgtgctcaaaatgttaa

SEQ ID NO: 354029 - DNA, 614 bp, Homo sapiens
atacatgctgttcttttttcacttaatatatttttgagagtttgctatctcagcacttatmaagcatcttcattctttttaaagactgcatagtatttgattgtgtggaaccattattttttaacccactggttgacaattagattgttcttagccttctgctcttacaaagctacatacagtgtgcacccttgcatgtacatctttgctaacacgtgggaagtctatctgcaggaagtcacagtaagaaatttctgggttgacttaatatttttctagattttgccaaactgtccttcaaagaagttgcactgatttatctaacaacgcatgaaagtgcctcaaaaccatcacttgcaaaaattgccataggaatttttcaatcaaatactcaaaacgtttaaggattctaacatgcctatgtaattgtctcaactttagctgaatatgcaaacactgtattttactgaaatatataaacaatgaaaaccaagtttcccatctccaggacttagaagggtgattgtttatgggaagtcccaccaacaaactacaaatgggaaaaggagtccgttgcaagagacagtgctgctgcccaacatcaccaaaaggaa

SEQ ID NO: 354030 - DNA, 546 bp, Homo sapiens
ctttttacatgtattgaggctaattttatgtcctaataatctatcctgaagagtgttccatatgcacttgaatgtgtgttctgttctttaagtggagtattctacagatgtctgttaggtstatgtggcttataatgttggatctgggaatggagctcaagctattctggtgttttcaagagggtgcttacctttttaagggctcaccatgccatttaatatcatcctaatggtaggaggtatgcacagtaaggtgcttgctttggatttgctcttaaacacatctattctgaagaactccaaggagagcaaggtaggaaatgaatgcagctgtcctatctttcctgattaatttcatatctatctcatgggcatgttttaaatacatgactacaatgtacgctgcatataaaaatatatacaagtgcacagtgaaaataaatgatgttatttcaaactactaatactgaaatttagtctgtacaagcgctttctgaaagaaatatcatatgacttggtaaagaagaaatatattttatgattaag

SEQ ID NO: 354031 - DNA, 522 bp, Homo sapiens
ggtgaagggaagaggaaagaccatacttaaagtgatcatagattgaaggaagcaaggaaccctgggaaagatggagaacataagggtcratgacagcaataatgaataggtgcttagaaacagaaaagagtactatgtttcagcaaatgcttacattcctatagttctccagtctgtgtccagaagaatgtggcaatgacagaacatctgttcctccactcccaggatgagcttcctatagccatagatggacaaggaggcaaagatacagtagaaaaaaaatgcgaacacttcaaaacctgactgaagcagaaaacaatctggtcagtatgaagagagtctcagcaggggcatggtagcatgaagaacggagacacaatcttgcaaaggggcagaaagcaactttatatgttagtattgatatagcacccctttaaagaaccactgctttagacgaatctttatttgtatattggccaaaaaaaaaaaaaaaaaaagccgcctatatttagagaaactcat

SEQ ID NO: 354032 - DNA, 541 bp, Homo sapiens
cagcctctttgatgcctgacactaaacctgctctccttaactcctcaaaccttcagtactattctcctcttcatgctctctctagatcatttcaccttcattttccaaaggaaacagaagttatctgatggaaagtcactctccttcctggtatcacatacaacctaccaaagtggctccagtccttcctactctggacttgacacaccaaagtggtgcccctcctccttccaaatgccagaccctctgcctatgcctaatcccattctctcccrttttcccaacaacatgaaaatattattccttctcttgtttatatattcaacctcttcttcttacgcagatctttttgcactggtttttaaacaaaccctagtctcttcctttaaaataacagcaaaacaaaaccatttggccccacatctccctccagctatagctcacaggcctatctagacacttcctgcttcaaataaacttctctacagagttgcctaaatgttctgacttcatgtcctcatctcctattcactcctcatat

SEQ ID NO: 354033 - DNA, 560 bp, Homo sapiens
ccatagacaaatccaatccaaatgactaaaatgacaaaaaatatgtaattttaataggttaatttcaacaatgtcctaaacacgttttaaactgatattttgcattattgcttcacattttatgtgtgcgtataaactaaaaatcaaaattgattttaatggaataccacttagtaatcgaaatgaacaagttattaataaacacaagttggatgaatctcaaggaaataatattaatytcgagacaatctcaagagaatgaaaaagttaaattaaaaaagttaaatcaaaaaagttaaatctaaggatccatttaaataacatttttaaaatggaaaaattatggcaacagggggcagattagtggttgccaggggttagggacaggggtgggaagtgggaaggtagatgagtgtgattataaaaggccaacatgatggaatctttgtgatggaaatgttcatcttgactgtagtagatacaagaagctacacatgtgataaaaaattagatagaactaaataaatacacacacaaatgagttcgagaaaaactaggaa

SEQ ID NO: 354034 - DNA, 596 bp, Homo sapiens
aatcatataatatgtagtctattgagtctagttcctttcactcaacactatattttttagtttcatccatgctgcagcatatatcaatattttcttcctttttcattgctgaatagtattccaatgtatagatatgcctcattttgtttatccatttaccaggttatggacattgcattttttcttgtttttattaatatctattacaaataatgttgccaagagcaattacatacaagtctttgtgtgaacatatgttttcatttctcttgggcagattccaagaagtggaattgctgagtttatatggcacaatgattaaaaattatgtatcagtttggctggaccacagcactcagatatttggtcaaacattattctcgacatttctgcaagagtaattttggacaagatctgcatttagactgttagactttgagtagagcagatggttctccattatatgggggagcttcatctaatgagttgatggcctgaatagaacaaaaggatgacctccctgggcaaaagggaagtccccagcagactcccttcagacttcatctgcaayattggctcttctggttttccagctg

SEQ ID NO: 354035 - DNA, 651 bp, Homo sapiens
attcagccagaagaaatgctggctgatacacacacacacacacacacacacacacacacacacacatatacacacacacacatatattaggccttcaatatttgttaaatgttaaaagaggtgataggtcctcttttactattctgaaaataacagaaccctaatatagtaacctttctcaagtaataaaggatagaagcaagtaggttaagtctttggtatagaggtgaactgtagaagmttttgacaacagttatgttaatgaaaacagtaagaacaccacctaatactagcacatttataaaacacttagcaatgtctaacgtactttatgtaatttcgaccctacagctgtatgaagtgaatattattatttgattaaaacagtgtcatgaagctgttcaaagtcacacagctagttaagcagcagagctcagacttaaaactctctgagagctatcccattcactaacagctctttattttgtcatgaaatgtggaaaatatcctcatccaaactccaaaatcagcatatacataagcacaacctttttttctctcaacctacccaatacccctttctaccaattcccataaaaattcttggagttcctattgcagcgtctttatgtcttcatactggtatgacca

SEQ ID NO: 354036 - DNA, 367 bp, Homo sapiens
ttccccatctggagaatggagctaagagcctctatctccaagtcctgaggattcagtgaggcarcatatggacagaacctggcatagttcccttcccataattggtgcatacaaaatgattgctgaagaaataaagggatgtatgaacctaactctcttttctcatttatcgctttttttttttttttgagacagggtctcattgtgtcacccagctgcggtatagtggtgcaatcgtagctcactgcagcctcaaactcccgggctgaaatgatcccccctcattggactctcaagtagctggcactacaggtgcacatcaccacatctggctaactttcgtattttttttgtagtaacggggttt

SEQ ID NO: 354037 - DNA, 367 bp, Homo sapiens
ttccccatctggagaatggagctaagagcctctatctccaagtcctgaggattcagtgaggcagmatatggacagaacctggcatagttcccttcccataattggtgcatacaaaatgattgctgaagaaataaagggatgtatgaacctaactctcttttctcatttatcgctttttttttttttttgagacagggtctcattgtgtcacccagctgcggtatagtggtgcaatcgtagctcactgcagcctcaaactcccgggctgaaatgatcccccctcattggactctcaagtagctggcactacaggtgcacatcaccacatctggctaactttcgtattttttttgtagtaacggggttt

SEQ ID NO: 354038 - DNA, 643 bp, Homo sapiens
ggtctggggaaaacttttctcatgatgtatgtctccatttccttctgggaagatactaaaatttctgataaaatgcttaagcaattttaaaatagactttaatgagcttagagagcctacctttgagaaattagcattctacccgctcaattgactgtcagccaagaatttaatgatcttgaaccaggtcttcttttccaaaaacctctctttgcccctacaagtgtgtctaccaagagagaaatcctctcaattggtctgtttctggactcttcttttgaatcaaatttgaaaggaaattttgacaagtgctcatgactcaatttcctgaaaagttttgttttttctttttaatcatcatttttggagttcagaaatttccctgggacatgtcagagtgtgaaggatgacaytgctgttgatgaatcgcagataaggaaggcataagaaagccattgatttgttccagaattattattattattattagtttagacagggtctctgtacggcaggtgctggagtgcagtggtgcaatcacgactcaatgtaacttcaaactcctgggcttaagtgatgctcctgtctcagcctcctgagtagctgggactatacatgcccaccaccatacccagctaattaa

SEQ ID NO: 354039 - DNA, 523 bp, Homo sapiens
ctgaaccgatcctttacaagcctgtttcatctcttcaccaggccagcagcttctgggagatagaatatgggataggaggagcagagcccatggtccaatgctcctgctgcacctcctttgctgtaaagttgattgcttggtcccatgcatgtgatgygggctcccatgtcagtggagcaaatactctgtgggccttcacatagtagcttaggccctgtaggcaggaaaactaaactcatacctggtctatgtatcaattctcatcaagataaatcatttcctcttctggagtggaaaggatgcaaggaatcaactccctgctaagtggccgtttggtccctctgcgggatgatgctccatcttgggctgcgcatttgtctcagtgacttgcagtttggacattcagaagcagtaatgactaagtcagccttagtgagagacagcccatgctgctgagcccacacggaccctccatccctgaggtagcagccaccatgtttatgcaccagctgtaccagcacgt

SEQ ID NO: 354040 - DNA, 578 bp, Homo sapiens
agcctgaaaatgctgtgctggtggaatatgaaattatatcctctttgaaggaaaacataatttagcaccggggctttgggttgtttgaaggtaaaatgtattatgcctgtggaaaaggcaaagcaatatttgtaataaaagacgtcattttttaaagactcagaaaaaagagaataattagtatttcctaacttgaacccaaaattcttcttgattcaccctgggaagatggttgkttctatattttatttccattttgtgttttaccgtaagggggaaagaatgaggatttaatttttaccaaattaaaagtaatgtgagagttatttcccaaactcccaaaagctgcctttgggctggggaaaaatggagaaaactctaaccaaaacactgaaatttatttatttatttatttatttctttctttcttacttatttgtttacttacttattcacttatttgagacaaggtctcactctgtcgcccaggctggagtacagtggtacaatctttattcactgcagcctccaactcccaggctcaagcaatcctccctcttcagccttctgagtagcca

SEQ ID NO: 354041 - DNA, 578 bp, Homo sapiens
agcctgaaaatgctgtgctggtggaatatgaaattatatcctctttgaaggaaaacataatttagcaccggggctttgggttgtttgaaggtaaaatgtattatgcctgtggaaaaggcaaagcaatatttgtaataaaagacgtcattttttaaagactcagaaaaaagagaataattagtatttcctaacttgaacccaaaattcttcttgattcaccctgggaagatggttgtttctatattttatttccattttgtgttttaccgtaagggggaaagaatgaggatttaatttttaccaaattaaaagtaatgtgagagttatttcccaaactcccaaaagctgcctttgggctggggaaaaatggagaaaactctaaccaaaacactgaaatttatttatttatttatttatttmtttctttcttacttatttgtttacttacttattcacttatttgagacaaggtctcactctgtcgcccaggctggagtacagtggtacaatctttattcactgcagcctccaactcccaggctcaagcaatcctccctcttcagccttctgagtagcca

SEQ ID NO: 354042 - DNA, 578 bp, Homo sapiens
agcctgaaaatgctgtgctggtggaatatgaaattatatcctctttgaaggaaaacataatttagcaccggggctttgggttgtttgaaggtaaaatgtattatgcctgtggaaaaggcaaagcaatatttgtaataaaagacgtcattttttaaagactcagaaaaaagagaataattagtatttcctaacttgaacccaaaattcttcttgattcaccctgggaagatggttgtttctatattttatttccattttgtgttttaccgtaagggggaaagaatgaggatttaatttttaccaaattaaaagtaatgtgagagttatttcccaaactcccaaaagctgcctttgggctggggaaaaatggagaaaactctaaccaaaacactgaaatttatttatttatttatttatttctttmtttcttacttatttgtttacttacttattcacttatttgagacaaggtctcactctgtcgcccaggctggagtacagtggtacaatctttattcactgcagcctccaactcccaggctcaagcaatcctccctcttcagccttctgagtagcca

SEQ ID NO: 354043 - DNA, 578 bp, Homo sapiens
agcctgaaaatgctgtgctggtggaatatgaaattatatcctctttgaaggaaaacataatttagcaccggggctttgggttgtttgaaggtaaaatgtattatgcctgtggaaaaggcaaagcaatatttgtaataaaagacgtcattttttaaagactcagaaaaaagagaataattagtatttcctaacttgaacccaaaattcttcttgattcaccctgggaagatggttgtttctatattttatttccattttgtgttttaccgtaagggggaaagaatgaggatttaatttttaccaaattaaaagtaatgtgagagttatttcccaaactcccaaaagctgcctttgggctggggaaaaatggagaaaactctaaccaaaacactgaaatttatttatttatttatttatttctttctttcttacttatttgtttacttacttattcayttatttgagacaaggtctcactctgtcgcccaggctggagtacagtggtacaatctttattcactgcagcctccaactcccaggctcaagcaatcctccctcttcagccttctgagtagcca

SEQ ID NO: 354044 - DNA, 631 bp, Homo sapiens
ttccagttaaacaaaatatgcatgggggaaaatgaactaactgaaaactagtataattgttttatttctaaaacattgtctaattttatttggtttcttccattcttccccccaaccctttggatcttttcttttctttctttctgaaattctcttcatcagggtttgcttgcctttttttctttccacttgtcagatcttccctgcagcctgtggaaggccatcaaaccagctgattgaaagatgaatatgagctagctaagaaacatctccctgagcagagtaaatatgcaagactatcatatatgaaaagaacatttttgtttcaagtggaaatgtatagtagtctatttgatttttaatgttccttgatttttttttgctcatagtttattcctattaaacttgaggaatatacaattaaagctttgcttcctctttctctctttctcatgctttctctctctctttttcatgcacacaaactgcttgggcttactaccaaagcagaatgaattctgtcaattatctcattatttagaaaatgagttatttacttgcattaaattatggtttaaaataactttcytgttgtatttctctttccttccaaaattggttcatgtatgta

SEQ ID NO: 354045 - DNA, 586 bp, Homo sapiens
ctgcacccggtcagttatctcctgcattcttggagaccacctgcttttttgtttaaagttaaattaagttaatatttttattttttatttttattttattttattatttatttttttttttttttgagacagagtctcgctctgtcgcccaggctggagtgcagtggcgccatctcggctcactgcaagctccgcctcccgggttcacgccattctcctgcctcagcctctcaagtagctgggactacaggcgcccgccaccacgcccggctaactttttgtatttttagtagagatgggttttcaccatgttagcgaggatggtctccatctcctgacctcgtgatctgcccgcctyggcctcccaaagtgctgggattacaggcgtgagccaccgcgcccggcctaaattaatatttttagagacagagtgttgctctgttgcccaggctggatgcagtggcgccacacagctcacagcagcctcaaactcctgggcttcagtgaccctcccatctcagccttttgcatagttgggtctaccagcacacgctaccatgcccggctaattttttttttggggggg

SEQ ID NO: 354046 - DNA, 586 bp, Homo sapiens
ctgcacccggtcagttatctcctgcattcttggagaccacctgcttttttgtttaaagttaaattaagttaatatttttattttttatttttattttattttattatttatttttttttttttttgagacagagtctcgctctgtcgcccaggctggagtgcagtggcgccatctcggctcactgcaagctccgcctcccgggttcacgccattctcctgcctcagcctctcaagtagctgggactacaggcgcccgccaccacgcccggctaactttttgtatttttagtagagatgggttttcaccatgttagcgaggatggtctccatctcctgacctcgtgatctgcccgcctcggcctcccaaagtgctgggattacaggcgtgagccrccgcgcccggcctaaattaatatttttagagacagagtgttgctctgttgcccaggctggatgcagtggcgccacacagctcacagcagcctcaaactcctgggcttcagtgaccctcccatctcagccttttgcatagttgggtctaccagcacacgctaccatgcccggctaattttttttttggggggg

SEQ ID NO: 354047 - DNA, 588 bp, Homo sapiens
ctttaccctggcatttacaatttccccttgccctgcctcattttcctctgtgacccctgccatggtcaccctccactgcagccttagacyagcgatggccctgaatttcctccctgttcactgagatcttcctgatcctcatccagccttccatggcctcagaccactgagctctctcccgttgcagaaatcctgcagaacatttttcctggaccccttactgggtgtaggggaccccagaataactcatgtccaggctcttttttttgaggatcctctgggatgggtggaggagtcacagctggacaagatgcttttagttctgtgtggtcagggctggaagaatggagccccagggatggagaccaggaatggaggagatgggatgtgggtgagattcagaaaaagctttatggaggaaggctgagcttatctttttgtctccttaccccaaaacctccctcccaactttgatgctggagcctgctgttctttctctgatcagaatcctctctcttcatgtctcacccctgtcctaacaggggtgctatgaatccactcttctggcccccaccattagatcactga

SEQ ID NO: 354048 - DNA, 588 bp, Homo sapiens
ctttaccctggcatttacaatttccccttgccctgcctcattttcctctgtgacccctgccatggtcaccctccactgcagccttagactagcgatggccctgaatttcctccctgttcactgagatcttcctgatcctcatccagccttccatggcctcagaccactgagctctctcccgttgcagaaatcctgcagaacatttttcctggaccccttactgggtgtaggggaccccagaataactcatgtccaggctcttttttttgaggawcctctgggatgggtggaggagtcacagctggacaagatgcttttagttctgtgtggtcagggctggaagaatggagccccagggatggagaccaggaatggaggagatgggatgtgggtgagattcagaaaaagctttatggaggaaggctgagcttatctttttgtctccttaccccaaaacctccctcccaactttgatgctggagcctgctgttctttctctgatcagaatcctctctcttcatgtctcacccctgtcctaacaggggtgctatgaatccactcttctggcccccaccattagatcactga

SEQ ID NO: 354049 - DNA, 567 bp, Homo sapiens
tcaaatttagaaagagggtagttgataaagtcagcaaggcaggacattgaaactattgaatttaagtgatggatttatgggtatttcttagactattgtcctctccttttggaaggagaggaaagtttgcacrctggatttgttggatgcatttcctactaaaaaaaaatcaataaatattttccctttacactctctacgcctactgctgttttttcttaagctattggatacactaggttgcttgtcctgtagatttttccagtgtgatttcacccttgcagtgtcattgcacgtattcttctatcccctaaccctgtaaaccagagcttggcaaatattttctataaaggacccaatactaaatacttttggctctgtgagttatgcagtccctgtcacggcaacttaatccttccatttaagtgcaaaagctgtcatagacagtatacaaatagacgggagtcactgtagaccaataaaaatctttatggatgctggaattttaattgcatatactttttgtgttataaaatattattcttcttttgacttaaaaatgtgaaa

SEQ ID NO: 354050 - DNA, 567 bp, Homo sapiens
tcaaatttagaaagagggtagttgataaagtcagcaaggcaggacattgaaactattgaatttaagtgatggatttatgggtatttcttagactattgtcctctccttttggaaggagaggaaagtttgcacgctggatttgttggatgcatttcctactaaaaaaaaatcaataaatattttccctttacactctctacgcctactgctgttttttcttaagctattggatacactaggttgcttgtcctgtagatttttccagtgtgatttcacccttgcagtgtcattgcacgtattcttctatcccctaaccctgtaaaccagagcttggcaaatattttctataaaggrcccaatactaaatacttttggctctgtgagttatgcagtccctgtcacggcaacttaatccttccatttaagtgcaaaagctgtcatagacagtatacaaatagacgggagtcactgtagaccaataaaaatctttatggatgctggaattttaattgcatatactttttgtgttataaaatattattcttcttttgacttaaaaatgtgaaa

SEQ ID NO: 354051 - DNA, 552 bp, Homo sapiens
aggatgcttaatgaccgccggccactcagccagcgcttgcctggactctgcaggtccagggctgtttgggcaaggctggcctaagggaccacccctggccagggtccgggccctgctgggggttgagggtgggragtatgcatggcctgagctggctgttgggactcaccaggtgctgggtgcccgtttcacgaaggccgcaaaggcagagctgggttgtctgaaggccagctgctgggtgtaccctgcagagaagagagaggaacccccaaaagagccggggctgagcagagggggcacgccagaaagggcaggggcggggtgcagagaggggacaggggctcagggtggcggaggggttctgggaggaggggaccttaaagagggaaggactcaaagagggtgggggatcagaacgaggaggtggaagagttctcaagaggacaagggattcagagaggagaaggatattgagggtggggggctttcagggaggggagggctctcagagagggggtggagtctcatggaagaggcatggcctggagagga

SEQ ID NO: 354052 - DNA, 552 bp, Homo sapiens
aggatgcttaatgaccgccggccactcagccagcgcttgcctggactctgcaggtccagggctgtttgggcaaggctggcctaagggaccacccctggccagggtccgggccctgctgggggttgagggtgggaagtatgcatggcctgagctggctgttgggactcaccaggtgctgggtgcccgtttcacgaaggccgcaaaggcagagctgggttgtctgaaggccagctgctgggtgtaccctgcagagaagagagaggaacccccaaaagagccggggctgagcagagggggcacgccagaaagggcaggggcggggtgcagagaggggacaggggctcagggtggcggaggggttctgggaggaggggaccttaaaragggaaggactcaaagagggtgggggatcagaacgaggaggtggaagagttctcaagaggacaagggattcagagaggagaaggatattgagggtggggggctttcagggaggggagggctctcagagagggggtggagtctcatggaagaggcatggcctggagagga

SEQ ID NO: 354053 - DNA, 552 bp, Homo sapiens
aggatgcttaatgaccgccggccactcagccagcgcttgcctggactctgcaggtccagggctgtttgggcaaggctggcctaagggaccacccctggccagggtccgggccctgctgggggttgagggtgggaagtatgcatggcctgagctggctgttgggactcaccaggtgctgggtgcccgtttcacgaaggccgcaaaggcagagctgggttgtctgaaggccagctgctgggtgtaccctgcagagaagagagaggaacccccaaaagagccggggctgagcagagggggcacgccagaaagggcaggggcggggtgcagagaggggacaggggctcagggtggcggaggggttctgggaggaggggaccttaaagagggaaggactcaaagagggtgggggatcagaacgaggaggtggaaragttctcaagaggacaagggattcagagaggagaaggatattgagggtggggggctttcagggaggggagggctctcagagagggggtggagtctcatggaagaggcatggcctggagagga

SEQ ID NO: 354054 - DNA, 629 bp, Homo sapiens
ttttacaatggatcagaccgttgtacccattgtacattgcacattgtacattgacatttgcagaaggaacaaattgttgcatgaattaatactaagaagtttgaccttcctagggtagcggggtaacacctagaagagactcagccctgcccagaccccctgattctgaatctgcaaggggggatgactgccatgtgtggacacaccggtgaccccatccttgctttctgctctctatctcagggtggattacggaacaacaacgagaaagacatggccctcacggcctttgttctcatctcgctgcaggaggctaaagatatttgcgaggagcaggtcaacgtaagtgccctccatcttcccaccctaccctaccttacccgatgcagagcacagccaccttggagagtgagaggttgccttcagggaatttgcagctctcccagtgcaataacagacatcactgcagtcatgttaatagctaacatcttttgagcacttaactcatctaatacagacccgccctctaatagtttcacatgttaagtctcataatccttttagcascctgaaaggtaagtcactcttattatccccagtttgcagatgagaaaactgaggcacaaaga

SEQ ID NO: 354055 - DNA, 552 bp, Homo sapiens
ttgtgtcaggtactgtcttaagttatttgcatatattaactaatttaatcctcgtaataattttttcacctgttattatctctacattaaaagatgaggaaacacagcccaagaaagtttaagtggctgcccaaattagtaaatggcagagctgggattttaaacctagataagtgctccagaggactgtggtcttaactactacccaagattagaactttatcttccaatacaccatgaagttttgtgatgtataactaccattacaccgtatactaaattgtaaaattaggaagcatacractacattaacacaggaagataactaggcaacagctttgtaatcttgaattttgatgaattgtacttaattttttaaaaagaaaactacattctaaaaccatttactccaagtttactcttatgagcaaagcataaatatatgcataagattgaaaaatgatttaaccatcattctgtttaaaccaacttactacatagatgctgtctaatactgtaaatatgttattggatgacacatttccccagatg

SEQ ID NO: 354056 - DNA, 457 bp, Homo sapiens
agcagcttgacttcagagggacggcttgattggcaggactttagaaaagagtccagctggaaacagctggacttcaggggacaaataccttyctgctccatccctttcccagctttccttccggctaagagccacttccattggcaataacatcccctacatttactatccttaaattcaattgtgtgaactgatttttcctggatgccagacaagagttcaggttacagaagactgttacactgactctctgccctcgtgaaaaggaacagggtccactgagctgttaaacacttaagccatctgcagatggctataagcgctttgcctgtaacactccttctggggcttcgggggttgtgggtactcccctctagatgctgctgcagggcccgcaccagagttttgcttctgctgacactcagaagcactcaccctggctcctgcaccaactcag

SEQ ID NO: 354057 - DNA, 593 bp, Homo sapiens
atgggttagtactcataccttattgtacttgtcttagtgcaatgaaactaagtatatataactgtaactcatttgtrtgttacatacttatatttgccagaagctgtggtacatgcgagaaaacaatagtaaacagaaatgcttcctccttcctgcaagctcagtgtctaatgagggaggtgaatgagtcaagacgatagtaaattgtgaaggctgcattctgatggaagtgtcatctaaatacaagccaaatgaagaattggttaaattaaactgtgttcagggagaagtctccaagtcttttaagtgtctctgttccaggaacaaaggagttcagtctaagtacattttagtgggagtgaaaaggtaaataaccttgaaacacatgacaaggagtttcaatctcctcctgaagaggtagtcagtgaaatgttccaaacatgggaatgccatgattatcacaaaacaggagagaaggcagaaagaccaattaggattctgttgaagtcatcaaagaaagagatatcataacatttgttaaaatcaaattgtatatatccatgtgagtatgcagcttcttaaatgactcccaa

SEQ ID NO: 354058 - DNA, 568 bp, Homo sapiens
gtgcttagcagaaaattacaacctatactggagaaggaaacaatctaaatctttatatctttcaaaaatttaccccacataatattattcatgatcatgatgaaattttcaaatggttttgttttacttcaaaaaggaaactcaagaaaagaagcaaactcttaattaattgctgtaattcccatatttgcctacrtgtatatgttcctgttatccttttaaattaaacacatgaatatgtgaattacactcaaagtattcttctctgtaaaaattacagtagtcataactatttataaatgataacctgaagcccagttacttcatagtcctttaaattccatttgataagcatgttgtgtattgtttagtccttgctcgcttcatttgttcatcagccattcatccaaaaaaattttgaggatctgccatacgttatgttctgtttgggctgggctaagacaatgaataaaatgagattcctgaagtggaattcacagtccaattagagaaactggtgtgcagatgaaccgataagttatactgtagtgtggtaagtattacagtt

SEQ ID NO: 354059 - DNA, 528 bp, Homo sapiens
acaatgatttaccagatatgaatagaagttcagtaagaactgaagcttcttactgaacttcttcacttaaaaagtgcttataatacagaaggcacaaaacacaatcagaggacaatgaggattatgatacatacctatcagatgagttaaatcgatgtctaatctttgcctgtatttgaagtctggatccataccactgcagtgtagcactatctgtgaaacacattcctcaattattttataatattgtggcctgaaaaggagagaaagtactcatgaatgcctttctaaccatgcagatcaatttgctttagaaaacattcaacatattagaagaactaggtcttttttctggagttgttttaaaaaatcctgcagccactacacttycttaggacaagcatgcctaagcttaaggatggtctgggtgttacagtaccaaacccattgtgatgtaatcaactacatctagtgacttcataatctagtttgcagggattcatgcttgtgttgaaagatacttatcaa

SEQ ID NO: 354060 - DNA, 523 bp, Homo sapiens
taagtccatttaaatcaagatatgaaattaagtagaaaaatgcagaacataaaaattatgccattgtagattgcaagtaaaacattttatattggggagtaaattggtagcttttttcatttacttatatttcagtaaatattgtgactttttgtgcaactaagtaattacagcaggattggccrgtggtgtggtgtgtgggggtgaaaacattgctgaactggaagttgtatgctttagctcagactgaccccctcttctcgacctaggaatagctgtgcaagctggattcattacccaatctctttgtgctacaatttcttcttcagaaaatcaacaacttgtctaggtgatctacacgctgtcctccagtgttaaaattatgttaaagtaacagatgccttcaaacaaccaagacggcaaagcatggtcaaaagtttggaaagcctcatgaagactcgtgttggaataaaagaggaaatgaaatgggcgaataataaaggaagtgagcccttactgtggc

SEQ ID NO: 354061 - DNA, 598 bp, Homo sapiens
attttaagagttctttatatattctgaatacaagrctttcatcagacatgtgatttataaatatttcttccagtctgtagctagtcttttcattctcttaacagtgtctttcaaagagcaaacatttttaattttgatcaagtccaactaaacgttttttttttctttcatggattgtgcttttgttgttgtgtctaaaatgttattgccaaacccaagtcctgctgattttctatgtttacttatagaatttcatagtttcattttttacttttatgtctttgatccattttagattaatttttatatgagatataaggtatgtattcttcaatatgccttcttttattttgttggttttgaacatgtgttttgagcatagacagtcttattttagtaccatttggtgaaaagaacatcatttttccattgaatttaattagcatctttataaaaaatgttgttgactaaatattcatagatctatttctgggttctctcttctgttccactggtctatgggtctatcttcccaccaatatcattctctcttgattactacagctttatattgtcttaaaatcatgtagaatgagtc

SEQ ID NO: 354062 - DNA, 562 bp, Homo sapiens
tggcacacaggctgtcattttaataggtatgcatgacatactgtccatgatttgagaatagctgtgtctctttgagtctctgtccactgacgtgtgtgactttcatattgcatgcttttcctgtccttgaatgaggaatgccttcctgtctctttttcccttagtcacttattagctccatgacagttaaaccaacctgctagggacatattagaaaccaagcctcagatcctattaaaacacggccaagatgagaaatacggatgcatcccattaaaaaagtaacatttcgtgagtcagttaagacaacctcactgatgaccctggatcatcattgctctaattaaccttgtacttagatgtgccgcttgatgatattgtgtgtaaaaattaaagcataaacacttaaaagatgtggaggaaatacaccaaggatttgtcccatccagtgtgtttacaagatcaactgccattttcaaatgcaragcaggctcagcctgaggaggacaggagttagacccctgtctatcctaatgttgttgaaatgcaaaccctttttggt

SEQ ID NO: 354063 - DNA, 493 bp, Homo sapiens
ttaataaaaagacgctactcaccactgcctactggaaataatttagtatgtatagcatttgatttagaaaactattttagctaaagtgcagcacaactagaatttgatccaaagtgtgggcattccaactgcatttgcaatttttcctacaaaaaggtttcagtggtttagtagtaactttaacttactaaaggaaaaaaattcacattatcaacaatcacaaataagctcagttagatatttaaagtgtcttttgagaaacgtgtataagtaactggacacaggagaatacacagggcaaaatagaggaccccaagcattcattatgttataaaatccatacatatgcatttcatatttctcttgcrttaccttgtttctcagagaatttgaaagctcccaaatagctggaaaaccctgggcttctgaacatggctgcacacagacggctcggtcacacagcctgctctacagctaattctcagccagctac

SEQ ID NO: 354064 - DNA, 561 bp, Homo sapiens
agagattccaatttttttttttttttgagacagagtttctctcttgttgcccaggctggagtgcagtagcgagatctcgggtcactgcaacctcagcctccccagttcaagtgattctcctgcctcagcctcccaagtagctgggattacaggcacctgccaccacgcccagctagtttttttgtatttttagtagaaacggggttttgccatgttggtcaggctggtcttgaactcctgacctcaggtgatctgcctgtcttggcctcccaaagtgctgggattacaggcatgagccaccgcgactggccccaaaattttaatttgaggcagaagccattaagttaagcttcacctgttagacygccccctgtttaattttaaccacaatatgtagtcggtgggcccaagcaatgctcatgcaattccaagaaaaattcgcaataattacagactgaccatatttacagagaaatggaacattcaagaaaaccaagggaaataatctcatttgcaagctaaggaaatagggctagaaaggtaactggctcctggatagac

SEQ ID NO: 354065 - DNA, 578 bp, Homo sapiens
ataaataaatagccagttaaaatattgtgtgayaaaggaaaggcgaggaatgagcagaagaaagcaggagaaaacagcacaaaggtgcttttttttttcttttttgagacacggtcttgctctgtcacccaggtgtgacgaaattatggcttactgcagcctcaaattcccaggctcaagtgatcttcctgcctcagccttctgagtagctgggactacaggcatgcaccaccattccaagctaattttaaaattattattattattattattattattattatttttaagacagtctcactctgttgcccaggctggagtgcagtggtgcaatcacagctcactgcagtctcaacttcccaggctgaaactattctcccacttcaacctcccaagttctgggaccacaggtatgcacataccaccatgcccgaaatttttttttaagtttttttgtgtgtttgtttgtttttagatatgggatcttgctgtgttgcccaggctggtctcaaacttctggactcaagtgattcttccacctcagcctcccaaagtgctgggattacaggtatgagcca

SEQ ID NO: 354066 - DNA, 576 bp, Homo sapiens
aaactaaactgaaattcaaaccaaagtccataaaagtaaacgaaaaggtgttcatggttgactgcctgcagaagtataagacttttttttttgtactaaattctcttaacatactattcaaaatgttgtgggaatcaacccaaaatcatttgttataccaaaaaccacgaaaatcttaattcattgagaaacgacaatgaacatatgccaatgccgcgatgacacacaggtgggaattatatgacaaaccatgataaaaatgcttcaacaagcaattaaaaacactcttgaaatgaatggaaaaaaatagaaagtttcagcaaaaaataggagatatatagaacamaatagaaaattttttcaactgaagaatacactaattaaaattaaaatctcactggatgaatattattgcagaatggagatgttagaggaacttgaaggtgtatcaatagaaattatccactccgaataagagagaaaatagcttgaaaaaaatgaagagaacaccacaaacctgtgggacactaacaaaaatataatattagtatcatattggaattccacagggagatg

SEQ ID NO: 354067 - DNA, 576 bp, Homo sapiens
aaactaaactgaaattcaaaccaaagtccataaaagtaaacgaaaaggtgttcatggttgactgcctgcagaagtataagacttttttttttgtactaaattctcttaacatactattcaaaatgttgtgggaatcaacccaaaatcatttgttataccaaaaaccacgaaaatcttaattcattgagaaacgacaatgaacatatgccaatgccgcgatgacacacaggtgggaattatatgacaaaccatgataaaaatgcttcaacaagcaattaaaaacactcttgaaatgaatggaaaaaaatagaaagtttcagcaaaaaataggagatatatagaacacaatagaaaattttttcaactgaagaatacactaattaaaattaaaatctcactggatgaatattattgcagaatggagatgttagaggaacttgaaggtgtatcaatagaaattatccamtccgaataagagagaaaatagcttgaaaaaaatgaagagaacaccacaaacctgtgggacactaacaaaaatataatattagtatcatattggaattccacagggagatg

SEQ ID NO: 354068 - DNA, 576 bp, Homo sapiens
aaactaaactgaaattcaaaccaaagtccataaaagtaaacgaaaaggtgttcatggttgactgcctgcagaagtataagacttttttttttgtactaaattctcttaacatactattcaaaatgttgtgggaatcaacccaaaatcatttgttataccaaaaaccacgaaaatcttaattcattgagaaacgacaatgaacatatgccaatgccgcgatgacacacaggtgggaattatatgacaaaccatgataaaaatgcttcaacaagcaattaaaaacactcttgaaatgaatggaaaaaaatagaaagtttcagcaaaaaataggagatatatagaacacaatagaaaattttttcaactgaagaatacactaattaaaattaaaatctcactggatgaatattattgcagaatggagatgttagaggaacttgaaggtgtatcaatagaaattatccactccgaataagagagaaaatagcttgaaaaaaatgaagagaacaccacaaacctgtgggacamtaacaaaaatataatattagtatcatattggaattccacagggagatg

SEQ ID NO: 354069 - DNA, 467 bp, Homo sapiens
ctttacaaggttccttgctgagtgctcccatctttgctttattcctctactcttaggctcacagttcttgtagagtacatccattctccagtacatcatctcctttttgtaaacccctatcctctcttcrgaatcaagttccctccctgattccccaagcctgaattacctagtcttataataatgcctttggggtttctgtaggacacaccagcataggagcaagccacatgccgacccctttagatctccatatcagtgtgggtcatactaatgcttcttaactttccagaggcttaatggatgtctgttggatggttctctcccctcctccctctctctttcacacacacgtatacacacacacacacattcattttcacatataccaatggtaaatattaattcttagattttacccccaaataaagacacatccttctcaaatgcatataatttgcaagtgt

SEQ ID NO: 354070 - DNA, 467 bp, Homo sapiens
ctttacaaggttccttgctgagtgctcccatctttgctttattcctctactcttaggctcacagttcttgtagagtacatccattctccagtacatcatctcctttttgtaaacccctatcctctcttcggaatcaagttccctccctgattccccaagcctgaattacctagtcytataataatgcctttggggtttctgtaggacacaccagcataggagcaagccacatgccgacccctttagatctccatatcagtgtgggtcatactaatgcttcttaactttccagaggcttaatggatgtctgttggatggttctctcccctcctccctctctctttcacacacacgtatacacacacacacacattcattttcacatataccaatggtaaatattaattcttagattttacccccaaataaagacacatccttctcaaatgcatataatttgcaagtgt

SEQ ID NO: 354071 - DNA, 575 bp, Homo sapiens
tcacaatcccacactatgaagtaggtatgatggttattattagattatttcaacttataggtgagaaaagtgagacttggattggccaacttaccaaggacataaatctattaaggggttttctggaatacaagtccagataatctgactccagatctcatgttttaaccactactcaaccctaagccaggacataaccagccctgaggtacttatactttagtggaggagggaaagcacatcaacttgtagagatactacaaggcagtgtgctgtagaacaggagcttaggagcttgaatgtttcctggaactgggctatataagggtgaaatcacccatggctgaggtaaccataggtagcttgagagggagacagaatttgagctataccttgaagggtaggtaggattttataattgtatcattatctcaattcaaacctgaataaaacaaaacaatttgtaattgtcctactctttctcatgccctagtcatggartcatttttttagctcaatactaccttatatgaagtcttttccaaagcatttgaaaagactactgaatttatttc

SEQ ID NO: 354072 - DNA, 619 bp, Homo sapiens
ttcttaatatagtttggctgggtccccacccaaatttcatcttgaattgtaactcccacaattcccacatgtcttgggaggatcctggtgggaagtgattgaattatgggggcgggtctttcccgtgctgttctcgtgatagtaagtctcacgagatctgatggtttaaaaaaaaaaaaaaaaaacaggggtttgactgcacaggttttttttttgcctgccaccatccaaratgtgacttgctcctccttgccttttgccatgattgtgaggcctccccagccacgtggaactctgagtccaatgaaacctcttccctttgtaaatttcccagacttgggtatgtctttatcagcagcatgaaaatgggccaatacaattttattgccaaaattatatttttatcttttagaaaaataaatgtaaatttagatatgctcctgggtagtagatgctctaaaaattatttgatatattttttagcattaatttatatgcccctaatctaaatagggcaaatttcatcaaatcttcttcaaaccaaaagattacataaatagaaaagatttgcattataattatagaaaagacagagggggaaaaaattatcttgaactat

SEQ ID NO: 354073 - DNA, 619 bp, Homo sapiens
ttcttaatatagtttggctgggtccccacccaaatttcatcttgaattgtaactcccacaattcccacatgtcttgggaggatcctggtgggaagtgattgaattatgggggcgggtctttcccgtgctgttctcgtgatagtaagtctcacgagatctgatggtttaaaaaaaaaaaaaaaaaacaggggtttgactgcacaggttttttttttgcctgccaccatccaaaatgtgacttgctcctccttgccttytgccatgattgtgaggcctccccagccacgtggaactctgagtccaatgaaacctcttccctttgtaaatttcccagacttgggtatgtctttatcagcagcatgaaaatgggccaatacaattttattgccaaaattatatttttatcttttagaaaaataaatgtaaatttagatatgctcctgggtagtagatgctctaaaaattatttgatatattttttagcattaatttatatgcccctaatctaaatagggcaaatttcatcaaatcttcttcaaaccaaaagattacataaatagaaaagatttgcattataattatagaaaagacagagggggaaaaaattatcttgaactat

SEQ ID NO: 354074 - DNA, 605 bp, Homo sapiens
ggaggcaggaaagatgagtttcttgaaggatgttggagacacgtaataatgatttctctattttctcaataagacagtaagtaaggctattttctgaaagtaagagaacagtatgcaattgcaatattaatagagttctgcaaatcataccttgtcattaagtattgggtaaaaggtttttgttgttgttgttgttgttgttgtttttgtttgtttgtttgttttgagacagactctctctttgtcacccaggctggagtgcagtggtgcgatctcagctcattgcaacctatgcctcccgggttcaaacgatgcgtagtatggcagcaattaagatggaagtaatgaggaaaaggaatactyatcaatggagattagagagagccaaggtaggaagatttttaagaagaatttgacgtaacagacgaatattaaaacaaataataataatacctctaatcctttgcatttgaccagttctctttggcagttctcagtagctacagaaaaggtgaattgcatgattgagataggatttaaggcatgttgatggcagacagtgagtaatctggagatctggtgtgctggtaaaatagttgagtgat

SEQ ID NO: 354075 - DNA, 587 bp, Homo sapiens
ttggctattttggattgtacgtacagaaaacacaacctaagtcaatttaaaaaataaaatagcttcatttctcagacattgtctcagctcggccctgcttcttgtatcagcttagttctcacaccagctttcctcatgatcacaacataaagagtctcttgggctatgtgctccctcactcaagtccagagacaataaacttgtctttttatttttaagacatttcagttgggatttctattactcaccattgcaaatawcctaaatgataaaaatgggaaaagtatgcaagagggtggccagatctttttagaaatagaatttttatttctctgctatagtgaattgaaataactcttaagtagcccttttaccttttcttcttccaccttctcattattttcacgtgtatttctccatgcctccttgctttaaaactaggggaagctgatggcaaaaggatgaggaatgtcacctaagactaactgtatattgcagaccacgtatgctggtaatgatagatgattgatttccagatttctctgcattaggccttctctgtcaagtctttgattttgtgccaaaga

SEQ ID NO: 354076 - DNA, 587 bp, Homo sapiens
ttggctattttggattgtacgtacagaaaacacaacctaagtcaatttaaaaaataaaatagcttcatttctcagacattgtctcagctcggccctgcttcttgtatcagcttagttctcacaccagctttcctcatgatcacaacataaagagtctcttgggctatgtgctccctcactcaagtccagagacaataaacttgtctttttatttttaagacatttcagttgggatttctattactcaccattgcaaatatcctaaatgataaaaatgggaaaagtatgcaagagggtggccagatctttttagaaatagaatttttatttctctgctatagtgaattgaaataactcttaagtagcccttttaccttttcttcttccaccttctcattattttcacgtgtatttctccatgcctccttgctttaaaactaggggaagctgatggcaaaaggatgaggaatgtcacctaagactaactgtayattgcagaccacgtatgctggtaatgatagatgattgatttccagatttctctgcattaggccttctctgtcaagtctttgattttgtgccaaaga

SEQ ID NO: 354077 - DNA, 578 bp, Homo sapiens
taactctatatataatccttgtccacatggaatttctaatttaatgagagggacatacattaaacaactaatcacacaattaatttattactccaatggcagttatttcccttgaccctatgatcacttctctctgtctcccatctgctttcaggtcatccagttgaccactgttctttgagctgagggttccttcctgctccactgtgagccacgggccacatcatacctggctgctgttgacccaagataccctgtaaaattctgcttcctcttcaagagcccatakggaggatggaggagtgtgaggcaagccttgtctccatctgcagccccatcttttactctctccataacctcaccacacaaaaaacgtcaaactatgtgttaaacatgactttttcaaagctccacgggagatttcccataaagtgaaaccctctataagggagtaactctgttcttaaccacatactccctttctttcactctgagagtaccatctttaagtctccatccaccttttgaaaaagatgctcttgtaaatactacatttaaaaaacagcagtagtcacaca

SEQ ID NO: 354078 - DNA, 578 bp, Homo sapiens
taactctatatataatccttgtccacatggaatttctaatttaatgagagggacatacattaaacaactaatcacacaattaatttattactccaatggcagttatttcccttgaccctatgatcacttctctctgtctcccatctgctttcaggtcatccagttgaccactgttctttgagctgagggttccttcctgctccactgtgagccacgggccacatcatacctggctgctgttgacccaagataccctgtaaaattctgcttcctcttcaagagcccatatggaggatggaggagtgtgaggcaagccttgtctccatctgcagccccatcttttactctctccataacctcaccacacaaaaaacgtcaaactatgtgttaaacatgactttttcaaagctccacgggagatttcccataaagtgaaaccctctataagggagtaactctgttcttaaccacatmctccctttctttcactctgagagtaccatctttaagtctccatccaccttttgaaaaagatgctcttgtaaatactacatttaaaaaacagcagtagtcacaca

SEQ ID NO: 354079 - DNA, 594 bp, Homo sapiens
ccctatctcactgacccaaaaggtaaaaaaataaaataaaagtaaagaacttacatcagattgtgcatttcttattttgccaccctgtttgttaggaaataatcttttttactttggtgaaatttgcttttgtatggctttcatacatcattctttgggcccaagtgtaatcctttttcacctgggaggtctttcagtctttggatacagctatcatcgtcctcaagtcagtttgtcctcaagttaatcacttcctatttcttcatctgatcttcagagaacaccattctaagttccatatggaagtgataagggagcaagccttgaggtctgtctgcctggatttgattcttggctccatctcttattagttagrtggctatttgtaagttacttaacttttcagggacctgatctcttcatgtgtaaactagaggataattataatgcccatctcataagtgactatgaaggttaagtgagagaatgttggtaaaatgcctatcatgatactgggcatgtgatcaaacattcaaaaattattaaatattatttttatacataatactcattagttggtctataccccacact

SEQ ID NO: 354080 - DNA, 486 bp, Homo sapiens
tagtatgctgttccagcatcaccgactaagatggacattaaaccacagatccaggaagctcttaacagagctgtggcctgtctttttagtctcttaacagagtctttaacagagcagttttaaatttcaataaagttaagcttattgattatttctttagtggattatgccactggtgttgtatctaaaaggtcatcaccatgcccaagttcatctagattttctcctacagtatcttctaggagatttatagttttscattttacacttaggtttataataaattttaagctaattttgtgaaagatgtaaaatctgtgtctagtcttcattttattgcatatagatatccagttgttccagcatcattttgaaaagactatcttggctccatcatattgactttgcttcaaagggcaaactgatctttgtcaaagattagttgactatatttatatgagtttatttctaagctctctcgtctgt

SEQ ID NO: 354081 - DNA, 486 bp, Homo sapiens
tagtatgctgttccagcatcaccgactaagatggacattaaaccacagatccaggaagctcttaacagagctgtggcctgtctttttagtctcttaacagagtctttaacagagcagttttaaatttcaataaagttaagcttattgattatttctttagtggattatgccactggtgttgtatctaaaaggtcatcaccatgcccaagttcatctagattttctcctacagtatcttctaggagatttatagttttccattttacacttaggtttataataaattttaagctaattttgtgaaagatgtaaaatctgtgtctagtcttcattttaytgcatatagatatccagttgttccagcatcattttgaaaagactatcttggctccatcatattgactttgcttcaaagggcaaactgatctttgtcaaagattagttgactatatttatatgagtttatttctaagctctctcgtctgt

SEQ ID NO: 354082 - DNA, 561 bp, Homo sapiens
agatatttcaaatatgcctccagacctgcctaagcatatccgccctcattatcaacatccccatcagagagactctttgcttttccctctgcaccccccatcttctcctaagcataagtccccctcacatcagacagcttgaaacccaagctcctgttctgagctcctgtcccgacacactgctctcaacagctacagcacttcagttctttatcctatagcttgattcttcaccctataggtcattktctactgtgtatccatttcttactttcccaaatagactataaactcttcaagggtggatcattgtttcagattcctatcctatcctttattttgtgtaaaaccccactaattttaattaaatatgtcaagctatcaaccacacacatatatacacacaccttacttcttcaaattacatacttggagaaaattgtggctcattaagatgaagagtttttaaaaatatatttgtagaagttgtttaagtgactcgatccataagggagaaaatatttaaaaaagaaaatgaagttaggttaaaatgccaagctg

SEQ ID NO: 354083 - DNA, 561 bp, Homo sapiens
agatatttcaaatatgcctccagacctgcctaagcatatccgccctcattatcaacatccccatcagagagactctttgcttttccctctgcaccccccatcttctcctaagcataagtccccctcacatcagacagcttgaaacccaagctcctgttctgagctcctgtcccgacacactgctctcaacagctacagcacttcagttctttatcctatagcttgattcttcaccctataggtcattttctactktgtatccatttcttactttcccaaatagactataaactcttcaagggtggatcattgtttcagattcctatcctatcctttattttgtgtaaaaccccactaattttaattaaatatgtcaagctatcaaccacacacatatatacacacaccttacttcttcaaattacatacttggagaaaattgtggctcattaagatgaagagtttttaaaaatatatttgtagaagttgtttaagtgactcgatccataagggagaaaatatttaaaaaagaaaatgaagttaggttaaaatgccaagctg

SEQ ID NO: 354084 - DNA, 561 bp, Homo sapiens
agatatttcaaatatgcctccagacctgcctaagcatatccgccctcattatcaacatccccatcagagagactctttgcttttccctctgcaccccccatcttctcctaagcataagtccccctcacatcagacagcttgaaacccaagctcctgttctgagctcctgtcccgacacactgctctcaacagctacagcacttcagttctttatcctatagcttgattcttcaccctataggtcattttctactgtgtatccatttcttactttcccaaatagactataaactcttcragggtggatcattgtttcagattcctatcctatcctttattttgtgtaaaaccccactaattttaattaaatatgtcaagctatcaaccacacacatatatacacacaccttacttcttcaaattacatacttggagaaaattgtggctcattaagatgaagagtttttaaaaatatatttgtagaagttgtttaagtgactcgatccataagggagaaaatatttaaaaaagaaaatgaagttaggttaaaatgccaagctg

SEQ ID NO: 354085 - DNA, 561 bp, Homo sapiens
agatatttcaaatatgcctccagacctgcctaagcatatccgccctcattatcaacatccccatcagagagactctttgcttttccctctgcaccccccatcttctcctaagcataagtccccctcacatcagacagcttgaaacccaagctcctgttctgagctcctgtcccgacacactgctctcaacagctacagcacttcagttctttatcctatagcttgattcttcaccctataggtcattttctactgtgtatccatttcttactttcccaaatagactataaactcttcaagggtggatcattgtttcagattcctatcctatcctttattttgtgtaaaaccccactaattttaattaaatatgtcaagctatcaaccacacacatatatacacacaccttacttcttcaaattacatacttggagaaaattgtggctcattaagatgaagagtttttaaaaatatatttgtagaagttgtttaagtgactygatccataagggagaaaatatttaaaaaagaaaatgaagttaggttaaaatgccaagctg

SEQ ID NO: 354086 - DNA, 584 bp, Homo sapiens
aatggcttctaagtgttcaagtgaaaggaagggtcatgtctctcactttaaatcaaaagctakaaataattaagcttagtgaggaaggtatgttgaaagccaggataggcagaaagctaggcctcttgtaccaaacagccaaattgtaaatgcaaaggaaacgttcttgaaggaaattaaaagtgttactccaatgaaaatacaaacaataaggaagtgaaacagccttattgtttatagggagaatgtttgcatggtcttgatagatcaaaccaaccaaaacaatctcttaagccaaagcctaatccagagaaggccctaacactcttcaatttatgaaagctgagggaggtgaggaagctgtacaagaaaagttgcaagttagtagaggttggttcatgaggtttaaggaaagaagctgtctccataacataaaagtgcaaggtgaagcagcacttttttccagaagatctagctaagattgatgaaggtggctataccaagcagcagattttcaatgtagatgaaacagtccaatattggaagaagatgccatctgagattttcatagctagagaggacca

SEQ ID NO: 354087 - DNA, 584 bp, Homo sapiens
aatggcttctaagtgttcaagtgaaaggaagggtcatgtctctcactttaaatcaaaagctataaataattaagcttagtgaggaaggtatgttgaaagccaggataggcagaaagctaggcctcttgtaccaaacagccaaattgtaaatgcaaaggaaacgttcttgaaggaaattaaaagtgttactccaatgaaaatacaaacaataaggaagtgaaacagccttattgtttatagggagaatgtttgcatggtcttgatagatcaaaccaaccaaaacaatctcttaagccaaagcctaatccagagaaggccctaacactcttcaatttatgaargctgagggaggtgaggaagctgtacaagaaaagttgcaagttagtagaggttggttcatgaggtttaaggaaagaagctgtctccataacataaaagtgcaaggtgaagcagcacttttttccagaagatctagctaagattgatgaaggtggctataccaagcagcagattttcaatgtagatgaaacagtccaatattggaagaagatgccatctgagattttcatagctagagaggacca

SEQ ID NO: 354088 - DNA, 613 bp, Homo sapiens
atagagcattgaagattcagcccatgtggttggaggattggttacccacacagtattgagcgaataattaaatatatggaggataatgggatccacgctcctcactgtgggagaagaagttacaaatatggaaagggagagggcaagaattaaccctgggttggaatttttggtatcagtggagactcatgagttgttttctttgatatagttaaatgtagataccgatatagttaaaatacccattatatttgtctgcttgggctaccataacaaaataacacgggctgggtggcctaaacaacataaatttatttctcacagttctggaggctakgaagtccaagatagaggtgccagcagattcagtgtctggtgagggcctgctctctggttcatctgtaacaccttccagctgtgtccccacgtggcagaaagtacaaggcagctctcttgggcctcttttatacaggcaccaatcctatttatgagggctcagacttcctgatctaaccactcccaaaggcttcacctcctaatatcatctctttgatgaggaggtttcaacatataaatttggagtaaggagagggacaacattcagttcattgca

SEQ ID NO: 354089 - DNA, 633 bp, Homo sapiens
catcatgcaattacttggcccagccctatgtttgtattagaacaggccctgtcaatattatttcacattaaacagcatctaatctatgagcaattagaagagcacagtgtgagaaggtgggagaataggagaataggagtgctttcttctcactggaataaaatcaatggagagcccaaggaatttcttggaggacgcacatcctttaaactatattcaacaatgacagattggttggtgcatttagcttaaattatattcccagaacagcagcatcagtatcacctgggaacttgctagaaatgccatttctcgggtcacaccccagaactaccaagaagagtggggcccagcaatcttgagttttaataagtcctttaggagatcctgaagcttgtgaaagttygcaaaccgctggtgaatcatccactcatcaagtttggaagaacaccatctattaggaattactcaggcacctgtgttcctctgaaaggggactaattcccaatttccttacagttaaaagccttcagaaagaatcaccataatttaaatggctggagctcttagagaactgcttaatatcaccataaataaaaatttaaacacaattaggcaccagaagctcttttt

SEQ ID NO: 354090 - DNA, 406 bp, Homo sapiens
aatggcctggagggcaaaagaatatgtttactaatgactgcttttaggtgcctttgcatttgaagttcatgcaaaaagmaaaaaagtgcctttataggcctatttagcagtcactccaaagtgctgagtatgcactttatagccctgtgatttttatcagccatatgatccgagttgacaatagcagatttagcaaacttggtgtttcacagaggtgtgggcagcattctagattctggtctcccataggctaactgaccccttcctttttggattttatgtacagtttctctattaacagtaagccaatattctgagaaagcccgtaaaacaaaaagtccaggacgtgacttggacagattgctgactgcatttctcaggctggattttatgaactcctccacgt

SEQ ID NO: 354091 - DNA, 566 bp, Homo sapiens
agaccccatgttcccatatccaactcagactctgcaactgaactctgggcttatctatccaaatgcccactctccctgatatggatgtagataggcacttcatactcaatatgtccaaaatggagctcttgtttctccctctaccttatagacctactcaccactgtcttcccgtcttagtaagttgtaaattcaaacttccagctctctggctaaaaatcgcagtgttatccctgactgtgtctctctctcacactgcytattgactatcagcaaatcctgtcaagctttcgaaagacgttcagagcctgacaccatctcatcacctcttccaacaccaccccattctaagccactatcatcccttgcctagattacacagtggttcctaactaacttgccagcttccaaacattccccacacagcaaccagagtgtttttttcaacaagttgagtcagatcacgccactcttcagctaaaaatcccctagtggcttctcatttcattaaactaaaaaccaacatccttacaaagatttatttggccctacccaacttggcccca

SEQ ID NO: 354092 - DNA, 566 bp, Homo sapiens
agaccccatgttcccatatccaactcagactctgcaactgaactctgggcttatctatccaaatgcccactctccctgatatggatgtagataggcacttcatactcaatatgtccaaaatggagctcttgtttctccctctaccttatagacctactcaccactgtcttcccgtcttagtaagttgtaaattcaaacttccagctctctggctaaaaatcgcagtgttatccctgactgtgtctctctctcacactgcctattgactatcagcaaatcctgtcaagctttcgaaagacgttcagagcctgacaccatctcatcacctcttccaacaccaccccattctaagccactatcatcccttgcytagattacacagtggttcctaactaacttgccagcttccaaacattccccacacagcaaccagagtgtttttttcaacaagttgagtcagatcacgccactcttcagctaaaaatcccctagtggcttctcatttcattaaactaaaaaccaacatccttacaaagatttatttggccctacccaacttggcccca

SEQ ID NO: 354093 - DNA, 617 bp, Homo sapiens
ctgctggtttaagacagctagtttgttacctcttaaaagtgtttttttctaagagttgccagtgaaatgtgtcctctttccctatgtcttttgagatgaatgtccatttattttaattatttttactttctcttggtattaaaatcttccatagattgaatattttttactttcctttggttcttctctagctctatcatgtcttttgtcaggtgtatcaatcaagacatcataatccagtatgaactcaccacgttttgtgtaaggaaagggataacatatatgtgggtggtggcagtgtgtttctgtatctgattcataccagacaatgttgctcatctttttttggtcatggaaggatgttgagaacactctgcaataattatgtcagttgctagcatatagttgctttggtagcttagagacamtaatcataattaacttaaaaatgtgttttctctaaaatatattatcttacactggctcacactgattattttttgctgtatttctataaattgcatactcttattaaatgtgtctcatgatatttatcctccaatgtgggctctcatttccaagaataactcaatttaccaactcggtgcgctacacca

SEQ ID NO: 354094 - DNA, 593 bp, Homo sapiens
catcattaagtacaaagatggctgctggtttaagacagctagtttgttacctcttaaaagtgtttttttctaagagttgccagtgaaatgtgtcctctttccctatgtcttttgagatgaatgtccatttattttaattatttttactttctcttggtattaaaatcttccatagattgaatattttttactttcctttggttcttctctagctctatcatgtcttttgtcaggtgtatcaatcaagacatcataatccagtatgaactcaccacgttttgtgtaaggaaagggataacatatatgtgggtggtggcagtgtgtttctgtatctgattcataccagacaatgttgctcatctttttttggtcatggaaggatgttgagaacactctgcaataattatgtcagttgctagcatatagttgctttggtagcttagagacactaatcataattaacttaaaaatgtgttttctctaaaatatattatcttacactggctcacactgattattttttgctgtatttctataaattgcatactyttattaaatgtgtctcatgatatttatcctccaatgtgggctct

SEQ ID NO: 354095 - DNA, 593 bp, Homo sapiens
catcattaagtacaaagatggctgctggtttaagacagctagtttgttacctcttaaaagtgtttttttctaagagttgccagtgaaatgtgtcctctttccctatgtcttttgagatgaatgtccatttattttaattatttttactttctcttggtattaaaatcttccatagattgaatattttttactttcctttggttcttctctagctctatcatgtcttttgtcaggtgtatcaatcaagacatcataatccagtatgaactcaccacgttttgtgtaaggaaagggataacatatatgtgggtggtggcagtgtgtttctgtatctgattcataccagacaatgttgctcatctttttttggtcatggaaggatgttgagaacactctgcaataattatgtcagttgctagcatatagttgctttggtagcttagagacactaatcataattaacttaaaaatgtgttttctctaaaatatattatcttacactggctcacactgattattttttgctgtatttctataaattgcatactcttattaaatgtktctcatgatatttatcctccaatgtgggctct

SEQ ID NO: 354096 - DNA, 617 bp, Homo sapiens
ctgctggtttaagacagctagtttgttacctcttaaaagtgtttttttctaagagttgccagtgaaatgtgtcctctttccctatgtcttttgagatgaatgtccatttattttaattatttttactttctcttggtattaaaatcttccatagattgaatattttttactttcctttggttcttctctagctctatcatgtcttttgtcaggtgtatcaatcaagacatcataatccagtatgaactcaccacgttttgtgtaaggaaagggataacatatatgtgggtggtggcagtgtgtttctgtatctgattcataccagacaatgttgctcatctttttttggtcatggaaggatgttgagaacactctgcaataattatgtcagttgctagcatatagttgctttggtagcttagagacactaatcataattaacttaaaaatgtgttttctctaaaatatattatcttacactggctcacactgattattttttgctgtatttctataaattgcatactcttattaaatgtgtctcatgatatttatcctccaatgtgggctytcatttccaagaataactcaatttaccaactcggtgcgctacacca

SEQ ID NO: 354097 - DNA, 634 bp, Homo sapiens
tctggcctgccctttaccaggaaaagagaagctacctttattacactgaacagtaaacaaatccacactttgctctggaaggagacactatatctaatttctaaggctgtttgctgtataaayaaatttgaaaatatagttcggcacagaggcaatctatataaaccacgttttgtagtttctgtaacttgatgaattaacatcttcaagatggaatgtcaaccactttaggtaaacaattagggacctgagataaccacctgacatccccacactcttagccccgcatgagtttataggggtgacacttttaaatatagcaaaccagtcccagtgtatcctttcctgcctcagcagaaaccactgtatcctttccttcacccagtgtatcctttcccagtgtatcctttccttctcccagtagaaaccactgtaaggcacttatctactctctttctaccttataattgatcctgatcttcccctatgtggccccacatggcatgctgtattttctcttaagagaactgtgagaataataaacttctgtgatttcaaagcagctctctttgtgcctcaccatactttaatcaagattatgtttaaaacacagtcagtaactctgctcacaaaa

SEQ ID NO: 354098 - DNA, 634 bp, Homo sapiens
tctggcctgccctttaccaggaaaagagaagctacctttattacactgaacagtaaacaaatccacactttgctctggaaggagacactatatctaatttctaaggctgtttgctgtataaataaatttgaaaatatagttcggcacagaggcaatctatataaaccacgttttgtagtttctgtaacttgatgaattaacatcttcaagatggaatgtcaaccactttaggtaaacaattagggacctgagataaccacctgacatccccacactcttagccccgcatgagtttataggggtgacacttttaaatatagcaaaccagtcccagtgtatcctttcctgcctcagcagaaaccactgtatcctttccttcwcccagtgtatcctttcccagtgtatcctttccttctcccagtagaaaccactgtaaggcacttatctactctctttctaccttataattgatcctgatcttcccctatgtggccccacatggcatgctgtattttctcttaagagaactgtgagaataataaacttctgtgatttcaaagcagctctctttgtgcctcaccatactttaatcaagattatgtttaaaacacagtcagtaactctgctcacaaaa

SEQ ID NO: 354099 - DNA, 634 bp, Homo sapiens
tctggcctgccctttaccaggaaaagagaagctacctttattacactgaacagtaaacaaatccacactttgctctggaaggagacactatatctaatttctaaggctgtttgctgtataaataaatttgaaaatatagttcggcacagaggcaatctatataaaccacgttttgtagtttctgtaacttgatgaattaacatcttcaagatggaatgtcaaccactttaggtaaacaattagggacctgagataaccacctgacatccccacactcttagccccgcatgagtttataggggtgacacttttaaatatagcaaaccagtcccagtgtatcctttcctgcctcagcagaaaccactgtatcctttccttcacccagtgtatcctttcccagtgtatcctttcsttctcccagtagaaaccactgtaaggcacttatctactctctttctaccttataattgatcctgatcttcccctatgtggccccacatggcatgctgtattttctcttaagagaactgtgagaataataaacttctgtgatttcaaagcagctctctttgtgcctcaccatactttaatcaagattatgtttaaaacacagtcagtaactctgctcacaaaa

SEQ ID NO: 354100 - DNA, 631 bp, Homo sapiens
gtatttgctggcaactggatgttttgaggatctcatcacagggaagtttgaaaataagaaaatcatgtcaacaattcattattgaacattttcttggcatatgtctgtataaatgtaattgggtaaaacagataaacaggaaaatgaaatatcctaagaggaagatgttgcgctacctgattggtcatccagaaatggaaaaatcttgattcatgagactcagtctgcaggagcacagagaaagaacaccgacaagagtmcgagaggtcatcttagaaaagtcttgatcttgcatggatcaagaatggtggtctctgtgagtaaaatgtcctttcctctttcacatgcggaggaagtttactgtttcataaaacagcttcctcttgatgaagcaaattctggaacactcttagctaagtttgtgtgatacttgtttgttgtagagccagaggtggaaaaacatgtttctaagagatttattcaccaatattgttgtttctcagagttcttccaaatcttctacgtagaaatatgtaaaatgaagaaagtaactggttccccaaacattgtcaccatagacttctaaggaatgcctttaagaggccacccaggtgtaagaagcagtgatttg

SEQ ID NO: 354101 - DNA, 581 bp, Homo sapiens
ggcaaaaaccttgagagttttatggaacaaatgctaccaaaatagaacaaccgtcttctgctakgtaacagtcaacaaaataaatgtgcttcaatacatctcgtatgaaaccacgccgaagttgtctgtaaatcttgctcagtttactttgttagagttgcactaaaaagaaagaaagaaaaaaaagtcctgggttacaaagcaaaacgcacgtgttactggtttagtccttcaatgggatatcgaccacagtgttcctcctgtttatatttggaaatcaacacataaaccaggctttggcatttcaatggtaaataagaaggcattacattcttccttccccaggccagctactttttcagttccttctccctgtgctcagggaaacaacccaaaatctgagctcctgtgagaacctgtctgatttaaacgctgccaagaaaacataaagtagtttatcttacactacagcgcaggctggacgaatagtgaggctgatcaaaacggataacgcagaagcactgaacagaagcgcaaggaaattcatttctaattaggtatccatgtgtccagcacctggc

SEQ ID NO: 354102 - DNA, 562 bp, Homo sapiens
gaaaggaagggaggatgtggttaagaacagagttactcccttatagagggtttcactttatgggaaatctcccctggagctttgaaaaagtcatgtttaacacatagtttgacgttttttgtgtggtgaggttatggagagagtaaaagatggggctgcagatggagacaaggcttgcctcacactcctccatcctccctatgggctcttgaagaggaagcagaattttacagggtatcttgggtcaacagcarccaggtatgatgtggcccgtggctcacagtggagcaggaaggaaccctcagctcaaagaacagtggtcaactggatgacctgaaagcagatgggagacagagagaagtgatcctagggtcaagggaaataactgccattggagtaataaattaattgtgtgattagttgtttaatgtatgtccctctcattaaattagaaattccatgtggacaaggattatatatagagttacattcaatacatagtttttaaatgggtaactaaatacattgatagcactattgattttttaaaatagtttcttat

SEQ ID NO: 354103 - DNA, 537 bp, Homo sapiens
atcagcaaaacaaaacaacaaacaaacccccaattgccacatcttaccccatttgaaactgttaaaaagtcatagagcccagggtaaattcaggtctgtctagagcccattggccattctttctctacttaagcacttgtgattcaaatgaacaaggcgagatgaagaccaatcacaaaacagacasagaaacatgcctcccaccacacagacatctcctcaaggtcataattatttttaatccttacattgactaattatcaagtttaaaccccacagcagctctgtgagtaaggtatttctattctcattttctggatgaggttgctcacaaacaaagcaggtgaactgggattagcacaaaagctgatattgtttaattcactcaaaaagcattgattgagcaaagctgacattgtttaattcactcaaaaagatggattgagtttattgagaactgagaagagtccaaggtactgatgtgggttcagggaacatagcagtgaataaaatgaaatatataagataactgttgta

SEQ ID NO: 354104 - DNA, 537 bp, Homo sapiens
atcagcaaaacaaaacaacaaacaaacccccaattgccacatcttaccccatttgaaactgttaaaaagtcatagagcccagggtaaattcaggtctgtctagagcccattggccattctttctctacttaagcacttgtgattcaaatgaacaaggcgagatgaagaccaatcacaaaacagacagagaaacatgcctcccaccacacagacatctcctcaaggtcataattatttttaatccttacattgactaattatcaagtttaaaccccayagcagctctgtgagtaaggtatttctattctcattttctggatgaggttgctcacaaacaaagcaggtgaactgggattagcacaaaagctgatattgtttaattcactcaaaaagcattgattgagcaaagctgacattgtttaattcactcaaaaagatggattgagtttattgagaactgagaagagtccaaggtactgatgtgggttcagggaacatagcagtgaataaaatgaaatatataagataactgttgta

SEQ ID NO: 354105 - DNA, 537 bp, Homo sapiens
atcagcaaaacaaaacaacaaacaaacccccaattgccacatcttaccccatttgaaactgttaaaaagtcatagagcccagggtaaattcaggtctgtctagagcccattggccattctttctctacttaagcacttgtgattcaaatgaacaaggcgagatgaagaccaatcacaaaacagacagagaaacatgcctcccaccacacagacatctcctcaaggtcataattatttttaatccttacattgactaattatcaagtttaaaccccacagcagctctgtgagtaaggtatttctattctcattttctggatgaggttgctcrcaaacaaagcaggtgaactgggattagcacaaaagctgatattgtttaattcactcaaaaagcattgattgagcaaagctgacattgtttaattcactcaaaaagatggattgagtttattgagaactgagaagagtccaaggtactgatgtgggttcagggaacatagcagtgaataaaatgaaatatataagataactgttgta

SEQ ID NO: 354106 - DNA, 597 bp, Homo sapiens
tttaattcactcaaaaagatggattgagtttattgagaactgagaagagtccaaggtactgatgtgggttcagggaacatagcagtgaataaaatgaaatatataagataactgttgtagaaggtgaaaataaaataaaacatgctcctaccctcayggagtttccattccaatggaggagatggggaaaaaaagacaaaatgttatcactaatttattagataatatggaccatatgtataaattaggatttccagtttctgatccagcatttaagcagtttggaagtcacctctctttcctaataacaagtaaaaaagtgaacaagctgaaaaatcaataacttttctaagatccttgaaaggtatgagatcacagggaaaacttctgtccctgaaattggagagacagacaggcagatacagagaattacaacttactggatcagaaaccccaaaacagaatcccacttcttgggggcaccagtaccaaggtaggaaaacctgaactgtgatttagaaagtgttgaaggcttaagtgtggctaagtctgtgagttaaaacactccaagatcccagaaacttttgtaagttttac

SEQ ID NO: 354107 - DNA, 597 bp, Homo sapiens
tttaattcactcaaaaagatggattgagtttattgagaactgagaagagtccaaggtactgatgtgggttcagggaacatagcagtgaataaaatgaaatatataagataactgttgtagaaggtgaaaataaaataaaacatgctcctaccctcatggagtttccattccaatggaggagatggggaaaaaaagacaaaatgttatcactaatttattagataatatggaccatatgtataaattaggatttccagtttctgatccagcatttaagsagtttggaagtcacctctctttcctaataacaagtaaaaaagtgaacaagctgaaaaatcaataacttttctaagatccttgaaaggtatgagatcacagggaaaacttctgtccctgaaattggagagacagacaggcagatacagagaattacaacttactggatcagaaaccccaaaacagaatcccacttcttgggggcaccagtaccaaggtaggaaaacctgaactgtgatttagaaagtgttgaaggcttaagtgtggctaagtctgtgagttaaaacactccaagatcccagaaacttttgtaagttttac

SEQ ID NO: 354108 - DNA, 583 bp, Homo sapiens
aatcccagcactctgggaggccatggcaggcagatcacttgaggtcaggagttcaagaccagcctggccaacatggcaaaactcctctccataaaacatacaaaaattagccgggtgtggtggcacgtgcttgtaatcccagctacttgagaggctgaggcatgagaatcrcttgaacctgggagccagaggttgctgcgagctgagattgcaccactgtgctccagcttggaccacagggcaagactccatctcaaaaataagaaaaaaaaaaaaaaggacacaaaaagtaatcttccagattaacagagctgcaagaattgcattgccaaatattatgacttataatttacagaaattgagatggtcagatatttgtgtaagaatagacaggttaatgaaacagaacatgaaatacagacaaatattcacatgtatatggtcacttgatttttgacaaaagtatcactgcagtgtataaaggaggttctttttcataaatggcattgaatcaactatatgctcatattgtaaaaatgactcctatctcacaccatatactaagtctcttccagatgaactg

SEQ ID NO: 354109 - DNA, 583 bp, Homo sapiens
aatcccagcactctgggaggccatggcaggcagatcacttgaggtcaggagttcaagaccagcctggccaacatggcaaaactcctctccataaaacatacaaaaattagccgggtgtggtggcacgtgcttgtaatcccagctacttgagaggctgaggcatgagaatcgcttgaacctgggagccagaggttgctgcgagctgagattgcaccactgtgctccagcttggaccacagggcaagactccatctcaaaaataagaaaaaaaaaaaaaaggacacaaaaagtaatcttccagattaacagagctgcaagaattgcattgccaaatattatgacttataatttacagaaattgagatggtcagatatttgtgtaagaatagacaggttaatgaaacagaacatgaaatacagacaaatattcacatgtatatggtcacttgatttttgacaaaagtatcactgcagtgtataaaggaggttctttttcataaatggcattgaatcaactwtatgctcatattgtaaaaatgactcctatctcacaccatatactaagtctcttccagatgaactg

SEQ ID NO: 354110 - DNA, 567 bp, Homo sapiens
gggaaaagattatatttcctgattaaaatgtgtcattttaggtggtgtatacttgtttttgctcttctagaaagctctgtagtgagatcttctgagtgggtcagcagaagtaaggaggaggaaaatccaacacaacagtgtccgcatcatgaagcawgtattacaagatgtaaattacataagaatggttttggttttgtttctgttttagttttttctaggtttccttgaaatgaaatgtattctctagttttaaatctgcattttacaaatgcaaaagaaattgtagttataaagtggtagggatcaagaattgaagtctgagggtgccgtctctgcacaggctatcagaatgtgctgggaaggaggtgaatggaccccttgagttgaaatgatggtgacactgagggtgtcagtttcccgacttagaccacacgtgttgccactcttcataccatggggtggctaccatgggtatttgaggagaacatgaagcctatggaagtttgctgctttgcttccacagatgttgtcaggcagggaagcagggctcaatccatagagcca

SEQ ID NO: 354111 - DNA, 597 bp, Homo sapiens
gtagtgagatcttctgagtgggtcagcagaagtaaggaggaggaaaatccaacacaacagtgtccgcatcatgaagcatgtattacaagatgtaaatkacataagaatggttttggttttgtttctgttttagttttttctaggtttccttgaaatgaaatgtattctctagttttaaatctgcattttacaaatgcaaaagaaattgtagttataaagtggtagggatcaagaattgaagtctgagggtgccgtctctgcacaggctatcagaatgtgctgggaaggaggtgaatggaccccttgagttgaaatgatggtgacactgagggtgtcagtttcccgacttagaccacacgtgttgccactcttcataccatggggtggctaccatgggtatttgaggagaacatgaagcctatggaagtttgctgctttgcttccacagatgttgtcaggcagggaagcagggctcaatccatagagccagcttgactcctatgtcagggagattgtgggtgcccacccacgctccatgtttcctgctctgggatgtcttcagaatcactgatcagagtcctctctctcctcactgat

SEQ ID NO: 354112 - DNA, 528 bp, Homo sapiens
ctaacttggcaatgcttagcaaaagatgctgttttctctgctttataactggtctttgagtactacttaaaattaactgtgagaaaaattgttacgggggcatttggttgtgtagtgttattttgggtctgaaagagctcacaatttttgtgccctgcaatgactcaaaatcagtgttcaatatttgacttgtgtgtgtcatgaatttaaagtgatatatgaaaattcattgtcatattgggatgaatgagttaaaagaagattaaaatatttgatttatttttatttaagactgagtgtctttcagggtaaatactgcaatatgttgaacttctcccaggatctcacttctttgtttaagctaacatccacyttttccttgacatgcatgccccatatttactcatagaagttccattctaccagggaagagtaattgatttcaatgtcttgccgggaaaagtgaaggtaaattttatttgggaaagagttgagttctgtagctatgggaatcttcctcaagtatgt

SEQ ID NO: 354113 - DNA, 600 bp, Homo sapiens
atacatattttgcatttttgcatatatacctaagagtggagtttctggatcactggaacatgtgtaagtcctgctttagtagacactacctcatcattttccaaggtggctatagcagttacaattctatcagcagtgtatgagcgttccaactgccctcatccccacacttggtattgtcaggcttatttttaattttagccaaattaaaatctgagacatatgctgtagaatctcattgtggtttagtttttacttctttaaaaattaatgacattaagtatttctcatgtgtttattgactacttgattattttcactcataaatattaagatataatgttatcttttgtagtaaaacttttatcctctttagtgtaatattaagataattaaaaaatggatacttaatttgcctgtcactcttcaaggatcatgattcccataaaaaatggattctcaatttgtctgtcactatttattcaaggatcattattctcactttattrcaatggcattgcatcatttttctagggctgctgtaacaaagcaccacaaactgtgtggttggaaacaacagaaatgtattgtctcaaactt

SEQ ID NO: 354114 - DNA, 561 bp, Homo sapiens
ggcagggaatgcttgctttgttcactattgcatatccagagcataatcttgcgcctagtaggctgtcaacaaatattcgttcaataaatacgtgggagagaagataaggtccataattttagatttatcctagttctttgtttaatgccaggccctatagtgagtatttatttaatgcctgccacagcatgttagatgcagtcaataagtcaccttgctccagaactggctccttccattccatttctaggaattgctcaaaatagtcatacaaaatctctcccctgggccaatgaggcccatgctagctgctagtttttctcttgtcggtctcatgtagttataatcattgaagcttttaaaatacttttttcaaggctagaatgagccatgtggtactggattacagttggagacatgattataaactcatatgtagcttaatatagatgctgatagatcaatatagaaataattatatatatatawaaaacagttagtatacatacatgtatttcccaggtctgtctgctgagaggacctagaggcagttatatacct

SEQ ID NO: 354115 - DNA, 656 bp, Homo sapiens
tagatcaatatagaaataattatatatatataaaaaacagttagtatacatacatgtatttcccaggtctgtctgctgagaggacctagaggcagttatataccttggttttctaatactctrttcttgaataaaatgaatctgggatctttggagaaataactggtcctaagacttggtgaggaaatatacaagatggcctgaatcatcttgtagtgccagaaaataaggaagtgctcaaacaaaataaggcaggcgtactagtttgttttcatgctgctgataaacacatacacgaaactgggaacaaaaagaggtttaattggacttacagttccacatggctggggaaagctcagaatcatgagtgaacggcagcaccaagagaaaaatgaggaagaagaaaaggcagaaacccctgataaacccatcagatctcatgagacttattcactatcacaagaatagcatgggaaagacctgcccccatgattcaattacctccccttgggtccctcccacaacatgtgggaattctgggagatatacttcgagttgagatttgggtggggacacagccaaaccatatcagcaggtatgtcaaaggaacacaacagcttactgacagcattcaaaggccaaagatggaacagtgt

SEQ ID NO: 354116 - DNA, 656 bp, Homo sapiens
tagatcaatatagaaataattatatatatataaaaaacagttagtatacatacatgtatttcccaggtctgtctgctgagaggacctagaggcagttatataccttggttttctaatactctgttcttgaataaaatgaatctgggatctttggagaaataactggtcctaagacttggtgaggaaatatacaagatggcctgaatcatcttgtagtgccagaaaataaggaagtgctcaaacaaaataaggcaggcgtactagtttgttttcatgctgctgataaacacatacacgaaactgggaacaaaaagaggtttaattggacttacagttccacatggctggggaaasctcagaatcatgagtgaacggcagcaccaagagaaaaatgaggaagaagaaaaggcagaaacccctgataaacccatcagatctcatgagacttattcactatcacaagaatagcatgggaaagacctgcccccatgattcaattacctccccttgggtccctcccacaacatgtgggaattctgggagatatacttcgagttgagatttgggtggggacacagccaaaccatatcagcaggtatgtcaaaggaacacaacagcttactgacagcattcaaaggccaaagatggaacagtgt

SEQ ID NO: 354117 - DNA, 656 bp, Homo sapiens
tagatcaatatagaaataattatatatatataaaaaacagttagtatacatacatgtatttcccaggtctgtctgctgagaggacctagaggcagttatataccttggttttctaatactctgttcttgaataaaatgaatctgggatctttggagaaataactggtcctaagacttggtgaggaaatatacaagatggcctgaatcatcttgtagtgccagaaaataaggaagtgctcaaacaaaataaggcaggcgtactagtttgttttcatgctgctgataaacacatacacgaaactgggaacaaaaagaggtttaattggacttacagttccacatggctggggaaagctcagaatcatgagtgaacggcagcaccaagagaaaaatgaggaagaagaaaargcagaaacccctgataaacccatcagatctcatgagacttattcactatcacaagaatagcatgggaaagacctgcccccatgattcaattacctccccttgggtccctcccacaacatgtgggaattctgggagatatacttcgagttgagatttgggtggggacacagccaaaccatatcagcaggtatgtcaaaggaacacaacagcttactgacagcattcaaaggccaaagatggaacagtgt

SEQ ID NO: 354118 - DNA, 492 bp, Homo sapiens
attagaaccacctttaaaaaatactgatgatgctcaagttcactcacagagactctgatttaatatttctggagtgtgatctaggcatcaggaatttttaaatagccccagatatttctaatagcccagttaagaaacactgcagaacagtttcctgagccagttactagaaccagtaaatgaggcggaaatatcacaattgtccttggaaaaacaaggacaattgtgaaaaacaaggaatccaaaaacatacaggaggtaggaatgttggagtggatctattatgtgcaatctacacaaccatccccacttttttcatgcttttgcctccactcaggaaaacctgcatgatgctccctcaattaagaaatgctgtggtcagagaagtgtaaccatccttagaaagctctacataaatgcaggggtgtccctgtgccagagatygggggagggagaatattgtagaactgggctactgatttcagtggcaat

SEQ ID NO: 354119 - DNA, 512 bp, Homo sapiens
gatgactcttttgcaaacagcagtgattatgacactgctgctgagatggcttggaaaacatgctttagagaggagaatgagcttctgaaaatcagaaagcatatctcatatctttgggagtgtgtacacaatgaacataaaaaactcaatagatattgcttctgattaaaatcaacccggaagagagcctttatcaatgaatatttgtaatggcaagaaacaaaacctgtgactaacttacacaggagaaaagagtctgtgacaaaatactaggcagctcacagatttgaaaggaaggctaaacwagcagacctcaggaagggcagaaaccagagtagctaggacctcatacataggagctagtagatgccattgggcactattgccactccaattcctttcatacctggttattcaggcaagatcccagttactaggagacagtctgtgtggtctagcctcattcatgtgtcccctgctgcggttggggtagggcacagcaaagtcacatg

SEQ ID NO: 354120 - DNA, 391 bp, Homo sapiens
ttttttcacttatgagtaaccttgaacatatgttatttcaatattgtaagtatacttatacttagggcaaattctcaaaggtgaaaataatatgctgaaggatatttccaattggaaatataataggtattaccamacaaccaaagattttttactgccttcaattaaagagcacctcgaaactatagtgaaaatatcagaaaatgacaatatcagaattatttcaacagtaacaggaatatctggttcttagttaatttgccatttttcaggtttcaggttttgtctctttgcagacatgatcaaaagttatctgctgagtacaaaagcagaatgaaatcataataatgatttaatcttaaagacacataatacatagatagaaatttta

SEQ ID NO: 354121 - DNA, 391 bp, Homo sapiens
ttttttcacttatgagtaaccttgaacatatgttatttcaatattgtaagtatacttatacttagggcaaattctcaaaggtgaaaataatatgctgaaggatatttccaattggaaatataataggtattaccacacaaccaaagattttttactgccttcaattaaagagcacctcgaaactmtagtgaaaatatcagaaaatgacaatatcagaattatttcaacagtaacaggaatatctggttcttagttaatttgccatttttcaggtttcaggttttgtctctttgcagacatgatcaaaagttatctgctgagtacaaaagcagaatgaaatcataataatgatttaatcttaaagacacataatacatagatagaaatttta

SEQ ID NO: 354122 - DNA, 572 bp, Homo sapiens
agtaagtattattctgccttgatttttataagctacaatattgggataatgatactttccttacagacctccagttacacatgtaaatacctccattgtaaaatggtcatgaaaaataagcttaatggtagttaagtaccaaaggtagatagcagcccagaatgacttagttttctgttttacctccccttgagaggctaaaagagtcttgagaaacctttgctagatgatgcccatgaattttcaaactagaatatactatccattcaacagatattcattacttattttatgtcaggcactatgccagacactagaggaattctgcaaagtgcttcagggatcctcaaatgtttggtttgaattttattctagacataaacttcaactattttgtaaaaaagaatagaagtggcatgtgtgttcagggtactatatattaaattttaactctttartatcactcctactttatcttgtactctcaggtttactcattttgtataaactcaaaatacatttcttctgccttcagtggaaatacttttacttctcctaaatgtatcattaat

SEQ ID NO: 354123 - DNA, 573 bp, Homo sapiens
atacccagatgcatgggtgatgctttctaaatattcacctgctgttagctcatctgttatgccatttttatataagccatccccttgccagcttttctggatgcctaagaatattatttatgtctctggctttgtaaaataaaaatatacaacttgaaaatgtttagaaagaccaggtgttatggccagcactttggaaggtcraagaaggaagatcacttgaggccagcagttcaaaaccagcctgggaaacagaataagaccctgtctctaccaaaaaaaaataaaagaaaaaaattagccaggcatggtagtgtacacctgtagtcctagctacatgagaggctgaggtgggaagatcacttgagctcatgagcttgaggttacagcaagctatgatcacaacactgtactttggcctggacagcagagcaagatcctgtctctaaaataaataaataaataaaaatgtttagaagatgtttaaaagatctttaaattttttaacttaataattatgagataaacagtaaaggtgttaatattgattaatatacagattaccgtcagcca

SEQ ID NO: 354124 - DNA, 470 bp, Homo sapiens
aatgaacaaatgaggaatagtggtagaaaaaaataaaaacagaggctgggcacagtggctcatgcttgtaatcccagcaccttgggaggccaaggtggaaggactgcttgagcscaggagttcagtccagcctgggcaacatggcaaaatccagtctctacccaaaaaaaaaaaaaaaaaaaaaagccaggcatggtggcgtgcacatactcaggaggctgagatgggaggactgcttgaacctgggaggctgaggctgcagtgagccatgatcatgccactgcactccggcctgggctggaaggaaaaccctgtctgaagggtggagggaaggaagaaagacagactattaaaacaacaacaacaaccaggaatattagagctgaaaactacaatatctaaaatgaaaatattcatggattgaataacagtaacttagaaactgaagaaaaatttagcgaacttaaaaa

SEQ ID NO: 354125 - DNA, 470 bp, Homo sapiens
aatgaacaaatgaggaatagtggtagaaaaaaataaaaacagaggctgggcacagtggctcatgcttgtaatcccagcaccttgggaggccaaggtggaaggactgcttgagcgcaggagttcagtccagcctgggcaacatggcaaaatccagtctctacccaaaaaaaaaaaaaaaaaaaaaagccaggcatggtggcgtgcacatactcaggaggctgagatgggaggactgcttgaacctgggaggctgaggctgcagtgagccatgatcatgccactgcactccggcctgggctggaaggaaraccctgtctgaagggtggagggaaggaagaaagacagactattaaaacaacaacaacaaccaggaatattagagctgaaaactacaatatctaaaatgaaaatattcatggattgaataacagtaacttagaaactgaagaaaaatttagcgaacttaaaaa

SEQ ID NO: 354126 - DNA, 504 bp, Homo sapiens
aattgatttctcccttgctgttctcatgmtagtgagttctcttgagatatgatgggttattgaataaaagtgtgtggcactcgtcccttggctctctctctctctctctgctgctgccatgtgaagaaagtgtttgcttcccctttgccatctgccatgactgtaagtttcttaaggcctcccactcatgcttcctgtgaagcctgtggaactgtcagtcaattaaacatcttttcttcataaattacccagtctcaggtagttctttatagcagtgtgagaatggactaatacactgtcattgttcttcattttttctgtgttctttttggaggatttaatcaattttctaacacttgtgttgattctttaaatttctctaataatagtttaattttcaagagctctttcttgttttcaggagacttctgactcatttcatagatgcattataatctttcatccagctgaggaatattaattgcagttgttaaagatttattc

SEQ ID NO: 354127 - DNA, 570 bp, Homo sapiens
ctggctgaaaacttcccaaatattgggaaggttacagacatccagatttccaaacttaaaaaaatctcaagtaagatgaatccaaaaaatactctgtgacaaaatataataaaattgtcaaaagtcaaaaacaggactgggtggttcatgcctataatcacagcactttgaaaggctgaggcagaaggatcrcttgagaccaggagttcaagatcagtctgggcaacatagcgagaccccatatcttcaaaaactaaaaaaattaactggatgtggtagcatgcatccgtagtcctagctaccagaccccatatcttcaaaaactaaaaaaattaactggatgtggtagcatgcatctgtagtcctagctacttggggaggccaaggcaggaggattgcttgacctagaatttgaagttacaatgagctatgatcacaccactgcactctagcctgggcaacaaagcaagatcctgtctcaaaaataaataaataaataaagtcaaaggcagagaatcttcagcagtaagagataacagaatcatcacatatcaaggaatctccattagg

SEQ ID NO: 354128 - DNA, 551 bp, Homo sapiens
tcaaacaactcaatagcaagaaaacaagtaacctgatttttaaaatggacaaagaacatgtattagtccgtttccacgctactgataaagacatactcaagactgggagcaatttacaaaagaaagaggtttaatggactcacagttccacatggctggggaggccacacaatcayggcagaaggtgaaaggtatgtctcacatggcaacagacaaaagaagagagcttgtgcagagaaactcccctttttcaaaccatcagatctcgtgagacttattcactatctcaaatagcatggaaaggacctgtccccatgattccactatctcccaccaggtcctttccacaacacatgggaattacggggggtacaattcaagatgagacttgggtggggacacagccaaaccataacattctgcccctggcccctaccaaatcaaatgtcttcacattccaaaaccaatcatgtcttcccaacattcccccaagtcataactcatttcagcattaactgaaaagtccacagtctcatccgagacaaggagag

SEQ ID NO: 354129 - DNA, 551 bp, Homo sapiens
tcaaacaactcaatagcaagaaaacaagtaacctgatttttaaaatggacaaagaacatgtattagtccgtttccacgctactgataaagacatactcaagactgggagcaatttacaaaagaaagaggtttaatggactcacagttccacatggctggggaggccacacaatcatggcagaaggtgaaaggtatgtctcacatggcaacagacaaaagaagagagcttgtgcagagaaactcccctttttcaaaccatcagatctcgtgagacttattcactatctcaaatagcatggaaaggacctgtccccatgattccactatctcccaccaggtcctttccacaacacatgggaattacgggggstacaattcaagatgagacttgggtggggacacagccaaaccataacattctgcccctggcccctaccaaatcaaatgtcttcacattccaaaaccaatcatgtcttcccaacattcccccaagtcataactcatttcagcattaactgaaaagtccacagtctcatccgagacaaggagag

SEQ ID NO: 354130 - DNA, 605 bp, Homo sapiens
tgggtgcatgtatatttacaatttatagtctcttactgaattaatccctttcttattgtataatatgcttctttatctcttttacagcttttgagttaaagtctgctttgtctgatataagtgtagctactcctgttcacttttgctttctgtttgcatggaatatcttttttcatcccttcacttttagtctatatatgtctttccaggtgaggtaagtttctcttaggcagcatattgttagttatttttttaaaaaataccctcagacagtctatatctcttaagtaagggaattcatttactttcaaggttattattggaaggtgagaattattcctatcaatttattggttgttttctggttttcatacatcttttcttcctttgtatatcctttctatcctttgttcctttcttcctctyttattatttatttttgtagttacatggctttttgtagtgatatggttttatttctttctctttctccttagtgtgttggctctaccagtgagttttataattttgtatatgttcattatgttggttatcatcttttctgttctagatgttaggctcctttgagcatttattgtaaggct

SEQ ID NO: 354131 - DNA, 516 bp, Homo sapiens
tgccgtgtatgtctgtcagtatcttctatttataaacaatccccaagacaaaatataatattcctagctaaataatagtaaaagtaactatgtaaataggaaaagactctcagcttaatgtaagatgctttggttgttaagtaaaggtttaaaacatttcatagcaatggctatgtctgtggtgtttgactataatgtctgcttatctttggcaaacttcaccatattcataggctttgttgagtctcataggttacacctgaatcaaaaaacaaaaagacaaaaamcccaccacaacaaaggttgagtatctgcaaatgagtcatggagtgttattttatagccctgaaaactagaatgtgtgctctggttgcctggctgaaggagagtaccaggttttcatgttcccatccagcttggctttttggatgagattaagtttattcatcacatagtagccaaatactagtatcttggcacccttgtgaggagcattgtccataataggtagtccaa

SEQ ID NO: 354132 - DNA, 292 bp, Homo sapiens
tctaaaatatttatatgtgtgtatatacatgcatatgtatgcatgtatgtgcacatatgtrtatttatatgtgcacataaataaattattatttcctaactttgttcaccaaacaacccactaagtaaagatacctcaaagagcaaaaagcatacctagcaccaagatcttggtctctaatatgatattccattacaaggaactagagctccaaaaggatatacagctgattccacaactgaggcagaagaggaataagatgagcctgaaatatcttcttataccagaaagt

SEQ ID NO: 354133 - DNA, 515 bp, Homo sapiens
ggattaaagaacaaattaamcctaaataccaccacactgttcactaacctactccagcagtcacacttaatgaacaggacccttaaggttatttaaatgaaagtacagtaattaaggatgtcaagctagatgctaagggaatactaattactcatggaagaatatgctaactctagcaagcaaccttaaaatctcagcagttctatacaataagtttgattccagcttgaagacactgtccagtgtggaatggatttggagaaaaggtcttggtccatgcagtcttccaggatctgggctattcctagcctctgcaatctttcagatcctcatcttcctctccattgaactgctgaatgaggaaacagagggtgtatggcacatgaggtttttaagagccaggcctagaagtggtgggtgttacttctgtctaccggacagagcccaataacatgacttccaacctaactgcaatggaggctgcgaaatacagctgagttgtgttcagaatgttt

SEQ ID NO: 354134 - DNA, 558 bp, Homo sapiens
gacagagcccaataacatgacttccaacctaactgcaatggaggctgcgaaatacagctgagttgtgttcagaatgttttcaaaattggcgattaaatgacattcaatctagtatagttttgagggacaasgtgttggtatagaaagactgatgggagaactaacatttaactttgaaagtacattcctaaaatccaagagctttaaattcattaagtcatactccaaaagaactcaaacatttacctgacataggaagttatatgctcaagttagacttgttaccagaacatattcctcaagggtagaaatcggacaaaaccatatatggtttcatactggccaaccttaacatgagtaacatgcgttctgaactgatattttcagatgtatgcttttggtactgtctcatagcctctcagtgaataaatgtttacagaataaagcaagcataagagttcctcaagtatcttatatattagacatcaaggctgcttaactcattatcacaaagaaaccattagtcttatctgcagttgcaaatacagcaacaaaaca

SEQ ID NO: 354135 - DNA, 589 bp, Homo sapiens
agacaaaaattctctcataaagatgttcacatcctgctagataaaaagacaagtaaattatgacttaacaagaacactgatggtaataatcatggaggcacaaacctgcctgaagttagtggggatattatgacaagtttttaggctggaattttattggagctgagatttgaaaaatgagtaatttgagttcaaaggcagggacataacacccatttaaataggcaaagacctgggtttatakggaggagtggttggatatgaagtaaaaactatataatattgtggaagtcttggaaactgaataaaatactgattaaaagatctgtttagaagctaatgtaacagtcaaggctaaataataatagacataagtaggacaatggatgtgcaatattatggccttaaaatggataagagctggccactagttgcatgtgagagtcaaagaaaatataagaacatactggtttagaccactgttagaatcaggtagttcaaggtttcaattctcattctagcacttaatgacttaacctttcaaaaaggagttaggcttatgtccttggtttactcatttgtaaaatag

SEQ ID NO: 354136 - DNA, 614 bp, Homo sapiens
ttcctattttcttttcccagaaagttgattttattactccttcaggttctagttcaaacatcctctgcttaaatttttcttatccaaccaaaataaattaatacttcccttttcagtgctccatcaatactttcttcattccattctattaaacaaatttattgaacacttacattgtggtattgttgcaatggtccccccaaaagttcactctagtaaaggatacagacaagtacacaaataatgcaagaaaagaaattaacagatatgaagagaaccgatttcagtttaggatggttattaagaatatataagatatgatatctgactaaatacttaaaaccaaacagaaattatcctaagaagtggaaggggttcataagcatattaaatcactaatgtaagaaattggtatactgtattttggtcagtgtcttcactgctagtctgagatactttcaacaaaaaccatatgttattcatcytcattagtagtatcaagtactcacttaataattgtttactgatttgaaggagtagctctccttcctaacaaaccatttttttcaggtataagcacattatagaaattaattgctctaaaaataatgagc

SEQ ID NO: 354137 - DNA, 478 bp, Homo sapiens
tgggaacctgtataaattcacaggccacrtgcccatgaagttggccttacttataatcaagctttagtgttgcaaagtattagaggcatccttgatcttagaacagaagacaatgatttaattccgttggttttaagaccaaaatggccttccttaataggaattcccccaagatcttttgctgtgaacttgtatttaacttcagactatagagaaggaataaaaactgattgtgctcaccttgtctgaatttgaaaatctgtaatacttaggtggctaagcaaagacataatcacctaacttgaaacatttaggataactctgcaacaagtaatatatttattttaaataaaaataaaaggatcattttccatgcttaatagactttaggtataaatttttatatatttatagttttgaagaattctttattaaactttccctatgtttctgtaattattatggttggaatttatta

SEQ ID NO: 354138 - DNA, 539 bp, Homo sapiens
aatcccaataagaataccacaaggcatgtcacaattaaactcacaaagatcaatgactaagagagggtctagaaagaagtgagaaaaaagaagcaaataacatttaagagagatctaatataactggcagcatatttctcagcagaaacctttcagggcaggagggaatgtgacaatatattcagaatgtggaaggaaactacctgccaaccaagaatactataggcagaaaaggtgtattttaaaaatgaaggagagaaggacttctgcagacaaacaaaagctgagggaattaatggccaccagaccaattctgcaaaaaatgctraagagagctcttcaaacttaaagaaaagaatacttacattgattgttaggctaatactgtaattttgttgtataaaccacatttatctttgtataaagaatgaacgacaaaactataaaaaactacaataatttgttaagagatagacaatatgaaaaatataagctgtgacatcaaaattcaaaatatggaaggatagtgagttaaaatg

SEQ ID NO: 354139 - DNA, 548 bp, Homo sapiens
tttggtaaacacattaataataattctttcatataagaataatcaatgtatggtaaaagttgccttttccagcttccaaagcctgtcctcatttgttggctcatggtcccttccttcacatctctccacttgcttccatcatcacatctcctactactgtagtcaaatttcctccgcttccctttcataagaatacttgttattacactgagyataccaggatagtccagaatagtctctctgaaaatccttagtttaagcatatgtaactccttcttatcatttaaggtaagtatgtatcacaggttctggggaggatgtagacatctttcggggtgcattactcaccctaacacagagtatcaatacataaataaatgactggaaaactagtacaatttagcaacaattttctctaggtagaaaaattagtaatttttatttttatttttatttatctcttttctagaatgaacatgcagtatttccactattgggccaaaaaaaatgtaaaccaatgttcagagagtttctttgttttaatcctt

SEQ ID NO: 354140 - DNA, 505 bp, Homo sapiens
tgcatatgctgtatcaatggcactgctcatgtaaatttcaacttatttgggaagaagaattcttagatataaattttgaattgtttctgaaattttatatgtgaattttytgagaaacaaactgcagcttaataatttgcttttccactgagttaatgattcagttaatattgcgtttcagttttaatttagcatcatctataccatttaaggagatcttggttgtaatctcccatataacaactaggttattttatacaagttaattaagcttaatgagacccaatggtacaacagggataaaaccgcctatgtcataggactgctctgtgaattaaatgtaattgtgtgagtatgtatttgccttagagaagactgtctgataaaataaaggcattcgataaagttatttcactgccttattcactgtagttatttctgaatgaattctgaaggatttcaaaagtcagattcccatatgtatgtttatttatattcatatgtt

SEQ ID NO: 354141 - DNA, 564 bp, Homo sapiens
atataactggtttaatatctattttctctagtagtgtataagcttcaatagaggaaaaamcattttgttcactttgttatccatggagtctaacaaagtagctagtcaataagtaaatgtagaatgaataaacacaagtcggtaaacgcaagtaaatgacagtctctccaagctctaacagtcgaatcctccagaaagtaatttaatgagaaaaaatatgtcacccttgggaatactgaaattattaatataaaattgttttgtacataaatatttaataaatactagtttttccttgtttgctcaactgtactatccatgctgaaaattattaagaatttctactgaatctggaacatttagaacaatttcaaaagtaaaatctgttgcacaagttttgtaggttcagcatttgctagatatcatatcatagaaaaaacacagttataatccaaactctgaaaactactaattgtatgacctaagatatacatttaaattcattcagtcttacaaataaattttttaaatacataagaatggatgattatcaccaatgccata

SEQ ID NO: 354142 - DNA, 564 bp, Homo sapiens
atataactggtttaatatctattttctctagtagtgtataagcttcaatagaggaaaaaccattttgttcactttgttatccatggagtctaacaaagtagctagtcaataagtaaatgtagaatgaataaacacaagtcrgtaaacgcaagtaaatgacagtctctccaagctctaacagtcgaatcctccagaaagtaatttaatgagaaaaaatatgtcacccttgggaatactgaaattattaatataaaattgttttgtacataaatatttaataaatactagtttttccttgtttgctcaactgtactatccatgctgaaaattattaagaatttctactgaatctggaacatttagaacaatttcaaaagtaaaatctgttgcacaagttttgtaggttcagcatttgctagatatcatatcatagaaaaaacacagttataatccaaactctgaaaactactaattgtatgacctaagatatacatttaaattcattcagtcttacaaataaattttttaaatacataagaatggatgattatcaccaatgccata

SEQ ID NO: 354143 - DNA, 645 bp, Homo sapiens
taactgggtaccattatcagctcttgtttttatgaaggtttggccagtttccaaaatggacacaactgttaaaatacagaagttggaatttgaacctggagggtctgacatcagcaccgtagctgtgagccattgtacaatagtgccttcatcatgagagtgaaatccttgggtattgccgtcagatctgyactctccttagtcttcggaggttggtgcacagttggcccaatcaaccaactctcatggaagtctgtgtcccaaggtcagggagcaagtaagaggttcagagaagagatgagataaattctactttgacagtttcaaggctcccatcctttgctgcttttagaaagcaacaaaggactggagaactatgggccaatatatgtgactatcgtaggctctggggtgtgtgtgtgtgtgtgtgtgtgcgcgtgtgcccccctgcatgcactggggaaagatgtttcaggaaggcagagtcactgtcagggtgacttataaatgggactggattctcctgatgcccacattacatcaggatatggtgctattcaaaaagcatgggttcaaggtttccctaagattcaatatccccctggtaactccctaatttggttaccacacatcaaattctacact

SEQ ID NO: 354144 - DNA, 526 bp, Homo sapiens
atctaagctgcagcacccacagctctygggtctagcccctaccactctagccacttgcttgcatacactgagtgtctaattagagggactggtgtctacctcttgaaggtgacttgtgcctcaggtagccctggtacttgtttgtcgtctgtttagccaaaaaaacactctgtctttttttttttgagatggagttttgctctcgtcgcccaggctagagtgcagtggcaggatctcagatcactgcaacctccgcctcccaggttcaaacgattctcctgcctcagcctcccgagcagctgggattacaggtgcccgccaccacgcctggctaattttttgtatttttagtagaggtggggtttcaccatgttgggcaggctggtctcgagctcctgatctcgggatctgcctgcctcggcctcccaaagtgctgggattataggcatgagccactgcacccggctgaaaacactctgtcttatattttcctccagcaacaatcctttcagataaaacttttgtg

SEQ ID NO: 354145 - DNA, 526 bp, Homo sapiens
atctaagctgcagcacccacagctcttgggtctagcccctaccactctagccacttgcttgcatacactgagtgtctaattagagggactggtgtctacctcttgaaggtgacttgtgcctcaggtagccctggtacttgtttgtcgtctgtttagccaaaaaracactctgtctttttttttttgagatggagttttgctctcgtcgcccaggctagagtgcagtggcaggatctcagatcactgcaacctccgcctcccaggttcaaacgattctcctgcctcagcctcccgagcagctgggattacaggtgcccgccaccacgcctggctaattttttgtatttttagtagaggtggggtttcaccatgttgggcaggctggtctcgagctcctgatctcgggatctgcctgcctcggcctcccaaagtgctgggattataggcatgagccactgcacccggctgaaaacactctgtcttatattttcctccagcaacaatcctttcagataaaacttttgtg

SEQ ID NO: 354146 - DNA, 526 bp, Homo sapiens
atctaagctgcagcacccacagctcttgggtctagcccctaccactctagccacttgcttgcatacactgagtgtctaattagagggactggtgtctacctcttgaaggtgacttgtgcctcaggtagccctggtacttgtttgtcgtctgtttagccaaaaaaacactctgtcttkttttttttgagatggagttttgctctcgtcgcccaggctagagtgcagtggcaggatctcagatcactgcaacctccgcctcccaggttcaaacgattctcctgcctcagcctcccgagcagctgggattacaggtgcccgccaccacgcctggctaattttttgtatttttagtagaggtggggtttcaccatgttgggcaggctggtctcgagctcctgatctcgggatctgcctgcctcggcctcccaaagtgctgggattataggcatgagccactgcacccggctgaaaacactctgtcttatattttcctccagcaacaatcctttcagataaaacttttgtg

SEQ ID NO: 354147 - DNA, 608 bp, Homo sapiens
tcactgcaaccttgaactcctgggctccagccatccttttgccttagcctcccaagtagctaggactaaaggcacgcaccaccatgtgcagctaatttatttttaaaattctttgaagagatgaggtcttgctatgtttccagggctggtctcaaacttctgggttcaatcaatcctcctatcttgacctcccaaagtgctgggattacaggtgtgagccactgcacccaggcaattattatttttttagagatggggtcttgctctgtctatcaggctggagtgcagcggtgtgaacatagctcactgcagccttgaactattgagctcacacaatcctcctgcttcagcctcccaaataggactacaggagtgtgccaccatgcccggttatttatttatttatttatttatttatttatttatttatttattttgcagagatgggggtttcactatgctgcccaggctggtcttgaactcctggcctcaagtgataaattacaggcatgagccaccatacttggccagaatctcactttttaagacatttgttctccatcaaattgtattcacttctatgcmtatattgacctacacaattggtt

SEQ ID NO: 354148 - DNA, 553 bp, Homo sapiens
gaagcaaatataaagtttcattttttaaaattagcaatatgtaaagtaatcatgaaattaatggcaacgttccaactcccaggtttcctgcctgatgctctcatccagtgatgtgctgataaactggctctctgacaaaaaaacaaaagccttgatttgtagcatttgccaatttctgtggtgtaaatatacccatcatggctgattccaagctattaaaggtttaataactggtttatataattcctgaatatttaataattggttctcatgaatggggatgagcaattcytactgtcccccacccctccctagataatttatatgcttttcattcatcatgtatggatttctatgaaattcagtctttatgtcaaaatccatcagtttttctacactgcagaatcttgatttgctcacgtatgaatataggtagagataaaaaccaagaatacaaattagcctaatttgctcagataaaaacatatgaagccacaaacacttttttaaattaaattcagccaggcaactgggtcaaatgatggacctatac

SEQ ID NO: 354149 - DNA, 367 bp, Homo sapiens
aggttctaaattataaataaaatagggatgaatcaacaggaaactttaaaaattgacttcaggaaactttcagacataaaatatgaatatkgaagaaaaaacatgaggctcagatataaaatatagactcagaataaaaaggttgaatgagaaattgtcaatttagaaatctctagtatatcactgacttttcatagggcttgggtaattagcaaaatagaaatcaagacaaatttgtggtccttcagataaaaacaagaccaaaatatcctctgttctctatgaatcaggaacctatagatagggaagtctatggatattgcaggcagaaaatccactggaagaaccactgtcccaaagcagctaa

SEQ ID NO: 354150 - DNA, 574 bp, Homo sapiens
ggatattgcaggcagaaaatccactggaagaaccactgtcccaaagcagctaagaatacctataatacgtatgatttacaaaaaaaaaaatgaagaatctttgcacaaactctccaaggatatgggcagaaaaattagagacaagctaataggagggcagatcaatccttccaaattatcataaatctttcttttttattaaaaagaaaatccatgataagtattaaatcaacaacatcaaagactcagtgccttttgtagcccattgcttgatccagtaaccaaggcttatcttccttgcctcagagcagttacagcctcatctaattacttgaagtatctacagaccatgctctaggatcacctttaaatttgatggtaccayatacagtacaatcactattgctaactgaaaacacccaacatttttctgttagtcttaactaacgaaatatggtattttctttttgtattaaccacccatcagtgtgacactttcaatgcagcaactctatacccttacccattgaaggagaatttcataattgtgtttctccagttcaagaaggggcca

SEQ ID NO: 354151 - DNA, 553 bp, Homo sapiens
tatgtatatactacccccttagtgaacatttatcgtacacatgctttatgaacagcatggtaggtgcrctagacttcaaaaagtaaatgacaaagttcttgctcataagtcatttataatttaattaatgagaggggataggcacattaaaatgtaagacaataaaatacagcttaataagtggctcagattaagatagcaaagagaagccctaaaagatggtagttaagtgcaagggctctgagctgtggcctaggttgaggtcagctctacaatttaaagatatatgtgaccaagagtaagtttctcaactactctcagcctcagtacttctcattggatagaaaaattaaagacgagaataaagaaggagcggtaacattagtttttttatagaactgtaatgatcagtaattcgaataatgtaagaaaaatgcttagcacagtgcatggcacaaaataagcatgcaataaattgctgttattgctcttctggacatttcaggtacctaaatgtagaaattgggagaatcctagtctacaccactgacct

SEQ ID NO: 354152 - DNA, 574 bp, Homo sapiens
atactgataaggcaaagtcaatctggtttaaataggcttgtataagtawggcttacactgtgaattacaataaattagattaagtcagtattttaaaggcttatacaatgtgtgtattcaaaatatcatattgtacattatatatatacagatatatgtacacacatatatatatataatttacacacacacacacacacatatatatatatatatattttttttttttttttttttgagacgggagtctcgccctgtcacccaggttggagtgcagtggcgcaatctcggctcactgcaagtgctctgcctcctgggttcacgccattctcctgcctcagcctcccgagtagctgggactacaggcgcctgccaccacgcccggctaattttttgtatttttagtagagacggggtttcaccgtgttagccaggatggtctcgatctcctgacctcgtgatccgcccgcctcggcctcccaaagtgctgggattacaggcgtgagccaccgtgcctggccaatatatataatttttatttgtcaactgaaagaaaagttaatttttaaaagtt

SEQ ID NO: 354153 - DNA, 596 bp, Homo sapiens
ggtcaaatataaataatgagtaatactgataaggcaaagtcaatctggtttaaataggcttgtataagtaaggcttacactgtgaattacaataaattagattaagtcagtattttaaaggcttatacaatgtgtgtattcaaaatatcatattgtacattatatatatacagatatatgtacacacatatatatatataatttacacacacacacacacacatatatatatatatatattttttttttttttttttttgagacgggagtctcgccctgtcacccaggttggagtgcagtggcgcaatctcggctcactgcaagtgctctgcctcctgggttcacgccattctcctgcctcagcctcccgagtagctgggactacaggcgcctgccaccaygcccggctaattttttgtatttttagtagagacggggtttcaccgtgttagccaggatggtctcgatctcctgacctcgtgatccgcccgcctcggcctcccaaagtgctgggattacaggcgtgagccaccgtgcctggccaatatatataatttttatttgtcaactgaaagaaaagttaatttttaaaagtt

SEQ ID NO: 354154 - DNA, 555 bp, Homo sapiens
atgcaagtggagtttgagaagccaaaggaagacagaataggaaaaattatcaattgtttaaaggctgaagatcaagttggataaggcatggaaaatatcccatagatttagtaagtcagtaattggtgaccttggttgatagtagttacccccattttgatatctgttacagagaataagttattagtttttggaagatctcattagataattgtccaatctaaaaccttacartaacgaatgcagaggaatttgggagaggactacttggactgataaaaaatctacataaactaatttaaagaaaaatgtatttaattatatcctatcttgttctaaaaggcattttagaccgttatcaagagctttggttcttctgtgaatttgttctattatctggctcaataacctattcaatcttatttcttcttcatctccaatacttaatttccactctagggaagaaggtgtacactctgtttaatacatatattatacttattcctcatagtccagaatgtccattcttccttttctggtccagatccacacatc

SEQ ID NO: 354155 - DNA, 523 bp, Homo sapiens
aaaaagattcataatggtacccatatcagaaagcctttgtgaagacttaacaaagtaatttccattaaataaagattgaagaatctgacaaatagtacatgcttaatgaatggtgactgttattaatactattatctattcatgtctgattacagtcctacctaccacctaatttcagtctcagtacaaaggccctttttgagaatagcaaatacatattttatttgatgacgctccttgcctatgatttaattatgatctgagcacacaaatgtgaatcacagacccaagctagacataatattttggayagagaaacagctttggggcagaaaactagatcataactttctatagactgaaataattgtttgcaacaaactacacatatgcaaaaggtactggagaatgcacatagaaatggaatttctgggttgtaagtttttcaaatattcaactttaaaacatggagcaaaattgtctttttctaagtggctatataaatgtttcacttccgccagca

SEQ ID NO: 354156 - DNA, 614 bp, Homo sapiens
tctgacatcttaaaatatctagcagaggcaaatataaaacttacctaatcagtaaacctagacaaaaatgtatgcagacaattctgaagacatttctattttattttaccaataattttaaatccagcttgtttattaaagattactaaatttacayaaacttaaaaagtacttgactttaccttaatgtgtgagtactcatttacttataagccaagttggtagcatgtcagacataacatataacacatgtacatacatataaacataaacatgtatgctctctcacacacacacacgcacacacacacacacccagtaccttttacttcagaactctagccatgagatagtattataaactcatgagactataaaggataactggatccatatcatttttgacaaaattgggaccccttcatatggctaaactttatttgcctaataggtaatccagtgaaggctgtggacaaaaatttggggtaaagtagttttcatagcagtttgattttttaaaaaacttcttttaccctcttttttttcttcagtttcaaatgagtttctaacatttacattttagttagaattgtctgacctgtgtaagaaaaaca

SEQ ID NO: 354157 - DNA, 614 bp, Homo sapiens
tctgacatcttaaaatatctagcagaggcaaatataaaacttacctaatcagtaaacctagacaaaaatgtatgcagacaattctgaagacatttctattttattttaccaataattttaaatccagcttgtttattaaagattactaaatttacacaaacttaaaaagtacttgactttaccttaatgtgtgagtactcatttacttataagccaagttggtagcatgtcagacataacatataacacatgtacatacatataaacataaacatgtatgctctctcacacacacacacgcacacacacacacacccagtaccttttacttcagaactctagccatgagatagtattataaactcatgagactataaaggataactggatccatatcatttttgacaaaattgggaccccttcatatggctaaactttatttgcctaataggtaatccagtgaaggctgtggacaaaaatttggggtaaagtagttttcatagcagtttgattttttwaaaaacttcttttaccctcttttttttcttcagtttcaaatgagtttctaacatttacattttagttagaattgtctgacctgtgtaagaaaaaca

SEQ ID NO: 354158 - DNA, 549 bp, Homo sapiens
ctgatggttttattcattcctagagactcagggattaataataggatagcaccacctatccttgcaatcaaaacatcctgatttcacttcttcctgaaggttattatagtaactgtgctaaacatgtctttgacagttgagccacctgacctctaccaggatataaaatcatggatcccagtttcaatgtgggctcccaatcatcatctctaatccactgagggcagccacagaagaatctttcgaggatatctgttctccctcattcaatgccttgaaaagagtaaattgtatgggccctcctgggcatggtwtgaatagagtttgactaagcagaatgactataacagagcaaatccaacatcccatctccctaaaccttgagattctttcttctacagtatgccagggaaattctggcatctcagcacatagattgtaagctattattgagaacaagcttctagtaacccacttagaaggacttccagatgctcaagtcaacagagcaaatctgaatcccaggtaagtatttagcaagatcctaca

SEQ ID NO: 354159 - DNA, 622 bp, Homo sapiens
caatagaatacacatttttctcttgtgtacctggaacattctccagatagactataagggagtccacatattaagtctcaatacattttaaaaagataggtataatactaaatattttcttcaaccacaatgagatgaagttggaaatcagtaacagaatgaaaactggaaaattcacaaatttgtggcaattaaacaacacactcttaaacaacaaatgatcaaagaaaaaatcacaagagaaatcataatattaattgctaatcaaaactacaatgagatatcacatcacatccattagaatgacaactattttttaaaaaacagaacataacaagtgwtggcgaagatatgaaaaaatttaaacctgtgtgcactgttgatgagaacataaaatggtacaacctctgtggaaaacagtatagcagttccttaaaacattaaaaatagaattaccataagatccagcaattccacttctgggtatatacccaaaagaattgaaagcagggtctcaaagggatacttgtacaccatgttcatagaagcatcattcacaatagctaaaatgtgaaagcaacccagtgtctgtcaacagatgaatggataaaaaaatgtggtg

SEQ ID NO: 354160 - DNA, 538 bp, Homo sapiens
attcagatatttgtttctgtccagtgttagtttctgaagcttattaatatgagtgtctccaatattgtttacttgatgaataataagagggtctgcatattcaggtttttgtcttgttttaaaggtatttgctttctaactgggaatgtcttaagctgttttcaagtttcgtgtttaaaagtactgtatcctaaaagctgttgttctattatctactattttgaattataattacatagtttcaggcttggttttttgagccacttctacatttgtgtgcttctttgaaatgagagctttttattttcaattttcatacataaatttttggctttctagcttttgattactgtgctagtgctaggtaattccaagagaagaaagagctactaattttttaatttttaaaggaatccacttttacatatttgggagtagcattaagttctrtttttgaaattgtgtttgcttcaagaaggatttttggcagtttctaaaatgaagtgagaacaacaaaataaactacttaactagaaac

SEQ ID NO: 354161 - DNA, 600 bp, Homo sapiens
tgtgtcttctctgttcttcctgattagcagagctagaggtttattaattttattaatcttgttcattttgggtttcttagattttctgttttctatcttattggtttcttccttactcttattttctttttcttacttactctaggctgaattttctcttcttttctaatttcttaaggttgcagttgaagtcattgattttaagatctttcttcttttctaataaagatgtttagtgctagaaattttctttctgctatggcttcagtgttatcccacaacttttatgtatgttttttcacttttattcagcttaaaatagtttctaattttcttttagatttttttttaaatctacaggttatctagaagcatgctacttagtttctaaatatttgcaaattttatckttttttctattattgatttctgatttaattccattgtggttcagaaaacatactttctgtgatttaaatccttttaaatgtattgagacttgtttttaataaacttgtagatgctttattatatgattgagaggaatgttaacttgatgttttaaatatttattggggaagctttttaattgtgttgtta

SEQ ID NO: 354162 - DNA, 535 bp, Homo sapiens
cttatgtcaacagccaagggcttccattcttggggcaatttcacacrtttagctattgaatcagcaggtgccctgacataggttctgtctccacggccttctctgctccttctggccacactggctacacagctacttagcttttcttgcattaactcttttaaacaaacaaacaaaaagctttcttttaattgccagtattaaattagatatatacaagctatagcccagtcatgtcttcttctcagtttcttttcatggtaagaaaccccacctctttgctgctgtcactcttactatccagtagggctcaaggtgctgtaggtcctttctaccccacagaaatccaagttctggccaactctgagcatttctagattcaaaatccagtgggttggtggcctcagcctgcacttatggctagaagcttctattttgacctttgtctacatagatgtttgtttttgagcatggctatctttggagtatgtgcatgtgtgtgtgcgcatgcatgtgcgctgtatttggagcaatt

SEQ ID NO: 354163 - DNA, 437 bp, Homo sapiens
gaagtggacaaacaggcagtaagtttcccccaacagttttaacagctttattaaagcataattgatgggcaataaggtacacataaagtgtttaatttgttaagttttgacctatgtgtacatccaagaaaccgtcaccacaatcaaatgaacataatcatcctccaacatttttaattgagcagaaaacagttagggccagatacttgctaaatgaggctrccccagccatcacccacacccactcccaggcaccagcagaccacccagagacaggaattggaatcattgggagtacagtgttcctgctgaggaggtttgccctcccctctttcttatggtgttcaagaaactgggactccaaaaaatagagactaaaggtgacttttaggcaagaggagcccagcagccaccagctgactgggtaggtaccaggc

SEQ ID NO: 354164 - DNA, 496 bp, Homo sapiens
aattgagcagaaaacagttagggccagatacttgctaaatgaggctgccccagccatcacccacacccactcccaggcaccagcagaccacccagrgacaggaattggaatcattgggagtacagtgttcctgctgaggaggtttgccctcccctctttcttatggtgttcaagaaactgggactccaaaaaatagagactaaaggtgacttttaggcaagaggagcccagcagccaccagctgactgggtaggtaccaggcttcagtctctgcaggcccactttgaagatggctacctggctgaagatttctgagggtgggaatttgccagggcagctcacaccagcagcaagaagggatcatggtgtagctgttcttgagtaaaagatggcactccaccctccagtcccctgtggcccttgcagggtatggaggagaaaccagtagctttcctggctcacatgagggagctgaggagtaaagagggaggcagaa

SEQ ID NO: 354165 - DNA, 580 bp, Homo sapiens
cagccattaattcagattcatctgtttcaacgtattcccatccacccacagactactgggggccacccagaggcctgagtttccaccagtttctcacatgagagaaagctgaaggaaaaggtatgaaggcggatttcactgttgacaggttgtctttcaagtgtgggtcctggcgtttatgaggcaatgatgagacacctagaaagaagcacatctctgagacatgacagttcagtcccaaaggccattaatagagggccagctcatcaacacagctgcagaaacagagcacagccagcctcgcagccccacacrctgaagcccccgctgcagcattccatctactctagcgcccatgcaaattgaaaacctaaaatagttcactccccatagccactggctttgaagaatctcttttgtctccatgaaatagctccaggagacagaacccagaggaaaactttttgaagtgaactttttccttataattttatttaaatttgaatatttttgtagaaataataaagttatccactaattatctgtgtgacacaaaacaatctcattttaattatggcta

SEQ ID NO: 354166 - DNA, 538 bp, Homo sapiens
cagtgaatgcatgccacctaggctacaggcatttaaatgagcggattttcaggaggaattggtaataacagttatgcctcacaattttggtagataactcrataactcctgtaatagaagtgtattttggttgagtgaaatcccttacattgacgggaacaagtggaaatttgttgttttttatcatttggtgataagcaattttctcaaacagctgaaagggacagctatttagaaggctaaaaattcctttagtttaggcatgacacacggtgcctcactgagttttcacccctctgtcacaaactatgcctgttggtacacatgacttttatcagctaatagctgacgaaaccttgaggatcagctagcccagtcatcatagcaggtgctctataaatatttgtagatttggaaggcatgcttctaacttttcatcttttgattcccttcataactatgagctgggataaaaggagtggtttttgtttgtttgttttgttttgctttttaataaaaattttgaagagagagtgaa

SEQ ID NO: 354167 - DNA, 538 bp, Homo sapiens
cagtgaatgcatgccacctaggctacaggcatttaaatgagcggattttcaggaggaattggtaataacagttatgcctcacaattttggtagataactcgataactcctgtawtagaagtgtattttggttgagtgaaatcccttacattgacgggaacaagtggaaatttgttgttttttatcatttggtgataagcaattttctcaaacagctgaaagggacagctatttagaaggctaaaaattcctttagtttaggcatgacacacggtgcctcactgagttttcacccctctgtcacaaactatgcctgttggtacacatgacttttatcagctaatagctgacgaaaccttgaggatcagctagcccagtcatcatagcaggtgctctataaatatttgtagatttggaaggcatgcttctaacttttcatcttttgattcccttcataactatgagctgggataaaaggagtggtttttgtttgtttgttttgttttgctttttaataaaaattttgaagagagagtgaa

SEQ ID NO: 354168 - DNA, 538 bp, Homo sapiens
tcattgttcctgcaagaaacttccattctagataggtattattttggtatggaacaactgctactgctgtcagtgagtgacaggagctgtgctgctgttgctagtagggggaaagttccttctttcctccttgcaattggcacagtcacaattacctcatgggaggtaagagctgagttttactcttgtaacataatgcacttgttatctttaaggagtcaccgtttttgccycttggtggtttccttatttgtagaaaggatggatgatgcgggaaccctatgcttgtcatcagaggagcacatgatgttggtgtattcatctctcttatagcataaaaatacatgccctggctttgcacaggcctgacattgcttcttgactggtttgccacataccctgactattacctcctacagggaggagacagaagtttcttcagggttatacctgtgcttaatatcacacctggataacaataggtgcttgataattatttgatgaatgaaggcaagatttgagaacatgatgtgataat

SEQ ID NO: 354169 - DNA, 538 bp, Homo sapiens
tcattgttcctgcaagaaacttccattctagataggtattattttggtatggaacaactgctactgctgtcagtgagtgacaggagctgtgctgctgttgctagtagggggaaagttccttctttcctccttgcaattggcacagtcacaattacctcatgggaggtaagagctgagttttactcttgtaacataatgcacttgttatctttaaggagtcaccgtttttgcctcttggtggtttccttatttgtagaaaggatggatgatgcgggaaccctatgcttgtcatcagaggagcacatgatgttggtgtattcatctctcttatagcataaaaatacmtgccctggctttgcacaggcctgacattgcttcttgactggtttgccacataccctgactattacctcctacagggaggagacagaagtttcttcagggttatacctgtgcttaatatcacacctggataacaataggtgcttgataattatttgatgaatgaaggcaagatttgagaacatgatgtgataat

SEQ ID NO: 354170 - DNA, 593 bp, Homo sapiens
cgaaggtgcaggaaacaccaacaaggggagtggagaagtacgaccaggaagggaaggcagcccaaccagaacacgttactgagccagctagcacaaagggtgatagcgttaaagctgcctgggacactctaagggctagtgtagaatgcttccatgttatcccttttgagggacgtaggctgatggatgtgcaaaaccctacctcttctgtcctgatatgggccctggaggccagagaaagctccygggcaaagaagcacatgtgctggcagagggaagttgggccactgacccctgacatagtaagaggggatgtgggtgaggcactgacaaagactgctatagcccaccgttttccctgctaaatgccccacagtaagtttactttattccatcattgacacttcaaggtggcagttagcgacaattaaaaaaaatagacttgccacatgaatagtcataggacaatctacatccctcccctttgccatagcagtccagagactgcaactatgtttatcatctcactcctcttttgtccattctgcattctctatcaccttggctagcttgtctagggtatatgaccagtg

SEQ ID NO: 354171 - DNA, 471 bp, Homo sapiens
aggatcccactccttggaaacataacgtctagtctagcagaatctaaagtggcagcacaaatttctcaaatgggtcatttggaatggtggtgagaggggctgctcttacttcttctccttagtttttagatccaattattttacctttcagctaccaagaaccatagatatattcttagttcaaaataggtaccacattttgaaggatagaacttctaaccttaggtgtcacttctaagctggtgccatagctgtatctgtaagagaccattccaacatactattagacttgctgcttctgagtgattcaatatatggtaggatcctatgatcatggacccattttcacacctcctttgccacaatgtgagtcccttggtttgatgtgatgttaggtagtatcgtatgtcagtaaattagatactgtatacgttsttagatgatggtgttggcaagaaaatgaataccatg

SEQ ID NO: 354172 - DNA, 463 bp, Homo sapiens
atgtttacatgcaacactttacaatttcactttgggaggtacatcatgaggagttaacctaaacgacagctaaaggtaagttgcataaagaagttcctagcagggctgtttatagattctgaaaactggaaacaatccaagtgccaattgataaaattaggggatataaatgtaatggggatctatcagggttgcattaatctgataagcttagggactgtgtccagctgtggaagcctgatatgaagtaaggaaaaaagaaaaagacaaaatccaaaacatgtacrtactggttgcagcctcaaaaaggtcagaaggtaattcagagatattacattctgctcagcttttaatcttccctgattcctttgtgaataaaatttctccccctttcttcccccttttataaagaaagttaaaaaaaatctgactatacaagcattttaattggtatgcaatgtac

SEQ ID NO: 354173 - DNA, 463 bp, Homo sapiens
atgtttacatgcaacactttacaatttcactttgggaggtacatcatgaggagttaacctaaacgacagctaaaggtaagttgcataaagaagttcctagcagggctgtttatagattctgaaaactggaaacaatccaagtgccaattgataaaattaggggatataaatgtaatggggatctatcagggttgcattaatctgataagcttagggactgtgtccagctgtggaagcctgatatgaagtaaggaaaaaagaaaaagacaaaatccaaaacatgtacatactggytgcagcctcaaaaaggtcagaaggtaattcagagatattacattctgctcagcttttaatcttccctgattcctttgtgaataaaatttctccccctttcttcccccttttataaagaaagttaaaaaaaatctgactatacaagcattttaattggtatgcaatgtac

SEQ ID NO: 354174 - DNA, 558 bp, Homo sapiens
aatatttcaacattgatttagaggcaagaaggaaagggcaatgagttacctgggtccaggaagatatcccaagaaatacrgagttgctgggaagtttggtttaagaggcagaggtcaagtattaattgtatcatcatgtagcccccagcagaaaagaatagcttagagcataagctctggagtctgagtctcagggagtctgagaattctgagttcaaatcctagcctctccactcttaaggctgtgtgtgatccacggtgtaatcctgggaaaactactcagtctctaaaactcattcctcttctgggaaatggtgataaaaatacatactgctcaggggtaatccaagaattaagtgagaaaataaatctgtgaagcttagcaaaacccttggtacctggtaactctatttgttcttttggttgcaaataacagtaaattgctcatgtgggttaagcattaaaaatggaaatgtaaaattaggctacacagctcataaagcccaagaggaggattatcatcaggcctcaggaagagactagagccactgtgttagt

SEQ ID NO: 354175 - DNA, 558 bp, Homo sapiens
aatatttcaacattgatttagaggcaagaaggaaagggcaatgagttacctgggtccaggaagatatcccaagaaatacagagttgctgggaagtttggtttaagaggcagaggtcaagtattaattgtatcatcatgtagcccccagcagaaaagaatagcttagagcataagctctggagtctgagtctcagggagtctgagaattctgagttcaaatcctagcctctccactcttaaggctgtgtgtgatccacggtgtaatcctgggaaaactactcagtctctaaaactcattcctcttctgggaaatggtgataaaaatacatactkctcaggggtaatccaagaattaagtgagaaaataaatctgtgaagcttagcaaaacccttggtacctggtaactctatttgttcttttggttgcaaataacagtaaattgctcatgtgggttaagcattaaaaatggaaatgtaaaattaggctacacagctcataaagcccaagaggaggattatcatcaggcctcaggaagagactagagccactgtgttagt

SEQ ID NO: 354176 - DNA, 611 bp, Homo sapiens
aaaacttcagccaaataaatttaaatttaattgagcaatgaacaacttgtgaattaggcagkccccagaatcacagcagattcacagagactccagcacagccatgtgatggaagaagatttatagacaaaaaaaaaaaaggggggggggggaaatgacatacagaaatgggaagtgaggtacagaatggctggattggttacagcttggcgtttgccttatttgaacacagtttgaacactcagcagtatatgaatggccactggcattgcccaagactcagctattgttacaggctcatactcctaaattaggttttcaatcttgtctatctattaagctaggttgcagtttgtccacaagaactcaaatatagaagtacggagtccttctcaggctatatttagttcactttaaataaactgctcactttaactcttgagggtggagccctcaagatggactgttggtgcccttgtaagaagagaccaaacagtttgcatttgtctgcttgctctcttgctctctctcccttactctgtctttcgctctctcccatgtgaggacacggtgagaaagcagctgtctacgagccagagagtcctcaccat

SEQ ID NO: 354177 - DNA, 611 bp, Homo sapiens
aaaacttcagccaaataaatttaaatttaattgagcaatgaacaacttgtgaattaggcagtccccagaatcacagcagattcacagagactccagcacagccatgtgatggaagaagatttatagacaaaaaaaaaaaaggggggggggggaaatgacatacagaaatgggaagtgaggtacagaatggctggattggttacagctyggcgtttgccttatttgaacacagtttgaacactcagcagtatatgaatggccactggcattgcccaagactcagctattgttacaggctcatactcctaaattaggttttcaatcttgtctatctattaagctaggttgcagtttgtccacaagaactcaaatatagaagtacggagtccttctcaggctatatttagttcactttaaataaactgctcactttaactcttgagggtggagccctcaagatggactgttggtgcccttgtaagaagagaccaaacagtttgcatttgtctgcttgctctcttgctctctctcccttactctgtctttcgctctctcccatgtgaggacacggtgagaaagcagctgtctacgagccagagagtcctcaccat

SEQ ID NO: 354178 - DNA, 556 bp, Homo sapiens
aatagtacagcttttctcaaggaaattatatgattgagattaaaattcactcaagtatacatggtcataacaaagcaaagatgatagttttcatgatgaaaacatcaattaggaaatattaagtttccatgggaaattatattagctgacttcctgtactgtatttctgtcatatagagcagaggtccccaacccctgggtcacagacaacctgttagggaccaggctgcacagcaggaggagcgktgggcgagccagtaaagcttcatctgtaatttacagcccctccccattaccgtctgagctccatctcctgtcagatcagtggtggcatcagattctcataggagtgcaaaccctactgtgaactgcacatgtgagatctagattacacgctccttatgagaatctaatacctgatcatctgccactgtctcccaccacccctagataggactgtctagttgcaggaaaacaaactcagggctcccactgattctatattatgatgagttgtataattatttcattatatattataatgtaataataatac

SEQ ID NO: 354179 - DNA, 521 bp, Homo sapiens
gcattccacatgctccaaagggcctatattagagccttaaactctcttccaattcttagccagcaatgtcgattaratgggtaacttgaagacagccaaaaccacacaatttccatcaaaaggcaattcactgctttcataacagtggggatggctaccggtagttaaaaaggcagaagtggctcatccatctctgggaataatttatatgacttggatgacatttaatttaacacaggtcacccaaaaggatggtgatttaatgccccagctttttttttttttcagtgctgcgttgctgtcattaggtgagtttcacctcatacttctttgtttttatttgaagagaaatctgtttgaaagacataattgtaaactatcacttttccagctgtaggcagggaataaaacccccaaggtgaaacatctgaccttgaaactcagagtgaataagcctctgtgctcctagcaaggggaatgaaggtagatttgtgaattaaaacaacaaagtagactccagc

SEQ ID NO: 354180 - DNA, 521 bp, Homo sapiens
gcattccacatgctccaaagggcctatattagagccttaaactctcttccaattcttagccagcaatgtcgattagatgggtaacttgaagacagccaaaaccacacartttccatcaaaaggcaattcactgctttcataacagtggggatggctaccggtagttaaaaaggcagaagtggctcatccatctctgggaataatttatatgacttggatgacatttaatttaacacaggtcacccaaaaggatggtgatttaatgccccagctttttttttttttcagtgctgcgttgctgtcattaggtgagtttcacctcatacttctttgtttttatttgaagagaaatctgtttgaaagacataattgtaaactatcacttttccagctgtaggcagggaataaaacccccaaggtgaaacatctgaccttgaaactcagagtgaataagcctctgtgctcctagcaaggggaatgaaggtagatttgtgaattaaaacaacaaagtagactccagc

SEQ ID NO: 354181 - DNA, 587 bp, Homo sapiens
gtatccaggttctctcattgggacttactaggtggttaatgtgacctgtggagagtgaggaaaagcaaggtggtccaacagcccacccgggagccacatggggcaaggggagctcccaccaccagccaaaggaggcagtgagtgattgtgctaccccgcctaggaaagcatgctttttccaccaatctgtgcaacccgtagatcaggagatctccctcatgagcccaygccaccagggtcttgggtcctgagcacagagctgtgcagattctctgtgccacgcagctggagacagcctaagactactgagttcccagggggaggggcggctgccatcaccgcagctccgccattgacagagttggggaggctgggcagtatggaccagggaggtattccccacagcacagcacaaccgctgtggcagattgtggccagactgcctctttaggctggaccctaacctatccctcctcactggcagggcctccctgtgggaatttcagcaactccagccagaggtttagggacagaactctgatctccctgagactgagcccctgcggggaggggtggcggcggcctcc

SEQ ID NO: 354182 - DNA, 579 bp, Homo sapiens
gatgggaggagatcacctaagggacagtgtagatagagaagttcaaggattgagctctaggagatttgaacattttgagattagggtgaggagaatgattcagcaaaggggactcagaagacatggccaggtctttaggaagaaaatcatgacagtgggatttccttgaatcctagtgaaaaaagtgcgtgaagggcttttgagaggttgagtaagatgaggaccaagaatgggccatttggtttggcatcatggaagtcattagagacttgaccagggagattttgcrgagtgtttttgatggagcggttttggtggaggattggggataaaaccataactcccaaagatgaatgggcggtaagaaattggaggtatcaatattacagagttataatagttagcacaatttggtgccaatgaaaggataaacaaatagactaattaggacagaatgaaaagcccagaatcaggcccatgcatgtacggacacttgatttctcaaaaaagtgttgccaagatcagtggaaacggatggccttttcagggaatagtgctgggatagttaaatatcggtgt

SEQ ID NO: 354183 - DNA, 536 bp, Homo sapiens
tgcaggtacttccaaaaacagtctcctatagagacctactgctccagtagtttcttatcaagggcccatttgtacaggggaataattttctagttggaaagcaatagacacaacttacttacatttatttttaaagaaaaaaattgtcagckctaacggagctaatgtctcctgctgggatgttaggctactgaattattctcctccaagcgatttgtagacccattaattgagaaattagagaaataagggcacatatgcctatgtaattaaactgcccattttgcctttcttcagtaaagcagtttccaaggatgttaattggccggtgagtttccccgtgcctggtaaatcttgataagttgtacattaaaaaagaactgcttccacctttaaactgtcagggggcttttttttttctttaagcagatttagcactttgaagagttaattacaaatccaagaaatatttctgtaaggtgtgcctcttggcatattggatgctaatggccccttcctgccattaaatgataaaa

SEQ ID NO: 354184 - DNA, 415 bp, Homo sapiens
taagatttatttttgtcattatttactttttaatgatatttatactctggccataaatgagagaagacagatgcatcatttccccaaccttgccagacaaaaaggaatatattcagagtcaaacaaacaatgtagcacatacttacttctctgcttcaaaacagagtgctaaaatcagggttgctgtatatggttgctcaggctgtacactgtacaattctcaggaacatcattcacaccatttgcatgcattgtgcaatctacaacmtgctgagccatatactgagactcctgctgcaatatatgtaggagttgggccagtcagcatatttccaagcagaaaaggcaattctagtagtgtatgcagtaccatggggtttacactagaaaggctataaccagagataagataaat

SEQ ID NO: 354185 - DNA, 557 bp, Homo sapiens
attagcatagatcttcataaattaggagtctgtgttctcattatatattcagcacaattaatgtcaytccatcttctcaagctgtcatttcctgattaagttttcatattcttctttggttttgattccttttccttaaactaagggttttaaaccaccaccattatattccctgagtggagagaaaactctttcacaagtttttaaagaaaggcaattctcaacacaaacctaatcacagggtctttgtaccccatcttgtttcagtccagatgactaaagcttcagagaccataatttcatgtcacagctcctcccaagacagagcaggccccaggaacatggaactggaactcacttccaaatcttcaccacaaaggtgaagaacaaagccacctttcttccccaggaaattacctttctttccattaaatttctttcaagaaaattaaggctcctccccctgctcctgtcttctcagggtagtcactcttggtaaatgctaggtaagtttctgttcctacctttactgtaacaatgaaagagattaatttatg

SEQ ID NO: 354186 - DNA, 557 bp, Homo sapiens
attagcatagatcttcataaattaggagtctgtgttctcattatatattcagcacaattaatgtcattccatcttctcaagctgtcatttcctgattaagttttcatattcttctttggttttgattccttttccttaaactaagggttttaaaccaccaccattatattccctgagtggagagaaaactctttcacaagtttttaaagaaaggcaattctcaacacaaacctaatcacagggtctttgtaccccatcttgtttcagtccagatgactaaagcttcagagaccataatttcatgtyacagctcctcccaagacagagcaggccccaggaacatggaactggaactcacttccaaatcttcaccacaaaggtgaagaacaaagccacctttcttccccaggaaattacctttctttccattaaatttctttcaagaaaattaaggctcctccccctgctcctgtcttctcagggtagtcactcttggtaaatgctaggtaagtttctgttcctacctttactgtaacaatgaaagagattaatttatg

SEQ ID NO: 354187 - DNA, 549 bp, Homo sapiens
gttgaactaccattcggcccagcaatccaattattggatatacactctcaggaaaatgaatcattctaccaaaaggacacatgaacccgtatgttcactgcaatgctactcacaatagcaaaaacatggaatcaacccaggtgcccatcaacagtggccttggtatttaaaatggaataccatggaatactatgtagccatatataccatggtacatatataccatggaatactatgtagccataaagaagaatgaaatcacattttacgccgcaatatggatgcagctggaggccattttcctaagtaaactaatccacaaacagaaaaccaaataccatgtgttctcacttataagtgagagctaaacattgggtacacatgtacataatgatgggaacaatagacaagggggactactatagaaaggtggggcaaasactgaaagactacctattgggtaccatgctcactatgttgattatgggctcaatcgtaccccaaaccttagcatcacgcaatataccttcgtaacaaacctgcacatgt

SEQ ID NO: 354188 - DNA, 549 bp, Homo sapiens
gttgaactaccattcggcccagcaatccaattattggatatacactctcaggaaaatgaatcattctaccaaaaggacacatgaacccgtatgttcactgcaatgctactcacaatagcaaaaacatggaatcaacccaggtgcccatcaacagtggccttggtatttaaaatggaataccatggaatactatgtagccatatataccatggtacatatataccatggaatactatgtagccataaagaagaatgaaatcacattttacgccgcaatatggatgcagctggaggccattttcctaagtaaactaatccacaaacagaaaaccaaataccatgtgttctcacttataagtgagagctaaacattgggtacacatgtacataatgatgggaacaatagacaagggggactactatagaaaggtggggcaaagactgaaagactacctattgggtaccatgctcactatgttgattatgggctcaatcrtaccccaaaccttagcatcacgcaatataccttcgtaacaaacctgcacatgt

SEQ ID NO: 354189 - DNA, 606 bp, Homo sapiens
gcaaatagattctaaacatattccgagcaggcatctcatattccactttatgcaaagcactgagattgaattcacaaaatttttcaagttgcaaggaaccttagagtcatgacctctcattctacagatgattgacagccaggtagagtgactcgttcaaggtcaccagccaatgagtggttagattaggattctttcacctttacacccaattttctggtgttttacaccacattgcctttggatttgatgtagaagaaacactttttcaaagtctggatggataaaaatgtgacattaaaaatattaccttaaactttaagtggaggaactccagaacctaatgtatttgaattctcattaggaagagattttattcaaaaccacccagcaatggtctattactttatgggcattctacatttctctatgttctataaattattcccaaaagttaaaataatcaaaaactaatcaccagaagttcaagctacttattcacataaagttatcaaagtatttaaatttcaaaaatgtaaattagaaagacaatgttctttttatgtrgtttgtaaatatatgatagacatttccatatctgcaaat

SEQ ID NO: 354190 - DNA, 618 bp, Homo sapiens
tattgaggaagaaattatggcaattttctacaatctcttccaaaagacagaagcagagggaatatttcctaactcattctatgaggccaacattaccttaatacgaaaactagatgaagacattattaagaaagaagactacagatcaatatctctcatgaacaaaaatccccaataaaatattaacaaaaagaatgcaacaatgtataaaaagattacacactatgaccaagtgagatttatctaaggtgtgcaaggtagtttcaacattcaaaaattaattagtgtaattccatcacaccaataggctgaagaaaaattacatgatcacacaaatagatgcagaaaaagcatttaataaaatcctacatgcattcatgataaaccattcagaaaactagtaatagaaggaaacttctcaacttgataagaagaaatctccaaaaacctacagctaacatcatagttaatagcaagaaactagaagttttcccactaaaatcatgaaaaaggtaaggctctcctcwcactactccttttcaacatcatactggtagtcctagttaatacaatgagaccagaaaaggaaataaaatgtatacagattgagaaagaaga

SEQ ID NO: 354191 - DNA, 596 bp, Homo sapiens
gatcacacaaatagatgcagaaaaagcatttaataaaatcctacatgcattcatgataaaccattcagaaaactagtaatagaaggaaacttctcaacttgataagaagaaatctccaaaaacctacagctaacatcatagttaatagcaagaaactagaagttttcccactaaaatcatgaaaaaggtaaggctctcctctcactactccttttcaacatcatactggtagtcctagttaatacaatgagaccagaaaaggaaataaaatgtatacagattgagaaagaagaaataaaactatggttgttttcagatgacatgattgtatatgtagaaaatctgaatgaattgacaaaaaaaaaaccgcctagaactaataagaaattayagcaaggttacaggatacaggctaacatacaaatgtcaatcatgtctcagtggtatagtggtgagcagagctgccttccaaatatcaaccattttcctatataacagcaaggaacatgtggaatttgaaattaaaaacacattattactcacattagcaccaccaaaaatgaaatacttagctgtaaatctaacaaaatctgtat

SEQ ID NO: 354192 - DNA, 605 bp, Homo sapiens
aatgtaatatgagctggggtggggtgtgcaattataatagtcaggaatatttagtccaaacatttcactgaggaartgtttgaattaaacccaaatgacgctggacacagtggctcatgcctataatcccagggctttcagaggctgaggcaggaggattgcttaaggccaggagttcaagaccagcccaggcaacataagaagacccccatctctacaaaaaaacaaacaaacaaaaagattagccaggcatggtagagtgtgcctgtagtcctgacaactcaggaggctgaggtgagaggatggcttgagcccaagagtttgaggcactccactgtaatccagcctgggcgacagagggagatcctgtcttaaaacaaaactaagaaaaaatccaacccaaatgacacacaggagccagaggaagagtggggtttgagtatcacaggcaggaagacctgaaagtgctcaagctcagtgtgtgtgtattctagaaaccaaaagaaaatccagttaagaggagctcagtgagcaagaggagagtggtaagacaggaagtcacagaggtgggcaagaccagatcctgtatatctttatagccacaa

SEQ ID NO: 354193 - DNA, 605 bp, Homo sapiens
aatgtaatatgagctggggtggggtgtgcaattataatagtcaggaatatttagtccaaacatttcactgaggaagtgtttgaattaaacccaaatgacgctggacacagtggctcatgcctataatcccagggctttcagaggctgaggcaggaggattgcttaaggccaggagttcaagaccagcccaggcaacataagaagacccccatctctacaaaaaaacaaacaaamaaaaagattagccaggcatggtagagtgtgcctgtagtcctgacaactcaggaggctgaggtgagaggatggcttgagcccaagagtttgaggcactccactgtaatccagcctgggcgacagagggagatcctgtcttaaaacaaaactaagaaaaaatccaacccaaatgacacacaggagccagaggaagagtggggtttgagtatcacaggcaggaagacctgaaagtgctcaagctcagtgtgtgtgtattctagaaaccaaaagaaaatccagttaagaggagctcagtgagcaagaggagagtggtaagacaggaagtcacagaggtgggcaagaccagatcctgtatatctttatagccacaa

SEQ ID NO: 354194 - DNA, 562 bp, Homo sapiens
ctggggtggggtgtgcaattataatagtcaggaatatttagtccaaacatttcactgaggaagtgtttgaattaaacccaaatgacgctggacacagtggctcatgcctataatcccagggctttcagaggctgaggcaggaggattgcttaaggccaggagttcaagaccagcccaggcaacataagaagacccccatctctacaaaaaaacaaacaaacaaaaagattagccaggcatggtagagtgtgcctgtagtcctgacaactcaggaggctgaggtgagrggatggcttgagcccaagagtttgaggcactccactgtaatccagcctgggcgacagagggagatcctgtcttaaaacaaaactaagaaaaaatccaacccaaatgacacacaggagccagaggaagagtggggtttgagtatcacaggcaggaagacctgaaagtgctcaagctcagtgtgtgtgtattctagaaaccaaaagaaaatccagttaagaggagctcagtgagcaagaggagagtggtaagacaggaagtcacagaggtgggcaag

SEQ ID NO: 354195 - DNA, 502 bp, Homo sapiens
actgaaattgtttttgtccacaccactgatgaactccactttgctaaatccaatggtcaacttcktcttcattttacttggttcattggcaagatttaacatcaatcatttcatccttcctgaagcaccttcttcactgtgcttccaggacaacctctctctggccacatttttcagtctgcttttctggttctttctcatctcccttacttctaaacattgacgtaccccagttccttgagtctcttatcctatctataaacactcctttggtgatcataaactgtctaatgactttaaatattatccatgtaatggtaactcactgatctactttgatggaccaaactactgcctgagttcacctatacaagtgcctacctaatatctccatttagaagtcttattaaacttaatatgtccaaaactgagttcctgatatttccatccaagcctgctccaaccacagtcttccctttcttagttaatagcaactttatcc

SEQ ID NO: 354196 - DNA, 494 bp, Homo sapiens
taacttgtctccttgtgtctttccttgctttcagtctattctcaaaacagaagtcaaagtgatcctattaaaatttaagtcacattatgtaccttctctgtgcmaatccttccaatggcttcccatctcacataaagtatcataaaaacccaagtgctcatcttaacctacgaggctctgcatgatcttccccgttctgcccataacctctctgaaatcatctcactaactcagtcttctccaatcactctggaagacatcttcctgctcaccaccttccttagctcttcccattattaaaaactatatgtatataactccactagattgtaaacaccatgacagcaggatttttttcagtctgttttgctatatctacagcactggaatagttttggaggcaagggaaggatatatgagatagctaggacctggtattgaacattttcactgtagacatggtaatatggtttggctaagtccccacccacatt

SEQ ID NO: 354197 - DNA, 494 bp, Homo sapiens
taacttgtctccttgtgtctttccttgctttcagtctattctcaaaacagaagtcaaagtgatcctattaaaatttaagtcacattatgtaccttctctgtgcaaatccttccaatggcttcccatctcacataaagtatcataaaaacccaagtgctcatcttaacctacgaggctctgcatgatcttccccgttctgcccataacctctctgaaatcatctcactaactcagtcttctccaatcactctggaagacatcttcctgctcaccaccttccttagctcttcccattattaaaaactatatgtatataactccactagattgtaaacaccatgacagcaggatttttttcagtctgttttgctatatcyacagcactggaatagttttggaggcaagggaaggatatatgagatagctaggacctggtattgaacattttcactgtagacatggtaatatggtttggctaagtccccacccacatt

SEQ ID NO: 354198 - DNA, 652 bp, Homo sapiens
aatcatttcactttcttttttttttttttttttttactgattatcaacacaattcattggccwatccactctttccctactgacgtgaaaagccactttcgtcatttatggaagtatatttaattctacgctgttataacaacttctatgttccagcagtaaagccccagacttttaatttctgtgactgtatgattaattttaacatcttatatgatattagattggtgcgaaagtaattgcagtttttgccattaaaagtaatgaaagtaacacatctactttcatgtctaccagaatggctaaaaataaagtataaacattaccaagtggtggtatggatttggagcaactagagctctcaaatactgctggtgggaatgtaaattagaacagatgtttctaaactctttggcagtgtctattaaagctaaacatatgtactgtatactctatgacccaatattaaccctcctggctttccctctagtaacaatgagtatttactttcaccaaaagacatgtgcatgaatatgatagctaaaaatcagaaaacaaccagaatgtttatcaccagtgaagaatttattttttaaaatgttagtatattcatgaaatggagcaccataaagcaatgaaaataataaactac

SEQ ID NO: 354199 - DNA, 557 bp, Homo sapiens
ttttctttatgtaagtataactgagatgtcaattgcactcagaaaatattttgacattctaattaaattttcttgaacactctcccaaatgcagtgagaaactcagaggagatgaacccacgaggagaggttgaggtattgtttataagctccccaggcaatgtgcagaatgtcgagaaccaacagcctggttgacttgactcacctgggtcctgctgaaagccaacagcttgactgccaaaaacacagcactatgttgcagtcagaaaaaaagaatgagacattttaatgtgggctggtcagttcccttaaaaagaaatcaatgaatcttctgctagagaataatgctgactgttagtattctgagacccaagtgaagggacaggaccagaggtctcactattgaagatgtcaactttcatttgatctgcctrttttcaatatggcactatattaggctatttttttattactataaataaatacctgagactgggtaacttgtaagaaaataggtttaattggcttgcagttgggcaggctatacaggaagaatt

SEQ ID NO: 354200 - DNA, 557 bp, Homo sapiens
ttttctttatgtaagtataactgagatgtcaattgcactcagaaaatattttgacattctaattaaattttcttgaacactctcccaaatgcagtgagaaactcagaggagatgaacccacgaggagaggttgaggtattgtttataagctccccaggcaatgtgcagaatgtcgagaaccaacagcctggttgacttgactcacctgggtcctgctgaaagccaacagcttgactgccaaaaacacagcactatgttgcagtcagaaaaaaagaatgagacattttaatgtgggctggtcagttcccttaaaaagaaatcaatgaatcttctgctagagaataatgctgactgttagtattctgagacccaagtgaagggacaggaccagaggtctcactattgaagatgtcaactttcatttgatctgcctattttcaatatggcactatattaggctatttttttattactataaataaatacctgagactgggtaacttgtaagaaaayaggtttaattggcttgcagttgggcaggctatacaggaagaatt

SEQ ID NO: 354201 - DNA, 560 bp, Homo sapiens
acatttggagcagctgctctggtcctgcctatcagggcctggcagccacattaacctagacactccctagtgctctgtagagtaggcagagctcagattccttgcagcttaagaacagtcaatattgttacacctaccaatgcctgagaaggtctaatcccaccattaagtctttcctgctggctcctgttctagtgagaatcaaagtcatgctccaacagcctttatcgttgcccttctcactgcagcctgtacacttgctgtaccgctcrggcacatctgacccacacaccccattttactaggtaatctcagccctgaaagacattgtgcagctgcttgtctgggtaaaattgttccatttatggataaaaccagtttaagcacagtaacctgccacagggtaatgttggctcttgaaaactggagctttaaacatcccaccctgtctgcattaacattgacctaatgggacttccagagacggcactgaaaggtgggaggggaaaaagtatcaattcacaataaaggaaataaaagtgaaataagttcaatacaca

SEQ ID NO: 354202 - DNA, 592 bp, Homo sapiens
tattttccaaccactctgatcactttttcaaagaaactttttcttgttgtgatagcttctcctttctctgaggatactaatgattattttgcagtcttctcttgtttcctttgtaaattctgtttcctcatgtgttaattctttttcacattgttattttctcagctatctggtgattcttagatgtgtgtttatattgatgagggaagattaccatttcagtacttttaagtgaaaggtattccctccgtaagttgaaagtgcttggattcctggaagtgaatgtggattccaaggttatacagggagggtcacagaggatgtgcatgaagctgagcttccctctagggaagtggtaccttgtcttgtgggtgcaggtctgctatttttttttttatcagctgcaattcaygtgtgaagttacctcatttctgtggccccagcgtttttgtctctgaatctttcaaatcaggactcgtaatttgtttagaggaatgtactgtcaacatattgaaagaaaaaagaacaacgtttccacatggtcccctagtttgtaatcacagaaacatgaactttgagaactggaagggct

SEQ ID NO: 354203 - DNA, 516 bp, Homo sapiens
ttgcccctcctgttctccttttctaactccagaatttaaacgccatgagagcaaagaaagccatttctgcctcaccctgtacaatctctgtaatgcctgggagaactcctgttacacaggagcatggtgaacacttgctgaatgaacaaatgaacsaatgaatgcatgagccagacactgagctggtgactgagaagcaacagtgagcagaaactgtcacacatccaccttgctgtgacttgcaagccagtggaggaagcagaagttctaatgttcacgctccacagtgactgctgcgaaggaaaacctcagggcgagcaagagagcttttaacaggagactctggtctagttggaagtatccaggctgctccctggggaagtgaagtttgcagatatctgaggcatatgagaaataatttttccaaatggtaatttggtattaacttggttattagctcagcttgaagaagataacatactgagagaaggaaatcaaacgggagttagtaacacc

SEQ ID NO: 354204 - DNA, 516 bp, Homo sapiens
ttgcccctcctgttctccttttctaactccagaatttaaacgccatgagagcaaagaaagccatttctgcctcaccctgtacaatctctgtaatgcctgggagaactcctgttacacaggagcatggtgaacacttgctgaatgaacaaatgaaccaatgaatgcatgagccagacactgagctggtgactgagaagcaacagtgagcagaaactgtcayacatccaccttgctgtgacttgcaagccagtggaggaagcagaagttctaatgttcacgctccacagtgactgctgcgaaggaaaacctcagggcgagcaagagagcttttaacaggagactctggtctagttggaagtatccaggctgctccctggggaagtgaagtttgcagatatctgaggcatatgagaaataatttttccaaatggtaatttggtattaacttggttattagctcagcttgaagaagataacatactgagagaaggaaatcaaacgggagttagtaacacc

SEQ ID NO: 354205 - DNA, 516 bp, Homo sapiens
ttgcccctcctgttctccttttctaactccagaatttaaacgccatgagagcaaagaaagccatttctgcctcaccctgtacaatctctgtaatgcctgggagaactcctgttacacaggagcatggtgaacacttgctgaatgaacaaatgaaccaatgaatgcatgagccagacactgagctggtgactgagaagcaacagtgagcagaaactgtcacacatccaccttgctgtgacttgcaagccagtggaggaagcagaagktctaatgttcacgctccacagtgactgctgcgaaggaaaacctcagggcgagcaagagagcttttaacaggagactctggtctagttggaagtatccaggctgctccctggggaagtgaagtttgcagatatctgaggcatatgagaaataatttttccaaatggtaatttggtattaacttggttattagctcagcttgaagaagataacatactgagagaaggaaatcaaacgggagttagtaacacc

SEQ ID NO: 354206 - DNA, 619 bp, Homo sapiens
gctatcaaaaatgggactaaatctagcatagagagacttccctataggaagctatggtggctgtgccagtagaagtgaacccatttggttagctgcctttgttgctggcatcttcctcggcttscctttggcccccacaccctgcttttttttccaggctaggtcttgctctgtcacccaggttggagtgcagaggcgtgaccatagctcactggagcctcaaactccttggctcaggccatcctcccactcagcctcctgaggagctgggactacaggtctgcaccaccatgcctggctaatttttaagttttttgtagagatgtggtctcactttgttgcccaggctggtcttgaactcctgtactcaagcaatcctcctgccttggcctcccaaagcactgagattacaggtgtgagccactgtgcccagcctggaactccttctaaacttcagagtaccaatgatgccttttactgaccatcaaagaatttacctaattcctttccggtatgacacctccctttaatggtagctctctgtgccttaacccaaaagaatgagtaaagggaatttgtggtaactctggttcttggtgtcatcacattgcctgggagg

SEQ ID NO: 354207 - DNA, 619 bp, Homo sapiens
gctatcaaaaatgggactaaatctagcatagagagacttccctataggaagctatggtggctgtgccagtagaagtgaacccatttggttagctgcctttgttgctggcatcttcctcggcttccctttggcccccacaccctgcttttttttccaggctaggtcttgctctgtcacccaggttggagtgcagaggcgtgaccatagctcactggagcctcaaactccttggctcaggccatcctcccactcagcctcctgaggagctgggactacaggtctgcaccaccatgcctggctaatttttaagttttttgtagagatgtggtctcactttgttgcccaggctggtcttgaactcctgtactcaagcaatcctcctgccttggcctcccaaagcactgagattacaggtgtgagccactgtgcccagcctggaactccttctaaacttcagagtaccaatgatgccttttactgaccatcaaagaatttacctaattyctttccggtatgacacctccctttaatggtagctctctgtgccttaacccaaaagaatgagtaaagggaatttgtggtaactctggttcttggtgtcatcacattgcctgggagg

SEQ ID NO: 354208 - DNA, 562 bp, Homo sapiens
gtgcactgtgcttctgaccccctcgctgggggcgtcaaggtctcctgggctggcacacagacgcccagggcagaagaaagaaaggcaaaaaggaattttactgaggacttttctcacatttatctgtctttgctcttgatctgcttgggcaggggctgctgggatcctaagcgcagtcttccactcccctgggtctcctccctgccccagacccctccccttaascagacaaggttacttgggcctactgtggctggatggccactctatcgtctcactagacatccttgaattcctctttctcagaccatcccagggcccgttccctccagaaacacccaaaacaagaatgagaagctttgcacagaaacccggagctgcagtcacagaacgcgtctgcaaacgtggaaaatttctcttttgcactctccctaaacatttgacaagaattaaaatttcccccaggggaaccaatttcacagattgaaaccaaacttttttccgtcttatatggtctctctctctctctctctctctgtctctgattagaaagaaatgattt

SEQ ID NO: 354209 - DNA, 616 bp, Homo sapiens
aatatgtcaccttgagcaaatggcatctacttgggtgaatggtgaagttaatatcatgttttgaacataaaaagtaaacttgaagaaaatttttaagagatctaaggtatarctctatactagaaggggaagttaatgtaaagccagagggaataatctattcatgagttttaaataccgtttatatatatttgacaatgatatatgttgataaaaaatttgagactcttaaagctttggctagcactaaagtttgcaatcatgcatttctgttgccctaaagatcttcaggcctccccaaatcatccagctcaaagcgagccataaataaatcagtgtcaactgtggttacaaattctggatgcctctatcaggaaaatgaaaggtatagaaattaaggaatagaatgaaagcaaacttttagcatgcattagtggttgttggggctatgaatgtgaggcaggggtatcgtgtgtcatgtttgtgagctgctagtttcattgcaaatcacatcttagttcatagtgttactatgataaatagttgggttctgtattgtaagcagtcttacaaagcaaaacaaaacaaaacaaaaaactaatgaggaatatatccc

SEQ ID NO: 354210 - DNA, 561 bp, Homo sapiens
cagacacctcttctctccttctctgctgcaccactctgccagtggagcttggggtttttatgggcacaggaaaaggtgtatggcaggccaaaaggcgacatttgggtgggaaaatggggatgtgaagttctcatttagggccgtgggtccaggcttgaaggtaaaacccttgccaaacaccctgccttttctatctagtattcctctgcctcctgtccatatcaccagtttcttcatggttattatttcctatcctgctaatttgggctacaagggttgtgaaaagttgtcataagcaaaaatacatttgtcctaccrtatcaccaagccctgtcagagttagattatcttaaaaagtaagattattatctaaaaagatttttattaaaaaataaaagaacaaagacaaaacatatcaaaatgctcatccttactacatgagggagcttactgccaaaaatttacttaaggcacattagtcaggattcctcagaaaaaacaaccaataggagagtgatagacgagtggagaggaagtacaagagaaagggtgggagaggga

SEQ ID NO: 354211 - DNA, 610 bp, Homo sapiens
atgaaactattttagccacagatatttaagaacgttcaaaacagctaaagaaatcatttttaatctgtagtatatcaatcctcattgtaaaatatggaaagctcaggctaaaattaacttcaatgtttattcaaacacatatataaagcatactattatggatttatataaataaaataaatataccacattaaaaaagtaagagagaaaaaaacccacatgaaaggattgattcattcatttattttctgagaattgaagtttcatcaatacagcaaagtaacagaaatgaggaaatttaaaatctgggatgttacaaggaaaaggtctgaataactaaaatcttttggaatcagtaaaccagaaagggtaagcttttgggaaaatagccttaatataagcatccctcaagcattactttaacttatagtataatgctttttacttacattttctgcattattgkgactttttgaaaaacatgaattcaaagaatcataggtcaaattatgcatttaaaaataatttaatatatgctaaaattatgtatgtttgatatatagtgtgcttaaattattgataagccactgtaagaaatttggtgctccca

SEQ ID NO: 354212 - DNA, 500 bp, Homo sapiens
gcacaggtaggagagtatgaatgaaattaaagaagttggaaataatatgaatatgaaggatggaaaaaattccctatgactagagtcagaagctaaaggaagaataggcaggtaagatagtggaagatattctttttaatgatggaaatttttgaaaagtagattgtggtactattaacttatataagctatgtaagagaaataatagtgtaggtgagaacagatatttaaacttttgaaaagttatttaatgaatataactgaaaaataccagaagtgatactcagttgaaattttactattggaaatgttctagggggattaatttgccctaaaaaaataaatatgaactcatcagtgtatgaaggagttkcacatgtcttttccacttacttctcaaaatatgcctataagttaagcaccaacccctttatttgatagatgagaatgaatatttaaaaattaaacggtatacctgaaatcatacaccagtgtgtttc

SEQ ID NO: 354213 - DNA, 603 bp, Homo sapiens
aactcatgcaaacactttagcttgttaatagtgtgtgtgagtagatgagagaataacttgctgtggaataaattccagaacaataatacaaaaatgaaaaggagaagaaagagtggacaagaaaaactgactccttgcttccattcctacagggagatcacacataaagaaactctccyttccttccaactggtggggttcctcatgtgatggatgtctccaattccaagcaatattacagctagcagttcagtacctctctgctcagcagtgaaggtaatgcgatgtgttttcaacaggcactgcaggggaactgagatttttctttttatatatcatttataaattgatgctgtaacttcaccaaacagtagtcttttaaaacttaatgagaatgaaaaattgtgtgtatgttcacatgtatatatgtgtgtgtaagagtgagtttatgtttaacatttgatgttcctaggaagtttaggggagcaacagttcaagcacttgaatatatttttatgctttgtttcttatttctttgtaaatatacctttatctttaatttgtatattgataatagaaatgcaggacaaatgattttttaaa

SEQ ID NO: 354214 - DNA, 550 bp, Homo sapiens
gtgaaatcatacaaaaataagtattcctaatcagtaataactatacttcctaagcacaacacatgtgtttctgtttctcatggtacaacacaacagatttgtaggccagaagaaaatcccagaattattgtcactgtgattgatctggtagcctacaaatggctgagttaatgacgttggttgtagaaagagtaaaagacaaatctaaccttttttactgccttaagccwttctctcctttgtagtattttacttaatgaaacagcactaagctttaaactgcagttgacctatgtttgtttttctgttgacagaacccttgatagagataaccataggaatagcatgctattgttctcagtccaaggataggataaaccactctcatggtgttaaatgtacactgtaggagatatgtgttacccatggatatagtttactagaaaaaaattgtacttacttacaagtactgacttcccaacatgtaggagaacattaatgaatagcatattgcagagtcacagacatgaacatcccttccctgatgtac

SEQ ID NO: 354215 - DNA, 632 bp, Homo sapiens
aaatttaagcactcttttatgtacaagatgttgataagtaaatttttgtccaagatttgaaaagggctcaaatatataattactttcttttgataaaaatgagttgcctcctcattatccttttatgaaaactcatggatgacaatctattgtactggcattttaaattaagttacatgtcttttgcttttgaatcttatctgcatccaaataagtaaattgcatatttgagggttcatttcttaawaatttaatctagcaccacttgacaaaatgattgaatctattataagacactttaatgttttagaagtatctcttatctgctgaaaaaataatatattcacttattaaactatacaatactgatatattttaacatttatgttgaaaatacctgtattcatttgttcttgcactgctataaagaactacctgagactgggtaatttatgaagaaaagaggtttaataagctcacagttccctgggctatacaggctgctgtttctgtggaggacgcaggaaacttacaatcatggcagaaggcaaaggggaagaaagtacatgttcacataggtgacaggaaagagaaatcatgaagagggaagtgctacacacttttaaacaagc

SEQ ID NO: 354216 - DNA, 601 bp, Homo sapiens
cacccctccttctaccactcatgcctgggggcaactgtttaaaggcattttgtttttgactagttgcctcactcaccattatcttcatgcttctgaatttgtgatacaaagaataatatatagtcaatcaacatcttgtgttattttgatgtgaattcttggtaaacaacctaggaactttccctttaaagacctatttgttaactgctgctaactggagtttttatattcagggcaacttgtatctatgctcctggttgcagtcctcaaacttggcccaaataagctctctacctgtattcattttgcctcactcttttccattaggtcgacataccctrgaaatctgttaaccatcagtatctctcttcactacaaacacattcctgaactcattcaatgtgcggaaatattataaatagggttaggtttggaattctgtgggatctgctgagtgtgccatgcacactatacttcatgcaagacagaataaaatggagttacaaaggccaactcttcctaaaagatttttttttttttttgtccaagaatcctgtgtcatttaaaggcaactaaaattttctgaaacttattctaacaa

SEQ ID NO: 354217 - DNA, 581 bp, Homo sapiens
tcaccaatcttataaggaaaaaatgcacaatataaatatatttaataggtaatatgagttattttgtatgggttcatgcaagcagaaggctactagaataaagatgcagtgctgatatttaaactaaattaaaatatattcttgctattaaaaaatgtcatgctccagttgttgaggtaagtgggatgagagaagataacatgttttgaggttgtcattactcacagtgtggaacttctaatgtaatacaatggaacagacagagtatgattttctggtgcatgggcatttccaaatatgtaaaagaaggagcttctctgaacattttctttgtggttttgagaacaaaattttcctgagctcacatactgtaagactgtatctttatctttgtctaccacactatttatatggttacatatgtatatgttatttctatattttatttttgtatcttaatcaaatacacttaactaaatatatttatattaaaaataagtgtycaaaatgccatattaaagcctataggaacttattaggatagaaaaaattccatatggactctggttcagctaaaatat

SEQ ID NO: 354218 - DNA, 577 bp, Homo sapiens
gttggcaagttttttttaattttaatatggccaaatcaatctgtaaggcaggctagaaacactttttgaaagttgtttacactgctacctraatacaattagagttctgctactaaggaagaaaatgggaatttgttttgggtagggaactaggtatcttcaccaggagtttttagaaaatcatgatgaatccattgataaatgaaaaatatatgggaatatatgcaagtttcattagctgtgacagaagggaatagaaaaagaccatgaattgacacatatgattagtctgacatttgtctttaggcattagtcaatgcactgttttcaatgagggggatggtataatggtattctgataccatagttggcttaatctgctctcctttacagatattacagctaatgtagaaactgtaatcattcatcaagtgatttttttggtagctgttggtaagtaactaaagattaataaatagttctgggagaaggctattaagtggatggaaagtttatcatggaaatttctatttcacacagctgatgtcttgaagcatcttaccttgaatattcaggt

SEQ ID NO: 354219 - DNA, 577 bp, Homo sapiens
gttggcaagttttttttaattttaatatggccaaatcaatctgtaaggcaggctagaaacactttttgaaagttgtttacactgctacctgaatacaattagagttctgctactaaggaagaaaatgggaatttgttttgggtagggaactaggtatcttcaccaggagtttttagaaaatcatgatgaatccattgataaaygaaaaatatatgggaatatatgcaagtttcattagctgtgacagaagggaatagaaaaagaccatgaattgacacatatgattagtctgacatttgtctttaggcattagtcaatgcactgttttcaatgagggggatggtataatggtattctgataccatagttggcttaatctgctctcctttacagatattacagctaatgtagaaactgtaatcattcatcaagtgatttttttggtagctgttggtaagtaactaaagattaataaatagttctgggagaaggctattaagtggatggaaagtttatcatggaaatttctatttcacacagctgatgtcttgaagcatcttaccttgaatattcaggt

SEQ ID NO: 354220 - DNA, 611 bp, Homo sapiens
aagtagtatcctatcgtggttcttatttgcattttcctagtgactaatgatgttgagcatctttttatatgcttattattattagccatttgtatctatattttggaaaaataactattcacatcctttgcccctttttaaattgagttgcgtttttattgttgtgttgtaagagttccttagatattttggaaactagatctttatcagatatatgattggctaatatcgcctcccattctatcagttgttttttcattttctcgatggtgtcctctgaagcacaaaagttttaaattttgacgaagtccaatttatcttttttaacttgtactttggatgtctgaattgcctaatttgcctaattaaaggtcgaagagacttacctctatgttttctgagaattttattatttttatttatttaatttttgtagagatggcatctcactatgttgcccaggttggtcctgaactcctggcctcaagtgatcctcctgcctcagtctcccaaagtgtagggattacaggcatgagccaccaaggktggctgtgttttaggagagttttaagttttacctcttacacttaggtctttggtcatttttagtt

SEQ ID NO: 354221 - DNA, 586 bp, Homo sapiens
aaaattgaagctattataataaaatcaggaatcaataccacagaggcaagaagaggttaaagaatcaaattctgccatatttccagtggctgatcctttatttctgattatttttgtaattagttttagaacttacagaatgttaggcactatactgattgtattagatgtgattcttgcccccaagggattgccactgtctaatcaaatgctctgcataatattgccacttcacaagttccacagttgccaggcgatggctcatgcctgtaatcccagcactttgagaggccaaggtgggcggatcatgaggtcaggatatcgagaccatcctggctaacacggtgaaaccccgtctctactaaaaaaatacaaaaaaattagccaggcgtggtggcgggcgcctgcagtcccagctactytggaggctgaggcaggagaatggcataaacccgggaggcggagcttgcagtgagctgagattgcgccactgcattctagcctgggtgacagagtgagactctgtctcaaaaaaaaaaaaaaaaaaaaagttctacagtttaggaacttaggccctaaaacgtgt

SEQ ID NO: 354222 - DNA, 496 bp, Homo sapiens
taagaagccctgtgagatgtttgctttgagggagaccacactcaagaatgcactaatttttmttttgagaaaatcagttctatacacctgccacaggcacacatgtgcatacacacccacaaactagactgagtcacagtgtaaactgcaggcactcagtgcccagaacaccaggggcctgggggcagatgggtagtttggggtagatgtgaactagtaacccaaaagaggtcagatggggccaccttctgacttggggacttgtacaaagggcccagactgcagtggtggagcaggaagaggccaagtgccttataggaaacacttcacttccatgccactttccatttaaaggccacccaaaaggcagagcgctccctttaactaactcattctggccctctgcagggcagttcctaaagcagaggctgctcaggttactatctcaatcccatctgaatgttgtatgttatgttacctgcagtgtgcgacaaaa

SEQ ID NO: 354223 - DNA, 634 bp, Homo sapiens
aaattgagaacacgtttttttctctaagtcaattttacatttgcagcaattaatggcagaattcttccctccctagattttcctgggcacaaagcaagaggaagctcctgattccaggggcagatggtggtggcagtgagagagcatgaacactggcacagcagcactgtgtagtgacagatccaaaagtccgcaggcaggagactcacagcgatgaggtatttccagcaaccaaaaccccacagccatgctatacacaacttaatctctggggggcaagaacagcaagtattcttacatgattttgtatgcagaattccagactctgtaggctctgcttatggtgacagacggctgtccaatccatccaattattggatgaaggaaaatcttttaagccttatcatatgttgactttgcttaaaagcccagctcctatacaaaggcatatggtgttcacaacaacagaggtgtacacacaccatatgcggtctgtgggcagcaaacaaacaactcactaaaycaaaaacactctaggaaacaggaagaactttcagtcagtaagcacatgtttatctttcccattaatcacctctcggtacactctcacaaacagactgatgcaagagacagg

SEQ ID NO: 354224 - DNA, 460 bp, Homo sapiens
cctgttgacctaatatgaatatactgaaggaacaagaaataagtttttttttctttaagttactagaattttaggattttgatagtttagcataacctagcatatcctgactgatataatgctacagtagaaatgtaaataaaatactgtaaagacataactgtatgcttscaagaatttatatctgcacttccaagttttctactaaacttttcagtcaccttaaaatcaccacattaaaaagaatttcctaagactgtaaaagtatttgcttgattataagtgacattaatttatctgtcttgcatctaattgaaaagtagtagagggtctgtgagaaaacctgtccaccaccaaccacagctatttcttactgcatttattactataattcagaactactcttcagtttgtattttctcccttaaacacttcctgaaacttaaaaacaattcaagtt

SEQ ID NO: 354225 - DNA, 553 bp, Homo sapiens
tgttcatcttgaatgacgttctttgagtcctgttattgtaaatcaatagtgctacattatagcccttgtcttaacaatgtgtgatttataacatcaaacatgtctggtgctaacatcatatttgtgtgactatagagttatcctgaggtctacatgaacacttccatatttcagccagcttataattaaagctcagatcctgacaggattttaaatttccattaagaggtacaagcagcttgttttaaaatttcccttttattttaaacagtattttcaaaacaattactacccctgctgtgacktgctatttaccaggtgcatcaaaagttcaataatgaaaatgtttgcaattcaagaaaacagtgtttcatctatagtaacgaagattagatgagtcacatctaacttagtttttttgtaatttaattaaaatgttgcatttctcattgctaagtgtatgcaggtagctgagtatacagtatccattattttcttataatctccaacttcataaattcagtacttatgagttcttcagctaagtaatgtt

SEQ ID NO: 354226 - DNA, 605 bp, Homo sapiens
tggggatggggagttggagaactggctttcaaaccaaggcgatataaaaaatccagtaatcagtataactatgtttctctttccacattcagcagaggggatgctagtgagaagcagatggrgcattggagttaacagagctatggtctggccaaccaaaaaaaagaagataatgcaagaaaaaggcaagggaatggagggtgcatatgtgtttgtgattagaatgattgcccatggaatttatattggataagaaggaaaatgaggaacactgaaatgtggggaggagggagatcaacaatgatttcagtcctggtagtagaacatgtgagccagaaagataggaggttggcaagtgagatgtttgagatttgggaaaagatacactcatttgctcagttaataggaaagtgtaaagatgagagtgtggctgaggtaggatggagagtaagattgctctagttaaaggagtgaaggaacaggactgtagaaggactgtctaattgcatattgaaatcaccatgagttatgacaaaagtagttttgaaaagagtgatcatgagacaagatctaaaattttgaagtgggtagtgaataactgcaac

SEQ ID NO: 354227 - DNA, 549 bp, Homo sapiens
tatggtctggccaaccaaaaaaaagaagataatgcaagaaaaaggcaagggaatggagggtgcatatgtgtttgtgattagaatgattgcccatggaatttatattggataagaaggaaaatgaggaacactgaaatgtggggaggagggagatcaacaatgatttcagtcctggtagtagaacatgtgagccagaaagataggaggttggcaagtgagatgtttgagatttgggaaaagatacactcatttgctcagttaataggaaagtrtaaagatgagagtgtggctgaggtaggatggagagtaagattgctctagttaaaggagtgaaggaacaggactgtagaaggactgtctaattgcatattgaaatcaccatgagttatgacaaaagtagttttgaaaagagtgatcatgagacaagatctaaaattttgaagtgggtagtgaataactgcaacaaggaaggggggatagtgctacagtccgaggacataggattgatctccacattctattgttgtgatggcagggtctggcacatag

SEQ ID NO: 354228 - DNA, 589 bp, Homo sapiens
agggcaatcatgctaaggctgaccaggaagaagtcgctgtagccaggtgagggaggatttgaatgagagggaaatactckctatgtttcttcttctgatatggctgcaatgtaaggtgaattagcatgagaattgtcagagagttggagagataagatttgctaattagctgggtatggagtaagggaggaatgaactcagctttccaggctaggcttactggatttgtacaaaggagaggtttagatataaagataatgagataaatgttagatattatatcccagaagaactacccctgtactcaagacagctgcgctttgaagagcgaaaaacataaaacacagtcccagaaataaatacaaggctgtttaaatgttctcagaagttctgcctacacatgcattagagtttcaagaaggtaacataataccccattgatggctctgtagaggggatttactctgaaattcacatagagaaacaacttttttattcctctgaaaactagggttaaactacaggaatagtcccaaagtttctgcgccctaaaaggagttgaatcctaaaaaggggagcagacaataag

SEQ ID NO: 354229 - DNA, 589 bp, Homo sapiens
agggcaatcatgctaaggctgaccaggaagaagtcgctgtagccaggtgagggaggatttgaatgagagggaaatactcgctatgtttcttcttctgatatggctgcaatgtaaggtgaattagcatgagaattgtcagagagttggagagataagatttgctaattagctgggtatggagtaagggaggaatgaactcagctttccaggctaggcttactggatttgtacaaaggagaggtttagatataaagataatgagataaatgttagatattatatcccagaagaactacccctgtactcaagacakctgcgctttgaagagcgaaaaacataaaacacagtcccagaaataaatacaaggctgtttaaatgttctcagaagttctgcctacacatgcattagagtttcaagaaggtaacataataccccattgatggctctgtagaggggatttactctgaaattcacatagagaaacaacttttttattcctctgaaaactagggttaaactacaggaatagtcccaaagtttctgcgccctaaaaggagttgaatcctaaaaaggggagcagacaataag

SEQ ID NO: 354230 - DNA, 589 bp, Homo sapiens
attgcttttgtttagctgttgtataaggctgcttcggtttaatgttgctgtaaacatgagtgcacagatatcccttaagactctactttcaatccttttggaatatattcagaagcagaattgctagatgacataatacttctaatacttagaggaactgccatactgtttccacagtggctgtacattttatatttccaccaaaagcatacaagttttctaatttttccacatcttcaccaatgcatattttctattttttttatagtagctatcctaatgggggtgaagtggtatctaattgtagttttgatttatattttcctaatgattagggaygttgagtctcttttcatgtgctcgttagccatttgtatgtctcctttaaagcaatatttagtcaagtcctttgcccatttttaatcaggttgctttgttgttgcattttaggagttccatgtatattctagatattaatccttaatctgatatatgatttgtaaatattttctcccagtctgtggttatcttttactttgttgatatggcctttttgcacaaaattttaaaattttcataaagtcctatt

SEQ ID NO: 354231 - DNA, 564 bp, Homo sapiens
acatttttttttttttctttttgaaaccgagtctcactctgtcgcccaggctggaatgcagtagcgtggtaatgctcactgcaacctctgcctcctgagctcatgtgatcctcccagtgcagcctcccagtaactggattacaggtgcatgccaccatgcctggctaatttttgtattttcattagagatggggtttcaccatgttggccaggctggtctcaaactcctggcctcaagcaatctgcctgccttagcctcctaaagtgctgggattacatgagtgagtcaccatgcccagcctgattcacattatttaatagctgaaaagtgatgcaaatttattaatgtgcatgggggaaaattacagactgatgacttgtagtgtaattaccgttattacccartaggaacagaagtttacctacccttattcctaggggaggaggggatggggaatgtagaaaattattttgagggtcagtaaattattagggagaataaatgtagcatggaggtggaggcagacattataggagggtgaggggtggagatgcacagcatca

SEQ ID NO: 354232 - DNA, 543 bp, Homo sapiens
ccaaattcttcctttcagtcattatgaatgcaattaattcttacataaaggatcatttccctaatattttccattgcttatttccttgtttttgatcatgttctaatttgtggtctgkcagtactcacaaattaatgcccggatagttctgaaggtggtcacaattttttggcatatgatagtgaggaaatatttattagatttaaaaattcatactatttttaatgtatacatagataagtatgtttgtatagaagtaacaggaactaaagttttactgattacttaccttggcaactagatatacattaaataccagaattctatcacaatatttaatagattaaaactacaacttaaaaacttgatttttaacatgtctactttctttgaggaatattattttgttcttaattttaatgtataatttaaatacattttatacttttaaagtataatttagacagttttaaatcaaagtaattttttgattttataagtgttcaacatttaatatttcattaacttatatttttatgacag

SEQ ID NO: 354233 - DNA, 588 bp, Homo sapiens
taaaacccaaacatcacctctgcttccaacaaatatatggattaacaagaactagacttatgctgtcatgtaaaacaaccaagataaaayacataaagcaatgattttcaagacactggaactcaggtaacaaaggacagtgatccctgagaaattgaaaacaagatgcgccctgtaattgtcctggtttgagagacttccaaagctatagcacattagggggtcacccaagaagaacttgataaactcaatgagttaagaagacagaagatagaatctggggaaaccaaggctgcactgaaggagaattccagaaaagtacagagggccttgacttattttgcgaagtactaatcaacacatatgtgtgaataacttaaaccctagaaaaagaattgaaaggattaaatagaacagcgcctgacactcacacagggctaggaacagagcctgttcccacaaactatgttagaaaaactcaccattcattgtagtgcactcaggaaagtcttaccacagcagggggaaataaactgctataaactgagcattgctacgaaaatattcaacattaacaaggtacaaatt

SEQ ID NO: 354234 - DNA, 588 bp, Homo sapiens
taaaacccaaacatcacctctgcttccaacaaatatatggattaacaagaactagacttatgctgtcatgtaaaacaaccaagataaaacacataaagcaatgattttcaagacactggaactcaggtaacaaaggacagtgatccctgagaaattgaaaacaagatgcgccctgtaattgtcctggtttgagagacttccaaagctatagcacattagggggtcacccaagaagaacttgataaactcaatgagttaagaagacagaagatagaatctggggaaaccaaggctgcactgaaggagaattccagaaaagtacagagggccttgacttattttgcgaagtactaatcaacacatatgtgtgaataacttaaaccctagaaaaagaattgaaaggattaaatagaacagygcctgacactcacacagggctaggaacagagcctgttcccacaaactatgttagaaaaactcaccattcattgtagtgcactcaggaaagtcttaccacagcagggggaaataaactgctataaactgagcattgctacgaaaatattcaacattaacaaggtacaaatt

SEQ ID NO: 354235 - DNA, 488 bp, Homo sapiens
ttctcctagcccatgagctcctctacactgtgatgcatgttccacacaagcagggatttctgtggaataaggccagggacattttagaggctttgaatatttgttgaatgaattattgaataaatggagaactctatcaaaggcttgctttaggcagtgtgcctgcctttactttgcactctttgttcctgtaaccctgcaggttccaaaatctaggcaacctatctccaaatttagattagaaggtcagaaaccctgcagcatcagcccaacttttgacttggcatgtctttctggggtatggctatgtycaccttattgtgctgctacacatgaattttaactcttaaaaaatcaggtatatgtgtgtacatatatatgcacatttatgtatttatcattgctttgtgtttgcagcagggaatgtttattgacgtgtaagtcctctgttctaaatttaccataaattgatttaagaactgactgtt

SEQ ID NO: 354236 - DNA, 537 bp, Homo sapiens
gctggaacattttttaaaataaaacaaataagtcaggcaaacaagtcttcctgaaaccaaaagtcctggtgttatctgtgcgcagttttcttttaatgctagcatcagtagtccgatattttctacttaagaagacagcaaattttcagggtgygctttgcttggaagtataatctcttaccaatgagcctacagattaaattcagtatgaaaatttataaataacataaagtaaaatgttactccctatttggagactgtcagaacttcacttttgatcccaaagtaactaaaataatgtagactgatgaggtcagagtccagaattctacctgaatgagatctcctgagaatttactacaaacattcaaacactctttgaaaaaggaaattataattgttcacctattctggcttattaatagcttaaagcaaaactcaacaattcaagctgcaattataagaaataatcacactacttccgtaaagtattactgaaaaataaatactaggttcatcactaaaaagtacaatgat

SEQ ID NO: 354237 - DNA, 537 bp, Homo sapiens
gctggaacattttttaaaataaaacaaataagtcaggcaaacaagtcttcctgaaaccaaaagtcctggtgttatctgtgcgcagttttcttttaatgctagcatcagtagtccgatattttctacttaagaagacagcaaattttcagggtgtgctttgcttggaagtataatctcttaccaatgagcctacagattaaattcagtatgaaaatttataaataacataaagtaaaatgttactccctatttggagactgtcagaacttcacttttgatcccaaagtaactaaaataatgtagactgatgaggtcagastccagaattctacctgaatgagatctcctgagaatttactacaaacattcaaacactctttgaaaaaggaaattataattgttcacctattctggcttattaatagcttaaagcaaaactcaacaattcaagctgcaattataagaaataatcacactacttccgtaaagtattactgaaaaataaatactaggttcatcactaaaaagtacaatgat

SEQ ID NO: 354238 - DNA, 656 bp, Homo sapiens
ttggactctacaccatctggaaaacttccacctaaccttctctttctcttcttcacttgagatcasacttgcataatgatctgccagctctcccaacctttccagctttttccctacttttttttcacgtaggtactctgcttaataaaattcttgcatgtttaaccccatgcttgcttctgcctctcagagcatctgtactaacattctgtctaacacctgttatctatgtccagttgattatttttcctaaatatgccgtgattttattcctattatcattaatattgcagagcaggccactaacaacttttatttaggtctgtttaaatataacagctttgcgatataattagaatacaatattattcacccgtgtaaaatgtacaaatcagtgatttatagtgttatcgcagaattgagcagctatcaccacagtcaaccttagaacaatttgcttctccctagaaagaaacctcatactcagcagtcattccctattttctcactattctcactcctggcaaccactaatcctctatctctatagatttgactattctggacatttcatataaatggaatcatacaacatgtgttctttcatgactggtttctttcatttagcatgttttcaagattcacacaccttatag

SEQ ID NO: 354239 - DNA, 656 bp, Homo sapiens
ttggactctacaccatctggaaaacttccacctaaccttctctttctcttcttcacttgagatcacacttgcataatgatctgccagctctcccaacctttccagctttttccctacttttttttcacgtaggtactctgcttaataaaattcttgcatgtttaaccccatgcttgcttctgcctctcagagcatctgtactaacattctgtctaacacctgttatctatgtccagttgattatttttcctaaatatgccgtgattttattcctattatcattaatattgcagagcaggccactaacaacttttatttaggtctgtttaaatataacagctttgcgatataattagaatacaatattattcacccgtgtaaaatgtacaaatcagtgatttatagtgttatcgcagaattgagcagctatcaccacagtcaaccttagaacaatttgcttctccctagaaagaaacctcatactcagcagtcattccctattttctcactattctcactcctggcaaccactaatcctctatctctatagatttgactattctggacatttcatataaatggaatcatacaacatgtgwtctttcatgactggtttctttcatttagcatgttttcaagattcacacaccttatag

SEQ ID NO: 354240 - DNA, 585 bp, Homo sapiens
tacctatattttcttttaagggttttaccctttagctcttacattttgttttaatttattttgagttaatttttgtatctaatgtgaggaaggcacccatctttattcttttatgtgtggatacccagcaatcctagcgccatttattgaaatgtctagtctttctcccattgaattgtcttaggatccttgttaaaaattaatagatcataaatgtgatggtttgtttctggactctcactgctattctattaatttatacatctgcccttatgccagtaccatatggttttgattactgcagcattgcattaygttttgaaatcagtgagtgtgagtcatccaaatttgtactttttttaaggtagttaggccattccaggtcccttgaatttccatacgaattttagtatagcttgtcgatttctgaaagaagccagctaatattttaatagggactgtatggaatctgtaaattaatttgagtggtacagccatcttaacaatattaaatcttctaatccatgaacatgagataacttttcatttagtcagaacttctttcccttctttcaatgacagttc

SEQ ID NO: 354241 - DNA, 587 bp, Homo sapiens
ccaatcaaatttggggcctttcaggattcagaagaaatttagagcaagcagarttcaggtgactcacagaaacttaacatttctcaactatacattatctatcaagacctgaagttaaacatagccccagtccaagaaagaaggcactaaagattatacaacctccacttttccaaaatattcttcagacatcttctcctaatttcttctatctgaccttattaccacatacataataaagaggggaagaagtgatgtttctgatgtttacctgattcaggggcattatcctgtccttgatttccataatttctatcaccaaggaagtcatacgtagattccttatcaccttaggggctaaatccaaagtattaaattacataaatagtatgatacatatcagctggagtaggcatacatatttcactttccctacaccacatccttgctcatagccaaagctggttctaggtacatgtgaaggaaaaataattgctataatcactatgtttaacatctattaaagttgtaaatatgattttcttcttatgtcccttaagttcaacctacaaatcttggtattttat

SEQ ID NO: 354242 - DNA, 587 bp, Homo sapiens
ccaatcaaatttggggcctttcaggattcagaagaaatttagagcaagcagagttcaggtgactcacagaaacttaacatttctcaactatacattatctatcaagacctgaagttaaacatagccccagtccaagaaagaaggcactaaagattatacaacctccacttttccaaaatattcttcagacatcttctcctaatttcttctatctgaccttattaccacatacataataaagaggggaagaagtgatgtttctgatgtttacctgattcaggggcattatcctgtccttgatttccataatttctatcaccaaggaagtcatacgtagattccttatcaccttaggggctaaatccaaagtattaaattacataaatagtatgatacatatcagctggagtaggcatacatatttcactttccctacaccacatccttgctcatagccaaagytggttctaggtacatgtgaaggaaaaataattgctataatcactatgtttaacatctattaaagttgtaaatatgattttcttcttatgtcccttaagttcaacctacaaatcttggtattttat

SEQ ID NO: 354243 - DNA, 523 bp, Homo sapiens
tagctctgaaaataatctcagaacaggcaagacataagaagaaagaaaagaaaacatgagttgtgtttcctcactkaaacttatcagctaaatcactcttccttccctggagttgcaagtgagggaactcagaatggtcataaatattatattaccaattgtctttccctatgaaatgcaggatgaatgtttcttactaacttggaactctttagacttatgtagagaacttacagaattcttcaattttatctaataaagtttgagaaatggtacatattcataagtcaaaaaaagatttcttaccgacacgtaaaatactcagtactatagatttagcaaaacccatttgctgataccatctatatttcaaaatcctgtgttagcacagtgcctggttcataacaaagctaaataaattttatatatttttgtttgtattatgataaccctcattttgtataacaggaaattaatgctgaaagtacatagcaggtatataactatattggccaacagtttg

SEQ ID NO: 354244 - DNA, 632 bp, Homo sapiens
atgtctgtcaagggcctgctttatagatcacagatggcaccttcttgctgtgtcctcacatgatgaaaagataagtctctctcagttctcttttataaggtcactaatcccattcttgagggctctgccctgctgatcccatcaactctcaaaggtcttacctcataacatcatcacactggtgattaggttttaacatatgaatgctggggagacagattcataccrtagcaacaactatataattaaatgagaccgcaaaggtagaaagaaaagaagtggacacactttctggtattaaaccttgactcatattctgactcaataatttcatactgaagtggtatcaaggaaattaataaatcttccttagcttttatttactcttcaatccattgtttaatgggattattgggaaaatcgaagtgatattgcatatgaagctctaagaattatatgtagaacataaatataaacaactgtgattgatcagaataattgcaacagcaatgcaatttgcttgttaaaatggaacaaaactcaaaaatcacatattttaggttgaatgttttcatctaaacacagctttaatgattaaacaaacaaaaacactcaggtaaattgaaatttta

SEQ ID NO: 354245 - DNA, 542 bp, Homo sapiens
gtatgtgtatttttttcaaatagctaccaagttgtcaggatataagcacttatatttactgaggtgcttattcactacttaataaatggagctgttagctttgtttttgggtttttggatttttttggcaaggggtgcagtagtgacatgaaaaatactactcaaatgctaagagcacaatgggctgagaaaattttcaggacttctgaactattgtatttttacctgttgcacaccacactgcaaaagcaggatggaccctcagttaaaaaattggtttggtagttgagattgatgatgtcacrcaaacacaaagggggcataaaacatcttattattcacacaacaaggttttctagggagaccagggaatctccagttaggtccaaaaatggcttgtgagatcaaggaaatgatactggcttgaggtttttatggttgtttgggaaaaaaaatgagtatttccaaacatggcttgagtttcccatttttaccaaagaagggaatacctggctttattatcagcctgcccagatgtagga

SEQ ID NO: 354246 - DNA, 666 bp, Homo sapiens
aaacacagctctagagctcccaagttggcagtactgaaaatgaaatcatcttgaaagaaaaaaaagatgctattctgagagtgcagaggaaaattgattaaaatataatgcatgtttcaaaaatgaaatatcaacactgatgagatttctaaagactatcctttatttctgtactcatgaatcatctaacrtatacttcagaagggatttggatggattggtaaggaaagagaagtgatttaacctcaaagatgaattaataagtgtgttttctatgttcttttttaaactgtatttatctatctatatagagggagcttgagtgcaaaataactacggataatatagctggactttaatagcccatgtctgaagacattgacattaattattaaaaaggcctatcaaaaagtaagagataatttttactgattttaagctatttaattatttaaaatgctacaacaagttaaaaacttaaaagatttctaaaatactttgttatacatttttaaacgtttttattttgaactttggggagaatgaaagaaaatatcatgcaattaaattatatctaaaaatgtttgatatgaacatgagattgtgtatgaaagcataattgatgaaagacctaactttgttagacacatagataagacattgacc

SEQ ID NO: 354247 - DNA, 592 bp, Homo sapiens
tcagactcagatgaggttcttttaaagacttttatgagatgtcacagtcagraaattaatagggaaaaattacccttagcaaatattcaataagaaaataaagaaagtagagttggacaaaacgagaagttgatctccaatgcactcgtgtgactgaggtctcagcaaataaacagaagctatgtagctcagatggcctttcagagttgcctccaacaaggacgtaacaccatcttgtacccctacacatcagtcagtactgctaataaggatagctaatccccaagtgtttttgaatatttgtgaacagatgatttatcatgatatgacagcaaatcaggtgcagtaggttaattggagagtttggcaaacctatcctgagaggaaaatttgccttcattccacctccatctgcaaatggaatcctcttttccaaacaggtggaaggctatacatataggaggtattagtctgacttcatgatgactgtggtttaatgcaattgacaatcatgatgctagaaataacaaagagggggcatggcttttctaatcttggtcatcgtatataatttttatttagtaagacaagg

SEQ ID NO: 354248 - DNA, 592 bp, Homo sapiens
tcagactcagatgaggttcttttaaagacttttatgagatgtcacagtcagaaaattaatagggaaaaattacccttagcaaatattcaataagaaaataaagaaagtagagttggacaaaacgagaagttgatctccaatgcactcgtgtgwctgaggtctcagcaaataaacagaagctatgtagctcagatggcctttcagagttgcctccaacaaggacgtaacaccatcttgtacccctacacatcagtcagtactgctaataaggatagctaatccccaagtgtttttgaatatttgtgaacagatgatttatcatgatatgacagcaaatcaggtgcagtaggttaattggagagtttggcaaacctatcctgagaggaaaatttgccttcattccacctccatctgcaaatggaatcctcttttccaaacaggtggaaggctatacatataggaggtattagtctgacttcatgatgactgtggtttaatgcaattgacaatcatgatgctagaaataacaaagagggggcatggcttttctaatcttggtcatcgtatataatttttatttagtaagacaagg

SEQ ID NO: 354249 - DNA, 365 bp, Homo sapiens
tgtaagaaggcaggatatgcctgtggtgctagaaatagtctccagaagtgggtatgaagacatgaaagatcatgcacactaaatgaccaatttagtcagtgatawaattgcctgtctaagtatatagacagaatctcagaaaataattattaggttcttcaagttgccatcattgctcctacaaatattgtcatttggaaattaattatttagaaaggcttgtgaccaaatcaactataattaaatacaacataaattcctcataagatataaagagataccaaaaatgagatttttaaaaaattaactatttttaaaatgtaaagttattatgactaaactaaaattcacttgttagaataagt

SEQ ID NO: 354250 - DNA, 628 bp, Homo sapiens
tgaatcctgtgttctcattttggcttttgtaccatcactacagatgttcctacatatttttgccagtttatttaatgatgtgttaaaaatgaacctaaactcttcaaaatcccctttctcttttttgttatatctttgtccaaactttcacaaagtaataaatctttctcttatttgccatataaaatattacatagaataagcaaaatagactcacatcattttcacttcattagtttacttataatcttttcacatattcccagtgctcattaaatcatcatgctgctgagtctgttttcatatctggctgccacctaaaacatttattattgtcwttaaaaggatatgaggttttgtctattttatttgctattttttctcacattatttagtaatgcaaaatatttaatatatctatgtattaatattttaaatattaaatgaatttagtttttataaatgcctgacagataagtacagaacatgctgggtccataaaacacagctttgaaaaaaacctccatatgttgataaattgctagaaaaaataaagaaggaaacatctaaaacagtattgtataccactataactactgtctttcacattttcaatacagccataaca

SEQ ID NO: 354251 - DNA, 525 bp, Homo sapiens
gctatattgtttttcagcttttgggtagttttactagatttcttggattgggtttcaacttgctcttcgatcttgagcttctttgccatccaggttctgaattctatgtctgtctttcagtcatttcaatttagttaagaaaaattgctgggaagctagtggactctgttggaggtaaggagacactggctttttcaattgccagagttcttgcgttgattctttctcatccaagagggctagcattcctttaactgtggtgggagttgagtgtagtcaattggcttcatttctgggtgctctcagagggccaaggctctgggtagaatctttattttgtggctggattcytgcgctggtttccacagtggtgtatattggtaaaatactttttttgtattttttattatactttaagttctagggtacatgtgcacaatgtgcaggtttgttacatatgtatacatgtgccatgttgctgtgttgcacccattaactcgtcatttattttgatccaccctcctt

SEQ ID NO: 354252 - DNA, 525 bp, Homo sapiens
atcttgggctcatattctcaggatctcccgagggctgtgtcatgggtcatggtcactaatatttggctcagaataaatctcttcaaatattgcacagtgttttactctttttgtcagtagaagtcttatttatcatcttctttgtctgaatgtatagcatatgcagtcaagtatatcttccatgcaatatactaggtgtgcgatattggctaacttagaaatcttgcyctgtcacaccaactggagttgcagtcactgcagcctagaacttctgggctcaatgggttctcctgtctcagcctcctgagtagctgggagtacaggcccatgccaccatgcccatctattttttttttttttttaattttttgtagagatggaggcatcttgcttgcttgcccaggctggtctcaaattcctggctttaagcagtcctactgcctcagctcccttaagcactggggttacaggcatgagtcactgtgcctgactagtatcttgaaaatgtaatcacttcccttttac

SEQ ID NO: 354253 - DNA, 525 bp, Homo sapiens
atcttgggctcatattctcaggatctcccgagggctgtgtcatgggtcatggtcactaatatttggctcagaataaatctcttcaaatattgcacagtgttttactctttttgtcagtagaagtcttatttatcatcttctttgtctgaatgtatagcatatgcagtcaagtatatcttccatgcaatatactaggtgtgcgatattggctaacttagaaatcttgccctgtcacaccaactggagttgcagtcactgcagcctagaacttctgggctcaatgggttctcctgtctcagcctcctgagtagctgggagtacaggcccatgccacsatgcccatctattttttttttttttttaattttttgtagagatggaggcatcttgcttgcttgcccaggctggtctcaaattcctggctttaagcagtcctactgcctcagctcccttaagcactggggttacaggcatgagtcactgtgcctgactagtatcttgaaaatgtaatcacttcccttttac

SEQ ID NO: 354254 - DNA, 573 bp, Homo sapiens
ttagagagaaacagcaaaaacagaaattttaaataaagtccagaacctcattacctcatacctaaaatgttaaagttttaataagtgtattagtccctttttgtactgctataaagatactacttgcaactgtgtaatttataaacaaaagaggtttaattgactcacagttccacatggttgcagaggcctcaggaaacttatgtcagaaggcaaaggtgaagcaaggcatgtcttacattgctgcaggagggagtgcacgcatgggaatctgccactattaaaaccatcagattttgtgagaattccctcagtattattagaacagcatgggagaacctcccccatgattcaatcacctcctacctggtccctccatcagtacgtggggattacaagatgagattttggttggaacacaaagccaaaccgtakcaagaagcagtcacttgtcctaaaaagaattatagagatctcaaactatttatagcaatgcaagtaaaaaaatctcaaactgaatgagagaagacagtcaatagtggccaataccaggataacaatgatgtcagcatt

SEQ ID NO: 354255 - DNA, 517 bp, Homo sapiens
tttagaatataaatgagcctttatactttgtgtttcagtatctggataactggaaaaaataacattaagaaagcaggtattgtattaaaaaaaraagtgaggaaaaaatctagaagcatgagattttcactgatttcaagcatacatgaatgcctgaatcaattgggattccagccaaatgaaacagaacaaggcagcagaaacaaatcatgctgtgcttcatgaaggatattagcagcttcataattgtgccttgaaatgcttttctttatttctgtctaattgccattaaattcatcatttcacagagaagttaaggccaaaactaaaggaacatttcaaaatttttatttcttatttatcagtgacataataattgcacatatttatggagtacaatgtgatgtttcagtgcatgtatacacagtataatcatcaaatccggggtaattaccatatccatcactattaacatttatcatttatatgtgacaacattcaaaatcttttggctttc

SEQ ID NO: 354256 - DNA, 444 bp, Homo sapiens
gcataaaactgacatattcaaaaaccaaaagttccactgtgagtaggactgagtgagtgaatgtttccaattgcagaagaaattgttaggccatgggattgtgtgtgctctgggaccattgtaaggactttgagagagagagaaataatcacaggatcttggagtagcataatttgacttatatttttaaataattcctctgcatattgtgartaatagactggggtgagacaggaataacaagggctgatggaagaaatccactttgaaagctattgtagtaatcaacaagaaagatgatggtgctttggacatgaaaggtagcaccaagagtagcaaaaaatcatcaaaatgtgaaagtaggttgaggaaatcactgatgaaacttacaactggattaaatgtgtggtataagataaatagcagacttgggtatgtcttcaa

SEQ ID NO: 354257 - DNA, 619 bp, Homo sapiens
tccaaacaccatcacatcaggagttagggcttcaacatatggattctggggggacccaattcagttcataagaaccactgacctagagaataaatatagacagagaagagttccaaaactgagcgttgggaagctttatgtayagaggttgacaaagtacagaggaatatccaaacagattcaggaacaatagccagtgagagaacaagaacaccaaaacagcctgggtcctacagaatcaatcaaaataagaacaaaacaatgagaagggaatgatatatttgggaaaaaaagtaaaattggcagatcaagcaaggtgattagttatgttgaactatgttgagcattttttcttatatgattcttagtcacttgtatgtctccttttgagaagtgtctgtttatgtccttttccctcttcttaatgagattatctgtgttttttcttattcatttaatttccatatagattatagatattagttatttgttggatgcataatttgtagatattttctgccattctgtgggttgtctgtttactcttttgatagtttcgtttgctgtgcagaagctctttagtttaattagattgcaattttcaatttgtggtttagtt

SEQ ID NO: 354258 - DNA, 619 bp, Homo sapiens
tccaaacaccatcacatcaggagttagggcttcaacatatggattctggggggacccaattcagttcataagaaccactgacctagagaataaatatagacagagaagagttccaaaactgagcgttgggaagctttatgtatagaggttgacaaagtacagaggaatatccaaacagattcaggaacaatagccagtgagagaacaagaacaccaaaacagcctgggtcctacagaatcaatcaaaataagaacaaaacaatgagaagggaatgatatrtttgggaaaaaaagtaaaattggcagatcaagcaaggtgattagttatgttgaactatgttgagcattttttcttatatgattcttagtcacttgtatgtctccttttgagaagtgtctgtttatgtccttttccctcttcttaatgagattatctgtgttttttcttattcatttaatttccatatagattatagatattagttatttgttggatgcataatttgtagatattttctgccattctgtgggttgtctgtttactcttttgatagtttcgtttgctgtgcagaagctctttagtttaattagattgcaattttcaatttgtggtttagtt

SEQ ID NO: 354259 - DNA, 560 bp, Homo sapiens
ttgtattccttgtatgtggcatagtacatagcatgtatgcattttatttatttggatctatattcacagtaaataaattctttattactttgtgctgacatatgtacacccttccctattgctgacccgcacatgcaagaagccttaataaggctgtatgagatagagcaagaacacggggttcttcagcacagcccaggagctgcagtcactttatcagatgtcccttccttagytcctgatatccgttctgattccttttccccccactgaggccatgtgcttcatcgtaggcacagtgaaatgccaaaacaatgtttgttttacatttgtcactacattgctcgttcattttgcttaaaaataatttaatttgtgaaactgtcaaaactacaaatttagtcaacatcttaaggccttataaatttttctttttaatttccttccatcaataaagagacacagtgttaaaagtcttctattactgagataattttaataatcattttaattagaacaactaaacataagttagctaagtgcatagtgaataaagcagc

SEQ ID NO: 354260 - DNA, 560 bp, Homo sapiens
ttgtattccttgtatgtggcatagtacatagcatgtatgcattttatttatttggatctatattcacagtaaataaattctttattactttgtgctgacatatgtacacccttccctattgctgacccgcacatgcaagaagccttaataaggctgtatgagatagagcaagaacacggggttcttcagcacagcccaggagctgcagtcactttatcagatgtcccttccttagttcctgatatccgttctgattccttttccccccactgaggccatgtgcttcatcgtaggcacagtgaaatgccaaaacaatgtttgttttacatttgtcactacattgctcgttcattttgcttaaaaataatttaatttgtgaaactgtcaaaactacaaatttagtcaacatcttaaggccttataaatttttctttttaatttccttccatcaataaagagacacagtgttaaaagycttctattactgagataattttaataatcattttaattagaacaactaaacataagttagctaagtgcatagtgaataaagcagc

SEQ ID NO: 354261 - DNA, 621 bp, Homo sapiens
aggtattaatttattcagcaaatgtcactgacagactatacattaggtgtaaggtgagaattaagtggtgatcaaaccagaggtttttctagctttatagcacttacagcttattagtagataaaaattgaaatattcacatcaagaaatgtacaattgctattccaaaaaatcctataaaagagagatatatgcctgcataagaccctgtaacaggagaatttcatctggttaggaaatttagatgaggcttttccaaagaagtgacactagaatgagatttgaggaatgagaagttaagtcaatggtgkgtgaatgtaatttaagtaggaaagccagcatatgctaaggacctgtacctggtggaagtatgtgaggtgtgaagagtagataaagggcagcttagctggagcaaagtcataagaaggagcagggtaacatggttggctggaaaggtcagcaggggccaaacccttcagagacgtgcaggtcatgacagtaagttttacctgtaggctcggtattgtgggattgcagctctccccctcccatccccccaaaatgagaaatcattaaatgagattgtcacatacataaagtttactctggctatagtgtgaa

SEQ ID NO: 354262 - DNA, 563 bp, Homo sapiens
acattcagtccattatacaggtagaggaggactatgaacaacatcttgaatgtgaggctcttgagatatgccagtggaaatgaggaaaaggcagtatgatacatatctgatctcagaggagaaatttcayctagaaatatgaatttcttaaaagagattacttgggctttaaatattttagattttttttttgataaagggaaaggaccttacttttattggatagcatatgtagataacaatattgggtttcaagcttccatctattcccacaagtctttgaggtctattattacttctattgtataaataaagacattgagcatcagagaatttaatttgcctaaaggtattcagaaagtgaaaagtcggaattggacaacaggccttttaatttcaaatcctagattcttttccttcagttaagacagtcttgggtgccttgaaatatttatatgtacctaaacactttgcttaagcatttccaatactctatattgcatttttaaaaattatttacacaattcatgaaaaagaatgtgctaagaaacagtatacttaat

SEQ ID NO: 354263 - DNA, 563 bp, Homo sapiens
acattcagtccattatacaggtagaggaggactatgaacaacatcttgaatgtgaggctcttgagatatgccagtggaaatgaggaaaaggcagtatgatacatatctgatctcagaggagaaatttcatctagaaatatgaatttcttaaaagagattacttgggctttaaatattttagattttttttttgataaagggaaaggaccttacttttattggatagcatatgtagataacaatattgggtttcaagcttccatctattcccacaagtctttgaggtctattattwcttctattgtataaataaagacattgagcatcagagaatttaatttgcctaaaggtattcagaaagtgaaaagtcggaattggacaacaggccttttaatttcaaatcctagattcttttccttcagttaagacagtcttgggtgccttgaaatatttatatgtacctaaacactttgcttaagcatttccaatactctatattgcatttttaaaaattatttacacaattcatgaaaaagaatgtgctaagaaacagtatacttaat

SEQ ID NO: 354264 - DNA, 534 bp, Homo sapiens
cattacattagggttagggcttcaaggtatgaatgtgggggagtaaatacattcagtccattatacaggtagaggaggactatgaacaacatcttgaatgtgaggctcttgagatatgccagtggaaatgaggaaaaggcagtatgatacatatctgatctcagaggagaaatttcatctagaaatatgaatttcttaaaagagattacttgggctttaaatattttagattttttttttgataaagggaaaggaccttacttttattggatagcatatgtagataacaatattgggtttcaagcttccatctattcccacaagtctttgaggtctattattacttctattgtataaataaagacattgagcatcagagaatttaatttgcctaaaggtattcagaaagtgaaaagtyggaattggacaacaggccttttaatttcaaatcctagattcttttccttcagttaagacagtcttgggtgccttgaaatatttatatgtacctaaacactttgcttaagcatttcc

SEQ ID NO: 354265 - DNA, 614 bp, Homo sapiens
ggccctttgaattgcatgggagtagggtgaggcctgtgactgccggctttccctcacttccctgacaaccctgaatgacacagttagagacagccataatcgtcctaggaacataactccattaacctgggaacctcatcctcatctctcacagcagccgcagcaagacccaccaaaggagaatctgagctcagacatacctagcccaggccttacccagtggtcyttctctacccaccctgataactgaagacaaagggcatatacgcttgggagttctagagtcctgcacaccacctgttcctccgcatactacagttgatgctctctggaaagcaccaactcctggcagggggccaaccagcacaaaaatagtgcattaaaccaccaaagctaagaaccttcacagagtccattttatccccctgccacctgtaccagaacaggtgttggtatccatggctgagagacccacaggcggttcacatcacaggactctgtgcagacaacccccagtaccagctcagagagtggctagatccagaagagagataacaatcactacagcttggctctcaggaaaccacatccataggaaaagggggagagtacta

SEQ ID NO: 354266 - DNA, 614 bp, Homo sapiens
ggccctttgaattgcatgggagtagggtgaggcctgtgactgccggctttccctcacttccctgacaaccctgaatgacacagttagagacagccataatcgtcctaggaacataactccattaacctgggaacctcatcctcatctctcacagcagccgcagcaagacccaccaaaggagaatctgagctcagacatacctagcccaggccttacccagtggtctttctctacccaccctgataactgaagacaaagggcatatacgcttgggagttctagagtcctgcacaccacctgttcctccgcatactacagttgatgctctctggaaagcaccaactcctggcagggggccaaccagcacaaaaatagtgcattaaaccaccraagctaagaaccttcacagagtccattttatccccctgccacctgtaccagaacaggtgttggtatccatggctgagagacccacaggcggttcacatcacaggactctgtgcagacaacccccagtaccagctcagagagtggctagatccagaagagagataacaatcactacagcttggctctcaggaaaccacatccataggaaaagggggagagtacta

SEQ ID NO: 354267 - DNA, 583 bp, Homo sapiens
actagctcactagcaatggacccaaaccaagaagaaatccctgatatacctgaaaaagaattcaggaggttacttattaaactaatcaggaaggcaccagagaaaggtgaagcccaatgtagggaaatccaaaaaaaaaaaaaaatgatacaagaagtgaagggagaaatattaaacgaaatagatagcattaatgaaaaacaaaacctcaggaataaatggacacacttttagcaatgcaaaatgctctggaaagtgtcagcaatagactagaacaagtagaagaaagaaattcagagcttgacgataaggtcttcaaattaaccaaatccaatgaagacaaagaagaataagaaaatataaacaaartgtccaagaagtctgggattatgtttagcaaccaaaccgaagaataattggtgttcctgaaaaagaagagatctctaaatattctaaaatatatttggaggaataattgaagaaaactttcccagctgtgttagagaactagacatccaaatacaagaagctcaaagaacaccttggaaatttatcacaaaaagatcttcacctaggcacattg

SEQ ID NO: 354268 - DNA, 545 bp, Homo sapiens
aaaactttcccagctgtgttagagaactagacatccaaatacaagaagctcaaagaacaccttggaaatttatcacaaaaagatcttcacctaggcacattgtcatcaagttatctaaagttaagatgaaggaaagaatcttgagagctatgaggcaaaagcaccaggtaaactataaagcaaaacctatcagtttaacagcggatttctcagcagaaaccctacaagctagaagggattggggccttatcttcagcctcctcaaacaaaaaaattaccagccaagaattttgcagccagcaaaattaagcatcacaagtgaaggaaagaatacagtatttttcagacaaacaaatgctgagagaacttgccgctaccaagccagcactacaagaactgctaaaaggagctctaaatcttgaaacaaatcctggaaacacatcaaaacagaaagtttttaaagcataaatctcataggacctatcaaacaaaaatrcaatttgaaaacaaaaaaccaaggtatacaggcaacaaatagcatgatg

SEQ ID NO: 354269 - DNA, 433 bp, Homo sapiens
acatttatcttaaaatcttcatgttactatgaagttctcataattattattgtaatatattttatcttatactgatcacatttctttattattaaacacttcccttttattgtatatttatttctattttttctgtgataaataatgcctaaatgaacatattcttgtaaataggttttttttattttatgtatgagtttttctttagaggacatttccagaagtcaaagggttcaaatggtataaactttgttttaatccctttaagtgcattgccaaattcccattcaaaaaagaatttgcctccaggaaaaaacataatttcaccataccttgtttagcattgcastctatcatttgtaatgggttttatgtattttacattagttgaatcaaagcaatggataagtagtaaatgtactcaaatgggaag

SEQ ID NO: 354270 - DNA, 572 bp, Homo sapiens
attcaatgtttcctattcacacattttcttttcgctattttttttaatctgcaaaagttttagaacattytaaatagttacatgaagtattttcaagttaaaagaaacatatgatgtcgtaatagtttagtgagtgaatcaatcttattgtctgaatgagaaaaatcccagtctactatttggcttaatagcaaataaaagatgctgcttgaaataattgactgaacataaaaaaggaaactatatttatgtttctggtgttttattatataatgtgtaactacattcttcacaactgtgctttaaaaccaatattattattgtattaaatagatttaagggatactttctatttgctaaagtcacaatattatcaagtcagtaacttgacgtagtgaaattatttatattgttaactattgttaacatcttacttctaaagttgttggggcaagaacagaggaaaatgcatcagacgtgggctgtagtcaattgaaaaagtattttacaatcatagtgtactatagatttggtgtacaaatagcttatgatatttacttctcttttttttt

SEQ ID NO: 354271 - DNA, 572 bp, Homo sapiens
attcaatgtttcctattcacacattttcttttcgctattttttttaatctgcaaaagttttagaacattctaaatagttacatgaagtattttcaagttaaaagaaacatatgatgtcrtaatagtttagtgagtgaatcaatcttattgtctgaatgagaaaaatcccagtctactatttggcttaatagcaaataaaagatgctgcttgaaataattgactgaacataaaaaaggaaactatatttatgtttctggtgttttattatataatgtgtaactacattcttcacaactgtgctttaaaaccaatattattattgtattaaatagatttaagggatactttctatttgctaaagtcacaatattatcaagtcagtaacttgacgtagtgaaattatttatattgttaactattgttaacatcttacttctaaagttgttggggcaagaacagaggaaaatgcatcagacgtgggctgtagtcaattgaaaaagtattttacaatcatagtgtactatagatttggtgtacaaatagcttatgatatttacttctcttttttttt

SEQ ID NO: 354272 - DNA, 582 bp, Homo sapiens
aattaaagcttggagaataattagctaaatatttgagccaatcttcaatcaatagaatacaaagttgaggacctttcagtggaaaccttacaagccagaagacattgagggccagtattcaatattcttaaagaaaagaaattccaacccagaatttcatatgtgcccaaactaagcttcataagcaaaaataatgtccttttcggacaagcaaacgctaagggaatttgctacagacctgccttacaagagttcctgaaggaagcactaaatatggaaataaaagactgttaccaggcactataaaaacacactgatgtacacagaccagtgatacgataaatcaaccacataaacaaatctgcaaaataaccagttatcatcaygatgacaggatcgaatccacacataccaaaactaaacttaaatataaatgggataaataccccagttaaaaaacacagagtggcaaactggctaaagaaacaagacacattcgtatgctgtcttcaaaagacccatcttacatgcaatgacacacataggctcaaaataaagggatacagggaaatccaccaagca

SEQ ID NO: 354273 - DNA, 601 bp, Homo sapiens
atgatattaacaatgaagaaaaaaaattacccagaaccaggaaattagacctaggtaatatggctcaacaaaagccgtgtttacaactatacaagataattgaatatgcwggaatttatgaatgatgtgggtggatgatatggtttgaacatttgtccccttcaaatctcatgttgaaatgggatccccaatgttggacatgggatctagtgggaggtgtctgggtcatgagggcagatccctcatgaatggcttggtaccatctccctgttgatgagtgagtttttgctgtattagttcacacaaggtctgattgataaaaagagcctggcatctcccgcctctctcaccatgtgctcccccttcaccttctgccatgactgtaggcttcctgagacctcaccagaagcagatgctggcactgatactatacactgtctgcagaatcttgagccaaaataaacctcttttctttataaattacgcagcctcaggtattccattatagcaatgcaaaatagaataacacagtgggttaaaaacactttcctttgaggaaaatggggagactcaaaaattttattcactaagctctgttagc

SEQ ID NO: 354274 - DNA, 642 bp, Homo sapiens
gcaatgatgactctcatgtactaccgggtcctggtggagagrcacactatctcattctgaagctatgaatactctcacataagggtcagcagtaccgagtaaactacccaatccattttccttctgcccttagaagacattccagcttatcatggttttttacctggtgaggtgacctgcatttttattcctgagtggtctgagtcattatcagtcctgcccaaatgggggtgtaattttccattgactataaggcatgggaagtaccaagaagtacttccattatgtcaaacatacctctcctttctctaaatttcccacaaaattcaggattagtatccccaggaagtatctcctttacttcaaacatacctctcttttctctaaatttttcataaaattcaagattagtattctcaggcaatatagtgaaacctctttttatgtctttgattcagtggcataaagaatccatattgaagagttggtggtttcaacttctagttcaatgaattcagggttgtgtcccctgatggaagcattcctccctttagaatgaagacttctagaccatcggagcctaaagtaatagggaaagaaacggttgcttgcaaatttctagcagtaatagtgagaggagtc

SEQ ID NO: 354275 - DNA, 454 bp, Homo sapiens
ctctaaaattaagaggcaaggcagagtaaagaggaggcactaggaaaagaagatgagaatgaatacccagtggaatggaaggaccattatccatttcatctggattactgcaacagcctcttttcttcccatttctacacgctctcccttccattccacagtccccaaagcagcaaaacaagwgtgagttcctttgtaaatcaacctacaaagcactcttgttttaatgcctttggtagcttctttttgcacatccaagccttggtcttgtatcgccaaaactttcaatggtattcagaatcagtgctttatcctgaatgttttcctttggccctcctgattctgatcttccatgcttctgacactgactatgttaaattcagactttctcctttctgtcctgcatattacatgatttgacagatttagatgttagcattctgaacaacagcat

SEQ ID NO: 354276 - DNA, 594 bp, Homo sapiens
attcagactttctcctttctgtcctgcatattacatgatttgacagatttagatgttagcattctgaacaacagcatttcaactgacagtttgcttttagcgtagttcaacaaaaaagaactgggcatttcaagtgacacacttggttctttttgatatacatactaggagctggtccctcttctgtgtgacgatttgcagaaaaccccttcaaaataggctcaatagccctctctatatattttagcacttaaaattgattaaatatttattatatagttcagaaaaacataggctacttttccaaaccaagttacttacargctggtagatatcattaccttgtatttaaatcacactttataatttgaattttattcccatagcattatccatcaccttagttattatcagttaaacaaagaactttgttttagacaataaactcaacataaaaatatatatatatatatgcttctttctaggaaattatgtctactgttttactactcttaccacttcttttacattttgccatttgtaattttataaatgtcagaacaatgttttattgcattccttgttagtattgaa

SEQ ID NO: 354277 - DNA, 359 bp, Homo sapiens
actctcagattttgagatttgtgtcttcctttccaaacccaaatctcatctttacattcatgaccttccacctaattgcctacagtacattcttatttaacagtgatgtcccattaaattcaccraactgtttctctgattagaaatgattagtaacttcccacaagctacaatttatcctttatcccacgataaagtttatcctgggaaggaaagtacctatagcttatccaatactgtttcactatttcatggtaaaaatccacattcccgaccaggctcatctcttctttgcctttcaaaatgttctttccgtcttcaatattttggtatttatttcttttctccaaccctttaaa

SEQ ID NO: 354278 - DNA, 557 bp, Homo sapiens
gttctgggttttataatagtatttgcagaactgttgttattgaactaactctaccataaataacacactcaattctggaaatattaataacataaaaaaacagctgtttgaaaactggaaagcaaacaaaaccaggttaagaaaataaataaggaggatctatgctttgaaaaaagggagacataatgagagagattttcacccaagtactttcaccagcaccggaagataaaattcaagcagaaaattacatattattaacctgaatacacagagtataaagttcagggctttctaaacgactaaaaattgaggccagacgcggtaactcacgcttgtaatcccagcactttgggaggctgagtcctraggatcgcttgagtccaggagctagagaccagcctggctaacatgggcagaaccccgtctttacaggaaaaaaaatatatatatatatattagccaggcgttgtagtgcccacctgcagtcccagctactcaggaagcttaggtgggagaattgcctgagcccaggaggttgagggtgtagtgagccg

SEQ ID NO: 354279 - DNA, 629 bp, Homo sapiens
aaggtctgcagcttcactcctgaaaccagcgaaactgcgaacccaccagaagaaagaaacyccgaacacgtccaaacatcagaaggaacaaattctggacacaccacctttaagaactgtaacactcaccgtgagggtccgtggcttgattcttgaagtcagtgagaccaagaacccaccaattctgtacatggtatgtgttatgatcagcaaatccagtggtcatatatccattcccatacttcttttactgtgaaatgagtcccctggtcatgctgtgtgaatatctataagtccctgcatagactggataaagcttcatgggcaggaaagaacacctcatacctgaaattggcagccgcccttctgaggataaacttctggttcttcagtaaagaagggacttgatgtagttgagttattaggtggccagttgatgtccttgaggaattgtgcaatatgtgatgtgcagtattggtctttgttgctgacatggtcgacaataacagatgtaactagatagaccttggtaagcaggagtcagtggtgttgggctgatgataacctctgtatctgccaccatgggactccaatcatgttgctatcatgtcagttttgatggccaatga

SEQ ID NO: 354280 - DNA, 629 bp, Homo sapiens
aaggtctgcagcttcactcctgaaaccagcgaaactgcgaacccaccagaagaaagaaactccgaacacgtccaaacatcagaaggaacaaaytctggacacaccacctttaagaactgtaacactcaccgtgagggtccgtggcttgattcttgaagtcagtgagaccaagaacccaccaattctgtacatggtatgtgttatgatcagcaaatccagtggtcatatatccattcccatacttcttttactgtgaaatgagtcccctggtcatgctgtgtgaatatctataagtccctgcatagactggataaagcttcatgggcaggaaagaacacctcatacctgaaattggcagccgcccttctgaggataaacttctggttcttcagtaaagaagggacttgatgtagttgagttattaggtggccagttgatgtccttgaggaattgtgcaatatgtgatgtgcagtattggtctttgttgctgacatggtcgacaataacagatgtaactagatagaccttggtaagcaggagtcagtggtgttgggctgatgataacctctgtatctgccaccatgggactccaatcatgttgctatcatgtcagttttgatggccaatga

SEQ ID NO: 354281 - DNA, 629 bp, Homo sapiens
ttgaaatccagaagttaaaaaaaatcataaaaacagctagagtaaaaacatattgcataaaagagaacaataatataatggcaactgacgttgcatcataaaagtagatattgaaaaacaagtgacaccttccagtgcctaataaaaaagaaaacatctgtcaacctagaattctatacgacattaaaatatcttggaaaaatagaagtaaaataaacattattttatataaacaaggttgggagattttgttaccagcagaggaagtcatataggctgaaaggaagttacaccaggtgaaaactcagacttccaggaactcagaaccctaggcyggacacagtggctcttcccagcactttgggagtctgaggcaggcggatcacctgaggtcaggagtttgagagcagcctggccaacatggcaaaaccccttctctattaatggtacaaaaattagctgggtgtggtggcgggtacctgtaatcccagttactgaggagactgaggcaggagaatcatttgaacccgggaggcagagattgtggtgagccaagatagcgccactgcactcccagcctgggctacaagagggagactctgaaaaaaaaaaaaaaaaagaaaaaaaat

SEQ ID NO: 354282 - DNA, 565 bp, Homo sapiens
tgtgtatttttgtcaaatgccttttctgtatctactgaaataatcatatgattgtttttagagtgttgatatggttaactgaatgaattatttttaatagrctatttttagagcagctttagtttagcagcaaaattgagtggaagatacagagattccctatatattccctagctcaatacatgcatagcctcccccattaacatcctgcacccaggtagtacatttctgacaatcagttatccctgcactgacatattattatcactcagagtccatagtttacattaggattcacccttggtgttgtacattctacgaatttggacaagtatgtaatgacatatacccactataatagtatcattcagagtagttttactgcccccaaatctccgtgctctgcctatttatccctcactccaccctcaccaaacatctggcaactactgatatttttgctgtctccatggttttgccctctccagaatgtcacctagttggaatcatacagaatctagatttttcaggctggcctatttcacttagtaatacacatacggtt

SEQ ID NO: 354283 - DNA, 565 bp, Homo sapiens
tgtgtatttttgtcaaatgccttttctgtatctactgaaataatcatatgattgtttttagagtgttgatatggttaactgaatgaattatttttaatagactatttttagagcagctttagtttagcagcaaaattgagtggaagatacagagattccctatatattccctagctcaatacatgcatagcctcccccattaacatcctgcacccaggtagtacatttctgacaatcagttatccctgcactgacatattattatcactcagagtccatagtttacattaggattcacccttggtgttgtacattctacgaatttggacaagtatgtaatgacatatacccactataatagtatcattcagagtagttttactgcccccaaatctcygtgctctgcctatttatccctcactccaccctcaccaaacatctggcaactactgatatttttgctgtctccatggttttgccctctccagaatgtcacctagttggaatcatacagaatctagatttttcaggctggcctatttcacttagtaatacacatacggtt

SEQ ID NO: 354284 - DNA, 480 bp, Homo sapiens
tcgtagttgacagtcactgctgcctgattccatgtacaatgtcttccagcaatcctatctcttaccacagtgctgactcacctggcatcctggcaggatcagaggccacatctcaatatgaaagtgacctgccatgcccagtacctgaattatgttagtaatgratgaggaaaaagtttacaatgtgtggaatcagaaactagtctttgggaaattcttcaaattatcaaatattaaaaattggaggtagagaatttgcttttcattgataactagtcacaacacaagtattctgtctgggatatacatgacaatacagtctgtaaaattatgattgtaccaataaaatcattttttatatattcctctattaaggcaagctaagttatttctgacattaaagaagccaaattgctttaatatttttaatcttataaaaatgaataattaagaaagtatacactttctactggaattaat

SEQ ID NO: 354285 - DNA, 480 bp, Homo sapiens
tcgtagttgacagtcactgctgcctgattccatgtacaatgtcttccagcaatcctatctcttaccacagtgctgactcacctggcatcctggcaggatcagaggccacatctcaatatgaaagtgacctgccatgcccagtacctgaattatgttagtaatggatgaggaaaaagtttacaatgtgtggaatcagaaactagtctttgggaaattcttcaaattatcaaatattaaaaattggaggtagagaatttgcttttcattgataactagtcacaacacaagtattctgtctgggatatacatgacaayacagtctgtaaaattatgattgtaccaataaaatcattttttatatattcctctattaaggcaagctaagttatttctgacattaaagaagccaaattgctttaatatttttaatcttataaaaatgaataattaagaaagtatacactttctactggaattaat

SEQ ID NO: 354286 - DNA, 617 bp, Homo sapiens
tggattaccattctattccactctaatctatttaaattattctaaaatttattcttggcatatgcaaaggcaaccaacaagtatgcaacaaaatatagaagaaaaaaagcattatagaaacatactaggctattaataaaaatatatttttgttaatttaaagattcttatagaattttccaattttttttatatttcaagcatgtggagatttatcttaaataaatattcacatttgtacctaattttatatgtataattttgtactctttcctaaagaaggcctccaaaatttataagctcaggccccacaaaacctgaatgtactgtttgcaagttgactttgagaggttaaaagtgacaaagtttagactacaagaagaggagtttgttctctgaaattggagagagggtagagtacacaggaaaatatacagggaagagagtagaagaggtagtggggtctcctagaagtttttcgattgcttgtgttttgttagtgaaatgggagacaaggtggttagcagagaatgaagataagaaaggtgttagaagtttgaggagtgaggaaatgacgggaaatcattgccagagtgggaragtaaatgagataggga

SEQ ID NO: 354287 - DNA, 674 bp, Homo sapiens
tgatatattagtcgtgttgtttcaaatgaatatttgggagaatttgatcaaatatgtttaatagatggaagatattaagcagcaagccaagtcatgatggtttctttaataggccccaccgcctcaccatcaccactagatattgaagattttttaacaattctaatcattttttaagggacacagggagggtgtggccttccttgggaatttttaagagccctggagataagtaatctgggaagctgaggatgggctctgggactcagagcatcacagtagcatagcccgtggcctcaggaatcctgacgggcgggatgtgcccctccagtggcccccagtcattctgtgttaacttcagtctgggtctcccataacatgcgaacacttcacttactcctatctctgtcttagtgttttgaaagcacagggcctccactttcctgaagcaactgttgaatggccaacttcaatagcatcctgttgcctgttttctccaaaagcctggatatttctctttattcaacttgctctcccttatgtgaggaatcccagaagaaagatcccaaaatctggtcacacttctgagagagaagagacagttaaaataatttttwtaaattcatttataatggcaaaataaccagttgaagatagttgtgtggtttttttgg

SEQ ID NO: 354288 - DNA, 674 bp, Homo sapiens
tgatatattagtcgtgttgtttcaaatgaatatttgggagaatttgatcaaatatgtttaatagatggaagatattaagcagcaagccaagtcatgatggtttctttaataggccccaccgcctcaccatcaccactagatattgaagattttttaacaattctaatcattttttaagggacacagggagggtgtggccttccttgggaatttttaagagccctggagataagtaatctgggaagctgaggatgggctctgggactcagagcatcacagtagcatagcccgtggcctcaggaatcctgacgggcgggatgtgcccctccagtggcccccagtcattctgtgttaacttcagtctgggtctcccataacatgcgaacacttcacttactcctatctctgtcttagtgttttgaaagcacagggcctccactttcctgaagcaactgttgaatggccaacttcaatagcatcctgttgcctgttttctccaaaagcctggatatttctctttattcaacttgctctcccttatgtgaggaatcccagaagaaagatcccaaaatctggtcacacttctgagagagaagagacagttaaaataattttttwaaattcatttataatggcaaaataaccagttgaagatagttgtgtggtttttttgg

SEQ ID NO: 354289 - DNA, 582 bp, Homo sapiens
gataatttcttgagaatttgagttgacataacattragaaagcctatttttatttcctgaaacaatttatctctgtatatgtttgctaaaagtgcttttcctgtctctaaataactgttttaagatatagtttcagtctgaatagaaaaactgcaactcaaaccatcatgcttaaaatttttaatttagacttggggactgcctagcccatcctttgacaccctacaatgtagaacctcttaataaataaaccactcttgagtactgcattgggtaacttttgaagatgcatgaattactgaaagctagtagaatgagatttagtaaaaatggatactaatttagtagaaagtgcctgcttatactatagattattgctgctacaaagataatgacacattttctgctagtgttttattaatgtccattctgattaaatgaacattagtcataaactaattcaaagacaaagacatgactgttacttgcataaatgcaaccatggctatggtaatggtaaatgtgaatgcccagtaaatgccatgacattcaaatttcataaattggagccatgggaaatac

SEQ ID NO: 354290 - DNA, 512 bp, Homo sapiens
agatgaggactgccttatcaattaaaaatactttaataacacctyacatcattggccagcattagtaatatgacatagaaatatttcttcaaatgctcattttgccaatgctttcatatatatataggcacttaacaaaattaaaagcaaaattacatctatgaatataaaattttcttcacatgtgaaaagttcagtttttacattcctttattctgtaaaaatatattatttagcatatattttagttgatttggcaacttgcaaataagatctctgctcatgtggacaaatttaaaatagggagaaatgagtaactttctatgtgctgtgattttaaattctaaattaaagaagcctaatttaaattacctaaataaaaaagtacatttatattaaccatattatattaaagcataatactcaaaatggtaaaatcaggactcatataaatacaaaataaatatgtatccaagggggtaaggtgttgatctaaaactggttaatctggt

SEQ ID NO: 354291 - DNA, 512 bp, Homo sapiens
agatgaggactgccttatcaattaaaaatactttaataacaccttacatcattggccagcattagtaatatgacatagaaatatttcttcaaatgctcattttgccaatgcttkcatatatatataggcacttaacaaaattaaaagcaaaattacatctatgaatataaaattttcttcacatgtgaaaagttcagtttttacattcctttattctgtaaaaatatattatttagcatatattttagttgatttggcaacttgcaaataagatctctgctcatgtggacaaatttaaaatagggagaaatgagtaactttctatgtgctgtgattttaaattctaaattaaagaagcctaatttaaattacctaaataaaaaagtacatttatattaaccatattatattaaagcataatactcaaaatggtaaaatcaggactcatataaatacaaaataaatatgtatccaagggggtaaggtgttgatctaaaactggttaatctggt

SEQ ID NO: 354292 - DNA, 512 bp, Homo sapiens
agatgaggactgccttatcaattaaaaatactttaataacaccttacatcattggccagcattagtaatatgacatagaaatatttcttcaaatgctcattttgccaatgctttcatatatatataggcacttaacaaaattaaaagcaaaattacatctatgaatataaaattttcttcacatgtgaaaagttcagtttttayattcctttattctgtaaaaatatattatttagcatatattttagttgatttggcaacttgcaaataagatctctgctcatgtggacaaatttaaaatagggagaaatgagtaactttctatgtgctgtgattttaaattctaaattaaagaagcctaatttaaattacctaaataaaaaagtacatttatattaaccatattatattaaagcataatactcaaaatggtaaaatcaggactcatataaatacaaaataaatatgtatccaagggggtaaggtgttgatctaaaactggttaatctggt

SEQ ID NO: 354293 - DNA, 635 bp, Homo sapiens
ataatttgaagtcaggtaatgtgattcctccagttttgttcttttcgctctggatagcttttgctattctgggtcttttgtggttccatataagctttaggattattttttgtatttctgtgaagaatgtcattggtattttgataagaattgcattgactctgtagattgctttggatagtatggacattttatggattcttccaatccataaatatggaatccattaatataaaatattytttaacttatgattgccttcttcagtttcttgcataatattttatagtgtccattagagagatctttcatttctttggttaagtttattcctaggtattttatcttatttgttgctatcgtaagtgggattatgttttaatttctttttcagattattcactattggcatatagaagtgctactgatttgtgtaggttgattttgtatcttgcaactttattgaatttgtttattagtactaatagttttttggtggagtctttaggttttttcatataaaagattatataacatgcaaacaaggataatttgatttcttcctttccaatttggatgcctttatgtttttcttttgtctgattgctccagctatgacttccagtactatgttg

SEQ ID NO: 354294 - DNA, 635 bp, Homo sapiens
ataatttgaagtcaggtaatgtgattcctccagttttgttcttttcgctctggatagcttttgctattctgggtcttttgtggttccatataagctttaggattattttttgtatttctgtgaagaatgtcattggtattttgataagaattgcattgactctgtagattgctttggatagtatggacattttatggattcttccaatccataaatatggaatccattaatataaaatattctttaacttatgattgccttcttcagtttcttgcataatattttatagtgtccattagagagatctttcatttctttggttaagtttattcctaggtattttatcttatttgttgctatcgtaagtgggattatgttttaatttctttttcagattattcactattggcatatagaagtgctactgatttgtgtaggttgattttgtatcttgcaactttattgaatttgtttattagtactaatagttttttggtggagtctttaggttttttcatataaaagattatataacatgyaaacaaggataatttgatttcttcctttccaatttggatgcctttatgtttttcttttgtctgattgctccagctatgacttccagtactatgttg

SEQ ID NO: 354295 - DNA, 635 bp, Homo sapiens
ataatttgaagtcaggtaatgtgattcctccagttttgttcttttcgctctggatagcttttgctattctgggtcttttgtggttccatataagctttaggattattttttgtatttctgtgaagaatgtcattggtattttgataagaattgcattgactctgtagattgctttggatagtatggacattttatggattcttccaatccataaatatggaatccattaatataaaatattctttaacttatgattgccttcttcagtttcttgcataatattttatagtgtccattagagagatctttcatttctttggttaagtttattcctaggtattttatcttatttgttgctatcgtaagtgggattatgttttaatttctttttcagattattcactattggcatatagaagtgctactgatttgtgtaggttgattttgtatcttgcaactttattgaatttgtttattagtactaatagttttttggtggagtctttaggttttttcatataaaagattatataacatgcaaacaaggataatttgatttcttcctttccaatttggatrcctttatgtttttcttttgtctgattgctccagctatgacttccagtactatgttg

SEQ ID NO: 354296 - DNA, 600 bp, Homo sapiens
gttttttaagggcttttatcatgaagggatgttgaattttttcaaatgtttttccacatcaattgaagttgtcatataattttggtcctttgttgatataatgtatcacattgattaatttgtgtatgttgaaccatcctttcatccttcagataaatcccacttggtcatgatgaatgatctttttaatttgttgctgaattyagtttgctagtattttgtggaggatttttgcatcaatgttaattaaggataaaaacctgtagtttttttttttttaatgtgtctttgtctggttttgatgtcatggtaatacttgcctcacagattgagttaggaagtactccctcttcctctattttttcagaatatcctgcataggattggtaatagttcttctttaaatgtttagtgaaactccgcaataaagtcatagggtcctgggctcttctttgctgggagaattttttttatggctttgatctcattacttgttatttctctattcaggttttggatttcttcatggttccatcttcgtaggttatatgtgtccaggaatttattcatttctcccaagttttccaatgtttgacatat

SEQ ID NO: 354297 - DNA, 600 bp, Homo sapiens
gttttttaagggcttttatcatgaagggatgttgaattttttcaaatgtttttccacatcaattgaagttgtcatataattttggtcctttgttgatataatgtatcacattgattaatttgtgtatgttgaaccatcctttcatccttcagataaatcccacttggtcatgatgaatgatctttttaatttgttgctgaattcagtttgctagtattttgtggaggatttttgcatcaatgttaatkaaggataaaaacctgtagtttttttttttttaatgtgtctttgtctggttttgatgtcatggtaatacttgcctcacagattgagttaggaagtactccctcttcctctattttttcagaatatcctgcataggattggtaatagttcttctttaaatgtttagtgaaactccgcaataaagtcatagggtcctgggctcttctttgctgggagaattttttttatggctttgatctcattacttgttatttctctattcaggttttggatttcttcatggttccatcttcgtaggttatatgtgtccaggaatttattcatttctcccaagttttccaatgtttgacatat

SEQ ID NO: 354298 - DNA, 600 bp, Homo sapiens
gttttttaagggcttttatcatgaagggatgttgaattttttcaaatgtttttccacatcaattgaagttgtcatataattttggtcctttgttgatataatgtatcacattgattaatttgtgtatgttgaaccatcctttcatccttcagataaatcccacttggtcatgatgaatgatctttttaatttgttgctgaattcagtttgctagtattttgtggaggatttttgcatcaatgttaattaaggataaaaacctgtagtttttttttttttaatgtgtctttgtctggttttgatgtcatggtaatacttgcctcacagawtgagttaggaagtactccctcttcctctattttttcagaatatcctgcataggattggtaatagttcttctttaaatgtttagtgaaactccgcaataaagtcatagggtcctgggctcttctttgctgggagaattttttttatggctttgatctcattacttgttatttctctattcaggttttggatttcttcatggttccatcttcgtaggttatatgtgtccaggaatttattcatttctcccaagttttccaatgtttgacatat

SEQ ID NO: 354299 - DNA, 600 bp, Homo sapiens
gttttttaagggcttttatcatgaagggatgttgaattttttcaaatgtttttccacatcaattgaagttgtcatataattttggtcctttgttgatataatgtatcacattgattaatttgtgtatgttgaaccatcctttcatccttcagataaatcccacttggtcatgatgaatgatctttttaatttgttgctgaattcagtttgctagtattttgtggaggatttttgcatcaatgttaattaaggataaaaacctgtagtttttttttttttaatgtgtctttgtctggttttgatgtcatggtaatacttgcctcacagattgagttaggaagtactccctcttcctctattttttcagaatatcctgcataggattggtaatagttcttctttaaatgtttagtgaaactccgcaataaagtcatagggtcctgggctcttctttgctgggagaatttttwttatggctttgatctcattacttgttatttctctattcaggttttggatttcttcatggttccatcttcgtaggttatatgtgtccaggaatttattcatttctcccaagttttccaatgtttgacatat

SEQ ID NO: 354300 - DNA, 497 bp, Homo sapiens
ttaacatccttttctttcatattgaagaactccatttagcatttcttgtaggactggtattgatgaaatccttcagcttttgtttgtgtgggaaagtatttatccttcatgtttgaagggtatttacactggatatactattgtcggataaaagttctttttcctccaacactttaaatatgtgatkccactctctcctttcctgtaagattttcacaaaaaagtctgtgccaggaatattagaactcgattttatgttgtttcttttctcctgctgcttttaggattctttctttatccttgacctttggaagtttgattattaaatgtcatgagatagtcttctttgagttaaatctgcttggggttctataagcttcttgaacttgaatattgatatctttctctaggtttaggaagttctgttattatctctttgaataaactttccagccttatctctttctctctacctcctcttaaaggccaataactct

SEQ ID NO: 354301 - DNA, 487 bp, Homo sapiens
cataattataggttagaatagtctgtgtttttctgtgtgcttactattaccagtaaatttttaaccttcagatgatttcttattgctcattaacatccttttctttcatattgaagaactccatttagcatttcttgtaggactggtattgatgaaatccttcagcttttgtttgtgtgggaaagtatttatccttcatgtttgaagggtatttacactggatatactattgtcggataaaagttctttttcctccaacactttaaatatgtgattccactctctcctttcctgtaagattttcacaaaaaagtctgtgccaggaatattrgaactcgattttatgttgtttcttttctcctgctgcttttaggattctttctttatccttgacctttggaagtttgattattaaatgtcatgagatagtcttctttgagttaaatctgcttggggttctataagcttcttgaacttgaatattgat

SEQ ID NO: 354302 - DNA, 487 bp, Homo sapiens
cataattataggttagaatagtctgtgtttttctgtgtgcttactattaccagtaaatttttaaccttcagatgatttcttattgctcattaacatccttttctttcatattgaagaactccatttagcatttcttgtaggactggtattgatgaaatccttcagcttttgtttgtgtgggaaagtatttatccttcatgtttgaagggtatttacactggatatactattgtcggataaaagttctttttcctccaacactttaaatatgtgattccactctctcctttcctgtaagattttcacaaaaaagtctgtgccaggaatattagaactcgrttttatgttgtttcttttctcctgctgcttttaggattctttctttatccttgacctttggaagtttgattattaaatgtcatgagatagtcttctttgagttaaatctgcttggggttctataagcttcttgaacttgaatattgat

SEQ ID NO: 354303 - DNA, 570 bp, Homo sapiens
atacaagacatttactgaagtcatggattaaggcgtagcaaagtacagacaataatttaaaattgaatattagaaattttcttaaagaccagtacctatttatttctcatggatatcttatttctcaaagctctacctgctctcttgttacctactcttcactatctttttgcaatcattccccatattttcttattctgaatgttgtctctacctataattcattatttggacatgggatatgtctatttggatatatgatattatataaaaacactasttaatatatttacttatctaaaataattagagatcaaaaatattgttaatttagtttgtgtaaatgcagacattttaaatttgaagcaactttaacaaattctaacaattcctgggaaagtgtaatccatcactcaattaattttaaataattatttcgttttttttcctggaatttaagaatatgtgtgtatatatatatatgtgtgtgtgtgtgtgtataattttatatatctgtttaaaatttatattttccttagttatttccaagggttaaattatgaagcataa

SEQ ID NO: 354304 - DNA, 584 bp, Homo sapiens
tgaactctgcaaagtgcttgattcagctgctcttttgcccaaatggcttttattgctttctgcctcattctgtagtgttgagaagagggacagaaagacrtaacatgtggttatatacggaacacctgggcttttaagagaacaaattttccatctgacaatcaatgatctctagtaagacttaaatgtagatttaacatgaagtaagtaacaagactcacactgtcttcatgacttctggaatccacaggtaggagcagataggaagaggtttccatcctcacagtgtttgactgtgaagtcctgatagtagagaccctatgttattgattattattgtgttgtccacttggtccatacatctccatcaagaaggcgctaactgaccaggaattcctggggtctgcatgaatcccaagatacttatccgtgagagaactttcacggataagcttttccagctgcaagtgacagaatgacctaccaggctgctaagtagcaaggaatttgttatctccatagcaagaaactcagaggcagggaggctccagggtgagctaactccatagcacagggaggccagg

SEQ ID NO: 354305 - DNA, 584 bp, Homo sapiens
tgaactctgcaaagtgcttgattcagctgctcttttgcccaaatggcttttattgctttctgcctcattctgtagtgttgagaagagggacagaaagacgtaacatgtggttatatacggaacacctgggcttttaagagaacaaattttccatctgacaatcaatgatctctagtaagacttaaatgtagatttaacatgaagtaagtaacaagactcacactgtcttcatgacttctggaatccacaggtaggagcagataggaagaggtttccatcctcacagtgtttgactgtgaagtcctgatagtagagaccctatgttattgattattattgtgttgtccacttggtccatacatctccatcaagaaggcgctaactgaccaggaattcctggggtctgcatgaatcccaagatacttatccgtgagagarctttcacggataagcttttccagctgcaagtgacagaatgacctaccaggctgctaagtagcaaggaatttgttatctccatagcaagaaactcagaggcagggaggctccagggtgagctaactccatagcacagggaggccagg

SEQ ID NO: 354306 - DNA, 509 bp, Homo sapiens
tttcacggataagcttttccagctgcaagtgacagaatgacctaccaggctgctaagtagcaaggaatttgttatctccatagcaagaaactcagaggcagggaggctccagggtgagctaactccatagyacagggaggccaggcttccaggacttcttccccatggggacaggtcttcattcactctcaggcaacaccattcagaggcaggaaaggaagtttcctccattatctttttcccagaagccccacagaagatgaccttgacatatcatgggacagaattcaatcacattctcaccatagaacacatcactggaaaatgagaggatttaaccattattatctcaaaccagtcatgttttatttcctggggctgggggaagtgctgctggggagctgggagagccaggattgccatttcagcctttgtcataggaaatgaggtctgccaaggagagtgaaaatggctgttgggtggacaccagcaagatggccaagagtcct

SEQ ID NO: 354307 - DNA, 580 bp, Homo sapiens
gtttccattgctactgcaacaagctaccacaactttagtggcttgaacaatataaatrtattatctcccagctccataggttagaagcctgatatgttgtcatcagagctgcatgccctactggaggctccttgggagaatccatttcctttccttttccagcttctagaggcagcctgcatgcctttgttcatggcccttccttcattttcaaaactagcaacattgcatctctctgtgcctttaaaaacagtcatatctcctttgagtctctctcttctggttccctcttttacctttaaggactttggtgattacattgggcccaccaggatatttcaggataatctattttaagaccagctgattatcaaccttaattccacttacaacctgaattcccttttgctgtggaacctcatatattcacaggttctggtgcttaggagtggacatctttgggaccgagggttattctgccttcctaccatgtcaccagagttgtgctaatacacagagagcttcaggggatgagatctgccattcattgagcaccttctgtgtggcagacagtgttagg

SEQ ID NO: 354308 - DNA, 620 bp, Homo sapiens
taaattttgcaataaagcaagtcacataattatttggtttcccagtgcatataaaacttttgtttacaatatactgtagcctatcaagtgtgtgatagcattacatctagaaaacaatgtaaaataccttattgctaaaaaatgctaacaatcatctgagcctttaatgagtcatgatctttttgctggtggagggtcttgccttgatgttgatggctgctgactgatggttggtgaaggctgcagtagctgtagcaatttcttaaaataagacaacaatgaactgtaccttattgattgactcttccttgcacaaaagatttctctgaagcatgtgatgctgtttgataccattttacccacagaacttccttcaaaattggagtcaatcctcttcagctgtgttgctgctttaactaagttacataatattctaaatcctttgctatcatttcaacaatattcacagtttcatcaggagtagattccacctcaagaaacgactytctttgctcatctataaaaagcaactctttatccattaaagtttgatcatgagatggcagcaattcagtcacaccttcaggctccacttctaattctagttctcttgcaatttc

SEQ ID NO: 354309 - DNA, 577 bp, Homo sapiens
aggagcggggattgagattgacagagtatatgttattttgagcactaggaaaattgctgctaggtgtatgacaagtctgttaggatatctaaaaatagtcagacattgttacataaaaaacaaaygaaaatacaactactgtgttaattgttgggagggtattaaaaaaataaatgtaatcaaagtatactacctgactcagcagtgtacaatatttaatatttctagtaatattatcactgactattcatttaatcaaaaactgtatcaggaggagaagtaaaagtggcagggtaagagaaatgaattatcaattaccctaataggaaagaataaacagaaacggcctaaagtgctaaactgattaatctataaccaacagagtaaacctgttagttagaatgtggcctgcataccagaggaacacctaaaacagttcaaagaggctgcctctcaagggcaggactgggatatgggtggaaaagggtgggcaaggactgttatttttctgttcaaagccttttagtattgagggttttcttttccagctttattcaggtatagctgatgtatgata

SEQ ID NO: 354310 - DNA, 554 bp, Homo sapiens
ctgctttagtaaatgaacggtcaagcagacaaaaattaataggtaaatataagccttgattacagactacaattaacaagtctgacttaaagggcatatacagaacccacacccaacaattagaggacaatagctatgaaggatgttggaccagtgggaagttcccctgtcctgatggggcaagtgactgagcagagacagggttgccatggttgacatatrttattgcttttatttgaatgatgctctgagattggatcctttgtcacctcacaggaacttggagtgcaaacagcacagtacttttctcagtttcctccatcgtgaaggggagagagtgcccagacagtgtgcaaatcctcctctgagcctgaggtaggagaaggggagctgcgggcaactagtaaactgtggtaaactctttgtttactgtcccaaaaaagcctagttcctaaattttttgactatgtggtaatcagatcctttggtggaaagaattaaaacacactatgtttatttaattcttctaactcagaagccatgattaactggtg

SEQ ID NO: 354311 - DNA, 554 bp, Homo sapiens
ctgctttagtaaatgaacggtcaagcagacaaaaattaataggtaaatataagccttgattacagactacaattaacaagtctgacttaaagggcatatacagaacccacacccaacaattagaggacaatagctatgaaggatgttggaccagtgggaagttcccctgtcctgatggggcaagtgactgagcagagacagggttgccatggttgacatatattattgcttttatttgaatgatgctctgagattggatcctttgtcacctcacaggaacttggagtgcaaacagcacagtacttttctcagtttcctccatcgtgaaggggagagagtgcccagacagtgtgcaaatcctcctctgagcctgaggtaggagaaggggagctgcgggcaactagtaaactgtggtaaactctttgtttactgtcccaaaaaagcctagttcctaaattttttgactatstggtaatcagatcctttggtggaaagaattaaaacacactatgtttatttaattcttctaactcagaagccatgattaactggtg

SEQ ID NO: 354312 - DNA, 430 bp, Homo sapiens
ccaggcaggtaaatgaaaatgcctgtaagaygatagggagtatttgggaagctgctgctactcaactccagcagactattatttggaaatgggggcatagaattgtcaggtatatccatttttcctaagaaaacagaacctagattgttatgtgtaatttcccaaattttagattttggcactttaatctatacatttgaaacagggccccccccttccctgacacacacacacacacacacacacacacacacacacacacacagaaaaatcaagtctcaggtcagatccagtgtgggctaccaacttccaagttcagttgcagatgaatagacttaaagaattttagacttggaagggacttgagagaaaacctttaagttaattattttcgaagtgtatgtgtgtctgtgtgtgcacacatgcacac

SEQ ID NO: 354313 - DNA, 438 bp, Homo sapiens
acatcaaactgtcattaaaatatgtggctctttcctgcagtgtcatgttactactgcactgaaaattttatttttccagtaacactggaggtagtaattagaaggtctattatttctggccaaccataatggatacaaccataatggacacaacccaaaggttaattgctgtgctacaaacactgcagcaattagctttcagagtagggagtgacagggaatgtatttcaagtgaaagttagtttttaaatagaaactatcctctacgtcatgcgcataaacttccctaaattaagtcagtgcatgatcaaattcacaatgttacatggagggagtgaagccatgrtagagctttcaagggttagggaaagaagtattagggagagaacttcatgagggaaggggttcataccactggaagttctaactgcttcctcc

SEQ ID NO: 354314 - DNA, 596 bp, Homo sapiens
ctaatgaaataattgatgtaggcaatgattatcaataactgctaaaagcattaggtagaaagctgatgagaaactttataaaggatagatcaggtggcctaagccaatcttaacatcacaaaaaacaagatataacctgatgtgtggttcctgatgtagaaccacacgatggaaagaatacctcatcacctatgaagtttcctactgaaaaagcaaaccagaattccgtcaagcctattgttctatcagtttacagagaatacagaaacttttttcaattaattaattaatttttaaattgacaaaattttgtatgtgktgtacaacatgatattttgatatatgtatatattcttgaatggctaaatcaagctaattaacatattcatgatctcagatatctttcttcgtggtgagatcatttaaaatctactttttaaacattcaaatacaattgtccctccctccctgcaggttccatttttgcagtctcagttacctgtggtcaaccaaagtccaaaaatattaaatggaaaattccagaaataaacaattcttaagttttaaattgtgtgccattctgagtagcatgatga

SEQ ID NO: 354315 - DNA, 614 bp, Homo sapiens
aacaccataacagcaacccattcatcagctgcccagactcacaaccaagcagacatgcagcgactttccaaaaaccctcatttctggcattacagcctgtggcaataacagagttaaggaaaggtaagtgaaactcagagagacacagtgagataattattcctcacrcctgttagaagaacattccaccgtctcagaagaagccctgtctgaatctgattcagctgagaaaacaactcaggccatggtagctgcacccaactctctaaatcaacagtgacctgtgctgaagggattaaggcatcccaacattcctcagagcccaaggcaaggagaatcccttatgaagatgaaattgatcttcaagcaccctctaccttactctgcgtgatgccatattcttcctgaatcccacccaactcaagagcatgatttgcataataaaatctctaatactttgatgaacaaatgttatccaagatactttaaaaactgccttcacggtgagaaatgaacttaattccattaattcattgtctgttcgttattctagaaacattatttgagtgttcagcatgtgctgagctatttagagatgtttctgagggctagga

SEQ ID NO: 354316 - DNA, 614 bp, Homo sapiens
aacaccataacagcaacccattcatcagctgcccagactcacaaccaagcagacatgcagcgactttccaaaaaccctcatttctggcattacagcctgtggcaataacagagttaaggaaaggtaagtgaaactcagagagacacagtgagataattattcctcacgcctgttagaagaacatyccaccgtctcagaagaagccctgtctgaatctgattcagctgagaaaacaactcaggccatggtagctgcacccaactctctaaatcaacagtgacctgtgctgaagggattaaggcatcccaacattcctcagagcccaaggcaaggagaatcccttatgaagatgaaattgatcttcaagcaccctctaccttactctgcgtgatgccatattcttcctgaatcccacccaactcaagagcatgatttgcataataaaatctctaatactttgatgaacaaatgttatccaagatactttaaaaactgccttcacggtgagaaatgaacttaattccattaattcattgtctgttcgttattctagaaacattatttgagtgttcagcatgtgctgagctatttagagatgtttctgagggctagga

SEQ ID NO: 354317 - DNA, 623 bp, Homo sapiens
caaaccgtgaggtcattgtaacaaataagaatcctgtgccttgaaaagattgggagagctgagtaaaagttaccatattccctcccctggaggtaactaaaatttaaagcttagtgagaatcatagtataataaaaggtcagattctcagctgtcagtycattcatgttgttataacaaaatatctgagggtgggtcatttataaattaaacacaaatttgtttcacacagttctagaggctggaaagtccaagaccaaggggccagcaggttcagtgtttggggaagacccattcctcatagacggtgccatctagtgccctcacatggcagaagagacaaagggcaaaaagggcacaaatgctgtgtcctcacatggtggaagagcaaaaaatggcctacgctagtttccttcggcccatttatacagtagtgattcataagactctgcccttatgacttaatcgctttcccaaatgccctaccttttaataccaccacagctggggagtaagtttcaacatgaattttggaggggagacaaacattcaaatcataccacctgggcaaggaattttaagcatcattgaaaaggaggtgcatttttgaggctggagaccctt

SEQ ID NO: 354318 - DNA, 563 bp, Homo sapiens
aaactaggatttagcacgttaagtgccaaacctgtgaattaaactcatgaattaaagtgcaaatctatgaattgagcaaatatcaaacctggtygcatcagtctgttccttttactcacctttagtgacaccaccttcttcaactctcttagtaacccagtgctttcatgatctcacttataaactcctcctttcaaatttcattctcaaaaaactcatctaataactattaatattggttctgagattctaccattcaataactaaaacagcgttattaattacagtttcaaaaatcaagaaataaaaggtaggctcctttaaggaaatggtcagtccctggcagaaatccctggaaatagcagttactattagtactggcagagatgagaaagaagagggcaagtgagaaggcaattcacatctctatcgtgaaaaacagcctgagccaacagtaagataaatgaaaaatgagaatcaaaatacatagagtattttctataatccttcactggaaataatgctagcattttatttctaactaagttctaattcttatttaa

SEQ ID NO: 354319 - DNA, 584 bp, Homo sapiens
tcagtgctcttgtgagtaagagcatgtgtgttggtgctgggcagatgtgggtacaaatcctgtttctagcatctactggccacaggactttggagaaattacccaaactcactgagctttagtttccttattcataaaatgaagtgtatcaatttgaaacgtgtttggctccaagaatgaaaaaatctatcagaattacttagggggttatttttctgatataataagtccagggtcaggccatccatggccaatgcagctattcatggatgttttctgggtccaggctctttctgtatttcwgctttatatatatatatatatatatatatataaagagagagaaggttaagtgagataatgtaagtaaagtgcttatataatgcctagcactagttagtgctcaataaacatcagttgttaatatgtataggcagccttggattcaatgtgatacaagtctgtaatttagagtacctggaaaggtgaaaaactgtatattcttcagccaataacaagtatctatcttttttattggggaggcttttgatagaagcagaccagactgtttgatgctactctct

SEQ ID NO: 354320 - DNA, 609 bp, Homo sapiens
tgtggactcatgtctggaataggaaagcttataaatactaagtagatgttatttaaaaggatagtacagattatattattgttatctttcagtggtttttttcaaactgatgctagatgtccttttgaactgaacaaatgatgcactgagactttcatkaatcagaaccattttgatggttcaatctgattcaatatgaagtatatagtgagaacactgtgaagcaataattacatcattcattcacttttttgctgatgataatatgttttgtagtgttcatgttttaatagtgttcctaaattttttaaatctaatttcctttgtatgtggtaactacatacattttaaggtttttgttttttcttttagagatggggtcttactatgttgcccaggctggtctcaaactcctaggctcaagtgatccgtcctgcctcagcatcccaaagtgctaggattacaggcgcgagctactgcacctggctgaccattttaagtttgaatgctaacagtgaccttataaattcatatcacctagactcaagagagatgcatccctgctattaaatgcctgtaattataagatggtagcaactagctttgttc

SEQ ID NO: 354321 - DNA, 585 bp, Homo sapiens
tgcttgtctagtaagtgattaggatcctccactttattgtaaggaccttagcatcataggacacattatgttgagcattctatgtcctcaacaattatttattaaagtacttatgggacaagggcattagcaaaatccatcatctaaatgcctaattaggaatctattaattcatttgttcacttatcaagcattcactgagtgtttttttaagtcctggagatttatagagaattttagacagagttccaaccttgaacgatctcataacataatcagacagctaaaatataatgtkataaatacataataggaaatcagcagataaataaacatgattacaaatactttattttattgattatagtgaaatgcctcaaaaaattccattttagtctttgtaaagtcctacagtttagatacacaaacccatgcatgtctgcttaggcagaaggagcagggaattactatttgttgaatgcctattaggtgctgtattggttcttgtactgctataaagaatacctgaggctgggcaatttataaagaaaagaggtttaattggctcatagttccacaggctgt

SEQ ID NO: 354322 - DNA, 585 bp, Homo sapiens
tgcttgtctagtaagtgattaggatcctccactttattgtaaggaccttagcatcataggacacattatgttgagcattctatgtcctcaacaattatttattaaagtacttatgggacaagggcattagcaaaatccatcatctaaatgcctaattaggaatctattaattcatttgttcacttatcaagcattcactgagtgtttttttaagtcctggagatttatagagaattttagacagagttccaaccttgaacgatctcataacataatcagacagctaaaatataatgtgataaatacataataggaaatcagcagataaataaacatgattacaaatactttattttattgattatagtgaaatgcctcaaaaaattccattttagtctttgtaaagtcctacagtttagatacacaaacccatgcatgtctgcttaggcagaaggagcagggaattactatttgttgaatgcctattaggtgctgtattrgttcttgtactgctataaagaatacctgaggctgggcaatttataaagaaaagaggtttaattggctcatagttccacaggctgt

SEQ ID NO: 354323 - DNA, 423 bp, Homo sapiens
gaacattctctggaaaaaccacatatgctaatattgaaataatttttaaaaataatgcaataccttaaactttaatcttttagaatggtcttttaacttcagactgtgctgtgtacrtgaaatgcatggtggacattcccttgtcttctgccttattttcctgcaagattaatgccagccagagactgatgtgccagctaatattccatggcaccaatttccagttagtgggaacatttgtgggtgtctgctgtgcagggtcacactgctgctcaggctgggagcttctgttggagaagcagctcgcagccaactggcaaatttaaagagttgacagtgttttctgtggaagttcaaaaaacccaacctgctgctgtctctagggcttgtggactttagggcgttaagaaactggaaaggctt

SEQ ID NO: 354324 - DNA, 615 bp, Homo sapiens
cactaggcctgccctttccttccttctctatgtatttagtcttgcaacttcctccgatggaacattttaccttcacccttactcattgtacaaatctaacccaaaagccacccctctgcaaagcctccctaggccctccccaagtggaacgaatctctgttttccccatacgccttttcttctcattgctatttccactgctgtatggtcagccttgtgcacatgtgcacaggtctgcccttccccagatgagtgtttcttggagtcaggaattgggtcttgctcattacctgtcccctaaaaaggcttgccattactgttgtctgagactgacaagtaggaayacactaactttggtatctgtcttgcatttgaagaatgtgataggctattgcttggtttcaaaactgtgggatttggggcatggctccatggacatccagctgtgtggttgcatagctgcataattgtgtgactgtttagctgcatgataatatggaagcatagcagtctggccacagtttgcatggtttcatggctgggtggctccacaactttgacagaaaaccttccctttgcatttctgtgttacatcatgatttctaccagcgttct

SEQ ID NO: 354325 - DNA, 461 bp, Homo sapiens
gattcttagagtcattcacttctgtaacctttgttcctgccagtgtctgttcttagaatgccgcagacccgcctgctgattgttttgttctagagagagaaccaagagggaagagagacagataaagagaaggagaagctaaatttccatcattgaaaaagagccaaagagccctgtttcctcacacttttttttaagcctcaggaatattttctttgtttccagggacctccttgaatccaggcttgaagtggagcagatgtgtgggagggtatgggagacaacgggcctgagggcagaaaccgttttktttttttgtttttggaatggacagtgacactggcaaggagattgtcccacagtcagcatgctggggaaagaaagatagtgattttactgttgtcttgaaagatctgattttatttttttgaaaacctccagaatgcttaaataaatatatt

SEQ ID NO: 354326 - DNA, 385 bp, Homo sapiens
gggactgttgagaagacatgattgtgttttgaaatgtgagaagaacatgagatttgggaggggctgggggcagaaagatatgatttagctctgtgtccccacccaaatcgcatgtcaaattgtaatctccagtgttggaggaggggcctggtgggaggtgactggatcattggggcggatttcctctttgctgttctcacgatagtgagtgagatctaatgagatctggttgtttaaaagtatmtagcacctccccattcactctcttcctcctgctccagccatgtagggcatgtctgtttccccttcaccttctgccatgactgtaagtttcctgagccctctccagcaatgcttcctgtacagcctgtgaaaccatgagcca

SEQ ID NO: 354327 - DNA, 432 bp, Homo sapiens
gaccatgttatgaactagagcacagtgcttatgtacaatatattttgcctttaacctttcagactgcactcctttctaaaggtacttagcttaggtcagcacattttccctcacatcttcagtgaggtggttctataattcataatatatgtagattgtatttttcacagcctgctttccatcctgggatccctgaactcgaaatgatgtcttttaattttcatacattaaggtttacactttgtgctgtgaggttctataagattttcacaaatgcttaggatgacatatccaccactaaagcatcatacaaaatagtttcactgccctccactgatcattttactgctgctatagcattatcttttctagaatgctatataatkggaatcatacagaaagtagcacctttcagtttggcttttttaatgt

SEQ ID NO: 354328 - DNA, 586 bp, Homo sapiens
aaataattaattctgagtagtgaaatcataggtttttttttgttgtttgcttgtttcttttgcctcttatacgtttctgttttctccaagaagtgttaattacctttattataaaattgttatatgtaaaggtttaacactttgctaatagtattttttagacttgcttctgaattacagaattggctctttagtgattgatctgggtaatcacagtacaaatcaggctctgcctttatattttcttgcctcactcctacacatatttcatgcactgctacctttctgttgtgctattttgtgacacaatattttgagagaaaacaattacttacacgcagatactaagtgacattagtttatctccaactaggcaatgtaaytgcaacaaaacccccagctaaccaaaacccaataataacttctgctcacataaaatgaaatgtcaatttcactaatcacatgctgtctggaatgtccgttctccatggtaactacctggctttcctggataagcatttctgattcaagtacacaactggcaggcctgccccagcttaactgacctagtttggtgaaagttctg

SEQ ID NO: 354329 - DNA, 537 bp, Homo sapiens
tcaactgaatgatatccaagtctctattttaggaatccgaggggatgggaggtctaaagaataaatggaagttttagatgacagaacaaattctgaagaaaagttgtatcttagacatagtaattctacartttgttgtgcagtatattgaggtggatatagttgagctggctattgaaaataaagtctgaatgtggtgacacggttaaggctacattttaaaatgcagaattcaaatatcaatttttactgtctagggtttgtcatgatataatttctgtgaatatttatttttaaaataaagagattgtgtctacaaatcaaataaaggttttttattccaactctaatatttactttcctttatcgcttcaatatatatgtccttatgtccttatggttctgtgttctctagttctctcattctctctgccttaaatctactttcttccattttaaaagtatcaatttattactcagccttccaaggtttgctaaattgcctctctttggtacccctgatcaaaatcagttaat

SEQ ID NO: 354330 - DNA, 610 bp, Homo sapiens
ggatgggaggtctaaagaataaatggaagttttagatgacagaacaaattctgaagaaaagttgtatcttagacatagtaattctacaatttgttgtgcagtatattgaggtggatatagttgagctggctattgaaaataaagtctgaatgtggtgacacggttaaggctacattttaaaatgcagaattcaaatatcaatttttactgtctagggtttgtcatgatataatttctgtgaatatttatttttaaaataaagagattgtgtctacaaatcaaataarggttttttattccaactctaatatttactttcctttatcgcttcaatatatatgtccttatgtccttatggttctgtgttctctagttctctcattctctctgccttaaatctactttcttccattttaaaagtatcaatttattactcagccttccaaggtttgctaaattgcctctctttggtacccctgatcaaaatcagttaatcattcttctctaaccagagcaattttcttcaaactgtgtattgaacaaatggaattaacctgacctcgttgtattgttgcatgagagtcttaacaatttgcaaaatacgaattag

SEQ ID NO: 354331 - DNA, 537 bp, Homo sapiens
tcaactgaatgatatccaagtctctattttaggaatccgaggggatgggaggtctaaagaataaatggaagttttagatgacagaacaaattctgaagaaaagttgtatcttagacatagtaattctacaatttgttgtgcagtatattgaggtggatatagttgagctggctattgaaaataaagtctgaatgtggtgacacggttaaggctacattttaaaatgcagaattcaaatatcaatttttactgtctagggtttgtcatgatataatttctgtgaatatttatttttaaaataaagagattgtgtctacaaatcaaataaaggttttttattccaactctaatatttactttcctttatcgcttcaatatatatgtccttatgtccttatggttctgtgttctctagttctctcattctctctgccttaaatctactttcttccattttaaaagkatcaatttattactcagccttccaaggtttgctaaattgcctctctttggtacccctgatcaaaatcagttaat

SEQ ID NO: 354332 - DNA, 610 bp, Homo sapiens
ggatgggaggtctaaagaataaatggaagttttagatgacagaacaaattctgaagaaaagttgtatcttagacatagtaattctacaatttgttgtgcagtatattgaggtggatatagttgagctggctattgaaaataaagtctgaatgtggtgacacggttaaggctacattttaaaatgcagaattcaaatatcaatttttactgtctagggtttgtcatgatataatttctgtgaatatttatttttaaaataaagagattgtgtctacaaatcaaataaaggttttttattccaactctaatatttactttcctttatcgcttcaatatatatgtccttatgtccttatggttctgtgttctctagttctctcattctctctgccttaaatctactttcttccattttaaaagtatcaatttattactcagccttcmaaggtttgctaaattgcctctctttggtacccctgatcaaaatcagttaatcattcttctctaaccagagcaattttcttcaaactgtgtattgaacaaatggaattaacctgacctcgttgtattgttgcatgagagtcttaacaatttgcaaaatacgaattag

SEQ ID NO: 354333 - DNA, 636 bp, Homo sapiens
tggatagaaaaaggaaagtgacatacagaaaatgaaagtgaggtacagaaacagctggattggttatagtttggagcttgccttatttgaacacaattcgaaatattggctacattttattggccaaaacctggagattggcacaagtttaggctacagtctgtctacacctccacttgctatagttcacgttgtacagaaaaccttcaggccaaacttaaaatttggaaggagacagctttaggctaaacttgatttgaaactcatctgtctgcctatttaaatagatttctgactgggattttaagaaccacgaatgtggtcttatccatttctatatatttattataaatgataagaagaatgctatcctggtagttatgatggaatttattccctataaatataattaatataaatagttacatggcccggacatggtggtttataccatttatctcagcactttgggagactgagtggaaggatcacttaaggccaaaartttgagatcagcctggacaacacagcaagactccatctctgcaataaatttaaaaattagccaggcatggtagcatgggcttttagtcccagctcctagtatggctgaacttaggaggatagcttgaaccc

SEQ ID NO: 354334 - DNA, 636 bp, Homo sapiens
tggatagaaaaaggaaagtgacatacagaaaatgaaagtgaggtacagaaacagctggattggttatagtttggagcttgccttatttgaacacaattcgaaatattggctacattttattggccaaaacctggagattggcacaagtttaggctacagtctgtctacacctccacttgctatagttcacgttgtacagaaaaccttcaggccaaacttaaaatttggaaggagacagctttaggctaaacttgatttgaaactcatctgtctgcctatttaaatagatttctgactgggattttaagaaccacgaatgtggtcttatccatttctatatatttattataaatgataagaagaatgctatcctggtagttatgatggaatttattccctataaatataattaatataaatagttacatggcccggacatggtggtttataccatttatctcagcactttgggagactgagtggaaggatcacttaaggccaaaaatttgagatcagcytggacaacacagcaagactccatctctgcaataaatttaaaaattagccaggcatggtagcatgggcttttagtcccagctcctagtatggctgaacttaggaggatagcttgaaccc

SEQ ID NO: 354335 - DNA, 563 bp, Homo sapiens
tatgggcacatttacactgaaacctgattttactttagatttttgcttccttagctctattggtttgaaagtttcccgtcaagaaaaagaaaggtcttgttttcattggcagcatgtcaaattgcatggtccattcaacttcagttttgcaaaattgcaaaataaggttcagtgtatacatagtatacaaagaattaataatattacctgtaacttacaaagcatccctggagtatatctaggattaacttcattgactgcaataagtggaaaggactttttctgttcagccatgtcttattgatgctaaccatgtgacaggcattgggctaagctacacagagggktgctctgctttttaaaggaacttacagtctaataggaaacattttattcaatcttagaagcaatacactaatcacttattttgtgaaacacatttattcagaaaatttatatcttatgtcaaataaaatagaaatttaatccagctatttaaagaaatcatttgacctaagattttattttcataatgtcattggttagaataatctcctacggaa

SEQ ID NO: 354336 - DNA, 584 bp, Homo sapiens
tccttactggggtagctgtgaggtagtccatacaagatacctggaaaagcaattagaattgtataactattgtttttctgacacaaatgtcagatatcagaatacttatggacatctaagctaatgtggaaatataaagaaaattcttcattcatccctaactctcccaattttgttaggccaaaattgtattagttttgtaastgatgttgatatgggtggtatgagacaaaacaaaatgaagtaagcctgtttgtgttattagcataatggatctaacagcgtgtggaaaagagaggaggactctaacaagctgctatggtcttagagtctacagtttataacagggtttctctacccatatctatgagtggaattcagagtgctacaaatcacctaacattttctgtagaattgtacgtaaatgggtacaaatatacacttagaaacaagacctcctggttttccaatagatcagtagggtgagtatagttaacataaattgattgtacacttcaaaacagctaaaagaaaagagtttgaatgtttctagcataaagataaataaggtggtggatatccca

SEQ ID NO: 354337 - DNA, 584 bp, Homo sapiens
tccttactggggtagctgtgaggtagtccatacaagatacctggaaaagcaattagaattgtataactattgtttttctgacacaaatgtcagatatcagaatacttatggacatctaagctaatgtggaaatataaagaaaattcttcattcatccctaactctcccaattttgttaggccaaaattgtattagttttgtaagtgatgttgatatgggtggtatgagacaaaacaaaatgaagtaagcctgtttgtgttattagcataatggatytaacagcgtgtggaaaagagaggaggactctaacaagctgctatggtcttagagtctacagtttataacagggtttctctacccatatctatgagtggaattcagagtgctacaaatcacctaacattttctgtagaattgtacgtaaatgggtacaaatatacacttagaaacaagacctcctggttttccaatagatcagtagggtgagtatagttaacataaattgattgtacacttcaaaacagctaaaagaaaagagtttgaatgtttctagcataaagataaataaggtggtggatatccca

SEQ ID NO: 354338 - DNA, 353 bp, Homo sapiens
tgacccctatttgattgtatgactgtatcaaattattacattaccctaaaatatgcacatctaatatcaccaataaaaaacaaaattaatttttaaaataaattttttgtttaaygtgcagtacagaatcaaatgttgaatgatcaaacattaaaatagtcccaattattttttaaaaagaatcgtatgtgaagtgtacttttccagaggaaggagtcacattttattatattctcaatgacacctatgacctctataccttaaacaactggcttaaaatttagtacttcttttttgcaaaactattcatataattggcaaatacatagattgcagtggtgtttttaacaatt

SEQ ID NO: 354339 - DNA, 583 bp, Homo sapiens
agaacctaaaaactaattaaagcagtcactttctaattctgctaacaaaatttttatgattaattttttgtttatgttctttgaactttttaatttttrtctcataggattttttaatttgcctcatagtgttagtgattttactttccacaaatgtatcaatctggatgattgaaatttatttgtctttaatgttttacaaatatttactgaatgcctactattgaaaatcctctagcaggcaataaccatacatggttattgatgtcatggtctaattggagagatggccattcattaaataatcaaacccacacaagtataaaattgaaattgcagtggatcctagagaggagaggtagttgggccaaaagtgaatacaattagaaaataaggccgtcttgaagaagtgaccacttgtgttgagatttgaagggtaagagttagttgagcaatggagggagggaagcatgccccagaaagaggaaatcatgtgcaagggtatgcatactataagcaaagattaaagtgtgtataaaagcctagaaggccagggagactggaacagaacaagttgatcaag

SEQ ID NO: 354340 - DNA, 550 bp, Homo sapiens
tgctatacaaaggtaaatgcagtacagagattttttttaaaaaattgctcataaaaatgctttcttccagatttattgatgcatatttgccaagtaaaaattgtatatgcccatttaagttgtatatcgtgatgtctttatatacacatacattgtaaaatgattaccaaaatcattaattaattaacatattcatyacttaacatagttatgagtatgtatctctgtgttgggggtcaggggtgagaacacttaaggtcaattcttagcaaatttcaagtatacattgcaacattattaactagagtcaccatgcttacattagattactgaatctttgtgtattttgacgagcatctctccttttccgccaccttccagcccctgggaaccaccattctactctgctttttagattccatatgtaagtgagatcatacttttattctgccttctcgttttcaagggacaaagtgacgttttcttcaaatcaggttaaactattgggtactatgctcactacctgagtgctgggatcagttgtacccca

SEQ ID NO: 354341 - DNA, 550 bp, Homo sapiens
tgctatacaaaggtaaatgcagtacagagattttttttaaaaaattgctcataaaaatgctttcttccagatttattgatgcatatttgccaagtaaaaattgtatatgcccatttaagttgtatatcgtgatgtctttatatacacatacattgtaaaatgattaccaaaatcattaattaattaacatattcattacttaacatagttatgagtatgtatctctgtgttgggggtcaggggtgagaacacttaaggtcaattcttagcaaatttcaagtatacattgcaacattattaactagagtcaccatgcttacattagattactgaatctttgtgtattttgacgagcatctctccttttccgccaccttccagcccctgggaaccaccattctactctgctttttagattccatatgtaagtgagatcatacttttattctgccttctcgttttcaagggacaaagtgaygttttcttcaaatcaggttaaactattgggtactatgctcactacctgagtgctgggatcagttgtacccca

SEQ ID NO: 354342 - DNA, 573 bp, Homo sapiens
accccttctatttgacaagcccggaatgtctcctyatgaatagagaacctatagagctatctaatatccaaaatatgggtagcaatgaacaaaatatagtaatgaaaatatgaaaaaggataatataaattttaaaatttcacatttgaaagcaaatgaagaggaatcaaaatacgacatattccactggacaaagataaggattcctgtcctggcaaagagtgattcccttgataagctaatttgacagctttccatgcacaccttttctttctattgtcacagccacatatgagaaaggcattaaggaagattccccttcttggggctctgcattctactttttgaagatgtggatttggaattctgagatttcccttaagtgttaaacaactataggccctttttcacctgtctttaggaaaaaataatatctgtaaacttttgactgttctcaattttgtccactcaatgggctcataaacaaatccgtgtggtccaagcctggtccttgagttcattcccagacttaggtgtcctcacttctcagcagtgtccttgatgcactgccca

SEQ ID NO: 354343 - DNA, 572 bp, Homo sapiens
tgcattttccgaaggattagtggtgtcaagcatctttacaagtgtttgttggctatttgtatgtcttctctgaagagatgtctattcagatcctttgccaattttttaatcaggttttttttttattgttgagtttagaggttcttcatatattttggatagtaaccccttatatgtcatgtgttttccaaatattttgtcccttttttacattgcyttttcactttgttgattgtccattttgatgcttagaaggatttaagtttgatggagtcccatttgtccatttttttcttttgttgtctttgcttcaatgttatattcaagaaatcattgccaaaaacaatggctgaaatcttttctcctttttttaattctagaagttttatagttttagatctttggtttatatctgttaaccagtttgttaatttttgtatatagtataaggtaagtgtccaacttcactcttttgtaaatggatattcagtttttccatcatcatctgctctagagactttcctgtatgtagtattggcatccttgtcaaaaatcatttgaccgtattctca

SEQ ID NO: 354344 - DNA, 485 bp, Homo sapiens
tagtattggcatccttgtcaaaaatcatttgrccgtattctcaagggtttacttatgaactttctattctgttccagtggtctatatatctgcatttatgccagtaccacattgtatggattcctggtgatttgtagtatattctgaaatcaggaagtgtgaggccactaattttgttctttcttttcaagattgtttttgctatttagtgtcctttgagattccatctaaattttaggatgatttttctatttctgaaagaaaaattattgggattttgatcgggattgcattgaatctgtggattgctaggggtactatggcatccaactaaactttttttgatatgtaagtctaacatttaattttccaggaatattggtgcagctcatgattttatgaacaccaaatatttatttgctattttcatttgatatatttactataatgtcttattactgccaatgttttagaagcaaatttag

SEQ ID NO: 354345 - DNA, 612 bp, Homo sapiens
cctgtgtcattcattaaatttgactgtgacttttaatcatttgacaggtactatgggaatatattagctattatatattattctaacaatgtgtaaaaaagtggaatcttaacttttattcctcaattratagccattaacaaccactagatattgttctcctacatatccccacactgtgtttgattagtaaatttttcttgagattgaggaggaaaaaaaagtcttgtcttgattttgttttgattctggctacatgggaacaaaagagccataatttgaaattaatattcaacaacatctatattaggaaaggctaagtgtgtcagggtgtgaactaccagcttctttaggttgtgacacactttcaatcgagcaagctatacaaatggatgagtgaactgtggacattggtatgaaaaacaatggagaaaatttcaaattgcaaaattaatataattggaggaccaatgcaatttgtgtcatttttttctttgtgactatggagatcttcaaattggagtacttaaattttaatcacgttaagttctaaaatctgtgattctgatttctagcgcaccagaccttatgtactcaatgaaattaaaggta

SEQ ID NO: 354346 - DNA, 579 bp, Homo sapiens
ggaggctgaaacaaattgttactgcttggtaacacatttggttaaaattttcttcaataataaattggaaggcataccatgtgcctactgagttgcaactctaaggaaatatggttggaaagatccatggttagttgtgtgtttctgattattgattacctttacaaggtataaaccaaaagaaatgagcttggcaggaattggccaagaagaaaggaaatagaaaaaatccagaaatgaagggccttagaggattgggaaagacagctgacaaaaagtaaataataaatttgaaaacagatttcagtctttgcaaggtgttttacaaaatattatttttatacataataattatactgggctttggggaaaatgaaaggcagaatttaggaagttcatcaaattttaaaaagtgaggtatttttgtgtgtgtgtgtgttagtttttcttattgtgtgatacattaccactgacagagcagctgaaagcagcacccacrtattagctcatagttcagtaagtcagttgaccatggcatgactgcgttctcattctctgctcagggtattgttataagac

SEQ ID NO: 354347 - DNA, 531 bp, Homo sapiens
acttgagggtagagggtgggaggagagtgaagataaaaaaaaaatacctatcaggtactatgtttattatctgggtgacaaaataatctgtacaccaaacccatgcaacgctcagtttctccatgtaacaaaccttcatatgtaccccttgaacctaaatgctggaaagaaaaaaaaaaacgaaaatgaagtaatgtatgtaaattgctgagaatcatgttcagcatagagtaagtgttcaacaaatgtaagcctttatcatattattcatataatagtaactgcctcccttgcatatgtaattaaacasctgaatagtttgattttcttctcataactaaattgtgattttctctctgtttctgattaggtgtgtgatattgaataaatggttcaccgtttctagaccttggtttctactgagaaataaaacaaatggataaagtcctcctaatatcatttctgagcctgtagtttggaatctcaagagaaacaaagtcaaagacattaaaagaaatgatgtgatgtaag

SEQ ID NO: 354348 - DNA, 594 bp, Homo sapiens
ggaagacaaatggttctacctaaattatctttgaggaaaaaggactgtccacaacgagctgttcaagatcacatcaaatatttgaaaacctgggagcgttttatatggggtgtgagtgtgtgtgtgtgtgtgtgtgtgcatttatgtgtaaggacagtttaagaatgagtggatttgttgaagataaatattgagaaaagaaagaaaaacttcagaagtttctatatgtattagtccattttcacactgctgataaagaccaagactgggcaatttacaaaagaaggagcgtttattggacttacagttctatatggctggggaggcctgacaatcatggtggaaggtgaaaggcacttctcacatggtgacagacaaaagaagagcttgtgcaaggaaactcccctttttaaaagaatcagatcttgtgagacttattcactatcacaagaacagcacaggaaacgtctgtccccatgattcaatgacctcycaccgggtccctcccacaacaagtgggaattcaagatgagatttgaatggagacacagccaaaccatatcactatatgaaataaatacaattaagacttca

SEQ ID NO: 354349 - DNA, 594 bp, Homo sapiens
ggaagacaaatggttctacctaaattatctttgaggaaaaaggactgtccacaacgagctgttcaagatcacatcaaatatttgaaaacctgggagcgttttatatggggtgtgagtgtgtgtgtgtgtgtgtgtgtgcatttatgtgtaaggacagtttaagaatgagtggatttgttgaagataaatattgagaaaagaaagaaaaacttcagaagtttctatatgtattagtccattttcacactgctgataaagaccaagactgggcaatttacaaaagaaggagcgtttattggacttacagttctatatggctggggaggcctgacaatcatggtggaaggtgaaaggcacttctcacatggtgacagacaaaagaagagcttgtgcaaggaaactcccctttttaaaagaatcagatcttgtgagacttattcactatcacaagaacagcacaggaaacgtctgtccccatgattcaatgacctctcaccgggtccctcccacaacamgtgggaattcaagatgagatttgaatggagacacagccaaaccatatcactatatgaaataaatacaattaagacttca

SEQ ID NO: 354350 - DNA, 458 bp, Homo sapiens
caggtctctaccactgaacacaggatgatccagcttctatggacatcttagactgctcttaaaagcactgctacttttgccccagaaatcagcacgtttgccccatggccactcttggccatcagaatgtattttctgttgcccctgtttctttaatatccttctgtcagtgtatttcaattcaaaaaccatagagggtgtttcttatgctaaaatctaggttatgtgtctgcatcctagatgcacaaagaggttgaaaagcaatcacagagcatttcagcttcaaggaagacatacgatttgcctctcacccaaaatacttaatatttaatgaatgcttcttctgtgttaggcactgttgtatgagtttattygcataatgtggagaatttattaaactaggagagattcagggagctacatcaaatatgtagaaaagggtgaaataatcacttaac

SEQ ID NO: 354351 - DNA, 585 bp, Homo sapiens
ttcattgcgtataggacattttatattaaaaaccttagacaaattctagttttgatagctactataggataattttgtattataagtcattttctacagacatacggctgtaagtatgtgatatatatataccatttctttctccgaaaactcacataggagtttcccacctctgccagcattagtattggtcattcttttatcacagggagaggtgagccagctcactcttccactgtgttgaaaagtagtgactctcattccacaggggcaaatgattcaggagtgagatatcacaaaataaccatgatttagaataaggattgtataaaaacatgaccttaatgaataactcttcaataaatacttctcatggtatcaggtagattcaaagtttcttttgcagtcttatgaggtagttggaagagatgaatagaattctggaatatgggycagatggcatatttgaaacccagtgggataagccagatggaatgctgcttttctgcccatttatgcatgaatagaaaatagtagggggatggtcctgaagcctgttgacaataatgattttccaaaggtttc

SEQ ID NO: 354352 - DNA, 580 bp, Homo sapiens
aaagggacttttatactgtacaaatatccatttattttttgtttccaaagcacttgaccttcrtataaatgttaacctctaaatctatttccttcctgattctgcaatctggccaaatttattcaagcataggtttttataaagaactctgtgcttaggtcatctctgtggaaatataaatcaaaatgagatatttacctatttaaggtactttacgacttgtgtgaaatgtgcagtttggagagatgagaagagttgaagagtagctattggtttcaagtcatctttagggagaagaaatagctatgatatgctttggctttcagcgtgattctgaaagttttatgataatgcacaatctaccaagttaccacatgtgacagctaatcaactagaagaataaaggtgccagggcagacagttcccatcaggatgaattcttgtgtgcagtgacccactagcatcatattttgaagctttccttattatcatttcatcttttatttagtatttcatcactgtggtttctgctatgcccttgtttttactaaacatattaataaaaatgtatgcaacatca

SEQ ID NO: 354353 - DNA, 580 bp, Homo sapiens
aaagggacttttatactgtacaaatatccatttattttttgtttccaaagcacttgaccttcgtataaatgttaacctctaaatctatttccttcctgattctgcaatctggccaaatttattcaagcataggtttttataaagaactctgtgcttaggtcatctctgtggaaatataaatcaaaatgagatatttacctatttaaggtactttacgacttgtgtgaaatgtgcagtttggagagatgagaagagttgaagagtagctattggtttcaagtcatctttagggagaagaaatagctatgatatgctttggctttcagcgtgattctgaaagttttatgataatgcacaatctaccaagttaccacatgtgacagctaatcaactagaagaataaaggtgccagggcagacagttcccatcaggatgaattcttgtgtgcagtgacccactagcatcatattttgaagctttccttattatcatttcatcttttatttagtatttcawcactgtggtttctgctatgcccttgtttttactaaacatattaataaaaatgtatgcaacatca

SEQ ID NO: 354354 - DNA, 559 bp, Homo sapiens
gactgctccatgcttttaattattaaaactatacctatataaaatggattttagcatataggaatttcatttatattaaaacacagaagaaactaataatataatttaatacttayaaatttccaaaactccctcaattaaagtataatatgttgaaatgctattggaaagcttataaaaatatatgacaatttttattggcaagctacttattaaaatagactataaattgttttcttcacgatatgtgtaacactttcttattagagatagctttcgtatctttaagtgagcagcttttctcttttaacacattttaagatgacttatagaattgttttgaattttctaccacttaagtttctgttttctgggtggatacctgatagaaataatccatatcaaagtatgtcttatgcactattattagcttacatttatagatcttatactttacaaaacacttaatttttgcattatcgaatccagttaatgtatttatattaatagattctcatggagatataatatcctaaataacagatgaaattttaaacac

SEQ ID NO: 354355 - DNA, 516 bp, Homo sapiens
tacaggtgcctgccaacacacccagctgatttttgtatttttagtagagatgagatttcaccatgttggcctggctggtctcgaactcctgacctcaggagatccaccagcgttggcctcccaaagtgctgggattacaggcatgagccaccgcaccmggcctattctagttactttcttttccctttaagaataacataaattaactttggatatagtttggatatctgtaccctccaaatctcatgttgaaatgtgacccccagtattcatggggcctggctgggaggtgtttgagtcatgggggcagatctctcatgtatggcttggtgccctcctcatggtaatgagtgagttcttgctctatttgtttgcaagagaagtgattgtttaaaagagcctggctcctcctccacctgtttcccttgcttcctctcttgccatgtgacacatctgtgctccctttgtcatctgccatggtagaagctacaagaagcctcaccaaaagctgaccag

SEQ ID NO: 354356 - DNA, 498 bp, Homo sapiens
taggtaccatgcagaatgcttcacagtgaagagcctgaactttgtactacatgtgagaacaataaatttcctatgagcttgtattttaggacatgttactttgacatttctctgcagggaaaaatggaagggtttaagactgcaggcatgaagagaggctgttgtaataatccatgaaaacttgataatggtccacattagggcagtggtaatagagaggatcagactgatttaataaatatttaaaaacagcagggtggagcaagatggcagaatagaaggcttaactgatcaccgttgctgcctgcaagaaaatcaattaccaatttaacaactatctacacaaaatagtactatcataagaaccaaaaataaggtgagcacttacagtacctggttttaactccacagcattgaaaaaggcactgaagatgtargaaaaacagtcttgaatcactgataccaccattctcccatcctgtagcagcagcagcatga

SEQ ID NO: 354357 - DNA, 535 bp, Homo sapiens
ggtttgttacataggtgtacatgtgccaaggtggtttgctacacccatcaacccatcagctaggttttgatccccacatgcattaggtatttgtcctaatgctctccctgcccttgccccccacctccccagcaggccccagtgtgtgatgttcccctccctgtatccatgcgttctcattgttcaactcccacttatgagtgagagcatgyggtgtttggttttctgttcctgtgttagtttgctgagaatgatggtttccagcttcactcatgtccctgcaaaggacatgaactcggtggttttaaaattaaatctagcacataaaactacataacaggtcccaccctcaagtcgtgatttatagtagaattccttgggactgacagaacaactaagatctagaaaactttcttgtagtttttgaaaactacccaatttcaaagttacaaatatttattattcctagagaaactagaagtttagaggtagcctgtgtcatggggaaatctttgcaaagaggtggtgtgtgctt

SEQ ID NO: 354358 - DNA, 535 bp, Homo sapiens
ggtttgttacataggtgtacatgtgccaaggtggtttgctacacccatcaacccatcagctaggttttgatccccacatgcattaggtatttgtcctaatgctctccctgcccttgccccccacctccccagcaggccccagtgtgtgatgttcccctccctgtatccatgcgttctcattgttcaactcccacttatgagtgagagcatgcggtgtttggttttctgttcctgtgttagtttgctgagaatgatggtttccagcttcactcatgtccctgcaaaggacatgaactcggtggttttaaaattaaatctagcacataaaactacrtaacaggtcccaccctcaagtcgtgatttatagtagaattccttgggactgacagaacaactaagatctagaaaactttcttgtagtttttgaaaactacccaatttcaaagttacaaatatttattattcctagagaaactagaagtttagaggtagcctgtgtcatggggaaatctttgcaaagaggtggtgtgtgctt

SEQ ID NO: 354359 - DNA, 548 bp, Homo sapiens
tttacttaatttattttttattatatacatttaaggtatgcagcatgaaactttgatatacatatacatagggaaatgattgccacagtcgagccatttaatatatctatcagctaacataatttgtgtgtgtgtgataagagtgtcaggcctatgagcccaacctaagccattgtatcccctgtgacctgcaygtatacatccagatggcctgaaacaagtgaagaatcacaaaagaagtgaaaatggccagttcctgccttaactgatgacattccaccattgtgatttgttcctgccccaccttaactgagcaattaaccttgtgaaattccttctcctggctcagaacctcccccactgagcaccttgtgacccccgcccctgcccataagagaaaacccctctttaactataattttccaccacccacccaaatcctataaaacggccccacccctatgtgcgtgacatttggtggtgtgactcagatcgggggacctcccttgggagatcaatcccctgtcgtcttcctctttgctccatga

SEQ ID NO: 354360 - DNA, 548 bp, Homo sapiens
tttacttaatttattttttattatatacatttaaggtatgcagcatgaaactttgatatacatatacatagggaaatgattgccacagtcgagccatttaatatatctatcagctaacataatttgtgtgtgtgtgataagagtgtcaggcctatgagcccaacctaagccattgtatcccctgtgacctgcatgtatacatccagatggcctgaaacaagtgaagaatcacaaaagaagtgaaaatggccagttcctgccttaactgatgacattccaccattgtgatttgttcctgccccaccttaactgagcaattaaccttgtgaaattccttctcctggctcagaacctcccccactgagcaccttgtgacccccgcccctgcccataagagaaaacccctctttaactataattttccaccacccacccaaatcctataaaacggccccacccctatgtgcgtgacatttggtggtgtgactcagatcrggggacctcccttgggagatcaatcccctgtcgtcttcctctttgctccatga

SEQ ID NO: 354361 - DNA, 579 bp, Homo sapiens
ctcacaggcccattctattctgttgtcatttcataacctcttccatgtaggttacaagctgctagcccacctcttagaacctctcatttcctttccatcgtggaaatctatcctcaaggaaatcacttctcagtgttccatctgctattctactacccctcagggattgttcaggctccctcccttccctacacatcaagctcagggatttgtccctgaccaggactggcaaaatgactttactcacatgccccaagtcaggaaactaaaatacctcttggtctgggtagacactttcactggatgggtagagacctttcccgcagggtctgagaaggccaccatggtcatttcttcccttctgtcagacataattcctcagtttggccttcccacctctatacagcccaataacggaccggcctttattagtcaaatcaccaagcagtttctcaggctctaggtattcagtaaaaccttcacaccccttaccatcctcaatcttcagaaaaagtaaaacagactaatggtcttttaaagacacacctcacygagctcagcttcctacttaaaaaggac

SEQ ID NO: 354362 - DNA, 547 bp, Homo sapiens
atgtggggtctttcacaatccatatgaattttagaattgtyttttctatttttgtgaaaaatgcaattggaattttgtaatgtgtatcttttgacaatttattttagcctttgttaacagttttatcttttaacgcttgcacgtcatcattagagtcctagagtattccaaaaaatggcactttttacttacaccattgagttttgtactttcatatgtttaatgctattacttaggagctttttgttgcagtataaagaactacctctagcaatttctgcaaggcaagtttagtggtgatatattccctgggttcttgttattcttatatagtcttttctcactcatttctgaaagatagctttattggataagatattcttggtggaaggttttttccttcagcactttgaatatcttattccactctcttcagctttctaagctgaaaattcatggacagttgtattggcattttaaatggcttggtagtatttacccctccaaatctcatgttaaaatgtgacatccagtgttgcaggtgggg

SEQ ID NO: 354363 - DNA, 596 bp, Homo sapiens
gcctcagtctcccaaagtgctgggattacaggccaccatgcccagccagacaagagcttttctaacggactgaataaaattatattttaagtattaagcaagtcagaatctaagaacccttgrtgggcaatctgtacatcctcatctgctttcattttgataaacttacaagaaggagttaggaaggagagaagtgggaagggatttcatgattttctttattatgaggctaaaacctgggtctgactcccctgcctccctgacagcttgtatctctccaagtaccttggccattttttcatctaaaggcctaggcagataaagggagaatgatggagatgaaaacacaggccttgctgaggttttttgttttgtaggaataaaatgagaagcattggtaccactcagctatgccactaaagatgcagaagtgcgaggctgctagcccacgggaggaagtggctgcttcctcgtaaggaatgaacgcagcaggtcatcagctacagagtgggggaacttcagggttcagaacagccctgaggcaacaaggaacaagtcggaagttgacccattatggagactgccaggttctagat

SEQ ID NO: 354364 - DNA, 596 bp, Homo sapiens
gcctcagtctcccaaagtgctgggattacaggccaccatgcccagccagacaagagcttttctaacggactgaataaaattatattttaagtattaagcaagtcagaatctaagaacccttgatgggcaatctgtacatcctcatctgctttcattttgataaacttacaagaaggagttaggaaggagagaagtgggaagggatttcatgattttctttattatgargctaaaacctgggtctgactcccctgcctccctgacagcttgtatctctccaagtaccttggccattttttcatctaaaggcctaggcagataaagggagaatgatggagatgaaaacacaggccttgctgaggttttttgttttgtaggaataaaatgagaagcattggtaccactcagctatgccactaaagatgcagaagtgcgaggctgctagcccacgggaggaagtggctgcttcctcgtaaggaatgaacgcagcaggtcatcagctacagagtgggggaacttcagggttcagaacagccctgaggcaacaaggaacaagtcggaagttgacccattatggagactgccaggttctagat

SEQ ID NO: 354365 - DNA, 613 bp, Homo sapiens
agccgattctgactctaaagaaccttagaaatgttcctaggttacatgatggagagttttgaaatcttgactcaaggggaaaataaatcagtgtgaatagatatttctcaaagtagattggcacaaaagggattctaatggtttaattacgaaacttccatttaacttccttcctcacagccttattttgttgtttggctctgtctgattttctcaattaatcctgaaaatgtcactgacttagggagaaaagggctgaaattatttccacctgcttccttctacattttgcgaacgaaagatttttaatttacacgcgtgtgactgcacaagccgttagctggctttgtgatacgagcattgtttcaaccattgccttaagatgttttsgtctgtgctcatcacctcggggggatctgggttgcggaaagaattctaacccacttttggaacaccctcatctgaggcgcactccgtaggagcaagactatctggctttcccagaagctgtatcacttataaggttaacaatttggaggtagaaagggagacctcttcaaagattctcacagggaagttacccaggggaagaggtctctaagcaagcctacca

SEQ ID NO: 354366 - DNA, 501 bp, Homo sapiens
atggcatacatggtgtcagcttacaggttattttcactcaacattgtttttgggatttatagctctagttcatttaactgctgtgtatattatccattggtgatgatctatctctgtattttgccaattgcgttaagattgagcatcttttcttattggccattttgatttcctctgcagttttctggctcatatccattgcccattctattaggatatttctttttcttattgttgtataggagttcttgatgaattctggccagtgatctttgcagattatgtgagatgtaaatatctcctaccgtgagacatgccttttaactttaattatggtttatttgaaaataaattgtataacgtgtaagtttgactaagtatactttttatagtgcgtaggttttgtgttgtgttttttwaaaaagtcctttcaatctcaggtcataaatatactctatttttttctaaaagtcttaaaattttgtctttcacatttgtcct

SEQ ID NO: 354367 - DNA, 577 bp, Homo sapiens
aatattaccaacattgaattcaaaggggttttgcataaattgataagcaacaataagcttatcaatttcaataaatctgcaaattttcttgaagtttattcatgwtagaaaatgtatgaaattattattgtatattgtattgcactctgaaaagttgcaattttagcctaaaattttgttcctctttagctaggtcacaagtcagcttttcatttccttggaacttcaaatttagctgtttcatatgcagtgtgatatcaaagttattcagtcgtttttgtctttaatttttgaatatttggccaggcacagtggcccatgcctgtaatcccagcactttgggaggccgaggcaggcagatcacttgaggtcaggagttcgagaaaagcctggccaacatggtgaaatcccatctctactaaaaatacaaaaattatccaggcatggtagtgggcacctgcaatcccagctacttgggaggctgaggcaggagaatcgcttgaacccaggaggcagaggttacattgagctgagatcgtgccactgcactccagcctgggcaacagagtgagactgt

SEQ ID NO: 354368 - DNA, 577 bp, Homo sapiens
aatattaccaacattgaattcaaaggggttttgcataaattgataagcaacaataagcttatcaatttcaataaatctgcaaattttcttgaagtttattcatgttagaaaatgtatgaaattattattgtatattgtattgcactctgaaaagttgcaattttagcctaaaattttgttcctctttagctaggtcacaagtcagcttttcatttccttggaacttcaaatttagctgtttcatatgcagtgtgatatcaaagttattcagtcgtttttgtctttaatttttgaatatttggccaggcacagtggcccatgcctgtaatcccagcactttgggaggcygaggcaggcagatcacttgaggtcaggagttcgagaaaagcctggccaacatggtgaaatcccatctctactaaaaatacaaaaattatccaggcatggtagtgggcacctgcaatcccagctacttgggaggctgaggcaggagaatcgcttgaacccaggaggcagaggttacattgagctgagatcgtgccactgcactccagcctgggcaacagagtgagactgt

SEQ ID NO: 354369 - DNA, 577 bp, Homo sapiens
aatattaccaacattgaattcaaaggggttttgcataaattgataagcaacaataagcttatcaatttcaataaatctgcaaattttcttgaagtttattcatgttagaaaatgtatgaaattattattgtatattgtattgcactctgaaaagttgcaattttagcctaaaattttgttcctctttagctaggtcacaagtcagcttttcatttccttggaacttcaaatttagctgtttcatatgcagtgtgatatcaaagttattcagtcgtttttgtctttaatttttgaatatttggccaggcacagtggcccatgcctgtaatcccagcactttgggaggccgaggcaggcagatcacttgaggtcaggagttygagaaaagcctggccaacatggtgaaatcccatctctactaaaaatacaaaaattatccaggcatggtagtgggcacctgcaatcccagctacttgggaggctgaggcaggagaatcgcttgaacccaggaggcagaggttacattgagctgagatcgtgccactgcactccagcctgggcaacagagtgagactgt

SEQ ID NO: 354370 - DNA, 620 bp, Homo sapiens
aaataaaaatgtaagcatattatttaaaacagactttacaactccccaattgcyagagtgtggcaggtagccttcttaaacagctcccaattgtccccacttcctggcattcatgcctttgtgttagtctagacctaatgacttgcccttaccaaaaagaatgtggcaaaagtgataggatttcccttctgaagttgggctatagaaggctaggacttctgtcttgcttacactcttactctgacttttccccacatatcacttgttttgataaagccagctgccatgttgtgagctaccctatggagaagcccatgtgacaaaaactgaggacttcagttgagcagcccataaggaaccaaatcctgcctccaaccatataggtaagaaagcagatcctccccaaatctagccttcaggagagaagagccctgtccattaccttgattgcagccgtgtgagagaccctgaagcagaggattcaactaagccacaccaggactcctgacccacagaaagtgtgagataataagtgtgtgttgttagaagctgctaagttttggggtagtttgttacacagcaataaataactaatgacaaatattttccttgaccagact

SEQ ID NO: 354371 - DNA, 587 bp, Homo sapiens
agatctatgactgtattgcagaatcctgcaaggttcacagggtgctggcacttcctgagatggcatcaccatgggattaaaagcctgacctggagtggcyttcccctgtgcactctacacaggaggcttcatacctggacaggaacacctgggaacaccaaggaaacacggaggaaataagcaaagccaaattccactcctgttaacccttttatcccttctgaaaaatccccttatatgaaacattagccaagggttgttattttgtctgggttatggggaaaatcatgttattctagaaaggaaatgaagtggcatctcttggcagccaattttgaattctgcatttgaaatcactcaaagcacttctgcggctggtggaatatagcaacttgttcaaagagaggaacgagaaactcatcaaagaattacacctccttgggggtaattttgatcataaacaggacagatgccatctgtctagtatgacttcattcattcacttgttcattcagaaacattactaggcatgtccattgtgagggccctgtgctaagtactcataatacaaagacgctaagacacaa

SEQ ID NO: 354372 - DNA, 587 bp, Homo sapiens
agatctatgactgtattgcagaatcctgcaaggttcacagggtgctggcacttcctgagatggcatcaccatgggattaaaagcctgacctggagtggccttcccctgtgcactctacacaggaggcttcatacctggacaggaacacctgggaacaccaaggaaacacggaggaaataagcaaagccaaattccactcctgttaacccttttatcccttctgaaaaatccccttatatgaaacattagccaagggttgttattttgtctgggttatggggaaaatcatgttattctagaaaggaaatgaagtggcatctcttggcagccaattttgaattctgcatttgaaatcactcraagcacttctgcggctggtggaatatagcaacttgttcaaagagaggaacgagaaactcatcaaagaattacacctccttgggggtaattttgatcataaacaggacagatgccatctgtctagtatgacttcattcattcacttgttcattcagaaacattactaggcatgtccattgtgagggccctgtgctaagtactcataatacaaagacgctaagacacaa

SEQ ID NO: 354373 - DNA, 443 bp, Homo sapiens
gttaggccactgggcagggatggatcaaaggtggtttagcctcagggatggacaagagccatggctactctcccttggagcaagacactccagcagtagttccagttccgaaatggggtaagacagtagctatgcaggccacaggggatggggcctagtggcagctccttctctggggggaacacagatttgcagactccaggcagctccctcagctggacttagtgcatgtgaggayttcagggggaccccagtgatgagaagtgtaggtgtccaaagagttgatggcagttactgggatcctcttgtctacctttgcaccataaaaagaggttcctcctggtttctagctgattctggttgggaagtggggtggtgaagaccaggtgtttccttttgctctctgtgtggtcaacctcagtttccgtgttcactggggtttc

SEQ ID NO: 354374 - DNA, 443 bp, Homo sapiens
gttaggccactgggcagggatggatcaaaggtggtttagcctcagggatggacaagagccatggctactctcccttggagcaagacactccagcagtagttccagttccgaaatggggtaagacagtagctatgcaggccacaggggatggggcctagtggcagctccttctctggggggaacacagatttgcagactccaggcagctccctcagctggacttagtgcatgtgaggacttcagggggaccccagtgatgagaagtgtaggtgtccaaagagttgatggcagttactgggatcctcttgtctacctttgcaccataaaaagaggttcctcctggtttctagctgattctggttgggaagtggggtggtgaagaccaggtgtttccttttgctstctgtgtggtcaacctcagtttccgtgttcactggggtttc

SEQ ID NO: 354375 - DNA, 600 bp, Homo sapiens
aacaatcttgtggggcagtttcaaattcctttgctgcgattctgtgaatttcactggttccagaggaattttacaatgtatcttgactctagatttctatacttgtgtgrtgtgcaatttagagatcatgtatgctgaaccagcttgaggggttaatttccttgcattaattttttctatcttctcatgagcctatcaagctgctttgtggtatctctgagctgtgaaacagaggaatttcatagtttccttcataaaccagtaacttccaactgtatatggctggttcatttccagctctttaacatgcagaggccctgggtctcatcaaccatctctctgttgccattaaaatctcatcaccctgacatccagtaccctgaatgtactcaactttggctccatgctcccttaagttttgtgatccttctttatttctggcacctgagaatgttgccttctttctttacacaaggctcatattttaggtaaaattttattcttaattactttatctgtttttgtgaaaagggaattatacatgtcaatgcaaatcactctattgtacacaaattccagatatacctttacaaaatgcaa

SEQ ID NO: 354376 - DNA, 600 bp, Homo sapiens
aacaatcttgtggggcagtttcaaattcctttgctgcgattctgtgaatttcactggttccagaggaattttacaatgtatcttgactctagatttctatacttgtgtggtgtgcaatttagagatcatgtatgctgaaccagcttgaggggttaatttccttgcattaattttttctatcttctcatgagcctatcaagctgctttgtggtatctctgagctgtgaaacagaggaatttcatagtttccttcataaaccagtaacttccaactgtatatggctggttcatttccagctctttaacatgcagaggccctgggtctcatcaaccatctctctgttgccattaaaatctcatcaccctgacatcsagtaccctgaatgtactcaactttggctccatgctcccttaagttttgtgatccttctttatttctggcacctgagaatgttgccttctttctttacacaaggctcatattttaggtaaaattttattcttaattactttatctgtttttgtgaaaagggaattatacatgtcaatgcaaatcactctattgtacacaaattccagatatacctttacaaaatgcaa

SEQ ID NO: 354377 - DNA, 644 bp, Homo sapiens
tgcctatagtaactttaggcacagagaggttcagaaactcgcccaaggtcacacactcaggaaggggcagcagcgggcagtgaacccaggtgatgcaactctagagcccgtgctttaactactgtgctgttgtgtggcacaccaagatccctgcactcctactcacccaatctggcaaacacaagtgcctgcttgcagatgacaacacagatcatcatgcctactcagctgcttgccagacagttggtcagggtctcccattgctggtcagtgggtagagagaaaaggaaagccatgagtcaacttggcttctctaaggcgccacagactgtgttgctgtgttcctccataaatgtaaatttacaacacatccttttatcacagtctggtttgctttaggctgccttatttctgaagctgaaggacacagtggtatttggacacatccaggaaaggcctggcaaatggtgactgcttttgaccccaaagaatcccacagtaatttggctccacagtgaaaagtgacccaggctgggtactstcaaacatccctccacccagcatattaattattcataatgtccttaaatactcttctgtgatgaaatgttaagtgacacattaaatattcatcatgatgcatc

SEQ ID NO: 354378 - DNA, 569 bp, Homo sapiens
aggtatttatggtcaagttcacrgagacaaaaagtagaaaaatagttgccgggggtaggagaaatgggaattgagagttattgctgaatgggcacagagtttcagttttgcaagatggagagttctggagagggtgatgattgcacaacaatgtgaatgtacttaatactcctaaactatacacttaaagatgcttaagattgtaaattttgtgttacatgtattttaccacaattaacaatttttaaatggcattactgtcctgaattagaaatagccttaaaagattattgttctccttatctaattatagatataattatagacttacaaaagagacgtagctcacctgttctgtaacaaaagtcactggttttgacagaaatcctctaacatttgactgcatctgattaaccatatgtggcaagttaattcttccattgctgatgcatatatgcaacaatcagttaaccttgaaggacgcaccaaaaaagggttaattgctcaaggttaagtgttatgtgaatgtcctactgagaattgttagggctgaggttagagttttacct

SEQ ID NO: 354379 - DNA, 627 bp, Homo sapiens
gatctgaggggctgattttttataggataaaggtaatgtctgtacactgtgaaaggaaggaagataragtatgaatttacagatattggtagtttctgttttgaattatagagaggttcattccatattaatcttctttatccacttaatacctttattactcttatatgtacagtcagatttagggcaataatatttaggtttagaataagcttaaagatgaaatgctgaccttcagtcttgtctagaatatttttctgaagaattgagataaacaatgaaggatggacaattaaatgaccagtaatgctggctccttggttgaggcgtatatgaaatttactctcaaattattctacaagctatcataaatatttttaaattgctataataaaagatcctaggtatgtttccatcttttggtcacctttgaaaagaggccaaggaagaacaatcctcagatcagttattccaaaaatcactgctattctggaaggcaactcctctacactattgtcaggcaaaagatgtctgaaaacaatataaaattcaggaaggtgtctgcattttccctgacattattccttttcaaatatgttccagtggcactacactaagcattttacc

SEQ ID NO: 354380 - DNA, 627 bp, Homo sapiens
gatctgaggggctgattttttataggataaaggtaatgtctgtacactgtgaaaggaaggaagatagagtatgaatttacagatattggtagtttctgttttgaattatagagaggttcattccatattaatcttctttatccacttaatmcctttattactcttatatgtacagtcagatttagggcaataatatttaggtttagaataagcttaaagatgaaatgctgaccttcagtcttgtctagaatatttttctgaagaattgagataaacaatgaaggatggacaattaaatgaccagtaatgctggctccttggttgaggcgtatatgaaatttactctcaaattattctacaagctatcataaatatttttaaattgctataataaaagatcctaggtatgtttccatcttttggtcacctttgaaaagaggccaaggaagaacaatcctcagatcagttattccaaaaatcactgctattctggaaggcaactcctctacactattgtcaggcaaaagatgtctgaaaacaatataaaattcaggaaggtgtctgcattttccctgacattattccttttcaaatatgttccagtggcactacactaagcattttacc

SEQ ID NO: 354381 - DNA, 375 bp, Homo sapiens
ataccatggaatactatgcagccataaaaaagaataagattatatcttttttgggaacatggatggagctggaggcttttatyctagacaaattcatgtaggaacagaaaacaaaatactgtatgttctcacttgtaagtgggagctaaatgataagagcttatgaacacaaagaaggaaacaatagcccctgggtctactggagggtggagtctgggaggaggcagagaagcagaaaagataactattgggtattgggcttaatacctgggtgaggaaatgatatgtacaacaaaccccaatgacatatgtttatctatgtaacaaaactccacatatacccccaaacctaaaataaaagttttaaaaaatcgt

SEQ ID NO: 354382 - DNA, 375 bp, Homo sapiens
ataccatggaatactatgcagccataaaaaagaataagattatatcttttttgggaacatggatggagctggaggcttttatcytagacaaattcatgtaggaacagaaaacaaaatactgtatgttctcacttgtaagtgggagctaaatgataagagcttatgaacacaaagaaggaaacaatagcccctgggtctactggagggtggagtctgggaggaggcagagaagcagaaaagataactattgggtattgggcttaatacctgggtgaggaaatgatatgtacaacaaaccccaatgacatatgtttatctatgtaacaaaactccacatatacccccaaacctaaaataaaagttttaaaaaatcgt

SEQ ID NO: 354383 - DNA, 375 bp, Homo sapiens
ataccatggaatactatgcagccataaaaaagaataagattatatcttttttgggaacatggatggagctggaggcttttatcctagacaaattcatgtaggaacagaaaacaaaatactgyatgttctcacttgtaagtgggagctaaatgataagagcttatgaacacaaagaaggaaacaatagcccctgggtctactggagggtggagtctgggaggaggcagagaagcagaaaagataactattgggtattgggcttaatacctgggtgaggaaatgatatgtacaacaaaccccaatgacatatgtttatctatgtaacaaaactccacatatacccccaaacctaaaataaaagttttaaaaaatcgt

SEQ ID NO: 354384 - DNA, 441 bp, Homo sapiens
agagatgaatggacacgaatacatgagagttgatgctttggcttcgttttattttacycctacttcttcctctacaactgcttattactcttcaaaaggacgtacagcgataactttgattgcacctcagccactgctcacaggagttcaaacgagctgatgaaaaatggaaggtcttctcctggatgctcaacacattgcaccaaatgagttgggaagtaataggcacaaaaccagagcctgggacggtggaaagagcatgggctttggaggctgaaagaacttggccttcaccctgcctttgatgattcttagctgggtgaccttgtgccagtcctcggcttctctatttgcagaatggggctaatgacacctaagttgtcaggccgatttgaggattataaataagacatttatgaggaacttagttattttgtggga

SEQ ID NO: 354385 - DNA, 441 bp, Homo sapiens
agagatgaatggacacgaatacatgagagttgatgctttggcttcgttttattttacccctacttcttcctctacaactgcttattactcttcaaaaggacgtacagcgataactttgattgcacctcagccactgctcacaggagttcaaacgagctgatgaaaaatggaaggtcttctcctggatgctcaacacattgcaccaaatgagttgggaagtaataggcacaaaaccagagcctgggacggtggaaagarcatgggctttggaggctgaaagaacttggccttcaccctgcctttgatgattcttagctgggtgaccttgtgccagtcctcggcttctctatttgcagaatggggctaatgacacctaagttgtcaggccgatttgaggattataaataagacatttatgaggaacttagttattttgtggga

SEQ ID NO: 354386 - DNA, 585 bp, Homo sapiens
ggtttttctcttacactgttyttttttctttatcttggcttttgtttgaggagcacttactaatatctcataagcgtaatggtctatgtagcaccaaagctgtcttatgtggctccagcctagcttgtaatattggatcagataaggctgaagatgaagaactgatagaggttcttttttttttaacttaaaaaaattttaaaatagagacagggtctctctatgttgttcaggctggtcttaaactcctaggctcaagggcttctcccacctcagcttcccaaatggctgggattacaggtgtgagccaccatggcgagcctgatcgaggttcttgaagcctctatccaaccttaaccacttctaagcttgattaaattcaagagtagattacatggtgctgttagtacaggtcaaaaaaaagacagggatggaattagaaatccgcaggttctaccagctcaagcccattggaggaaactaaagagcaaagttgatccctaacctccatgttgagttgtggaaggtagccacagttaagtgcagtttggtcacgcaggtttcctggaaactgatattggtggc

SEQ ID NO: 354387 - DNA, 585 bp, Homo sapiens
ggtttttctcttacactgtttttttttctttatcttggcttttgtttgaggagcacttactaatatctcataagcgtaatggtctatgtagcaccaaagctgtcttatgtggctccagcctagcttgtaatattggatcagataaggctgaagatgaagaactgatagaggttcttttttttttaacttaaaaaaattttaaaatagagacagggtctctctatgttgttcaggctggtcttaaactcctaggctcaagggcttctcccacctcagcttcccaaatggctgggattacaggtgtgagccaccatggcgagcctgatcgaggttcttgaagcctctatccaaccttaaccacttctaagcttgattaaattcaagagtagattacatggtgctgttagtacaggtcaaaaaaaagacagggatggaattagaaatccrcaggttctaccagctcaagcccattggaggaaactaaagagcaaagttgatccctaacctccatgttgagttgtggaaggtagccacagttaagtgcagtttggtcacgcaggtttcctggaaactgatattggtggc

SEQ ID NO: 354388 - DNA, 563 bp, Homo sapiens
aatccgcaggttctaccagctcaagcccattggaggaaactaaagagcaaagttgatccctaacctccatgttgagttgtggaaggtagccacagttaagtgcagtttggtcacgcaggtttcctggaaactgatattggtggctttttgcatagaaccatgagtcatgcatctaagagtcatagactttgactgtgggaggggtgtcrgttcctctagatggtagttggaaggggtgggaggcttaatcactgcccagtaacagtgaaaaggggaaggggaaacggagcagcattctctctggggcccttatggcatgtggcaaaagtagtgacaatcttcaccaggtgagaagattttcttactcaatttagtatgagtctggagaggtagaaagtgggagaggaaggaagaagaggttcttcttcctgtctgtgaaggaaagaatcagtaggaatgtccctaagtttgtgggcacctagccagctggtgttctgtggacaatcaggttacacgggcctgaactaattgtcacaggataccaggatgttggggctgatgtg

SEQ ID NO: 354389 - DNA, 534 bp, Homo sapiens
aaacaaatgaagtaaaatgttaatattttggaaatctgggtgaaaaggatttagaaatttttcataatattttttcaacctttttatcagtctgaattttgtcatttttttaaagrgatgggaaataaataaatgatctaagggattctcatctcaaaatcattacaatttgtcttctatgttataaatactgagattctacaatagttattttaagaagactaaactatggaataattcttgaatgcctttatttgctcctgatataaggtaagccataagttcaaatttactttaacaagtaaactttaacaagttttaaaagatatgaggcattaaaatcatttcttacccctattcctcaatctagttctcctgaaatagaaaaggccaaacaaaaaggtttggaaaataaaatatatgttaagtatttagtttgctagcatagtagcttaagatcaattacatttacaattaagtggtatttttatgtttgcttatgttaaaatgcactaggaatttatgtaaatgaag

SEQ ID NO: 354390 - DNA, 597 bp, Homo sapiens
atctctaacttcgcttgaagtaccaatattctaattcttggaatatagcactctcattttaaatgattataaaaatgtatgcttgtgtcatattttcttttacaataattcttggtcagagctatgacatattgatgctattgcttgggtagaaattctgctgtgtgcttatgaaatggataatgaagagagagcactcacctctaactctcagyatagagattcctggcctttactctgagtggtcatccactggctttgcaaatgcatgtctttctctttcccaaaacctacctccagacagccttctcaaactgaccacccaacctccagctcaatccttccctcctctgccccagcagccatgctggagtcctgctctgcatagctgtctgttttctctgggttactttgcttcagtgccctgcacctgcagtggcagatgggtcctaggagcttcctgaggacaggtgcccagtctctagggcccagggtgatctacacacagtggatgcttgcttggtacaagaagtgccctaggctgactaatctagggacgcagaacaaaccactataactgaatcaatgcagtacttc

SEQ ID NO: 354391 - DNA, 598 bp, Homo sapiens
cggagattttatggttactagagaggtatatggagacccctaagaatacgccctaccccacattagacagcaagccaagttaaaacgtcatcaaccttaccttttccaggcaccgttcctcagtcctttyggcagaatttagtgattatccttgaggtggccgagacaaggctggtaacacagatatccggggctatttgtgtaaaaggagaagtgaagggtgaaaaaatatgatcatgctgtgacgacaggaagcccagatgagaagaaggaggaagtgaggctgagtccgccctctttagtctcagagatttagtactttcccagtggctttttagaagcttcctctcacagcccaccctaaactagttttgtgaaacaaaagaaaacttcaaaaccaagttggttcaggcacagatctgtgagcagtggtggattctagggtaatttggcaatgatttttgcttagaaaaggacagtgcttctcaatcaaggtggcatctcagaattaactgtgtatttgttcaaaaagaagtatgcctggccccaccaccagtttcccattcaggtagacagactggaggggaacacaggaacc

SEQ ID NO: 354392 - DNA, 651 bp, Homo sapiens
tagtcatcaaaaaacaagactcttgtttactgagattgattaatgtgccaatagtagctgtgactttagcatctactcaatactctatttttgcctgctctgttttttatttttttctctctttgaagtgagccatgcacctgaaagatgttatgcttttctgaatctagaatgtaggcatttctaggaatttttaggtggaaaatcttctayattatctactccactacattatcccttctttaatgtgttattataagtagatatttgagttagatttttctgataattacaatcaaatgcatcctaacttaatcaccatgtcctatcgtgatactatctttctttgtaagtgtttcatctcagctgctttaaaattaacgtctccactaattagtgaactctagagaggatagtgacgccagacaagtttgtttctcctatacctaacttcccaggaataactgacgtagagataacctaagttaccacctccctttccacataaacaaaagtcttattcctaggggaagagccaagatggtctactagatgcagccaggaggaggagcttcttccacagagacagaccagaccattgaggagaccagcatactcagaacagatcgttggaaataaggcattgagagt

SEQ ID NO: 354393 - DNA, 549 bp, Homo sapiens
ccagacaacaactaaaataatctttgagaaactaatctgtagctggtgtttgtatacactattttaaaatatttatctttacctaaaatttgtacaatgtgagtaatatatttatttaatattcgcatgtctattttaaagtaatgctttctagaaaagctaagaagcagggttgtgtggtacacactgcctctgtctgtgataygcacatgaggacaacttggctggttaggcacagaagcataatttttcccctgaaggcaaagtccctgaggaagataaccaacctctaacagctggccttgggaacccaattcttaagaacaactgcaaacttcaaggtaatatcattgattttttgttcttattatttcctgcaaataattattatctactatgtgatagatactgttcttggcactgggatacagtatcagacaaggtagaagagttccctgctcttgtgggattatagtctagtagtagatgcagtcaattaccaaggaaataaaaaaaatgcagggaaataatgatacacatcatgcagaa

SEQ ID NO: 354394 - DNA, 597 bp, Homo sapiens
tctgtgatatgcacatgaggacaacttggctggttaggcacagaagcataatttttcccctgaaggcaaagtccctgaggaagataaccaacctctaacagctggccttgggaacccaattcttaagaacaactgcaaacttcaaggtaatatcattgattttttgttctyattatttcctgcaaataattattatctactatgtgatagatactgttcttggcactgggatacagtatcagacaaggtagaagagttccctgctcttgtgggattatagtctagtagtagatgcagtcaattaccaaggaaataaaaaaaatgcagggaaataatgatacacatcatgcagaaaaaaaagcagggcatgttctaggcagagtcaacaattacaggttttctgagataaaacaggacttggtgctcttacaggatgaggcaaaagagaaaaaaaaagtaacaggcagccaaaaatagttaacttttcattatatccacatagtcacattcacaatcatgtgaatatctgaagttgacacattaggctcaaaaatccttttatttcagccctttatattttctttcttttttttattt

SEQ ID NO: 354395 - DNA, 542 bp, Homo sapiens
ttatttaccccttggtattggactgtacccagtccaattcaatctcctgaaatcaatatataatatctcaaaaccatggaatccttatctgcaccacttatttgacaatcagtcaagtgctgccttgcaatcgctctcgtacttttgtcttaaactattattatgactaagcacttcacagctttatagcatgtctcccaacaatactgtaagtccctctaggatttcatcattttggggtccctttatagctttcccacaggaaagcaaataaytaagaaggtaaaaaaaatcattaaaaattgaatgcataaatgtgtgttaggcattcaatacagattggatctgtttaatttttggccagtgttgaaagagtccatagcattttgcctgaatttaagaatgaccaaggcaaataaataaaattttaaacaaaattatttaaggcaggggcaagacttatctggagtgtcaataaatttaaggcagggagcaagacttatctggagtaaattaagatcaccaaatagaataaaggcaca

SEQ ID NO: 354396 - DNA, 543 bp, Homo sapiens
gggcgcatagcgggggctgctgaagatcggagtgtgaggctgagagatgaggtccaggtggagcacgtgaaaagcttcctgtgtctgaaaacacgactccttccagttcttttgtctgtctgcacattatgagtattttggtactactgaatccgtttttaaaagttcaccacgtcgtgcctgacacaggtgtctcctgaaagaaygagtgaggaagtgaatgcgtggaaggggtgggactgggaggcagcccttctgttctgtttatgccgtgcagaccaatgccaggcacttcgatgtttgttgagtgaatgcaggaacagatgtgtagtcagagggcgtttcctccgcggtgctggccagctgctaagtcaggctctgtagtcccattactggtcttagagaagttactttcacattcagtttttgtttgtaaagacagtccatgggaaagtttgttattctcagtttgtttgtttgagacatagtttctttcttgtcgcccaggctggagtgcagtggtgtgatcttggctcactgcaa

SEQ ID NO: 354397 - DNA, 532 bp, Homo sapiens
agctgaaggggatgtgtgtgtgtgtgtgtgtgtgtgtgtgtatacactatatatatataggatgtttccagattgttttcccaataaactacagcaattctcacttccattaatagtacatgaaggcacctgtttccacatccccgtagcatyagttgtgatttccttgtttgtgctggctgggctgatgggtgggcagtaacacttcattgttactttgtttcatttctctgacccctggtgtgcctgagcattattgtataggattatctgccatctggattgctcttcccccaatcacctgtgggacctttgcctgttttgctcccgaggttccagaaaggagaacaaggctttctgggtcaggcaggcaagcaagtgtgtttccgtctcagcctttacctggtcctggagatggtcagccctcaatgacttaccttccctttcccttctgcacagtttttagagtccccagaaatgggaaattaaatcttattctcccaagcgtcccagggtaagggtgagggagaga

SEQ ID NO: 354398 - DNA, 605 bp, Homo sapiens
tggctttcatcaggtttgttcgcttgcttcccaaaatgaagcaagcaaaagcaagagaatggcacatataagagaagttattacaatgaatgaatattgattgtaagctaaataagaagaaaaataaggacacatatgtgagaggtacaggaaacatttatatgaataatgaattgtaaatagttaaatagagatcaaaagattgttaagtttggtggaaagacaggaggcagtggtgagaagraggaacagaaaaaattgagatgatggagaggctgcaattattggtaatcagaaagtttgtggtatgatcatgagtagtgagtttgtataattttatggagaacaaagtaattggcagagagaagtaaagacactaagagaccaggctatcataaaaatagtccacacatttatgaaatcactaagaatcatgaaggagtagtgttagaaagagtggcaatgaaccagtaagtcaatcatcaagaaattaggaggaatgacccaggtggcactgcagactgcaacaaggagagctaatggtcagtatagtctaatgatataaaattcaaagttgggtgctttttgagcaagatagagaagca

SEQ ID NO: 354399 - DNA, 605 bp, Homo sapiens
tggctttcatcaggtttgttcgcttgcttcccaaaatgaagcaagcaaaagcaagagaatggcacatataagagaagttattacaatgaatgaatattgattgtaagctaaataagaagaaaaataaggacacatatgtgagaggtacaggaaacatttatatgaataatgaattgtaaatagttaaatagagatcaaaagattgttaagtttggtggaaagacaggaggcagtggtgagaagaaggaacagaaaaaattgagatgatggagaggctgcaattattggtaatcagaaagtttgtggtatgatcatgagtagtgagtttgtataattttatggagaacaaagtaattggcagagagaagtaaagacactaagagaccaggctatcataaaaatagtccacacatttatgaaatcactaagaatcatgaaggagtagtgttagaaagagtggcaatgaaccagtawgtcaatcatcaagaaattaggaggaatgacccaggtggcactgcagactgcaacaaggagagctaatggtcagtatagtctaatgatataaaattcaaagttgggtgctttttgagcaagatagagaagca

SEQ ID NO: 354400 - DNA, 557 bp, Homo sapiens
tcaaatacagttaatgaccatgcaagaagcttgagtctttggttcctgtcatagtaattagagctcttgccaatggtgaggcttagagatttataagccaacagcaatgcaaagctgttcaagataggtgggggcaacctgacagcctcaaggtagtgytttccactggacagtttttgatgatctcaggagagtgtatactgagcaagaacttataaaaaataataccaagaaataatttagatgaagcctaaccatgatccagattggtaaacaatttttcaagatggctctaattttaaagattctgttcccagtctctactcatttctatcacataaaatgatctgacttagggatgcaaaaatgtgacctcaaaattaagggtagctagaaatatgcaaatactatttatgatcacttaatttcagttaccttagagttactctgtggttcagatctacattccttttgtccgcctcactgtgtaatctccagtcattcacatatctatttcaccacatggtggtaaactccttccaggtggaagctatgtt

SEQ ID NO: 354401 - DNA, 579 bp, Homo sapiens
tggtaagtctaattttgtctctaatatggaagaaactattggcaattaggaaattatgttgggtagcatggaacgttacccaccagccaacgtaacttgagtaacaaaaaagartaattaaaaaataaaagatttaagtacagattttaaagtccattcatagagttccaatgtccaaggcatatctgtgtggcaaagggtcagaagcaaggacggggcttgtatctcctcttctttcaatctgttgctatctctttgggctctagttctctcactgctaagaagtataagtccccaaacgagaaagctaaaagaggaaaataagcacttcaggatattgtcaccttgtcctcatgtcccgggagtcaatgatttcttctgtgtctccaaattcaggtatcattaccttaaaacataaaatgttagaaatagaaagaactttgaaaatcaagactctgggaaagagaaaccagtaataagtatcaccagttcaactaagatctgatttggtcagttagaaaattaactaaaaatatcagtgcatttagatcttgttatggggctatgcagactgtatca

SEQ ID NO: 354402 - DNA, 579 bp, Homo sapiens
tggtaagtctaattttgtctctaatatggaagaaactattggcaattaggaaattatgttgggtagcatggaacgttacccaccagccaacgtaacttgagtaacaaaaaagaataattaaaaaataaaagatttaagtacagattttaaagtccattcatagagttccaatgtccaaggcatatctgtgtggcaaagggtcagaagcaaggacggggcttgtatctcctcttctttcaatctgttgctatctctttgggctctagttctctcactgctaagaagtataagtccccaaacgagaaagctaaaagaggaaaataagcacttcaggatattgtcaccttgtcctcatgtcccgggagtcaatgatttcttctgtgtctccaaattyaggtatcattaccttaaaacataaaatgttagaaatagaaagaactttgaaaatcaagactctgggaaagagaaaccagtaataagtatcaccagttcaactaagatctgatttggtcagttagaaaattaactaaaaatatcagtgcatttagatcttgttatggggctatgcagactgtatca

SEQ ID NO: 354403 - DNA, 398 bp, Homo sapiens
aggatattgtcaccttgtcctcatgtcccgggagtcaatgatttcttctgtgtctccaaattcaggtatcattaccttaaaacataaaatgttagaaatagaaagaactttgaaaatcaagactctgggaaagagaaaccagtaataagtatcaccagttcaactaagatctgatttggtcagttagaaaattaactaaaaatatcagtgcatttagatcttgttatggggctatgcagactgtatcatcraatttatttttccttgacagcacactataaatcctttatttcacttaacttctaaatcagattaagtggattacaaacagaatttttaaaaaatgaaacagaatataacacaaaagtcaaagtgcatcataagtagaaataatattt

SEQ ID NO: 354404 - DNA, 606 bp, Homo sapiens
ctagcatggcaatatggaaattttacaagtttgagaatttaacaggtccataagttttgccaaaacactgaagaacccatatgcatcaaagaaatggaaagttatcatcagtaggaggtgctcagaaaaaagagaaaactttaatacgtagttcagtcattcctgagctatgtaaggatttgacttaagataaaaaaaaaagggggataggtatacccattcttttgtattagcaaagaatgatttggttgcaagtaacagaaagctatmttaactaagttatgcagaaataaaaatagattggttggatactgaaccatttcacataatcttggcaggtatagagatgtaacatgtcaggaacaaagacacagatatttgaatgctttcaggacctttcctttccattcctcatctaagcttctctctgcatggtggcttccttctgctagtacagctttgtccacatggcaaaacgatgaccactagctgagcccacgacccacttttcaaagtttcaatagcagagatctgcttctcttttcttctcaaatacagcttgaaaagtctcaaggaagcactcagattggtcaggcttgggttagg

SEQ ID NO: 354405 - DNA, 569 bp, Homo sapiens
cctttcctttccattcctcatctaagcttctctctgcatggtggcttccttctgctagtacagctttgtccacatggcaaaacgatgaccactagctgagcccamgacccacttttcaaagtttcaatagcagagatctgcttctcttttcttctcaaatacagcttgaaaagtctcaaggaagcactcagattggtcaggcttgggttaggagcccattatagaatcatcaatgatggccaagtagttggccctatgactgattgcccccactgagatggaacaattgaaaaggaggaagaggagttctccaagaggagggcaatgtattttggggaagatgaaaaagccttatgccagacataatgagtaaggaaatgaatacactttgacctttggatttctgtttttttggtttgccattttatgtaacatactcacaagttgactgttgatctctttatctagataactagttatatttctcttttaacaggtttcacttttctagtcattcttctcatataaggatcagaaaacaacagtaaaatggagaaagagggttaggt

SEQ ID NO: 354406 - DNA, 569 bp, Homo sapiens
cctttcctttccattcctcatctaagcttctctctgcatggtggcttccttctgctagtacagctttgtccacatggcaaaacgatgaccactagctgagcccacgacccacttttcaaagtttcaatagcagagatctgcttctcttttcttctcaaatacagcttgaaaagtctcaaggaagcactcagattggtcaggcttgggttaggagcccattatagaatcatcaatgatggccaagtagttggccctatgactgattgcccccactgagatggaacaattgaaaaggaggaagaggagttctccaagaggagggcaatgtattttggggaagatgaaaaagcyttatgccagacataatgagtaaggaaatgaatacactttgacctttggatttctgtttttttggtttgccattttatgtaacatactcacaagttgactgttgatctctttatctagataactagttatatttctcttttaacaggtttcacttttctagtcattcttctcatataaggatcagaaaacaacagtaaaatggagaaagagggttaggt

SEQ ID NO: 354407 - DNA, 525 bp, Homo sapiens
ataaaatctgctatacaattatagayaataatattgaaaatttaatataagctgtaaaaacaaccaaagggtaactatgagacagcaatttttttttcctgatttgttaatatatgacccccaagtaggtgaaggctctgtcaagttcacagaggtatccaagaaattacattctaggcagaggctctcagaaaactgcagactaatggctgctttaaccctattgtccagtgtcaaaggagtcattcatattggaggagtgtgcccatcagctgcttaaagaggccatggcacttaactgagctcaaactaggggaaagttacaagatttatttcccatggccacaacttgattaaagagaccctaatctaaaaaaaaaaaaaaaaagatgaaggggggatttttaaaaaataaatgttattaaggtctagggacaggcttacaatcaatagctgaaatttggtaggggtgaggtaagtggagatagggatggaaaattacaataaacatgagattttggaaag

SEQ ID NO: 354408 - DNA, 596 bp, Homo sapiens
ccccagtttaggaaagttaactttatttgggtttagactttagaaagcaggaatgcaattaagtgatatgtgttagggaaatagaattagaaagaaaatcttccaactcagaaatcctgtccacaaaggtacagaatagagggaaaaaaaggattttatgattgaataagcattaaaccacgatgtgatgtgcattgtaggcagtgtgctaagagaaggcaaagatagaatgaaacctcaccctttatatagccaagctgatgacaacccattgcatacatgttttcaagataaacaaaattagtccttatgtaagaggacttgacatcaccatttgtcacacagagttcatcctaactttacctagtaattggggtgaccatytgtgttagctaattgtgttaccatatttttgccatgggaattaagtctttaatgtttaatttgcatttgtttttactcatataaggttatcactataagatattattttccttaggggtatcactaatagatgtcacttttcttattttattttgatcatattaagccatgatgacattatcttcttcagactatcaaaagatgaatttata

SEQ ID NO: 354409 - DNA, 405 bp, Homo sapiens
ggagtttattaagtattcattcacataacctcaaggtcctaagaaaggccgtctgcaacctgaggaggaagaagagccagtcggagtcccaaaactgaagaacttggagtccgaygtttgagggcaggaagcatccagcacaggagaaagatgtaggctgggaggctaggccagtctagtcttttcacatttttctgcctgttttatattctagccatgctggcagctgcttagatggtgtccgcccagattaaaggcagatctgcctttcccagcccattgactcaaatgttaatctcctttggcaacaccctcacagacatccccaggatcaatactttgcatccttcaatccattcaagctgatactctgtattgaccatcatacattgcttgcatttctgg

SEQ ID NO: 354410 - DNA, 577 bp, Homo sapiens
gccttcactgaatattcacagctctattagccaaaacccccactgtttctaagggagtaaaaactgggtagacttctaactttctgtgcccactctgtgccttaacaatggccccaggactgctactttaaactgaatttagaatgagagatccattatattttcctstttatatttgtgaattatgtttgccagtttttttgcaaattgtttttaaagtggcctgccctcaattttaaaatctttgtgctctggacatatataatgaacttcattccaggtagaactgaaaccagcttcctatccttctgaccttgactgatgcttgacatacgtcaatgtatgggattacatgacatgttgctttttaaagctgttatactgcttgcatctttttcatcattttagtggagatttagaatgttgtattccgttagcctaaggtttctaaggccatttttgtcatcttttttctgttgaaaattctctaaagggtctctaatagcttgctcagtgggtgacacacgtggtcttctatagtcttgcccctaggcctatttttttttttttttcatct

SEQ ID NO: 354411 - DNA, 495 bp, Homo sapiens
aaaccatcaatgaacccagagaacataacaaggagcaaaaacaagtcaatcagtggagccttactcagattgcagaaacatggccaaatgagtggttgttgctttaagctactaagtcttgcatggcttgttacatgatattagtaaagtggcatatttactgatrcagttaactttgtgatccccattttacagatgaagaaattgacatacagagaacttacatatattttcttaagtcatacagctaaagcacggcagagcaagtattctactgaggcagcttggcttcagagctccccatgcaatcaccacagtaaatggcactctctggacttatgtcagctttctttcttttctcctgaaacaagcctacatctaaagctttagagttattcagtcttttcaagtatttttatggagtctgacaaaaattatttttttttcttggggttctcattggtaatgcatccaataaaattagttaagtaagag

SEQ ID NO: 354412 - DNA, 508 bp, Homo sapiens
catttagtgatgttcaaaatattatacattgttattaaccatggtcaccatgtgtacaatagatcttttgaccttattcctcatatctaactgaattgtatctagcctgaatcctgagtccacagaggatgacctgatgctggaatgggttgtgaccttgacttggcaggggcatggccaggtgctgggatggtcctggtacctggttcccctgagatggacctgaaactgagttcacatgagctagtcttatctgcatgcagcctactggatccaggggtgggcctgggtcttgagtctcctggggtaaacatagtatctcagttcatgagggagagcctagaactcaggtccactgagatagacctggattgtgtctgctggaacatggggcagccacagggactggcctagcattggayaggactgtatcctatgtccataggtgccaacgtggtgcatgaagtcaggggtggtgacctgatgctggggcagacctaaaaattcg

SEQ ID NO: 354413 - DNA, 561 bp, Homo sapiens
tcatagggtaattctacctgtatttgttactcctgccattttactacctcctgatgccaccaggagcccaatacttacacaatgtttccaggttgttcaaacccgagtctcaatattattattttaaaaatgtattgaacaatacatgtcttaagacttattatgggattttattaagtatatctggccactttactaaatactccaacgtgcattaattggactattctttcttgaatataaattataatatggtttttactctatttaaatgtttgaaggtgtggacgaragctattacattccatggatggtaacaaaggaaatgagactcttgagtcagaggcaaaggacattattattcatggcaaaacagtagcaagaatatcgtcatgggtgtatggattccccagtccccaaattgtgcacagtgatgtgatggccaggtggagccaatacatacgataaaatctttgctagaaaataaggaacctgagttagggaatccataacttgttttgtatactagtaataaactagtatacaataaaatagataaac

SEQ ID NO: 354414 - DNA, 584 bp, Homo sapiens
ttctcatttttcattgtttaactgaaaataggaaggtgtcagcaattagcatatttcattaagtaagacaagatccacatcatgatgatttttatatayaaattgataagagggaggacatgtgtttctttaagaataagaggattctaaattttaaagatttccaaattttaaatatttgaagtgaaaaatctattaatcattatagataaaagtattcccacagtattaactccaaattgctgtcaaacactgggatgcatccaatataatgttaaagtaatatcctcttctgcttgaaacatttttcttttccaagatgtttgagatatattttagtattggatgatggtctgcacttaattctaaaatggtggctgtgtgtgcatgtgagtgtatgtgtatgtgtgttttaaactgcacatctttatgtataaattaatttgcttctaagagatcaacaatgaaacattttaaaggcttaatttgcagaaaataattgagtggtgtattcaagaaataagcaatatagcatagtgtgaagaacactcagtctagggagagaaatttaaaattcacagagc

SEQ ID NO: 354415 - DNA, 546 bp, Homo sapiens
tatttgggactctgaaaagccaagttccttcttgattcggctattcggtgattcctcgggcttgtcttaatttgggtacatgcatatctttctaacaaggaagagaggatcctcaagggcagggattatgtttgctggagactacattgtcagcaactttgagaaaagggattttgtttaatgcatttttctgtttcttttccattcctggtccctcagtytacatttaggaggtgaatggatgtttgttttgacatactgagtccaataaaaatgcgaaaggaaacttctgacataggcccttgttgtgttttactttctaagaagtatcgctttgtcctggataacttatacttaattctctgtgtttagattctattttaaaatcaaatttccatggaatctgggactaaaccattcttcatttcccagcctggccacagtctcagagcaggccttagaacattgtcacaccagccacagttcccaggcatgtctcccctgaaggataatcacactcctaaaaaaggtaattcatgccagagg

SEQ ID NO: 354416 - DNA, 633 bp, Homo sapiens
tagtatatccactgtttctgcaacgattaccactacaactattataactccagaatatttccatcatctcaaaaagaaactccgtacctattggcagttagtcccaatcctccttccccsacctggaaatcactaatctattttctgtctttatagatttgtctattctgaacatttcatatgaatggaatcacaaaatatgtgaccctttgtgtctgccttttgcttatgatagtgttttcaagtatacggtgaattttattatactcatcattcaaagatgagtatattttacttgaatataataaaactatctgctcagaatgctaatagatatgtggaataattagaaaagattcagcctaaaatgtggaagacctcagttctagtgctgatttcttcacacagtaactttctctgttgtaacataagagtattaaataagatgatatcaaaggtatctctctttaatttctgttattctaggaatccctaaaatacagagacatgtactcatcattttggaaaaagtagttgttacaaaatcaattaactagatataaaaactttagttcctaacttgattctggagacagaaaatttgagacggctgctatcaataacactttgacc

SEQ ID NO: 354417 - DNA, 633 bp, Homo sapiens
tagtatatccactgtttctgcaacgattaccactacaactattataactccagaatatttccatcatctcaaaaagaaactccgtacctattggcagttagtcccaatcctccttccccgacctggaaatcactaatctattttctgtctttatagatttgtctattctgaacatttcatatgaatggaatcacaaaatatgtgaccctttgtgtctgccttttgcttatgatagtgttttcaagtatacggtgaattttattatactcatcattcaaagatgagtatattttacttgaatataataaaactatctgctcagaatgctaatagataygtggaataattagaaaagattcagcctaaaatgtggaagacctcagttctagtgctgatttcttcacacagtaactttctctgttgtaacataagagtattaaataagatgatatcaaaggtatctctctttaatttctgttattctaggaatccctaaaatacagagacatgtactcatcattttggaaaaagtagttgttacaaaatcaattaactagatataaaaactttagttcctaacttgattctggagacagaaaatttgagacggctgctatcaataacactttgacc

SEQ ID NO: 354418 - DNA, 633 bp, Homo sapiens
tagtatatccactgtttctgcaacgattaccactacaactattataactccagaatatttccatcatctcaaaaagaaactccgtacctattggcagttagtcccaatcctccttccccgacctggaaatcactaatctattttctgtctttatagatttgtctattctgaacatttcatatgaatggaatcacaaaatatgtgaccctttgtgtctgccttttgcttatgatagtgttttcaagtatacggtgaattttattatactcatcattcaaagatgagtatattttacttgaatataataaaactatctgctcagaatgctaatagatatgtggaataattagaaragattcagcctaaaatgtggaagacctcagttctagtgctgatttcttcacacagtaactttctctgttgtaacataagagtattaaataagatgatatcaaaggtatctctctttaatttctgttattctaggaatccctaaaatacagagacatgtactcatcattttggaaaaagtagttgttacaaaatcaattaactagatataaaaactttagttcctaacttgattctggagacagaaaatttgagacggctgctatcaataacactttgacc

SEQ ID NO: 354419 - DNA, 471 bp, Homo sapiens
taccgcccatcacccaaacttgcctgaatttctatttttatcttcttaaaatgacttggattttctaatttgattaatgctttcatgatcaggaatatttttaaatattcttgtagcatttctaattgttataaaaatcaaaacactctttatgctaacatttgcaattagttcagtatcatttatcatttatattgcagaaatgtrtaataaatctgccatgctgacaaggttctacacagttgacatagttctagatttccagttttagatggtttatatagttttagagttccagtggaaggagtggcccttgaatccctcatttcccaaacttctacttccttcctaggacttaaccctttaggtaaacaactattttttctttagcccaaatctcacatttccatactgcaagaagcctgtggaccagaaggaatttgaaaggagctggtaagaggataggtgtgg

SEQ ID NO: 354420 - DNA, 471 bp, Homo sapiens
taccgcccatcacccaaacttgcctgaatttctatttttatcttcttaaaatgacttggattttctaatttgattaatgctttcatgatcaggaatatttttaaatattcttgtagcatttctaattgttataaaaatcaaaacactctttatgctaacatttgcaattagttcagtatcatttatcatttatattgcagaaatgtataataaatctgccatgctgacaaggttctacacagttgacatagttctagatttccagttttagatggtttatatagttttagagttccagtggaaggagtggcccttgaatccctcatttcccaaacttctacttccttcctaggacttaaccctttaggtaarcaactattttttctttagcccaaatctcacatttccatactgcaagaagcctgtggaccagaaggaatttgaaaggagctggtaagaggataggtgtgg

SEQ ID NO: 354421 - DNA, 643 bp, Homo sapiens
aaatttaattttatttattttgcctatgtcttttcaaaattcagatctatttctctgcttttccagactagatatggtgaacataatttgtctatttttaaaggatttccctctactaataacagtattttgctgctgtctgatgcaatgatgatttctaggccttcttagatatataaggctctttgcccctccactgaatggccttagaccgctggattgggttttgtgacttggctctgacctcattattgactctcagctcctgtctgacagttacagcaggtatgatgaggcatctcctctcctcccctccccawcacatccaacacgctcactctaaagcgctgtaggcttagaacacacaatatgaaacttgggttaaatataagctgagggagggcttgagggactgtcccagtcactatgacattttgtacagagcatgagagactaggattctacttcctgattaccccttaattccctgactgaattccctaattctcttattgaactaatttgcttactgaaattccctaactttgcagcctcaacttcagcatcaggatataatgggttttattcaaggatatttaacatcttctctagcttgaagattcctgaagctatctttaaaaca

SEQ ID NO: 354422 - DNA, 187 bp, Homo sapiens
attctgaactagggaactccctcagggctcctaaaacaaagccaggcagatattaggcactcaatacttgtkgaatgaatgaagcagctctccgcttccatgagcaaatagagaaatagagaaaagaaaacaccaatcaaatgtgcaatagggtgccttactgttccctgcaagcttgggcagccgc

SEQ ID NO: 354423 - DNA, 620 bp, Homo sapiens
ctgttcccttggaaaacattttgactctaaggaatgatgatcaattaagaatgctgcaagcctttcaataatgcatattttaaaggaaaacaatcattttcttaggagtatttttatatccactcaagactagtcacaatagctgaatgcaaagtagttagggtttgcttttgtttgtttggtatttttttggtttggtagcatagttgcaacttcaaggcaagcttccttccagctcccacgtaagagttctcaaaccttacggcatcccactgtcttcggtttttcactctgtttcttcacccaatcatggaagctgccgttttaaaagaaacaaattgatttcccttggtaaaaggggtggatatggggatggggacaccagacccagaagaggcaaggattaacaagataggagtaaatatttactggacctgtggacatggagaacttcaaaattctctaaagcaagatttcagtttgcaaaactgcttctgggttaataaattctaaaacaatgaacagccaattgtttttttcttaatttataagataygcttatattatttcttaaattgtctaaataatatctaaaatcataagattatttacagccccca

SEQ ID NO: 354424 - DNA, 616 bp, Homo sapiens
tttcctttaggctagttttttaaacttataaaagaaatttccatctatggtgtagtaaaaaaaagaagaaaaaagcagggagaagggagtcttttactcccatgggactttctatgtaaaaggtgagatttttcagctactaaatttaacattattttcaaagctttatcaaattctttttcacttcctcttctttctgctgagtttcacgtgttgatcaagggaaggggattaaattatgggtctcttagccactggaagggcttatttaccctcactgcagcccaactatgctgctctgtaatctaaagaagctctttaattttccaaaatgaatcaagatggacccttctrtcatactttgccccactgccctgtgtttgtgtaagcctgaaaggacttgggtcttttcattaaaaccgaactacaaaggcattgctaccttgtgcattttttctgggaagctgggatttgcattgagagtatgtcccatacctacccggttcccctgcccaccttcacaatgctaggcttaattagtatggtcattattattcttattatttcccttaaaagcaggaagacaaaatagcattacccattcattatcaaccag

SEQ ID NO: 354425 - DNA, 585 bp, Homo sapiens
tttcgccatcttgaatctgacttttattttctttctatttctgggtcttcaaatgattttattaagtcagtcttacattttggagtgcaagtaaggaattacatggagacaagagagaggaaaagatgtcttcttctgtgcttacttccttagacaagattagaaaagggaaaatgtgaaatasaattgcaggctttcccgtttaaaacctgaaagagtctgttttaaaaattatattggcaaataggtcttatggaaacaaactctagcttaattattatgatgtaattaacttccatccagtgagcgtgagggcagaacataagtctacaaacatcagatggataaacatattaaagagaaagaaacgttatcaagtagaatgacataaaggcaagtggtagcacaatggcaagagaggaggacaaagctcttttgccaggaactgggagtctgtggaatctggaagtctgtattctatctgacatgaacttaaaagatgaaaggtcagtgtcttcatcccactgctgtgccacctccccttgctgtaccagagcccccattgtttaggttcagatgggcaaa

SEQ ID NO: 354426 - DNA, 585 bp, Homo sapiens
tttcgccatcttgaatctgacttttattttctttctatttctgggtcttcaaatgattttattaagtcagtcttacattttggagtgcaagtaaggaattacatggagacaagagagaggaaaagatgtcttcttctgtgcttacttccttagacaagattagaaaagggaaaatgtgaaatacaattgcaggctttcccgtttaaaacctgaaagagtctgttttaaaaattatattggcaaataggtcttatggaaacaaactctagcttaattattatgatgtaattaacttccatccagtgagcrtgagggcagaacataagtctacaaacatcagatggataaacatattaaagagaaagaaacgttatcaagtagaatgacataaaggcaagtggtagcacaatggcaagagaggaggacaaagctcttttgccaggaactgggagtctgtggaatctggaagtctgtattctatctgacatgaacttaaaagatgaaaggtcagtgtcttcatcccactgctgtgccacctccccttgctgtaccagagcccccattgtttaggttcagatgggcaaa

SEQ ID NO: 354427 - DNA, 602 bp, Homo sapiens
attcgtttctttctctctctttccctcccttctttccttttttcctgccactcttcatctttgaaattctatcatttgtgtttagatcctttggcttctcacctgctttgcctgggacctatgtggttcacagaagtagccaatccattcgttattttaaaaagtttattggaaattcagccttgcacacaatatggctatacaggctactttaactgttaggatttttttgctttaagtaaaattttaccaagttgatgtgtaactctagttttatcttcaggaagtgatctatcactggaaaatggagtttcaaaggaaaagtacttctaaaacaatamaataataaatgaaaaatacattttaaaatttaaaaataataaagataaactttgtcattagaaaggctggaagttgctgcttctttcactttgaaagtgctaacatatactctttagggacaaggaaagacactataagatcaacttcttgtgagttaattaagcagagtcagttgtataagtggtgaatgggggagagttaaatggaagatggaggagagtttgtttaaaaagctcagcaaggaagagtagaagctcttg

SEQ ID NO: 354428 - DNA, 542 bp, Homo sapiens
aaaacagacaaggtaaattttaaagatgaggaagaaggagcaggacagagatgttgcatcagtgactgcatcctgaactggctctaagtataggcacaggcattggagatggatggacaggtaggaaggtggggcacatggtgagggacagctcaggctgccttggcctaattctcagatttgcaggagccctctctgcagtcttggtagggagmtgattagacacatgtagatattgtccatgacttgtgcacagtagtagatacatcttcagatgcaaaaaacaaaatacccagaatacagaaaactatttctcaatggtgttggagggtgttttgaacagagggcagtgagatcaccgaaactacaaacagaataatctaatctttaaaagacaatctaaccatcagtgccttgaagtggaaatggggatttttttgttggcagttacaccatttgatatttgtccttttccactggtcacacattttggtatctttgggtgacagttttaaaagattgaataaagaaactgataataa

SEQ ID NO: 354429 - DNA, 544 bp, Homo sapiens
cagatgcaaaaaacaaaatacccagaatacagaaaactatttctcaatggtgttggagggtgttttgaacagagggcagtgagatcaccgaaactacaaacagaataatctaatctttaaaagacaatctaaccatcagtgccttgaagtggaaatggggatttttttgttggcagttacaccatttgatatttgtccttttccactggtcacacattttggtatctttgggtgacagttttaaaagattgaataaagaaactgataataatggttctctccatggcaaggacaggcagcctggggtggagtcagaggaagatcaacctttcgttgtgcatttttttgtgtgttatttgaattttgttactatgcgtatttattacctactcaaaaataaragaaatgtactgcaccatgtctacagtgcttccttgaattcaacaaatatttattattgaataaaattagcacaaataaagcatacagttcactgcatctttgggatttggctctacttgaaagtccctgattagtacaggaa

SEQ ID NO: 354430 - DNA, 579 bp, Homo sapiens
gtgtggcttttgctcctttctgtgctaccatcaacactcacggtcagtcattagcacctatgaggggaccatatctctttcattcatattaatattgctgttttgctgtagatgcataatctgtacttgaatgaaagaggaaaagaaattaaaaaatagttcttggccaggcgtgatagctcacgactgtaatcccagcactttgggaggccgaggcaggtggatcatttgaagtcaggagttcgccaccagcctgactgacatggtgaaaccgtgtctctactaaaaatgcaaaaaagttagctgggcatggtggcacatgactataggcccagctactcaggaggctgaggcaggagaatcgcttgagcccaggaggtggagattgaagtgagccaagatcacgccactgcactgcagcctgggtgacagagagagactccctctcaaaaaaaaaaaaaaaaaaaaaaarttctcgatgtcactgttttcacatctctggcaaatgaactgtgtttttcatacttgcctgaatggtgaataaaacaggttcttcccacactctcccattcacaataa

SEQ ID NO: 354431 - DNA, 574 bp, Homo sapiens
ttgcctctctggggtaaggcccaagaatttgcattttgtagttctctctggcaattatctgaggatccagaaatgtagaaattcctgggataaatgatttctaaaatgccatctaataagactttctctrgatgcaaattaggaaatttttacagtattgccaatcgtttcatacggaggttttgttctttattctcaccattcgattaatatctaaccttcatttctgaacatctttatgcattcagtcctgtgttctccagcaaggtcactggtttcttcaagacagtcactaatgtcttcagcagactgtcctgtgggcattgacggagggaagcaggaaatgaaagaagctagaagttccagaaatgcatgtaaaattaaaagccctggatctgatacaaatgtattaagccaagaagcacccagccttcataagcaaacaggaaaaaaagaacaatcattgctcctcttggtaactcctttcctccttcaagatcatacttggtgttgtaaagattggaagaaggtcgtcaaggaaagaatataatgacaacaacaacgacagtaagag

SEQ ID NO: 354432 - DNA, 574 bp, Homo sapiens
ttgcctctctggggtaaggcccaagaatttgcattttgtagttctctctggcaattatctgaggatccagaaatgtagaaattcctgggataaatgatttctaaaatgccatctaataagactttctctggatgmaaattaggaaatttttacagtattgccaatcgtttcatacggaggttttgttctttattctcaccattcgattaatatctaaccttcatttctgaacatctttatgcattcagtcctgtgttctccagcaaggtcactggtttcttcaagacagtcactaatgtcttcagcagactgtcctgtgggcattgacggagggaagcaggaaatgaaagaagctagaagttccagaaatgcatgtaaaattaaaagccctggatctgatacaaatgtattaagccaagaagcacccagccttcataagcaaacaggaaaaaaagaacaatcattgctcctcttggtaactcctttcctccttcaagatcatacttggtgttgtaaagattggaagaaggtcgtcaaggaaagaatataatgacaacaacaacgacagtaagag

SEQ ID NO: 354433 - DNA, 574 bp, Homo sapiens
ttgcctctctggggtaaggcccaagaatttgcattttgtagttctctctggcaattatctgaggatccagaaatgtagaaattcctgggataaatgatttctaaaatgccatctaataagactttctctggatgcaaattaggaaatttttacagtattgccaatcgtttcatacggaggttttgttctttattctcaccattcgattaatatctaaccttcatttctgaacatctttatgcattcagtcctgtgttctccagcaaggtcactggtttcttcaagacagtcactaatgtcttcagcagactgtcctgtgggcattgacggagggaagcaggaaakgaaagaagctagaagttccagaaatgcatgtaaaattaaaagccctggatctgatacaaatgtattaagccaagaagcacccagccttcataagcaaacaggaaaaaaagaacaatcattgctcctcttggtaactcctttcctccttcaagatcatacttggtgttgtaaagattggaagaaggtcgtcaaggaaagaatataatgacaacaacaacgacagtaagag

SEQ ID NO: 354434 - DNA, 574 bp, Homo sapiens
ttgcctctctggggtaaggcccaagaatttgcattttgtagttctctctggcaattatctgaggatccagaaatgtagaaattcctgggataaatgatttctaaaatgccatctaataagactttctctggatgcaaattaggaaatttttacagtattgccaatcgtttcatacggaggttttgttctttattctcaccattcgattaatatctaaccttcatttctgaacatctttatgcattcagtcctgtgttctccagcaaggtcactggtttcttcaagacagtcactaatgtcttcagcagactgtcctgtgggcattgacggagggaagcaggaaatgaaagaagctagaagttccagaaatgcatgtaaaattaaaagccctggatctgatacaaatgtattaagccaagaagcacccagcctycataagcaaacaggaaaaaaagaacaatcattgctcctcttggtaactcctttcctccttcaagatcatacttggtgttgtaaagattggaagaaggtcgtcaaggaaagaatataatgacaacaacaacgacagtaagag

SEQ ID NO: 354435 - DNA, 632 bp, Homo sapiens
gtgttaactgaaaaaccctagcaagttgcagaatagaattcgaatataattataatactatttttgttaaaaatatatrtttatctatacataatgtttgtatagacataggcaaaaatctgggagcatttgcacaaatgtgttcatttcttttggggtggggaaagattacaactcctcctctgtttatttcatgagaaattttgtcacaaccaaccattttttcctctcaaattggcaagattcttaaaaaaaaacagaaataattataactcatgatgataaatatgtgaagaaacagatatttttatattttgctggtaggggtgcaaaacagtgaaaatttttctgtatcttgcagaaacagatatgtatgcaaaaatgattagatatatattcaccaaaatactatttataatagcaatttacaaaaggaatgaaaagtccaccaggggatttataaaccatctcgacctgagactgagttccatgcagcctttaaaaatcatgttatcaggaatatgattagttatcaagaactatcaggaatagttaatgacataaggaaatgttcataacacatgaagatggaaacaggcaatatgcataaaaaatagtatatataatatcat

SEQ ID NO: 354436 - DNA, 557 bp, Homo sapiens
tttgtcgcagtgccacaccttgtagccaccagccctgcaggggaaggccagaggcagagagagaagatgctgtccagatttggcaggttctggaagaagcctgagagagaaatgcatccatccagggactcagatagtgagcccttcccacctgggacccagtccctcatccagccgatagatggaatgaaaatggagaaatctcctcttcgggaagaagccaagaaattctggcaccacttcatgttcagaaaaactccggcttctcagggggtcatcttgcccatcaaaagccatgaagtacattgggagacctgcaggacagtgcccttcagccaggtatgtgttctgsggggagagcaggtaagagtttgcaggtggtagtggacagctgggatggatggagagtaggggaaaaggctgtcaggagcctgactctagcttaactacagatttggtccttgggcattcatcataggatttggcaaagattaagtttccttctggcctttccattttttcttggcattgtggaaatgctgcaagaatgatatgat

SEQ ID NO: 354437 - DNA, 485 bp, Homo sapiens
caggtatgtgttctggggggagagcaggtaagagtttgcaggtggtagtggacagctgggatggatggagagtaggggaaaaggctgtcaggagcctgactctagcttaactacagatttggtccttgggcattcatcataggatttggcaaagattaagtttccttctggcctttccattttttcttggcattstggaaatgctgcaagaatgatatgatgatactgtcaatatcagtaatcattcattcacactgaagacacagagctctgttttatttatttatttttgcattggaggtgatctactcagagatataagtcagactgtaccctcagttaggaaactgagaatttagagtaatcaccagaactcctctgtagctatctttctgcactctattaatatgtggatgagcaggtcaactccatttgttgataaagtggggtgcattggactccttcccaaatactctcatatccat

SEQ ID NO: 354438 - DNA, 530 bp, Homo sapiens
ttggcaaagattaagtttccttctggcctttccattttttcttggcattgtggaaatgctgcaagaatgatatgatgatactgtcaatatcagtaatcattcattcacactgaagacacagagctctgttttatttatttatttttgcattggaggtgatctactcagagatataagtcagactgtaccctcagttaggaaactgagaatttagagtaatcaccagaactcctctgtagctatctttctgcactcyattaatatgtggatgagcaggtcaactccatttgttgataaagtggggtgcattggactccttcccaaatactctcatatccatttacgatggtcttaatccccatagtccatacttaattactttataggtttatgagggacttctttaatagcttgctaaagctatcccacaacctcaaagtacgttgaggttctcaggcaaaagttgtcatatcatttctagtattatgatagcaaaaaagtgattttctttcacttattttctcatatga

SEQ ID NO: 354439 - DNA, 530 bp, Homo sapiens
ttggcaaagattaagtttccttctggcctttccattttttcttggcattgtggaaatgctgcaagaatgatatgatgatactgtcaatatcagtaatcattcattcacactgaagacacagagctctgttttatttatttatttttgcattggaggtgatctactcagagatataagtcagactgtaccctcagttaggaaactgagaatttagagtaatcaccagaactcctctgtagctatctttctgcactctattaatatgtggatgagcaggtcaactccatttgttgataaagtggggtgcattggactccttcccaaatactctcatatccatttacgatggtcttaatccccataktccatacttaattactttataggtttatgagggacttctttaatagcttgctaaagctatcccacaacctcaaagtacgttgaggttctcaggcaaaagttgtcatatcatttctagtattatgatagcaaaaaagtgattttctttcacttattttctcatatga

SEQ ID NO: 354440 - DNA, 585 bp, Homo sapiens
tagagcctgtgaactttccatcacatgtttcaagtaaagatattgacattgctgggaacaactgtggaaggtcacagtgaaaggtcagttactggggtgaagttagtagacagatttaaatgctgggccagtttcctgttacttgcaaattataagcagaaacacttraattttactagaaagaatatgaagaaaggggatttaaaattttctgaatggaccaagatttaattctggctcaaaaaagggtacttaaaagtagaatctatttattatacttgatatgtctgtctgcttgaaaatatttgtaaaatattttattttgatttttaaacactatggaagtgcctcacacatctaacttttccccaaaataatagagctatcatatgatacactaattccactactgtgtatacaccgaaaagaaaggccctcaattaatgtttatatgtggaatgaatgaactgcttcgtacacagagggtgctgagagaactacagcctttattattgctgctttcctgggtgattgaaactcaaaggagatgagatagtccctgagagaacagtacaagttgccaag

SEQ ID NO: 354441 - DNA, 585 bp, Homo sapiens
tagagcctgtgaactttccatcacatgtttcaagtaaagatattgacattgctgggaacaactgtggaaggtcacagtgaaaggtcagttactggggtgaagttagtagacagatttaaatgctgggccagtttcctgttacttgcaaattataagcagaaacacttaaattttactagaaagaatatgaagaaaggggatttaaaattttctgaatggaccaagatttaattctggctcaaaaaagggtacttaaaagtagaatctatttattatacttgatatgtctgtctgcttgaaaatatttgtaaaatattttattttgatttttaaacactatggaagtgcctcacacatctaacttttccccaaaataatagagctatcatatgatacactaattccactactgtgtatacaccgaaaagaaaggccctcaattaatgtttatatgtggaatgaatgaactgcttcgtacacagagggtgctgagagaactacagcctttattattgctgctttcctggktgattgaaactcaaaggagatgagatagtccctgagagaacagtacaagttgccaag

SEQ ID NO: 354442 - DNA, 570 bp, Homo sapiens
aaacccaggctgtggctccagagcttgcattccagatggctttccccactgcctctaaggaatggatgttaagggctaagagacagtcccacgagtcagggttacacttgcaagcaccaacatttatattccttatatcatataatcctcaacacaagaggtgtgagtgtataaatatgcttactttttagagagatctcaagatagaattgttagggagctgagactgaggctctggattgtatgggtgttttccctaacatcaggcggctctgaagggatctactgcctcgttctaraagccacattgtgttagccagtcatccttcttttatcccttctcttcgacaagctcaaacgcttttgtacctattctgctagatatttgttgggggcaaagccagaaccagaagacaacacaatccctgtctttgaagcatagacattctattcagggtcagaaaatcaatgcacaaaataattaataaacacttaattgattccttatgggtcaaattccagtaggtcagagaagatatatgaagtgcttagaatacttcaaaccattag

SEQ ID NO: 354443 - DNA, 655 bp, Homo sapiens
ggataattctatgattaagtattgttaatgtaaaaaaaaacaggattataaatttggaaaaaggagactatttcttataaagggttacagcytgcaaggtggctttctcacaggctgggaagcatagcctctggcaaagatcagagaggtgcacttcaaagaaggaggggttggggtaaggtgctttattctgaacagattggctaaatatacatattcatcaggttacagaagaagctagaaatattcatgaaggtggtcctgatgcatgcttattgaacaaacgtatgtaacatatgacccatgttaaccttgtggtgaagatgttaacatttaaacatattacaattaggccctatatgtcaaaaggtcttctcaggatgcaaaagcactcaagtgggaagcctctgtaaactgaccagaaccagtccatgattggtggtcttcttatctggagaaagttcctgaaatcagtctcttgtccaatcaaagttgtcattatggcttgtgaaacaggaggtcagttagtatctggtgataagctacaattattttaatattgcttatctctagaccagtgctcctttggctgctagagaaaaagaaacaccttgtagcagttagaacagagtttgttactcttgtctggcatggc

SEQ ID NO: 354444 - DNA, 655 bp, Homo sapiens
ggataattctatgattaagtattgttaatgtaaaaaaaaacaggattataaatttggaaaaaggagactatttcttataaagggttacagcttgcaaggtggcyttctcacaggctgggaagcatagcctctggcaaagatcagagaggtgcacttcaaagaaggaggggttggggtaaggtgctttattctgaacagattggctaaatatacatattcatcaggttacagaagaagctagaaatattcatgaaggtggtcctgatgcatgcttattgaacaaacgtatgtaacatatgacccatgttaaccttgtggtgaagatgttaacatttaaacatattacaattaggccctatatgtcaaaaggtcttctcaggatgcaaaagcactcaagtgggaagcctctgtaaactgaccagaaccagtccatgattggtggtcttcttatctggagaaagttcctgaaatcagtctcttgtccaatcaaagttgtcattatggcttgtgaaacaggaggtcagttagtatctggtgataagctacaattattttaatattgcttatctctagaccagtgctcctttggctgctagagaaaaagaaacaccttgtagcagttagaacagagtttgttactcttgtctggcatggc

SEQ ID NO: 354445 - DNA, 546 bp, Homo sapiens
atgacttctgcctggaaaggtaccaactcacctgttccatagataagacaccaagatagcagggggacccctgcacttgttcacttccccctcaccttataaaaatgcccactttctgctccaaaggtgaagtggcacatttaaaggcaggatgctttgtgccccttcccccaagctagctttggaataaatccacttttttttgtggccttgctcttgttaattaaacctctacatgcagcaagcaactaacctactttkcagttacagttttaaagtttttctagggtccctttggtcaagaagggatccattcaggcattgggggggttgggattttatttttagtttacctcatcttttcaatttttatcttgaaggtgcaaagataaaaccatggtcaaaggtttagttggaaaaaaagctgcagtcactcattttcaccagtgctgctagcggtgaatctgtatggatcttcagcaacttgatcattgcctcctcagaggaaagaattcaggcgaggggtagaagtaggtatgaggcaga

SEQ ID NO: 354446 - DNA, 620 bp, Homo sapiens
tggcagcaacagtgtgagtcaccagcaagactctgactcactaaaatatggtgaaagccttcttccaataaaggaagagtgaagggatagacatgatgaagctgtcacacctggragactatggatttccccataatgtgaagcagcagctgacctgctgtctgttatgagaaatacatgtactcccagcatttaacaataatccctccaactgcaagagagctggctctctggatcccttaaccgctgttctgtgctggataacggaagggggaaaactgcagccagatgctgactctggttttgtcttctcctgcaggaaggtagagaaaggacccaaatgtcaaagagctttgagtagccaaaaattcctgaatgtttgaattgctctttcctccaagtgggagggaaaaaaatcagtttccttggcttgagcaagccttagatcaactttaagccttaaaggaaaaaaacagggaaaacaagccaggtgtagtgactcccacctgtaatctcagcactttgggaggatgagacaggagatcacttgaggccaggagttcaagaccagcctgggcaacacagtgagacccacctgctctacaaaattttaaaaagtt

SEQ ID NO: 354447 - DNA, 620 bp, Homo sapiens
tggcagcaacagtgtgagtcaccagcaagactctgactcactaaaatatggtgaaagccttcttccaataaaggaagagtgaagggatagacatgatgaagctgtcacacctgggagactatggatttccccataatgtgaagcagcagctgacctgctgtctgttatgagaaatacatgtactcccagcatttaacaataatccctccaactgcaagagagctggctcwctggatcccttaaccgctgttctgtgctggataacggaagggggaaaactgcagccagatgctgactctggttttgtcttctcctgcaggaaggtagagaaaggacccaaatgtcaaagagctttgagtagccaaaaattcctgaatgtttgaattgctctttcctccaagtgggagggaaaaaaatcagtttccttggcttgagcaagccttagatcaactttaagccttaaaggaaaaaaacagggaaaacaagccaggtgtagtgactcccacctgtaatctcagcactttgggaggatgagacaggagatcacttgaggccaggagttcaagaccagcctgggcaacacagtgagacccacctgctctacaaaattttaaaaagtt

SEQ ID NO: 354448 - DNA, 620 bp, Homo sapiens
tggcagcaacagtgtgagtcaccagcaagactctgactcactaaaatatggtgaaagccttcttccaataaaggaagagtgaagggatagacatgatgaagctgtcacacctgggagactatggatttccccataatgtgaagcagcagctgacctgctgtctgttatgagaaatacatgtactcccagcatttaacaataatccctccaactgcaagagagctggctctctggatcccttaaccgctgttctgtgctggataacggaagggggaaaactgcagccagatgctgactctggttttgtcttctcctgcaggaaggtagagaaaggacccaaatgtcaaagagctttgagtagccaaaaattcctgaatgtttgaattgctctttcctccaagtgggagggaaaaaaatcagtttccttgscttgagcaagccttagatcaactttaagccttaaaggaaaaaaacagggaaaacaagccaggtgtagtgactcccacctgtaatctcagcactttgggaggatgagacaggagatcacttgaggccaggagttcaagaccagcctgggcaacacagtgagacccacctgctctacaaaattttaaaaagtt

SEQ ID NO: 354449 - DNA, 620 bp, Homo sapiens
tggcagcaacagtgtgagtcaccagcaagactctgactcactaaaatatggtgaaagccttcttccaataaaggaagagtgaagggatagacatgatgaagctgtcacacctgggagactatggatttccccataatgtgaagcagcagctgacctgctgtctgttatgagaaatacatgtactcccagcatttaacaataatccctccaactgcaagagagctggctctctggatcccttaaccgctgttctgtgctggataacggaagggggaaaactgcagccagatgctgactctggttttgtcttctcctgcaggaaggtagagaaaggacccaaatgtcaaagagctttgagtagccaaaaattcctgaatgtttgaattgctctttcctccaagtgggagggaaaaaaatcagtttccttggcttgagcaagccttagatcaactttamgccttaaaggaaaaaaacagggaaaacaagccaggtgtagtgactcccacctgtaatctcagcactttgggaggatgagacaggagatcacttgaggccaggagttcaagaccagcctgggcaacacagtgagacccacctgctctacaaaattttaaaaagtt

SEQ ID NO: 354450 - DNA, 601 bp, Homo sapiens
catgtgtacttatcattgctctgtgacttaatttgaaaatattttcaaaattaaaaaagtacaaatcaccattttgccgtggaatgttcatatatataactaagttcttacacactttttccaaataacaatattctgtttgcagtgggaaatatgagtgagcttstaagagcaagatcccaatcctcagaaagaggaaatgaccaagagtcttcccagccggttggatctgtgattgtgagtcttttaacatttgatgttttctattaacacaatttattttaaaaatatttttgagctagtatacatacactgatacaggtgttccatgctgataaaaaatgatgatggcatctcatgaaggaaactttggttcaggaatactatattctggtgttacctgtatggatatggatatttctctctctctctctatctctatgtatgtatctgtctgtctgtctatctatctatctatctatctatctatctatctatcatctatctatctatatgtgtgtgtatgtgtttatatatgttggaaaaatgtctttagatgtgtgattcgatgcacatatgcatttgtgtatttatattattg

SEQ ID NO: 354451 - DNA, 622 bp, Homo sapiens
tttattgggggctatctctctctttagctcttatagaatttgttttatatatctgcrtgctcaagtgttgggtgcatatatatttaaaattgttaatatcctttggatgaattgacccctttattattgtatagtgacctttagtctcttctcaaagattttgttttgaaatctatttttttcttattctttttgtatcttttaagttcaggcatacatgtggtgcaggtttgttatacaggtgaacttgtgtcatgggggtttgttgtacagattattttgtcgcccaggtattaagcctggtactcatgagctattttttcctgatcctctccctcctcccatcctccactctttggtgggccccagtgtctgttgttctcctctgtgtgtttattttttcccatttatagcttccacttataagtgagaacatgcagtatttagttttctgttcatgcattactttgctaagtataatgacctccagctccatccatgttctggccacggagataatgtcatttcgtttttatggctgcatcctattccatggtatatatgtactccattttctttatccagtctaccatcgatgggctttttggttgattccatatct

SEQ ID NO: 354452 - DNA, 622 bp, Homo sapiens
tttattgggggctatctctctctttagctcttatagaatttgttttatatatctgcgtgctcaagtgttgggtgcatatatatttaaaattgttaatatcctttggatgaattgacccctttattattgtatagtgacctttagtctcttctcaaagattttgttttgaaatctatttttttcttattctttttgtatcttttaagttcaggcatacatgtggtgcaggtttgttatacaggtgaacttgtgtcatgggggtttgttgtacagattattttgtcgcccaggtattaagcctggtactcatgagctattttttcctgatcctctccctcctcccawcctccactctttggtgggccccagtgtctgttgttctcctctgtgtgtttattttttcccatttatagcttccacttataagtgagaacatgcagtatttagttttctgttcatgcattactttgctaagtataatgacctccagctccatccatgttctggccacggagataatgtcatttcgtttttatggctgcatcctattccatggtatatatgtactccattttctttatccagtctaccatcgatgggctttttggttgattccatatct

SEQ ID NO: 354453 - DNA, 614 bp, Homo sapiens
tccagtttttcacccctcagagtgttataaatattatttcattgtttaataacacttataattagagctaaaatgttcaatgtcaggctcatactcttccttttrtaagtaatctatatgcttagtaggaatatcttcctattaggagaattaaaaaaggtcctggtatattagtcagggttctctagagggacagaactaataggagacacacacacacacacacacgtgagtttatatataactctcatatacatacatatatatatttatgtatatatatacatgtatatatatatgggagttattaagtagtattaattcacatgatcacaaggtcccacaataggccagctgcaagccgaggagcaacgaagccagtctgagtcccaaagctgaagaacttggagtccaatgttcaagggcaggaagcatgcagcatgggagaaggatgtaggctgggaggctaagccagtctagccttttcatgtttttctgcctgctttatatttgctggcagccaattagatgatacccacccaggttaagggtgggtttgccttccccagcccacttactcaaatgttaatctcctttgggcaacaccctcacag

SEQ ID NO: 354454 - DNA, 357 bp, Homo sapiens
atatacatacatatatatatttatgtatatatatacatgtatatatatatgggagttattaagtagtattaattcacatgatcacaaggtcccacaataggccagctgcaagccgaggagcaacgaagccagtytgagtcccaaagctgaagaacttggagtccaatgttcaagggcaggaagcatgcagcatgggagaaggatgtaggctgggaggctaagccagtctagccttttcatgtttttctgcctgctttatatttgctggcagccaattagatgatacccacccaggttaagggtgggtttgccttccccagcccacttactcaaatgttaatctcctttgggcaacac

SEQ ID NO: 354455 - DNA, 532 bp, Homo sapiens
atcctcccctatccccagcaaatccctccctgccccaccacccaagaaaacctggaaagaaaaaagcttatccaattctgctctctacccatataattcacatattcataatatgtaaaaaaaattttgcctttccccatttaataaatgatgcgtgatatttactttatgcctaaaaaagcatcatttgtcaataaagaaatttttaaagcacccatcctatatgagttggcagctgattaggttaaactggctggattaaaaacatcactggactcaacaagttataaaatgtgaatatgttcgttatatttactctcaataaaatgataggctcaacactgttagacctagcatatatttactgagatrctatgtttttggaaataatcaaattgtcaacttacacttgttgataacttttaaatggggaagtttaaatagggacttgtatgaatggcacatgagggtttagctgtctcttactttcaatcagtgaaattgacctatccttgaagaggcaggtataaat

SEQ ID NO: 354456 - DNA, 595 bp, Homo sapiens
ttatttattaaaagaaaagaaatcttctgggctcaaagttctagttattctaaaagcagagcacttgttccatgttttcatatcrcctccccacacctacctctcctctcccattctctatttctttatttctgtgctgtagtaataagcaaaacagagaagcaattggttttagtcttggatcttgaccttgctgtgtggccttggccaagtcacttcccctttctcagcctcagtttcttcaagtgtaaaatgagagattggatggatcagaagattcaggcctccttgaagatccccatgggtgaaccccaacacacaggctattcagccagcagccccaagtcctttatgaaaagccaaggttgattgaaactctcccttctcaggagagaaactagaggcaaagcttcctcatcagcagagataaacttggcaggagccaattcaggtaccagtaaaggatatcttcttctgcaggccagcctccctctctccagcttggttcaatcctgcattcattgacactgcacttctataagcccttagaactctgggaattctctcctagttttcctaggtatgcttgctgttt

SEQ ID NO: 354457 - DNA, 595 bp, Homo sapiens
ttatttattaaaagaaaagaaatcttctgggctcaaagttctagttattctaaaagcagagcacttgttccatgttttcatatcacctccccacacctacctctcctctcccattctctatttctttatttctgtgctgtagtaataagcaaaacagagaagcaattggttttagtcttggatcttgaccttgctgtgtggccttggccaagtcacttcccctttctcagcctcagtttcttcaagtgtaaaatgagagattggatggatcagaagattcaggcctccttgaagatccccatgggtgaaccccaacacacaggctattcagccagcagccccaagtcctttatgaaaagccaaggttgaytgaaactctcccttctcaggagagaaactagaggcaaagcttcctcatcagcagagataaacttggcaggagccaattcaggtaccagtaaaggatatcttcttctgcaggccagcctccctctctccagcttggttcaatcctgcattcattgacactgcacttctataagcccttagaactctgggaattctctcctagttttcctaggtatgcttgctgttt

SEQ ID NO: 354458 - DNA, 569 bp, Homo sapiens
tgaccttgagacttcttggccagcccccataatcctgtgagccaattagtctcctgttggttttgtttctctggagaaccttgactaacatactggagttatgcctggaaagtgcttgccagttggtttctttctttccttcatatttatctggatggatcactgcccaccacattgaccctataggacaggaaaatagttatgcctctcaaaggcaacagaataagatcctagatcctgaccaggatagtcaatagagatttgctggacaggccactctgaggattcccttaccaaaacctttttaacattccattttacctcctctactggttacttacctctttgcattttttttttagcarttgttctagggattgcatatgcatccttaacttatcacttagagctaatattgcatgaaatataagagcaatatgcaatatgatagcaatgtcctgctgatgctttgggcttagagattaccacagagaaagacagcctctgaaaagagcagtgcctgagtggaggttctgggcattactacatacctaggaattatagcagaa

SEQ ID NO: 354459 - DNA, 613 bp, Homo sapiens
gaaatcaatcacatacaaaatagaaaaataatagagacaactaacaaaatcaaaaattggttattttggaagattaatgaagtgaaacatatgtccacaaaaagactttacaagawtgtttatagcaactttattcataatagacaataactggaaaccaatgtctatgaatagaagaatagatagatcaatgtggtatagtcatacaatggtatactactgaacaatacaaaggaaagaactgttagaacacacaacagcatggatcaatgtctcagacatgctgagcaagaggcaaaacaaaagggagtagatactttatgatcccatttatatgaggccaagaacaggaaaacagacaaaaatctatggtgaaaaaaataaaatataagaaatggctgctggtgggaaggtggttgacaaaagaactttctgggatcatggaaatgctttatatcttgatagctgtgtggttagatgggtgatttcatttaccactactcatcaaactgcagttaaaatctgtgcatttcacttctgaagattgtatatgaagaagaactgtaagcaaacattaaacttattatgaagtttgcttgttgaagtagtaatg

SEQ ID NO: 354460 - DNA, 572 bp, Homo sapiens
ttcctgcccagactggtgtggcctcatgctgtgtcatttccactctccacaaggctgcttcaagtagaaaatagtcaatgcttcctcaagacctcaggaaccccaggcagctagccacgtccagctgaaggcaattgacagatctcaggcacggtctcttaaaagcctccagccccctgtaggttcaagcccatggataaactgccatctggagccctgcagcatcaacagactcaggtagagctttcagcccttcagaactggtcatgttgtccccagggtagttgtattagttatctattgcagtgtaamaaattacagcaagtttagtggtgtaaaacatacattactatctcatggtttcagcattcaagcatctggccatggcttaactaggtcctctgctcagagtctcacaaggcacaaagtattggccagttgcattttcatctggagcttgggctccacttccaagctcatgtaggctattggcagaattcagttcctcccaatggtaggactaaggtcctcaagtcctagatgctgcctccctccagaggcagttgacagca

SEQ ID NO: 354461 - DNA, 572 bp, Homo sapiens
ttcctgcccagactggtgtggcctcatgctgtgtcatttccactctccacaaggctgcttcaagtagaaaatagtcaatgcttcctcaagacctcaggaaccccaggcagctagccacgtccagctgaaggcaattgacagatctcaggcacggtctcttaaaagcctccagccccctgtaggttcaagcccatggataaactgccatctggagccctgcagcatcaacagactcaggtagagctttcagcccttcagaactggtcatgttgtccccagggtagttgtattagttatctattgcagtgtaaaaaattacagcaagtttagtggtrtaaaacatacattactatctcatggtttcagcattcaagcatctggccatggcttaactaggtcctctgctcagagtctcacaaggcacaaagtattggccagttgcattttcatctggagcttgggctccacttccaagctcatgtaggctattggcagaattcagttcctcccaatggtaggactaaggtcctcaagtcctagatgctgcctccctccagaggcagttgacagca

SEQ ID NO: 354462 - DNA, 598 bp, Homo sapiens
ggctgtttgctttttaaaagcctgcaggagagcatctgttatggactgaatgtttgtgttctcccccaaatctgtatgttgaaatcctaacccacaatgtgatcatattaggagatggggcctttgagagattattaggccatgaggatggagccctcattaatgggattagtgcctctatataaggaactccagagagctctttggctctctttctgtcatttgagaaggcagctgtctacaaaacaggaaaagagccctcaccagaacctaaacatgctggcactctgattttggtcttccagcctccagaactgtgagaaataagtttctattgtttacaaatcactctgtctgtggtaatttgccatagcagctccaagggactaaggcagtgcctygttcctgaggaaggacacatgcctcctttaaggactttcatttgattaagtcaaacccttgcaaaataacctcatttttggttcactcaaaatcaaatgatttgggacctcaattacatctgcaaaatctcttcattttttgcaatataatgtagacaaatcacaggaatgatatcccaccctattcacaggacttg

SEQ ID NO: 354463 - DNA, 574 bp, Homo sapiens
atggtaaatatactgaacaaattagcaacagaagggaacttcctcaatctgaaaaagaccatctaagaaaaactcaygtcatacctaatggtgaaaaacagaatggaatgctttcctcctaaaatcaggagcaagacaaggatgtctgctttcactacttcaattcaatattgtattggagtctcttgccagagcaactagacaagaaaaagaaaaaacaggatctatattgaaaaagaagtaaaaccatctctactatatcatagtcttgtatatagaaaatcctaagtaatcactaaaaaactattaagtccagtaaataaatttagtgagatagcagaatacaagatcaatatccaaaaatcaattgtacttctatacaccagcaaatgaataatctgaaaaggaaatttaaaaaataattctacttacagtagcatcaaaaataataaaatacttaaaaataaatttaacaaaagaaatgcaaaactcatattctgaacactacacaacactgttaaaagaaattaaagaaaatttaaataaatggaaaaacatctaatcttcatggatt

SEQ ID NO: 354464 - DNA, 669 bp, Homo sapiens
tgtcaatgtgaccttaattactttgaaatatgttccttctatacccagtttgtgggttttttcctcatgaaagtatgccgaattttattactttttcagcatctattgaaatgactatatggttttagtccttggttctgttaatgtgatgtatcatatttattgatttgcatgtgtggaaccgttcttctatcactgggatgactcccacttgatcayagtgaatgttctttttgatgagttgctgaattcagtttggtggtttttgttaagaatttttgcatctatttttatcagtaatattagtctacagttttctttctttttgtgtccttgtctgattttagtatcattttagtatcagggtaatgctggcctcacataatgagtttagaaggattccctcctcttcaactttttttggaagaatttgaatagaatgtttggtattagtttttctttaaatgtttggttgagtttggtagtaaagccatcaggtcatggcttttttaaaaaacattttttttaatagaggcaaatccttgctcttttgcccaggctggagtgcagtgttgtgattatagctcactgcagcctcgaattccttggctgaagtgatccgcctgtctcagcttcccaagtagctaggactacaggcatgcaccacca

SEQ ID NO: 354465 - DNA, 669 bp, Homo sapiens
tgtcaatgtgaccttaattactttgaaatatgttccttctatacccagtttgtgggttttttcctcatgaaagtatgccgaattttattactttttcagcatctattgaaatgactatatggttttagtccttggttctgttaatgtgatgtatcatatttattgatttgcatgtgtggaaccgttcttctatcactgggatgactcccacttgatcatagtgaatgttctttttgatgagttgctgaattcagtttggtggtttttgttaagaatttttgcatctatttttatcagtaatattagtctacagttttctttctttttgtgtccttgtctgattttagtatcattttagtatcagggtaatgctggcctcacataatgagtttagaaggattccctcctcttcaactttttttggaagaatttgaatagaatgtttggtattagtttttctttaaatgtttggttgagtttggtagtaaagccatcaggtcatggcttttttaaaaaacattttttttaatagaggcaaatccttgctcttttgcccaggctggagtgcagtgttgtgattatagctcactgcagcctygaattccttggctgaagtgatccgcctgtctcagcttcccaagtagctaggactacaggcatgcaccacca

SEQ ID NO: 354466 - DNA, 553 bp, Homo sapiens
tttaatttgttctgaaagacatcatttccattgaattctaaacactgacatttaaaataaaatgattacattatgcttttaaaagtgtgtaacgggatctaaatgccatgttggtttgatatccaccattatccatttaaacatttttgtattattcctctttttattcatgaacacatatgtatattattttacttatgtaattttatcctaatgtatttttatggctatcgctcacttactgtatttcttttgaatcaattaaatttggtttgtttcttaagctttcaagtgtgaagaaatgttttcaggattgagttatcattacaattatgatttatatacaattgatcataacaaaatagatatgctatatatttttataattcatgaacttaaaaagtgaaattttatttgaaatyaaatgcttaatgaaccccataaaatatccataaaactctgaatgaatctcacatattgctagaataagacaaggttcagtatcaattttctttcttttaaataagccctgaggaatttttcacacaaacaa

SEQ ID NO: 354467 - DNA, 581 bp, Homo sapiens
tgggttcaaatcccagctctgtgttttcgtggcagtgatctaagacgtggtttcctcgtttgtaaagtggaattaatgaccccctcatgggcttgctaagataattacctgaaatactgaattcagtgaattattgcttcagacttttgaaaattgggaaccatgagttgtggatttcagcttagacgctttgcttgaaaaagcgtaagatgagagttcacggagtaatctgaggctcccctctgagccctgggacaacaccaacttccacacacttaacaagctcagttggtgacaagggatccagttcatcccatgacaagcatctaagtcttcttaatgtggaaggacaagaccccagcaaaccacggaacttgacarcccaacagaagtcccataggccaaaaggaagccaaggcctgaggtgtgtctttggccagaagtggaaatcccttacacccaaggaatatgccttcatctcaaccacacacttcagaggccgcagagtcaacttgaaaagctctggaagctccagcatccttctcacccagccctgagatacagctgctaaagtctccact

SEQ ID NO: 354468 - DNA, 581 bp, Homo sapiens
tgggttcaaatcccagctctgtgttttcgtggcagtgatctaagacgtggtttcctcgtttgtaaagtggaattaatgaccccctcatgggcttgctaagataattacctgaaatactgaattcagtgaattattgcttcagacttttgaaaattgggaaccatgagttgtggatttcagcttagacgctttgcttgaaaaagcgtaagatgagagttcacggagtaatctgaggctcccctctgagccctgggacaacaccaacttccacacacttaacaagctcagttggtgacaagggatccagttcatcccatgacaagcatctaagtcttcttaatgtggaaggacaagaccccagcaaaccacggaacttgacagcccaacagaagtcccataggccaaaaggaagccaaggcctgaggtgtgtctttggccagaagtggaaatcccttacacccaaggaatatgycttcatctcaaccacacacttcagaggccgcagagtcaacttgaaaagctctggaagctccagcatccttctcacccagccctgagatacagctgctaaagtctccact

SEQ ID NO: 354469 - DNA, 581 bp, Homo sapiens
tgggttcaaatcccagctctgtgttttcgtggcagtgatctaagacgtggtttcctcgtttgtaaagtggaattaatgaccccctcatgggcttgctaagataattacctgaaatactgaattcagtgaattattgcttcagacttttgaaaattgggaaccatgagttgtggatttcagcttagacgctttgcttgaaaaagcgtaagatgagagttcacggagtaatctgaggctcccctctgagccctgggacaacaccaacttccacacacttaacaagctcagttggtgacaagggatccagttcatcccatgacaagcatctaagtcttcttaatgtggaaggacaagaccccagcaaaccacggaacttgacagcccaacagaagtcccataggccaaaaggaagccaaggcctgaggtgtgtctttggccagaagtggaaatcccttacacccaaggaatatgccttcatctcaaccacacacttcagaggccgcagagtcaacttgaraagctctggaagctccagcatccttctcacccagccctgagatacagctgctaaagtctccact

SEQ ID NO: 354470 - DNA, 559 bp, Homo sapiens
gtcccccaaggtcctgggttgggcwtctctcagtgcttctttgtgacaagaaatttctgcctgtcctgctcctgtgcaccatgggccagcctgacttagacaacaggaaaataatcagtgtttggttgcctttgaccatctccttgatattcatcttccaccagctatggctaggagagccatttctcctgagaacgttccttctcaggaaaagagaaatgagtggggagggttttgaatgaatacttgtgttgcgcttaagtatgttgtctcttctatgcctcacggcagcccagcgggataaagctatcattcctatcttacaggagagaagagagaggcttggggaggtgaggtggcctgccctaggctataccacagcaaggaggggctgggttttgaaccccaattgtacaaggccagaggaaccctgagaattctagggcatatgtatggggctgggacagctggattctaatccacctgcttccgcaagtgaccgtacaagcctggacaggtcaccaaactcgccgaggcatctgcttcttgcagttgtaaa

SEQ ID NO: 354471 - DNA, 687 bp, Homo sapiens
catgcctggctcatttttgtatttttttgtagagacagggtctccctatgttgcccaggctggtcttgaactcctggactcaagcaatctgcctgtcttggcttcccaaactgctgggattatagtcatgagctacctcacctagctaagagtcttttttctaaagtgcagattagcaggccctacctgaaacctacatgagcattgtgacaaggcctgcatctctgcactggcagcagcattccaggtgaatctcatgcccacagtgtctggagaagcactgagctaggagagtgcagggaccacgggggtcagagatgatacagggtcagggctgggagggcaatggagagtgccagagaggaagaggcccccgacgtactcaggagactagtttcttgagggaaggaactagatttttctaagaatgaatctagacttggtgggacctgaaatttatacaatttgggggcccctttaagaaaaaaataaaattattgacaaaaatatataaaattaacaaaaataaaattaggttcaaggccttgaaaggttctgtgcaaataaggcgcctgaggctcaagcctcaatggcttgccagtaaacccacctccccctcccagttctagttkcccacattgtctagtaggatgtacataatatcagattcactaaatgcctggcaaa

SEQ ID NO: 354472 - DNA, 612 bp, Homo sapiens
ataacttaaataaggtgttagaaagggtgatgtgctggaaaactcctaatgtgactcctgtgacttttatgwcatttctcaaatgttgcctatattgtacccaagataaaaggtcctcccacttctctagtgaagacattccaattactgaacaaattctgatcagtaagatgtccaattgcaaaatgaatattccaaactctcttccttatttataagcaaacatatttagtaaatatgatgaaagaaaagttcccattggtaaaatcaatagaaagtgtaaaaacaaaactagaaataaaatttgttaaaacagaacatatatttataagattattactcaattaatgtacaaaaagaaaacttgagtaaatggaaagctatgctttgttgttaaataagacttggcatcatatcagttcccttacattagtttagaatttagatgtaggccaggcgccatggttcacgcctgtaatgctagcactttgggaggccgaggcgggtagatcacgaggtcatattcaagaccagcctgaccaacatggtgaaaccctgtctctactaaaaatacaaaaattagccaggcgtgatggcgcatgcctgtaatcc

SEQ ID NO: 354473 - DNA, 510 bp, Homo sapiens
taaatgtaagaaattatttgagctgctgctgttgctacttaaaagcaacatacctcaacactttggccatgaactcttcgcagtcgtacaaatctgtatctacagaataaagactcctcagacatgtcctggtatagtgtgtgttccacctaacaaactctgcttacctcagatatttgaagctgaacctctgaagtacacattgactacctgactacctacatttctaggttttctagaatttgctcctgttttgagcatcagaaaaaaaaattcacacagagtgtatattacttgtgtggccttgggcagaaaaaccattagtaaattaggatgtgatgctgtattcttagaattagtaagatgaaagcagcattattttaaagaacaattactatatttcmcaattataactgaagattttacttatcaaaatgtcattaaaacccctaccttaattttatgttaggaagcctttttttttttttttttttttttttttgagacaga

SEQ ID NO: 354474 - DNA, 510 bp, Homo sapiens
taaatgtaagaaattatttgagctgctgctgttgctacttaaaagcaacatacctcaacactttggccatgaactcttcgcagtcgtacaaatctgtatctacagaataaagactcctcagacatgtcctggtatagtgtgtgttccacctaacaaactctgcttacctcagatatttgaagctgaacctctgaagtacacattgactacctgactacctacatttctaggttttctagaatttgctcctgttttgagcatcagaaaaaaaaattcacacagagtgtatattacttgtgtggccttgggcagaaaaaccattagtaaattaggatgtgatgctgtattcttagaattagtaagatgaaagcagcattattttaaagaacaattactatatttcccaattataactgaagatyttacttatcaaaatgtcattaaaacccctaccttaattttatgttaggaagcctttttttttttttttttttttttttttgagacaga

SEQ ID NO: 354475 - DNA, 510 bp, Homo sapiens
taaatgtaagaaattatttgagctgctgctgttgctacttaaaagcaacatacctcaacactttggccatgaactcttcgcagtcgtacaaatctgtatctacagaataaagactcctcagacatgtcctggtatagtgtgtgttccacctaacaaactctgcttacctcagatatttgaagctgaacctctgaagtacacattgactacctgactacctacatttctaggttttctagaatttgctcctgttttgagcatcagaaaaaaaaattcacacagagtgtatattacttgtgtggccttgggcagaaaaaccattagtaaattaggatgtgatgctgtattcttagaattagtaagatgaaagcagcattattttaaagaacaattactatatttcccaattataactgaagattttacttatcaaaatgtcattaaaaccmctaccttaattttatgttaggaagcctttttttttttttttttttttttttttgagacaga

SEQ ID NO: 354476 - DNA, 512 bp, Homo sapiens
aaaagtcatcaggatggcaatcatttatgtacgtagactatgtgccaagcactattctaaacattttccacgttaactcatttaatcattccagctaccctctacagtagttgctacctttaagaaccctgatttacagatgaagaaatcgaagtactaacaagaagtaccttgcctaaggtcataaagcctattaggagttgaattcagggggtctggatccagaatctttgatctcaactgcctcctaaagatgaagatggtacagtacagaatgkaagtaggagaagaagaagccaagttacagtatttgagataaatttttagaaaacatctggaagggattttgggatgggcagcaaaatagcagacttgggaatacactacatggcatgtaaataaaatggagttttccaaatggctcagaaacagctgccttcatgtcagaaatagaagaaatgatatttgagcatccaaccagtgttgcaaggacaaattgctggtgtcaactt

SEQ ID NO: 354477 - DNA, 524 bp, Homo sapiens
tctaaggactagtcaacaacccaccctgattccaattaatatggccttagtcatgactcaacacttcataaaaccaagttagattgatgtgaaaaataaaattgccacacaagttaagaaaaataaggcagaatataaaattgtgcatacaccattgttccaattcaattccagtagagataaacagattaaaatattaaccatgattattccttgctgataatgtagtaacttatattttctattttattcttctgaatgttcctttttttttttcaatgagcatgtatttctctgcaraaaactctattgctgcaaggtgtttgtagccactaccaaatgcttcagcataacaaaacatttatcttcccaaatttcaggaaaacatttcctagtctcatcactattactgtaacacattctgccttaaaagtcatatttctgcctttccccatcatttaaaaaatgttgtatctcctttgccgctgtttttattagtgtggtcatatagtatcccatgattg

SEQ ID NO: 354478 - DNA, 524 bp, Homo sapiens
tctaaggactagtcaacaacccaccctgattccaattaatatggccttagtcatgactcaacacttcataaaaccaagttagattgatgtgaaaaataaaattgccacacaagttaagaaaaataaggcagaatataaaattgtgcatacaccattgttccaattcaattccagtagagataaacagattaaaatattaaccatgattattccttgctgataatgtagtaacttatattttctattttattcttctgaatgttcctttttttttttcaatgagcatgtatttctctgcagaaaactctattgctgcaaggtgtttgtagccactaccaaatgcttcagcataacaaaacatttatcttcccaaatttcaggaaaacatttcctagtctcatcactattactgtaacacattctgccttaaaagtcatatttctgcctttccccatcatttaaamaatgttgtatctcctttgccgctgtttttattagtgtggtcatatagtatcccatgattg

SEQ ID NO: 354479 - DNA, 396 bp, Homo sapiens
agctaatatcaagggtgtttctaagggaaaaattaagtcttctaggaaaatgtcttgaaaatctgtttgggattgaggttgaagscttgagttgacaatggttggaaggagagagagctactctgttagatgtaagacaagaatgaggtgtagtgtgggagctggagaccgttaggctaaaatggccaaggagattttaagatcagggatgtttaatatttaattttatgctattccaacagtggaacaaccacaagctatagtgtgaaaaaccaaggtttactacactcaagaaatcacagacaggaagtattaaccactgattaattatagaaacattagggaggaaattgagtttcctgtggagtaaataaaagaggtttgatacattcatct

SEQ ID NO: 354480 - DNA, 615 bp, Homo sapiens
gaatctgtttaccaatgaaagtcaaatagagtctatgaaaaagtagaaatctgatacaaggaatcttaggaattcagcaaaacaattcaagggatgtaacatgaaatgattattttaagaaagaaccaaattgatcttgagctaaataacttactacaataatttcataacaccatcagaagtattaactgcagaataggacaagatgaggaaagaatctcagagctcgaaccggctttttgaatgaactcagtcagacaacaataatgaaaaaagaatttttaaaaatgaagaaaacttcaaagaaatatgagattatgtaaagagaccaagcctatgactcattagggtccctgagaaagcaggagagagagyaagaaacatagaaaacatatttgaggatattgtccatgacaattcccccaacctcaccagagaggtcaacattcaaatacaggaaattcagagaacccctgtgaaatattatacaaaaggaccatggtgaagacagagagtcatcagattctccaaggtcagcatgaaagaaaaaatattaaaggtagctagcaagaaggagtgggtcacctacaaatgaaactccatcaggctaatagg

SEQ ID NO: 354481 - DNA, 578 bp, Homo sapiens
aaaataacattaagtatgaaaaacataatcaaattaaaagattttctgaatgtgaatatataaacccaagttataaggtttacaagagaactacccaaaatatatagatgttgaaagtttgaaggtaaaacaattttgtttcagctagagtttattcagtgatgcagaatcactatgaaagataaagaattttcataggaattagaacttacatatttgtaggagttgggatacaattctayggaaggatgttattgctgtgtttggttgtggcctattgtctctgtaggccagtcgggcaggcagctggaaagaaaaactgaatgtgaagctggagaaagggaagacaaaatggaagccatgcagataaactagaacccttgcctgtgtctctgctttcaacctgagcacatgtgtggcctgcagaagctggctcccttcatcatggatttacgcatgaccctggtcagacttggagaagcttgaaggaggacatctggcataaactgcagaagctacagccctggctattgattcataccaatgagtgagacagcagatcggtgataatttgaaca

SEQ ID NO: 354482 - DNA, 630 bp, Homo sapiens
ttattcagtgatgcagaatcactatgaaagataaagaattttcataggaattagaacttacatatttgtaggagttgggatacaattctacggaaggatgttattgctgtgtttggttgtggcctattgtctctgtaggccagtcgggcaggcagctggaaagaaaaactgaatgtgaagctggagaaagggaagacaaaatggaagccatgcagataaactagaacccttgcctgtgtctctgctttcaacctgagcacatgtgtggcctgcagaagctggctcccttcatcatggatttacgcatgaccctggtcagacttggagaagcttgaaggaggacatctggcataaactgcagaagctacagccctggctattgattcataccaatgagtgagacagcagatcggtgataatttgaacagaaattatgtctttaaaaacaagtaagataactttccttagaaamaggtctgcaaatctgccgtgaattgacttgaagtgagacaaaggttttcccaatctacaataaggcacaagatgttatgcagaaatttaagagaactttaaagtgaaaaggctctcggtaaatccctggatcttgttttccaacatgtggaaagtaaa

SEQ ID NO: 354483 - DNA, 530 bp, Homo sapiens
aatatttatttgcatgtgtctgtcagaaggtggttattataaaatggaacacaatggtttyaataaggaaagctattactaaacaggatgaaaaaataatgactatttgggttttaaaaatatttttaatttttaatatattgttaaaaatttagtttttgtttttatattcgatttggttatttttagatttacatactcagtcacctccttgaatgttattcagtgttaaatactgtgtctagtctctcactctacctactacctctctcactattccctacacactgctcctgaaatgtttaaagtggggtgcttgtttgcaacctataggtactctatattcgcgcttcttttggtataaattctcatgcattttcactgcatttcttcctcttcagttacctctaatccacttttactttaagacccaggtagagcccaatcttttctgagcagcctgctcctcttatcctagattgctttatcaatttcttcattgaattccaaatacagtaggaaaaggatgt

SEQ ID NO: 354484 - DNA, 530 bp, Homo sapiens
aatatttatttgcatgtgtctgtcagaaggtggttattataaaatggaacacaatggttttaataaggaaagctattactaaacaggatgaaaaaataatgactatttgggttttaaaaatatttttaatttttaatatattgttaaaaatttagtttttgtttttatattcgatttggttatttttagatttacatactcagtcacctccttgaatgttattcagtgttaaatactgtgtctagtctctcactctacctactacctctctcactattccctacacactgctcctgaaatgtttaaagtggggtgcttgtttgcaacctatagrtactctatattcgcgcttcttttggtataaattctcatgcattttcactgcatttcttcctcttcagttacctctaatccacttttactttaagacccaggtagagcccaatcttttctgagcagcctgctcctcttatcctagattgctttatcaatttcttcattgaattccaaatacagtaggaaaaggatgt

SEQ ID NO: 354485 - DNA, 530 bp, Homo sapiens
aatatttatttgcatgtgtctgtcagaaggtggttattataaaatggaacacaatggttttaataaggaaagctattactaaacaggatgaaaaaataatgactatttgggttttaaaaatatttttaatttttaatatattgttaaaaatttagtttttgtttttatattcgatttggttatttttagatttacatactcagtcacctccttgaatgttattcagtgttaaatactgtgtctagtctctcactctacctactacctctctcactattccctacacactgctcctgaaatgtttaaagtggggtgcttgtttgcaacctataggtactctatattcrcgcttcttttggtataaattctcatgcattttcactgcatttcttcctcttcagttacctctaatccacttttactttaagacccaggtagagcccaatcttttctgagcagcctgctcctcttatcctagattgctttatcaatttcttcattgaattccaaatacagtaggaaaaggatgt

SEQ ID NO: 354486 - DNA, 495 bp, Homo sapiens
acacaatggttttaataaggaaagctattactaaacaggatgaaaaaataatgactatttgggttttaaaaatatttttaatttttaatatattgttaaaaatttagtttttgtttttatattcgatttggttatttttagatttacatactcagtcacctccttgaatgttattcagtgttaaatactgtgtctagtctctcactctacctactacctctctcactattccctacacactgctcctgaaatgtttaaagtggggtgcttgtttgcaacctataggtactctatattcgcgcttcttttggtataaattctcatgcattttcactgcmtttcttcctcttcagttacctctaatccacttttactttaagacccaggtagagcccaatcttttctgagcagcctgctcctcttatcctagattgctttatcaatttcttcattgaattccaaatacagtaggaaaaggatgtgaaaatgcatgag

SEQ ID NO: 354487 - DNA, 574 bp, Homo sapiens
atggtgtaaaggaaagagttcaaatatgatgaggacatacagttctttttctagttctgccatttttctgttttgtgactgtgagcaagtgggcaaattttgggagccgtgtttttctcttctgtcaatgaaaccatagacttttgccatccactgagagcagcctttctgtagacaatggaaaattgctttaacaatggactggaacatctctcagatccttaamagtgattccaaacaatgtaagaaacaataatctatagggtagagagatggaaattgactaatccaatagtataagtcactacagctaatgctgaatggaaaatttaattttttaaataaatcacaaatttataattataaaatgcagttggtgctacagtttctacagaaactaatttataattgcatggagtatggcattgttttcttttccaaatgaatctctagtatacttttacatgaaatatagctaatccttggcagtaagaagttcaaagcttgaagaagtatattatggcttggatatgaagtttcaatgaatttgatttccttttccagactttgatag

SEQ ID NO: 354488 - DNA, 574 bp, Homo sapiens
atggtgtaaaggaaagagttcaaatatgatgaggacatacagttctttttctagttctgccatttttctgttttgtgactgtgagcaagtgggcaaattttgggagccgtgtttttctcttctgtcaatgaaaccatagacttttgccatccactgagagcagcctttctgtagacaatggaaaattgctttaacaatggactggaacatctctcagatccttaacagtgattccaaacaatgtaagaaacaataatctatagggtagagagatggaaattgactaatccaatagtatragtcactacagctaatgctgaatggaaaatttaattttttaaataaatcacaaatttataattataaaatgcagttggtgctacagtttctacagaaactaatttataattgcatggagtatggcattgttttcttttccaaatgaatctctagtatacttttacatgaaatatagctaatccttggcagtaagaagttcaaagcttgaagaagtatattatggcttggatatgaagtttcaatgaatttgatttccttttccagactttgatag

SEQ ID NO: 354489 - DNA, 574 bp, Homo sapiens
atggtgtaaaggaaagagttcaaatatgatgaggacatacagttctttttctagttctgccatttttctgttttgtgactgtgagcaagtgggcaaattttgggagccgtgtttttctcttctgtcaatgaaaccatagacttttgccatccactgagagcagcctttctgtagacaatggaaaattgctttaacaatggactggaacatctctcagatccttaacagtgattccaaacaatgtaagaaacaataatctatagggtagagagatggaaattgactaatccaatagtataagtcactacagctaatgctgaatggaaaatttaattttttaaataaatcacaaatttataattataaaatgyagttggtgctacagtttctacagaaactaatttataattgcatggagtatggcattgttttcttttccaaatgaatctctagtatacttttacatgaaatatagctaatccttggcagtaagaagttcaaagcttgaagaagtatattatggcttggatatgaagtttcaatgaatttgatttccttttccagactttgatag

SEQ ID NO: 354490 - DNA, 590 bp, Homo sapiens
gctgaacattattttttcatatatctgttgacagtttgtgtgtcatcttttgagaaatacctattatgatcttctgcccattttttaatcaggtcatttgtttttaagttgatgagttgtttaagttccttatatatgctggatattaacttcttgtcagatgtatagttcacaacattttcttcattctgtatgtcatctcttcactttgttaatagtttcctttgctgtccataaggtttttagtttgttataatccaatttgtctatatttgcttttatttcctgtgcttttgaggtcttattttaaaaatccttgcccagcccaatttgggaagyattttccctgtgttttcttttagtagttttggagtttcaggttttacatttaaacctttaatctattttgaattgatttttttatatggtgtcaggtagtggtctagtcttattcttcagcatgttgatagccaattttctcagcaccattcattgaagagattgtcttttcaccaatatgtgttcttggcacttttgtagaaaaatcagttggctgtcagtctattcacttcagttagaatggctactat

SEQ ID NO: 354491 - DNA, 590 bp, Homo sapiens
gctgaacattattttttcatatatctgttgacagtttgtgtgtcatcttttgagaaatacctattatgatcttctgcccattttttaatcaggtcatttgtttttaagttgatgagttgtttaagttccttatatatgctggatattaacttcttgtcagatgtatagttcacaacattttcttcattctgtatgtcatctcttcactttgttaatagtttcctttgctgtccataaggtttttagtttgttataatccaatttgtctatatttgcttttatttcctgtgcttttgaggtcttattttaaaaatccttgcccagcccaatttgggaagcattttccctgtgttttcttttagtagttttggagtttcaggttttacatttaaacctttaatctattttgaattgatttttttatatggtgtcaggtagtggtctagtctyattcttcagcatgttgatagccaattttctcagcaccattcattgaagagattgtcttttcaccaatatgtgttcttggcacttttgtagaaaaatcagttggctgtcagtctattcacttcagttagaatggctactat

SEQ ID NO: 354492 - DNA, 618 bp, Homo sapiens
gtgggaagactgcccaaagccaaaattgagtggcaaatgtagagtgcaccccakaagtaggtgctagaattgggctttctcccatcactgaacttgagcaggaggagaattgccgaagctgcaggttctcctgagtggtgtaatctctggccaggaacagctttgtagcttgagactggactgcctctgtcattgctgggtgccccagattgctcccttggtcaatcaggagacagtgccccaccagttctgaggtgcaagagggaggcagaccctactcttcctcacccggaatgggaacgtgggccacatctctcttcccttgcaaagaacttggtgcagtggtgctccttcttctccacacctgggcatatttccaggcatttggtacaaccacttgcctggaataggggcctgagttgcccctttattcccctgcaaagacctttctgcatcagctattaaaatgttatgcaggagttactccacttcttgccagagtacatatctccaggtatttggcacacctgctgcctgaattaggagcctgagtcacctcttctttcctgtgcacaaatctgggtgcagtggtgccctttcctctccatacccaggcat

SEQ ID NO: 354493 - DNA, 496 bp, Homo sapiens
ggagaattgccgaagctgcaggttctcctgagtggtgtaatctctggccaggaacagctttgtagcttgagactggactgcctctgtcattgctgggtgccccagattgctcccttggtcaatcaggagacagtgccccaccagttctgaggtgcaagagggaggcagaccctactcttcctcacccggaatgggaacgtgggccacatctctcttcccttgcaaagaacttggtgcagtggtgctccttcttctccacacctgggcatatttccaggcatttggtacaaccacttgcctggaataggggcctgagttgcccctttattcccctgyaaagacctttctgcatcagctattaaaatgttatgcaggagttactccacttcttgccagagtacatatctccaggtatttggcacacctgctgcctgaattaggagcctgagtcacctcttctttcctgtgcacaaatctgggtgcagtggtgcccttt

SEQ ID NO: 354494 - DNA, 580 bp, Homo sapiens
ggtatttggcacacctgctgcctgaattaggagcctgagtcaccycttctttcctgtgcacaaatctgggtgcagtggtgccctttcctctccatacccaggcataattccaagcaatcagtgcacctgctcacctggagtagaagcctgagtcaccccctttccctctcaccacccatcttggtgcactggcaccctctacactacatgcccagttatatctgcaggcatatgactggagcacccactctttttgattaggagtttaggccacctgtcctaggcacagaacttggaacagtggaggtctgtacactctactccccagtacatccctgggtgcttgatggctgtaccctgaatcccaccttggacctggtgattatgcctgccattgagtgatggtgcaggcaggcctgctgatctggcccttagtccccactcaggggctaagcagggagctcagactattatgtatgccacaggacagtctaatgtctgaatctacagggagcttctcatgataaacaaagatcaaacatataccattttttatcagctgcagccagctcttatccat

SEQ ID NO: 354495 - DNA, 580 bp, Homo sapiens
ggtatttggcacacctgctgcctgaattaggagcctgagtcacctcttctttcctgtgcacaaatctgggtgcagtggtgccctytcctctccatacccaggcataattccaagcaatcagtgcacctgctcacctggagtagaagcctgagtcaccccctttccctctcaccacccatcttggtgcactggcaccctctacactacatgcccagttatatctgcaggcatatgactggagcacccactctttttgattaggagtttaggccacctgtcctaggcacagaacttggaacagtggaggtctgtacactctactccccagtacatccctgggtgcttgatggctgtaccctgaatcccaccttggacctggtgattatgcctgccattgagtgatggtgcaggcaggcctgctgatctggcccttagtccccactcaggggctaagcagggagctcagactattatgtatgccacaggacagtctaatgtctgaatctacagggagcttctcatgataaacaaagatcaaacatataccattttttatcagctgcagccagctcttatccat

SEQ ID NO: 354496 - DNA, 629 bp, Homo sapiens
aattaacccagtcagacaaaaataaagattttttttaaatgatcaaagcttttgagaaatatggcattgtgcaaagcatccaagcctatgagttataggtattccagagggagaagaagaaaaggtaaaaagtatgaaaaacctatttgagggtctaatgcaggaaaacttctctggtcctgctaaatatctagacatccagatacaagaagctcagagaatccttagaagatacacttcaagaataacttaaccaaggcatagagtcatcagactatccaaagtcaacataaaggaaaaaatcctaaaaagtgacaagagagaatcatctaatcaccagtraaagaaattccctcaaactaacagcagacttctcagcagaaagtttcaaagccagaagagtttggagtcctattttcagtcttcttagagaaacaaacaatccaaccaaaagttttgtgtgctgctaaaccaaacttcataaatgaaggagaaataaagtcttttccagacaagcaaacactgagggaatgtcacctctaggctgctcctacaagaaatgttcaaaagagtttgaaacatggaactgaaagggtaatacttgttatcataaaaacacaggtcttata

SEQ ID NO: 354497 - DNA, 614 bp, Homo sapiens
aaaaacacaggtcttataaatcaattacacaatcgagattgcaaagcaattaggtaataattcacattatggcaagaacaaaacctcacacatcaatactaattttaaaggtaaatgaactaagtgctctacctaaaagatatagaggttagcagaatggataaaacactaagatgcaaccatatgctgcatacaagaaattcacctaatgggtaaatacgtttacagcctcaaagtacagggatggaacaagatattttgtgcaaacagatacaaaaagcaagcagtagtagctattcttctatcacattaaaaagactttaaatctacaacagtaaagaaaaaaaagacaaaagaagtcattacataatgataaagagattgattccagaagaagagataataatcctaaatatatatgcacttaacactggagcatccagattcataaaacaaatactaytagacctatgaaaaaggatagacagcaatacaataatagtagaggactttaataccccactgacagcactagatagatcatcaagggagaatatcaaaaaagaaactctggatgcaaattggactgtagaccaaatggacctaacagacgt

SEQ ID NO: 354498 - DNA, 577 bp, Homo sapiens
aaagggcaactgaatggaattttctctggatctgataatggcattctagtccactgttagtgagggctggagaccttcattgctcttaatggcactgcattctcattactcattcaacaagtatttattgagcacctactatgcacagagcatagcgataaacacacaaccttcctttcyttaacgtaccaaaagttccagacgtagatgctcttctctttactcattcttgctatacatctataattaaggctccaattatccccatatgttaatgacacccgcaagtttattccaatactgacttctcttttgagctctagatccaaatctccaattgtttattgcaatatctgactgggtattcccaagaatatcacactgaggctgtccaaactgaacctattcatgtcttgtattatccttccccttctcctcctgcagtcctgggcttcctaaaggatacacaggtcaactattctctctagtcagaaaacttaggaatcacctctgtcttaccaacaatgtgcaattcatcaagttaggtcgagtccatctcctaaatctctttcaaatc

SEQ ID NO: 354499 - DNA, 615 bp, Homo sapiens
atcatttttatgcataatgaaaaatgataacttttagataatgaaaactgatgtgtagcacctgggactatattctttatagagtaaagtagaagcaaaatcctgggttaaaatataccatggggtaagtgtgtatgtatgtgtgtgtgtgtgtgtgtgtgtgtgtaaaataaaaaggaaaatattgtcaaatatcagtgctactatatctacctaatcatattatttctgacatatttattctcaattaaaagcataaagtattttttcacatgttagtttataatgtcatttgggcatgtgaacttattactattttgagtttcatagtatttataacccacatatatcttggacctcactgcttcctgacatgcctstcatgtagcaattgtactgaaatctgagctactatcttctgccatctgggtgaataatgctttgcttttgttgtgtttagctagaccatgagtttcttgatctgttctgccatgggttggctgagaggaccacaagatacctcatcatcttggacagtttaatccagctcacacaaatggcatatttgtctctatcatgactgctagaaaaagggattttagtaatgtcatattc

SEQ ID NO: 354500 - DNA, 544 bp, Homo sapiens
ttgggtcactagtttcaagctttctctccaaactttctttactcttaaccagaaattttactgtatataatatattcatgttccagggaatacataaacacatacagaaattcccaaagactaatgggagagcaaaagtaaaaaaagcagggactgtaaaaaaactacaaatgaaacattatctctagtgtaaagaagaattttttaaattggcaattatgtgccaggaacttaagatatattttaaatcctttcagcagccctgtgaggaaggcattatatccatttacatattagaaaacctacacagtgaggttaagaaacttcattagaggcatctagccagtgggtggcattcctaggtaaamcaagtaaagaacttcctatgattagtaggaagagtacaaccatttctttttattccctttggaaaaaaagtcaagaagatcatctatcaagggtttgagcagattaaaaaggcagcctttcaacactgattttttaactttatttgtgggtgaaatttttattgagataattttag

SEQ ID NO: 354501 - DNA, 589 bp, Homo sapiens
cctttggaaaaaaagtcaagaagatcatctatcaagggtttgagcagattaaaaaggcagcctttcaacactgattttttaactttatttgtgggtgaaatttttattgagataattttagtttcacacgaagctgtgagaaataccaacggggagatcccatgtactctttacctattttcctctgatgggatcatcttacaaaattatgttacaatatcacagctaggttaatgagaatatactcgttttattcatattgcttgtgctcacttgtgctttacttgtgtgtgtgtgatttagttctgtttacttgtattacatgtgtaggttcatatatccaccactacaggtgaaatacagaacagttccatcaccccaagtatccctcctgtgactctgttataaccacacaaacctcttttctactttccctcccagatccctaacccctgacaacatctgatatgttctctgttgctaaaattttatcatttcaaaaatgttacataagtgaaatcatattgtatatagccttttggyacaggctttttttctcagtgtaatttcctggaaattcatcctagtt

SEQ ID NO: 354502 - DNA, 635 bp, Homo sapiens
aactcagtcatgttttgatttagtactgaaaataaatgagaatccattgctcctggactgaaatgaatccagccatttttattatcctctatttgcttggcaatgaaaaagactttttgaaacataaacatgataaatggtttgaagttagtttgagagttatgaaatgagttttacctaatgaaacagaaaaatggcagcaaggaacacttttctgtggagaagtaagaaacctgtcctacagggagagttgctyagagagttgctttttgctgtgcagcttatgtttaatccccactgtggtcaatagtcatcaggcttttgaagggattggaccgggccttgggacaagtattaacacagtcaagattgttttttctctaatgactctctatcttctcccttttacatgttttctttccctttagaaccctgtcctgatgaccttatatattcttgcaagcaacctgtaatgtgctccagttgctttccttttttgtctcctcaccccatcagtcaggaccggctgtaggtaatagcttgatcacgggtttatattctcatgtttagaggcaggtagtccatggatggtgaaaattattttaatctaggcctattattaccctaaaaactta

SEQ ID NO: 354503 - DNA, 635 bp, Homo sapiens
aactcagtcatgttttgatttagtactgaaaataaatgagaatccattgctcctggactgaaatgaatccagccatttttattatcctctatttgcttggcaatgaaaaagactttttgaaacataaacatgataaatggtttgaagttagtttgagagttatgaaatgagttttacctaatgaaacagaaaaatggcagcaaggaacacttttctgtggagaagtaagaaacctgtcctacagggagagttgcttagagagttgctttttgctgtgcagcttatgtttaatccccactgtggtcaatagtcatcaggcttttgaagggrttggaccgggccttgggacaagtattaacacagtcaagattgttttttctctaatgactctctatcttctcccttttacatgttttctttccctttagaaccctgtcctgatgaccttatatattcttgcaagcaacctgtaatgtgctccagttgctttccttttttgtctcctcaccccatcagtcaggaccggctgtaggtaatagcttgatcacgggtttatattctcatgtttagaggcaggtagtccatggatggtgaaaattattttaatctaggcctattattaccctaaaaactta

SEQ ID NO: 354504 - DNA, 561 bp, Homo sapiens
cccatcagtcaggaccggctgtaggtaatagcttgatcaygggtttatattctcatgtttagaggcaggtagtccatggatggtgaaaattattttaatctaggcctattattaccctaaaaacttacataaggaagagatttatacaagtttgttttttaagttatatgtatttaatacccataaatactgggtagaacatgatgggtgtatggtaaattaaatgtatggaaagataagagaactgggtggaaggttgaaggttgaacatagattctaacatttagggattaaactagacacaattcagaggtctggcatattctgggttaaagttagaccaaagggctgcaatgcatccgaaggaaattgactctagaattcatgcctcaagtgtggattaatgcagaagcaaatgtgaggatgtgaattaaatctctcagtgtagaatattggtagatattagtgatatgcaataaggcacaaaatcataattagaaaagatctcatcaggaagctaaatatgatcatttgctttgcaagggaatataaatggataaa

SEQ ID NO: 354505 - DNA, 561 bp, Homo sapiens
cccatcagtcaggaccggctgtaggtaatagcttgatcacgggtttatattctcatgtttagaggcaggtagtccatggatggtgaaaattattttaatctaggcctattaytaccctaaaaacttacataaggaagagatttatacaagtttgttttttaagttatatgtatttaatacccataaatactgggtagaacatgatgggtgtatggtaaattaaatgtatggaaagataagagaactgggtggaaggttgaaggttgaacatagattctaacatttagggattaaactagacacaattcagaggtctggcatattctgggttaaagttagaccaaagggctgcaatgcatccgaaggaaattgactctagaattcatgcctcaagtgtggattaatgcagaagcaaatgtgaggatgtgaattaaatctctcagtgtagaatattggtagatattagtgatatgcaataaggcacaaaatcataattagaaaagatctcatcaggaagctaaatatgatcatttgctttgcaagggaatataaatggataaa

SEQ ID NO: 354506 - DNA, 561 bp, Homo sapiens
cccatcagtcaggaccggctgtaggtaatagcttgatcacgggtttatattctcatgtttagaggcaggtagtccatggatggtgaaaattattttaatctaggcctattattaccctaaaaacttacataaggaagagatttatacaagtttgttttttaagttatatgtatttaatacccataaatactgggtagaacatgatgggtgtatggtaaattaaatgtatggaaagataaragaactgggtggaaggttgaaggttgaacatagattctaacatttagggattaaactagacacaattcagaggtctggcatattctgggttaaagttagaccaaagggctgcaatgcatccgaaggaaattgactctagaattcatgcctcaagtgtggattaatgcagaagcaaatgtgaggatgtgaattaaatctctcagtgtagaatattggtagatattagtgatatgcaataaggcacaaaatcataattagaaaagatctcatcaggaagctaaatatgatcatttgctttgcaagggaatataaatggataaa

SEQ ID NO: 354507 - DNA, 569 bp, Homo sapiens
cgtggggtttacatgtaattcacataaaaactcttcgagctgagaatgtatgtttctcttctctgtaacatgttctgttgaaggtcttatttgtaaaatctcagccttatttagattttttttatccaatcattatttaagcttagcataaatcattaaaacagacacattaaatgattttcaacctaaggtttttgactggtttcattgccaatgagatttttagtttgtgttttattgatgataattttttaaaaaatagctcaacattgctaggagagtactgttcccaaagaaggacttartcttttaaaattacattgatttctgacaaggaacaagagtcagtttcatattttgattgacttgaagaaatatttgatttcattaattcaactttttcagtaagttcttattgtcagaggtgcttggataataatcctcactttaccatttttggacttacttttcctctactttgcaaccactgtgttgttttccctagcgtgtttgtttttctttttcagttttccagctgcttctctcttctttctcctattatttctgct

SEQ ID NO: 354508 - DNA, 622 bp, Homo sapiens
attcagcgatatttctcccatttgcttttgaaagaagagaaatatggctctgttccacccggctcactggcggtcagagtttaaggttatctctctttttccttgaacaattgctgttatcctgttcttttttcaaggcgcccagatttcatattgttcaaacacacatgctctacaatttgcgcagttaatgcaattattacagggtcctgaggtgacatacatcctcctcagctgacaggattaagagattaaagtaaagatgggcatataaaatcacaagggtattgattggggaagtaataagtgtccatgawatctttgcagtttgtgtgtagagattgcaataaagacaggcataggaaattataaaagtattaatttggggaactaataaatgtccatgaaatcttcacaatccatgttcttctgccatggcttcagctggtcccttcgtttgtggttcctgacttcctgcaacattgtcctatagtcagacacagttagtctctaacttaaataatgtataagtctgtttcaacagcattcattagcaaatcttgttagctctggaaatcacctatttctgtccaccaaattatttaggcaaccagaccatgtg

SEQ ID NO: 354509 - DNA, 568 bp, Homo sapiens
atctgtagtagtatgttctcatgctgctataaagaactgcccgagactgggtaagttataaaggaaaggggtttaatttactcacagwtccacagggctggggagtcctcaggaaacttataatcatggcagaaggagaagcaaacattgaagcaggaagaagaaaaatgagagccgagtgaagggggaagccccttataaaaccatcggatgtcatgagaacttactgtcacaagaatagtatgggggaagccaccatttaccggaagtggaaggttcaattacctcccacttggcccttcccatgacatgtggggattatgagaactataattcaatatcaaaatatcaaaatttaacttgaattgtaactataattcaagatgagatttgggtagggacacagccaaaccatatcagcatccaacaaggggctaataataagaatctataaggaactcaactcaacaaccaccaccaccacaacaccaaacaaccccattaaaaagtgggcaaatgtcatgaacagacatttttcaaaagatgacatacaggtggccaaaaaaca

SEQ ID NO: 354510 - DNA, 634 bp, Homo sapiens
gtagtagtatgttctcatgctgctataaagaactgcccgagactgggtaagttataaaggaaaggggtttaatttactcacagttccacagggctggggagtcctcaggaaacttataatcatggcagaaggagaagcaaacattgmagcaggaagaagaaaaatgagagccgagtgaagggggaagccccttataaaaccatcggatgtcatgagaacttactgtcacaagaatagtatgggggaagccaccatttaccggaagtggaaggttcaattacctcccacttggcccttcccatgacatgtggggattatgagaactataattcaatatcaaaatatcaaaatttaacttgaattgtaactataattcaagatgagatttgggtagggacacagccaaaccatatcagcatccaacaaggggctaataataagaatctataaggaactcaactcaacaaccaccaccaccacaacaccaaacaaccccattaaaaagtgggcaaatgtcatgaacagacatttttcaaaagatgacatacaggtggccaaaaaacatatgaaaaaagtgctcaacatcactaatcatcagagaaatgcaaattaaaatcacaatgagatactatct

SEQ ID NO: 354511 - DNA, 550 bp, Homo sapiens
atgaaaaaagtgctcaacatcactaatcatcagagaaatgcaaattaaaatcacaatgagatactatcttacagcagtcagaatggctattactaaaaagtaaaaaaagaaacagcagatgttggcaaatatccacagaaaagggaatgcttatacacttttggtgggaatataaattaatacaatgtctacagaaaacagtatggagatttttcaaagaactaaaaatacaactacactgtgatccagcactcccactactgggtgtctacccaaagaaaaagaaatcattttattaaagatacctgtatttgtatgtttactgcagctctattctcaatagcaaagataatgaatcaacctaagtgtccatcagtggatcatggcattaaaaaatacacatacacgcgcgcacacacacacacacgcatgcacacacacacatgcctcaccatggattactattcagccataaaaagaaaaaaaacatgtctttttcagcaatrtaaatggaattggaggccattatccttagtgaaatgactcagaa

SEQ ID NO: 354512 - DNA, 550 bp, Homo sapiens
atgaaaaaagtgctcaacatcactaatcatcagagaaatgcaaattaaaatcacaatgagatactatcttacagcagtcagaatggctattactaaaaagtaaaaaaagaaacagcagatgttggcaaatatccacagaaaagggaatgcttatacacttttggtgggaatataaattaatacaatgtctacagaaaacagtatggagatttttcaaagaactaaaaatacaactacactgtgatccagcactcccactactgggtgtctacccaaagaaaaagaaatcattttattaaagatacctgtatttgtatgtttactgcagctctattctcaatagcaaagataatgaatcaacctaagtgtccatcagtggatcatggcattaaaaaatacacatacacgcgcgcacacacacacacacgcatgcacacacacacatgcctcaccatggattactattcagccataaaaagaaaaaaaacatgtctttttcagcaatgtaartggaattggaggccattatccttagtgaaatgactcagaa

SEQ ID NO: 354513 - DNA, 540 bp, Homo sapiens
ataatctctgaaaatgtttcaagcttatatttgatctatattcaattctgagccttattttaatatttgaaattttaagcactttatttttgccagattttactcatgaagccttgtttccttgggtgtttttgttttttaactatgtgcattatccttacaaaagtatttgtgggaattcttgacacttayggtaaaggagcatttcttcggagtagacttacatttgcttgggaagcatggagcctcaatagtctggaacacttttaaatgaaattctccatatacttagccaattattccagcaacgcttattgaatagggagtccttttcctattgcttgtttttgtcagtattgttgaagatcagatggtagtaggtgtgcagctatatttctgagttttctatttttgttccactgacctatgtggctgtttttgtactagtaccatgctgttttgattaccgtcactttataatatagtttgaacttgggtaatatgatgcctctggcttttttttccccttaagattaattt

SEQ ID NO: 354514 - DNA, 540 bp, Homo sapiens
ataatctctgaaaatgtttcaagcttatatttgatctatattcaattctgagccttattttaatatttgaaattttaagcactttatttttgccagattttactcatgaagccttgtttccttgggtgtttttgttttttaactatgtgcattatccttacaaaagtatttgtgggaattcttgacacttatggtaaaggagcatttcttcggagtagacttacatttgcttgggaagcatggagcctcaatagtctggaacacttttaaatgaaattctccatatacttagccaattattccagcaacgcttattgaatagggagtccttttcctattgcttgtttttgtcagtwttgttgaagatcagatggtagtaggtgtgcagctatatttctgagttttctatttttgttccactgacctatgtggctgtttttgtactagtaccatgctgttttgattaccgtcactttataatatagtttgaacttgggtaatatgatgcctctggcttttttttccccttaagattaattt

SEQ ID NO: 354515 - DNA, 484 bp, Homo sapiens
tttatgtgatcatacagttctatggacatcaaaaaacctaaataagacttgtacctgctataggatcaagaattcatttggccctttctaatagatatatttttttaatcccaggaaaatagttaatgcattttcctgattaggatattagattttatttatatagcatataaaaaatccaacaaatcaactttaaacagtaaaatatttgatattatattttactttgctcatcattgtgggactagcagatctgaaaggaaaaccaaggttarttttctagcaatcagatacagttaattgatggagatacttcagagtaaaataaaattatcttgacagcttttcattagggtaacaacctgacagtcaaagaactacctaattttttccctaatcattacgaattattaatagtagcttacacatgtattaaacatcttgagagatggattcttgcagacttgagtgcacagattggtga

SEQ ID NO: 354516 - DNA, 484 bp, Homo sapiens
tttatgtgatcatacagttctatggacatcaaaaaacctaaataagacttgtacctgctataggatcaagaattcatttggccctttctaatagatatatttttttaatcccaggaaaatagttaatgcattttcctgattaggatattagattttatttatatagcatataaaaaatccaacaaatcaactttaaacagtaaaatatttgatattatattttactttgctcatcattgtgggactagcagatctgaaaggaaaaccaaggttaattttctagcaatcagatacagttaattgatggagatacttcagagtaaaataaaattatcttgacagcttttcattagggtaacaacctgacagtcaaagaactacctaattttttccctaatcatkacgaattattaatagtagcttacacatgtattaaacatcttgagagatggattcttgcagacttgagtgcacagattggtga

SEQ ID NO: 354517 - DNA, 568 bp, Homo sapiens
tttggcaatgtaaatctctccagaactccccattttagcagctacaataaggtaagataaaaggaatggaaactaactaccttaatgataggatcagctttaaaagtatttgttatgttctggctggtttttttggcatgggtacagaggttaaagctgtgagaaacaatagcacaaagctacatgataatgaacatttgggcttttattgaatattctttcatttctagagacatcagagcacaatgtwacgcacattttaataagttgcatattttgacctgttgtgtatgcaattaaacaaccagatcatttacatttaaaatgtcaatcctaaaaaattaaaaagaaggaaggttgccatggagattatcctgtgtacatatgataggtgagtgtcttaacctgaaatgtgatgtggtctcagaaaaaatacaagtttacactgctgtaataaggcaaataaatccgcttacctaagtaagaaggacagtacttgtgctgaagaaactcctttatgtctccttatttattaaaaaattatgagaatataatattaacagtaagg

SEQ ID NO: 354518 - DNA, 568 bp, Homo sapiens
tttggcaatgtaaatctctccagaactccccattttagcagctacaataaggtaagataaaaggaatggaaactaactaccttaatgataggatcagctttaaaagtatttgttatgttctggctggtttttttggcatgggtacagaggttaaagctgtgagaaacaatagcacaaagctacatgataatgaacatttgggcttttattgaatattctttcatttctagagacatcagagcacaatgttacgcacattttaatragttgcatattttgacctgttgtgtatgcaattaaacaaccagatcatttacatttaaaatgtcaatcctaaaaaattaaaaagaaggaaggttgccatggagattatcctgtgtacatatgataggtgagtgtcttaacctgaaatgtgatgtggtctcagaaaaaatacaagtttacactgctgtaataaggcaaataaatccgcttacctaagtaagaaggacagtacttgtgctgaagaaactcctttatgtctccttatttattaaaaaattatgagaatataatattaacagtaagg

SEQ ID NO: 354519 - DNA, 568 bp, Homo sapiens
tttggcaatgtaaatctctccagaactccccattttagcagctacaataaggtaagataaaaggaatggaaactaactaccttaatgataggatcagctttaaaagtatttgttatgttctggctggtttttttggcatgggtacagaggttaaagctgtgagaaacaatagcacaaagctacatgataatgaacatttgggcttttattgaatattctttcatttctagagacatcagagcacaatgttacgcacattttaataagttgcatattttgacctgttgtgtatgcaatyaaacaaccagatcatttacatttaaaatgtcaatcctaaaaaattaaaaagaaggaaggttgccatggagattatcctgtgtacatatgataggtgagtgtcttaacctgaaatgtgatgtggtctcagaaaaaatacaagtttacactgctgtaataaggcaaataaatccgcttacctaagtaagaaggacagtacttgtgctgaagaaactcctttatgtctccttatttattaaaaaattatgagaatataatattaacagtaagg

SEQ ID NO: 354520 - DNA, 572 bp, Homo sapiens
gggacccagatacagaggccatctttggctctttatataacagtcagtttgagtcttttattattgttttagtggattgtttgctacattattcacaaacttagggcactgattcttcatcagttatatgtgttgcaaatttatccttccatatgtatcctttcattttctattttggtagatgttcttaactttgaatttattaatatttatcctgtttttcttttccccktaccctaatatttattcacttactcttactcctaaaaatctttaaatccttattctctctggaatttacttttgtatatggtgtgaggtagggatcccattttactttttacatacaaatgacctttatttttccccaggtttgtttattgactagccccacctttcccaactttcccacctttcccaactttgttatatatcaacattccagttacttatgggtctatttctgatctatctattctcttccactggaaaatttgtctatcttgatgtcaacaccacattatttaattaccacagctttataaaaagtcttgatatttagtagtgcaaaa

SEQ ID NO: 354521 - DNA, 459 bp, Homo sapiens
gccaagtactaagagacaatatctagcacacattcttacactaaaatcaattccagatgggtgagttacctgtaaaaaaatagaatgaatctatcaaaaatttataatcctggagtgtggaaggtatttctaagtagcatgtgaaattcagaagccaaaatggaaaagcgatggatttacttaaataaaaattaaaaatggatatccatcaatatttaaatgcacaaatcccttgaccactgctaggaatttacattatggaaatgtctgtgtaagtctgcaaaggtatgtacccaaacaacgcagcattatttataagagcaaaactctsaatcaataaaactatggtctgccatatgacagaacactatgagggcaagtaaaagaagagatttgaaacaaagatgttccctttgtttaacaaaacacatctgcagacatatattatctaaccctata

SEQ ID NO: 354522 - DNA, 591 bp, Homo sapiens
cacattttcctaataactagtgatgttgatcatgttctcatgtgtttattggccatttgtatatcttctttggataaatgcttattcaagccctttgcccatttttaaattaagttgtttggtttttgtttggaaatattcctttaaatgtatatatagacaaggcagaggtatagaaacaacaggctgttacctcagaggttgtgtgttgaggtggaagaggagcaaacatgattcctttctgcctcttgtgaaattgtactgaagggctccacgtattaccagcatgtgtcactaactgaataaagaaaaacaatttaaagaaattatcagtaaaaagtcaccttgcttaagtatctcaaaatatctaacttgaagttttttttaatggtacagccaagaaaatgaaataatcttgagttgaaccttcacacagatttcattggtaaaattttaataaygagaagaaaacttcccttcattgttctagtcacagatccttggcctgccttttccacctcctccctcctcccttctggaaagagctcagactaagagaagagcctgtctctctttaaagagactatttgt

SEQ ID NO: 354523 - DNA, 595 bp, Homo sapiens
tttgtaaaattttagcgtttatatattataaacaatctgttgtaatttatgataatatgtattagtacttgtcatcctaaaaaggtattttattattatatcatttgtataatatacttaaaatttgggagatcctttgtagtcattaataaaaaagtcttttatacccatcaaccaacttaccaaaaaccacttcaaatatttaagtggtgaatatccttgatcttcatttatatctggaaatatgtttatttcacaaaatgcttataaacacatatrtaaataaaatctatatagacacattaatttattatgttttgtgatactagtgactctaaatcttgatttcattatttagtgatagtttttttcagtgcatctgtttttgtaagaccccagaacttttggctgaagtttcccgttttctccccctcagatacttaaaagttttaatcagcccatttagtaacagatagtttgacatctgctatttgctttgattctttggaggtttgatgagctcagccttttaaactctgtttactattgccactgatattccagttatgagaacttctagccaactgtttgacta

SEQ ID NO: 354524 - DNA, 481 bp, Homo sapiens
taagcttttgattaagtattaaaattcycaaaactgaatacattttttaattaagtggtctgaagcacaaataattcttaatactatgcagaggtttgaaataagtgccatatttagctttattcattgcagcaattttttcagcttattaaaaatattaagttaatacttccttagaaatacataaaaatcttaaaaatggttattttttatagtcatatgtcagtgtaaacatttataaactaagaactatggttttctcatggtcactgtattcctgtgcattcattgactatagtgttcacctgaaatttgcaactagccagaccttaagaaaacatagcagaaaccttatgtacaatacagtacattatttaaagctttggattaatatatgcgttttatttgaagaaaacaatggtttattagtcattctttgccattaacattctttgcacatagaaatggtgctttctaagtc

SEQ ID NO: 354525 - DNA, 481 bp, Homo sapiens
taagcttttgattaagtattaaaattctcaaaactgaatacattttttaattaagtggtctgaagcacaaataattcttaatactatgcagargtttgaaataagtgccatatttagctttattcattgcagcaattttttcagcttattaaaaatattaagttaatacttccttagaaatacataaaaatcttaaaaatggttattttttatagtcatatgtcagtgtaaacatttataaactaagaactatggttttctcatggtcactgtattcctgtgcattcattgactatagtgttcacctgaaatttgcaactagccagaccttaagaaaacatagcagaaaccttatgtacaatacagtacattatttaaagctttggattaatatatgcgttttatttgaagaaaacaatggtttattagtcattctttgccattaacattctttgcacatagaaatggtgctttctaagtc

SEQ ID NO: 354526 - DNA, 481 bp, Homo sapiens
taagcttttgattaagtattaaaattctcaaaactgaatacattttttaattaagtggtctgaagcacaaataattcttaatactatgcagaggtttgaaataagtgccatatttagctttattcattgcagcaattttttcagcttattaaaaatattaagttaatacttccttagaaatacataaaaatcttaaaaatggttattttttatagtcatatgtcagtgtaaacatttataaactaagaactatggttttctcatggtcactgtattcctgtgcattcattgactatagtgttcacctgaaatttgcaactagccagaccttaagaaaacatagcagaaaccttatgtacaatacagtacattatttaaagctttggattaatatatgcrttttatttgaagaaaacaatggtttattagtcattctttgccattaacattctttgcacatagaaatggtgctttctaagtc

SEQ ID NO: 354527 - DNA, 575 bp, Homo sapiens
ttccagagactgctggcttaggtcccagacagccactcctgtaatttttcttatcagttaagctcatagttttccttgacttacactactcttattttctactttaaaacttcctgaagactgtcttcatgtaagaatcaacactacattttcctggagacttctcttaacctaaatgttagaaattttgagattcacgagttttgaatattacacattatgggacaccattctcttcatgtgtaaaatacccaagatttaaaaaaatgcatagcatgatacactagcattacattactgcttcatggtaaactgaacatgtaattttaaaatatatgttctaatttaggctgccaaagtttcgtatttctttactaattttaacaaattctggctctttcactggaaaggtccgtcaggtggtttatttgctttccaataaaccagctttattagsttagagttgaattttttagattacaaaaagtgatcttggtagactatacaatatggcagaaaggccacctaaatattcattataaagttagattaacttccctatttaatatgccaca

SEQ ID NO: 354528 - DNA, 545 bp, Homo sapiens
atggtcactgaaactgcagaaagtgaaaccatggataaaggagaactactgtatataccactcttttaaagtctccttttattcataagcctattatcattctcttcagcttaaccagtctccagcccctcactcaggactagtatactatattggctctttagttcatatggtcactagtggttctggcaaggaggaatcaaaagcctaatcatcctttgaattaactgataaaatggagttattaagcttacaaaaccaaagattacagccacgatcaaggtatccttaccaatgtgtaactgccccatgaaccctactggaaatagtcttcaacttcagtgaaaagaaatgtattataaatcaaaacagctaacaccaacttgattgattgattgaagcaagctgtcactctgtcacacaggcaagagtgcagtggcatgatcacattttactgcagcctcaacctcctgggttcaagcgatccycctgcctcaatttttttacttttttgtagagacaaggtctcactgtgttgcccaggc

SEQ ID NO: 354529 - DNA, 512 bp, Homo sapiens
gaatgcctctgggcataattaaaagaccctgttacttttcctgtatcatgtgttaaagtttaagtgtgttacataattgaattgattaacaatttttagaagattaattagcatcccaacagaaatttaacagaacttttcattaataccttaatcttgatagtactgacttccctctcagagcactttgaattcccagagatggcttttaaatatggagcctctatttacttaatrgagctttgtgccactgagagtagctctgtgcggtgctggggaactcggaggaagatgtgaaatgggttgctaacgaacaagaatgcaaagtagaccctctcagcctcacaggtttcaagcactacaatatcccttaccctgattatagcttcagcagagtggagtggtttgtttgttgaaataatgaagagtggatggcatccattttagtggaaagttttaatttgtgatttcctgaggctgtgtgaaatgaaatacccttatttattcccata

SEQ ID NO: 354530 - DNA, 512 bp, Homo sapiens
gaatgcctctgggcataattaaaagaccctgttacttttcctgtatcatgtgttaaagtttaagtgtgttacataattgaattgattaacaatttttagaagattaattagcatcccaacagaaatttaacagaacttttcattaataccttaatcttgatagtactgacttccctctcagagcactttgaattcccagagatggcttttaaatatggagcctctatttacttaatagagctttgtgccactgagagtagctctgtgsggtgctggggaactcggaggaagatgtgaaatgggttgctaacgaacaagaatgcaaagtagaccctctcagcctcacaggtttcaagcactacaatatcccttaccctgattatagcttcagcagagtggagtggtttgtttgttgaaataatgaagagtggatggcatccattttagtggaaagttttaatttgtgatttcctgaggctgtgtgaaatgaaatacccttatttattcccata

SEQ ID NO: 354531 - DNA, 585 bp, Homo sapiens
ctgagaaagaatgtgagagattcagaatatgtagagaacaaaaagtaagatgaatttgcttcttacattcaagatgctcttttactttaggtttttaattggctacataactatgtttatattaggagaaattgttagagttaaatctattatttttattcttggttctttatggccaaaaatggagtatgcgaccatctcttagggaagaaaaagtcctgcatcaaagctgtcccttcttacataaaagtgaagttttaaaagtaaattaaaactcagagctcagtgcatgtggggtgtgaatggctgtattgtggtgtatctatatgtggatagttyatttctaaatcattcactgattcctttatcaagcacagtggtttactgagtgtagacggtagtagccactatactgtaaagcctgtttagcctggagttaaaaagaagttacggttatattttgttttcataccctcttctttactttagggtctcttttgcttatgtaagaattgccaataattgccaggtgtagcagatattctgagtgtcccacccatatccccttaaattattttactgttt

SEQ ID NO: 354532 - DNA, 573 bp, Homo sapiens
gagactttcttccccactccccaacctccggggaaagaggcgaaggtcgagttgatcaccaatggcatttaatcaatcatacctaggtaacaagacttccataaaaacgcaaagggctgggtttggagaactttcagatgaccgaacacggcgaggtgcctagagtgggcaccccttcccacacatcttgccctatgcatctctcccatctgatgttcatctatagcctttgtaatatccyttataataaaccagtaaatgtaagtgtttccctgagttctgtgagctgctctagcaaattaatcaaaccaggagggggtcatgagaaccccaatttgtggttgattagtgagaagtacaagtgaaacaacctggggcttgcaattggcatctcaatgggtggggacactcttgtgggactgaaccctcaacctttgggatctgacactgtctccaggtagatagtgtcagaattgaattgaattagaagatatcaagctggtgtctgctgctgaatctggagaattgctttcttgcttcatgtgtggggaaaaaaataatcccacctatttg

SEQ ID NO: 354533 - DNA, 554 bp, Homo sapiens
gtgaattccttggcattttagtttccccmaaatctgaaaggtgttacatgggagagaaaactcacccattcacgctcggtgggatgaatcggccaatgattagccatccacggtccagtacttttaggacacatggacacacaataggaactcagtaaaagtttgtttaatgaatgcatgactaaaaccctgagttaaacaaaattgaatggggttccttgtagcatggtgggtcaggttctccagaagcagaccttgaagtgaggacatatgggcaaggaacttatgaaaaaagtgctcccaaaagcagccaatgaagtaggaaataggatagggaagggagaaacgaagaccaggtgccatttcaggtgatcacttaggcccaggcagctctggggcttgaagtatttcacagagtttgttctacttaaaggcaaagggttaggcttctcaacatctgcccatcattgtcgtcattgaccatgagcctcctgagggactgtgaattctcaggtactttaggctttctgtgcatccgccaatactctgaagaa

SEQ ID NO: 354534 - DNA, 512 bp, Homo sapiens
cacactggctcaccagaatgctcaccagaagagataataattttcaaatgttttttaaaatcatgctttaggtatagttcctaccctggaagcagacatttttcttttattttattttaagcaaaggcttgctgccttagttagagagttaccacactgaatgcttgtagagttttaatttcccatggtkgtttaatggtagcacagcccaccagccattaagctgtcggcaagagctttggaaaacgggagcaaacaaagcagcagggcaaggatggacaacttcatccctgggccacaggactctagcctttagctcgtacatttgcatttagtacacatgcaacctttctacatactcatcaaattcacgttgggctgagacccaatatagccaagaaggaaagcttccccccaaaatgaacaatttctcaagtcagagtgggagagtttacatggaacttctcatatagtgtttgctttccatgaacttctattaccactagtttagt

SEQ ID NO: 354535 - DNA, 587 bp, Homo sapiens
tttctgttttctggggtgtgagagtgccctctggtgggcatttgttggaaagtagcactgaggaggctctccactctgcgagggagaacagtacattccatggtgcacatggagcctccacgaagcgcacgaaccaatgtgaactctcttcattcctcctctactccygccttcattcctccaatgccttcattcctcctctactcccgcaacctccccacggtcgtgtcagagaccatgtattgtctaaatcagtgctgtccaagagaactttctacaatgatgtaaatattccacatctgtgctgcccaatatgttggccgctagccactgagcatttgaaatgagcctagtgggactgaggaagtgaatcaacacttttacctttacatcaacatttttaatgaggtgaaatccacataacaaaattagccgttttaagttgtacattttagtggcgtttaatactttcatattgctgtgcaaccagcatctctatcaagttccaaaatatgttcattaccccatagaaaccctgtacttattaagcagtcacttcccatttccaccctttactcagtccctgg

SEQ ID NO: 354536 - DNA, 525 bp, Homo sapiens
caagttggccaatctctctcttttttagacggagtcacgctctgccaccaggctggagtgcagtggagcgatcttggctcactgcaacctccacctcccaggttcaatcgattctcctgcctcagcttcatgagtaggtgggactacagttgcctgccaccatgcctggccaatttttgtgtttttagtaaagacggggtttcaccatgttggccaggatggtctcgatctcttgacctcatgatccaccctcctcagcctcccaaagtgctgggattacaggcatgagccgccgcaccggcttggccaatctctcttaaatctcagggcaaaagacagatatatggcaaaagaaagttgaaatctacttctgaactgtaatcgctccttacatagaattaattgatctcctagaagttgaacgctttctttttgcaaatgaattatccaaataaattatttactgaacattgagactttagttgcttygaaaaaattagtcttcctctttttcatttctggagt

SEQ ID NO: 354537 - DNA, 411 bp, Homo sapiens
ccccaaacattccttgggaaagatgactcaatataggggtttatttgataccactgggctttatttggtcccactttctctgagattagattatattgagttgtttagctgcagtctgtcactattcatctttgtacctggctcttatcgtaggccctgaytccactaaactcaagtgaatcttctttataatggcagggttgaatgtaagtctgatattaccttaaagaccacctcaaaatgtgggccatggatcagcagcatcagcatcacctggagattgtttgaaatgcacattcgctaaatctatcttgggggtgggggaggcagccatctgtgttttggcaagtcctccaggagtttctgatgcagactcgggtttaagaacgactgatagactatccttagcag

SEQ ID NO: 354538 - DNA, 517 bp, Homo sapiens
ttctggtacattgtatggaaatattcagggggcagagtggcagctggagcttgtcttcaatctctgatagtctccaaacaggagagagagctgcctgtctgtcaccatacacgccctggccttttttgctgcccctgatttgcacttagctgccctgttcccagcatccaagggataagagaagtaataaagacggcacttcatgcaagcaagccctcctctgggcccctgtgctatgcatggcattcccataacctcgccaagccacccaagccccwgttctgctgagattcacctgcaccaggtagacagtgagggattgttcagagcaaaacactgtgcaatcaattggagataacagaggcccaggggtcaggcgggctgcccagagcatctttcatctttgacttatattggtagggtgtaaagtgtggcatcagcctggcctgcctcacggtcaatggctgccttgttctgccctccatttatctgccatctctctgatgtcacaggtttc

SEQ ID NO: 354539 - DNA, 517 bp, Homo sapiens
ttctggtacattgtatggaaatattcagggggcagagtggcagctggagcttgtcttcaatctctgatagtctccaaacaggagagagagctgcctgtctgtcaccatacacgccctggccttttttgctgcccctgatttgcacttagctgccctgttcccagcatccaagggataagagaagtaataaagacggcacttcatgcaagcaagccctcctctgggcccctgtgctatgcatggcattcccataacctcgccaagccacccaagcccctgttctgctgagattcacctgcacyaggtagacagtgagggattgttcagagcaaaacactgtgcaatcaattggagataacagaggcccaggggtcaggcgggctgcccagagcatctttcatctttgacttatattggtagggtgtaaagtgtggcatcagcctggcctgcctcacggtcaatggctgccttgttctgccctccatttatctgccatctctctgatgtcacaggtttc

SEQ ID NO: 354540 - DNA, 352 bp, Homo sapiens
gggacaaattccctggagcctgtgattattaatggggcaccagctgctttgtctttattgctgtcagtcacagtgtctgcctctgccagtctgcagggatgtggcttctgtggtcagagtgcagagccaccaatcagtgtttactttctccctgccctttcttaccttccacaccagctccggcttacttgcatgaacagttctcttaattccatgagctgcctcagtcaactgatgtcagagagcgccacctgccgagctaagaggtgacattgaaaatcagtatgctgtgagcctctacawggagctagccagccaacccacctgcccactccatgtctgcttgctgggt

SEQ ID NO: 354541 - DNA, 457 bp, Homo sapiens
attttctccagtgcttcaccctgtagtgcagtgggaagattttttaagaaggaccggggaagtatatgcccaatcctcttaggagtatccagagtgccacacataactcctactcacattccattggccagaacctaatcagatggccatactgagtggctaggtagccagctaaaacttgacttctggggaagaaagggagagcaactgccrgttggaacaagcagcagtctcttacagtaatttgttgctattgagtctcatcaactctggaccatcagatgggatccagtgtctgaacacgtaagttttatgaacaaaccttggactgtgggaaactcacatttttacagatggtgagtcagtagtgagaacacagagggtaaataaagccattgatcttgattagtaagtggtaccagagtcagccttcccaccctgaagtacgtgcaccaag

SEQ ID NO: 354542 - DNA, 599 bp, Homo sapiens
acaatgaaaggagtggctgcagattatgcaaaacccttttagagcaggtgctgtgcccatgctggtctgcagcactgggcaggcccgctctgtcacagccccatcccaccctgttccactctgccagctctctctgcatgctcggtctttccctcacccaatgtccctgctcccactgtgcactttgccttaaatgtcacaggactcagtcttcatctccctgctgtgacctccttgaggtcaggggaacacacctggactcatccctgtagctctcgtcagtagcatmtcgtaggccagttaagtatttgtcaagccctagctcctcatttcctttaaattcattctacttgttcctcgagctactcactcagcatcaagacatctcttgcattgctgtgctgttattttccttcgtacattgtgatatcaccccgccccagttaaactgcaagtgtctgaaggagcacccttgttctctatcaaggtgccttgcccatcctgcatggtccaaacatgagctgattgagtgatgtgagcaacagcccacacttaaccaagagtaaaaagtgcctgctgctctagctggacagcacagt

SEQ ID NO: 354543 - DNA, 565 bp, Homo sapiens
ggccttctttgagttccagactgagcagagggaagtagatgattgctatggtgccccccagcactaacgatctggcctgccccaggtctaagcttgcytctctccgtgcccaaattctgccactgattcctgatgaatgcctgctcagcctcaggactcagctcagaatgtccttcccaggaagcctccctggaccctaaccctgacgctcccatcccacctcccaccctgggttgtcatgttgccttgttttgctccctagccttacctgtagactcctccagctcctcatcttggtgcccatcacagtgtctgccccagagttaggttccataaaagttgtggactgaattaaacaaatgaaccaatcattcaaactggccacctaggtcaatcctgagtggcgggatctggagagaccaaggagcctatctcagcctctccaaagattagagcagtgcttaggacccttcctggcatgctgtgggggctcaataaatgttaggacccttcccctttgctttctcctcaatccagggagatgcatggctcattctgttagaat

SEQ ID NO: 354544 - DNA, 565 bp, Homo sapiens
ggccttctttgagttccagactgagcagagggaagtagatgattgctatggtgccccccagcactaacgatctggcctgccccaggtctaagcttgcctctctccgtgcccaaattctgccactgattcctgatgaatgcctgctcagcctcaggactcagctcagaatgtccttcccaggaagcctccctggaccctaaccctgacgctcccatcccacctcccaccctgggttgtcatgttgccttgttttgctccctagccttacctgtagactcctccagctcctcatcttggtgcccatcacagtgtctgccccagagttaggttccataaaagttgtggactgaattaaacaaatgaaccaatcattcaaactggycacctaggtcaatcctgagtggcgggatctggagagaccaaggagcctatctcagcctctccaaagattagagcagtgcttaggacccttcctggcatgctgtgggggctcaataaatgttaggacccttcccctttgctttctcctcaatccagggagatgcatggctcattctgttagaat

SEQ ID NO: 354545 - DNA, 589 bp, Homo sapiens
tgctgcctgatgcccctttatggacccctgaaacttctcctttttcctccgtacccaacctcctggctgtgaccaggaggaaagccaggagaaagaaacagaatgctagtgcccagagcctccagcctgccctagccttggaacaaagacgtggtcgcctgcaggaagcagcacacattctccacaggcccgtcaacctgccctcagcctccgtcctggaaaacgcccgccgygctccacctctcacaacagctggcccgcgtgtcacagccaattaggctttggagggagtgagagggaaagcagtgacaccgcatattgacccctgctggcacggggcagatgtggaggccagcacgcgtcccccgcacggccacgccgctaattaatcacctcggccaccgagtcgtgacagcgctttgcgctccgcgaggcgcactcggaggcaggggccgggcacctgcggagagaacggccggcggggaagcactgggccaccagccgttccctctctcagctggcctggcaggttgtttctggcaagttttcactaaagctgttggggttaaaagtaaggatggaaaaggag

SEQ ID NO: 354546 - DNA, 617 bp, Homo sapiens
atttgccaagccaattttaggccacaggctgaggaaataaaaatcccttcagggatagaggaggctgatgttttttctgaacctgcgggaagaatattagattcagcaactaacagagtttttctgagaacgggccctctggcccatcaacacacaggccaacatccctggtggggaatgggccacatgatgcaatgatagaaatccagataactttgggggttctaaagcagaggacccaggacctcaattccataatgtagcttggggaagcttccagcctagaaatgttctggagcttctcacacctgcttgtggtgtagggaaagaagctaaaatgtctgtgcactggagaaggccttggaagagcatttgaatgagggctggcagacccaaagggccccaagagatgggatgattatggccaaggcatcagrgtggaaggctaaggccaaaaacagacaagacctatccccttggcagtggatgtccggagcgcagagcctgaagacctggcaccctctccctgccaaagcctggagaagtaggccccaccctaactttatgtcacccacaggaagtagaagagtgaaggggacagccctagactgacagag

SEQ ID NO: 354547 - DNA, 536 bp, Homo sapiens
ttgcccctgcttgtctctgagggctgcaatgattatactccaagaggttacccacctctgagaaagaaagtcttcaaagggtctataccccatgaagaaaatccaagaagctagaaaataaattaatagcccttccagaaatagcacccattagggaatttcctagttttctttttctttctttcagatcaggattgagcaaactacagtccataggccaaatccagtttgccacttgttttcataaaattttattgcagtggttttaactgggatgactttgctcccctatggcaatgtctagggayatttttggttgtcattagtggaggtgggagcactgttggcatctaatgggtcaaggtcaggaatgctgctaatcatacagcaatgcacataacagctcagcagcaaagaattattggggaaaaatgtcaacagtatggaaattgagaatcccttgttttgttagatccctaccacattcatgtttctgtactgtctctggtttccacaacgtgctacaatggcagtgt

SEQ ID NO: 354548 - DNA, 523 bp, Homo sapiens
ccatatcagcaggcttgaagcaaaaatcaaaaggaaagccaagctctggaaaatatttttcacccgagctaagaatgacaaagcagaatgactgacagaacctgggacactgacaccattttagagccaccatatcagccctagattatttatctcgtaactttatgtcaaaagtgaaaaagaagcctaagtttaattaagtcactataatcraatcaaactgctggtgcccactcacagtgagcagtttcattctctgaggaattcaggctctttccgtcattctagcccacattttagtcactgacatgttgccccctcatgatgcaaaatagctactaaagctttacacaacacacaaacctgcccccccaactgccccccgatccaatcacctcctagcaggccccacctccaacacagaggattacaattgaaggcaagatttgggtagggacacagacccaaaccatcctgatccaatcacctcctaccaggccacacctccaacacaggggattac

SEQ ID NO: 354549 - DNA, 523 bp, Homo sapiens
ccatatcagcaggcttgaagcaaaaatcaaaaggaaagccaagctctggaaaatatttttcacccgagctaagaatgacaaagcagaatgactgacagaacctgggacactgacaccattttagagccaccatatcagccctagattatttatctcgtaactttatgtcaaaagtgaaaaagaagcctaagtttaattaagtcactataatcaaatcaaactgctggtgcccactcacagtgagcagtttcattctctgaggaattcaggctctttcygtcattctagcccacattttagtcactgacatgttgccccctcatgatgcaaaatagctactaaagctttacacaacacacaaacctgcccccccaactgccccccgatccaatcacctcctagcaggccccacctccaacacagaggattacaattgaaggcaagatttgggtagggacacagacccaaaccatcctgatccaatcacctcctaccaggccacacctccaacacaggggattac

SEQ ID NO: 354550 - DNA, 521 bp, Homo sapiens
aagactttcccatcttggcaacctctgttcctagcwggtaactggtcattaaggtctgacctttgaccagttagtacatgtctcaccgtgggttccctagaaagcagaactgagatgaggttttcagggagcaagagtgaggcagaacaaagcatgggaggagtgagctggctcccagcacaggtgactgctggagcccaccagacttgctaagaagccccatgaaatgcatctcaagaccatctgcagggttgtaaaggggaggcatttacccaccactcctgtctaccagtgctcaaagtcttgccccataggggtattcattcccttgcacttcaggattgtgcagctgagggcttcaggtatgtttctgaggtggtccaagccacagtgtcaacaggaaaggccagaggtaagggacgaacaatgaaggtctgagatgtgggattgtcaatcatacctatgtgaagctgtcaactacctcttgcagtcattaggccaaaaggatctgaagaagtgca

SEQ ID NO: 354551 - DNA, 472 bp, Homo sapiens
cctactacatccaacacaacttaatcaactaaatccaaactcaaatataaacataataaaattcaaatgaacaacattcatgtactatgatgagtagtgtttgactgaaactcaatcacagtttgcaacatgagcatggcagtggctgctgcagccccagttccttagagttccatgtgcccctattattacctatgtgctatttgcacgctgctctcctctatcggaactactttctacagcctactgtgatgtcatttggccttcatttggcacaaacgcatcatttactattcagttcacctctgttcttttctcgttagtaagagccattaaagtagtgtcacttgrcaacaatgtaattgctaacaaaagcaaataagagcactgaaatcttggggctgttgggatgatccagaatagacatacattaaagttgttggattattacaagattaaagttgaatttaaa

SEQ ID NO: 354552 - DNA, 547 bp, Homo sapiens
ttattacaagattaaagttgaatttaaaacttagtataaagcccatagacatgcacagatctccagtttgagagcagtgtggtaaagtggaaagagcttaagctttgaagaaaaacaaactcagattcaaawcctagcttttccaccaactttccagtcgttgttccctctttgtgtctcctttccccattttaaaaattaggaaaataatactaatctcacactgctgaaatgagaattggagataatatgtataaagttttgagcaaaatgggtaagcccttaggtaaagagttgttgccattattagggattatctatgcttagtacatttgcccaataacctgccctgaagtaatgagtttgtgtggggggaaagtgatgagggggattgtgtagttaaaaattttacctacatcagacacaaatgaaagataattttgaaaacaatgattttccaaatatgccctagagagcccagtgagggtagggagggagttgggagacctggtggggttcagggtttctactctgtcttcaaccaaag

SEQ ID NO: 354553 - DNA, 551 bp, Homo sapiens
actgtattcagagctatggtgctttgtaaaatcttgaaaggcatttctttgttgttgttgatatgcattttaatggcatttaaatgagacgatttgtaattcttaagtgcattttacttaattgtatttattcttgggagaacattcatttttttatagatcaaaggttaaaaaataaccaaagctaaggcatgataattatcgaattaaaatatttcatgatctaaacatgaaataaacctaacaactgaaattttctttcaactctgaatttattttggmttatgtaaaatctttttaccttagtctttaatcattgtatcaaaggtccatatttttagtaagttgctttatgtgctgtcacaaattgtgcatgtcactctgctagtccccatggaaatgtgttttatctgttaccatcatggaattgctgcctctttgtccgtggactgtcattcattacctgcccatctaatcttgctatttgatatcttgtacatgtgacaatgtgtttggcattggaggaatatagataagtgtaagaagagcca

SEQ ID NO: 354554 - DNA, 604 bp, Homo sapiens
aactaataaataaataccccagtctgtagtattctatcatagcagcacaaaacagactaagaccatttgtgcccatgaacatgccaactatattcttgccttaagcactttctgcctgcttgctgttcttttcccataatctcacactggcttctccatatcctttgggtttcaggtcagatgtgctctcctaagtggggtctcctctgatgagtatctgtgacatattcacccccacacactcatacttaccacagcactctgttttctttccttctggagttcatcaacatcggaaatcctcttgtccatttattgacttctttgaactagcttataagcctcctakggcagggactgtgtctgtttcatccacaaatatgtccctgacacatagaacagcacatagtgcatgacacagtgtaagcatggcataagccctcaaaaaatatgtatcacaatctgtaaggagtgacttattttgtcagttatttgcttttaacagttattttaaggcttagaacctcctctgacatcccaagtctggtgctccttctcgatgcccacagagcagcctatactccccacatattgttattatgtg

SEQ ID NO: 354555 - DNA, 494 bp, Homo sapiens
ggattaaaagtgttaagtataggggcttcaaaaatagattataatgaagaaaatatttgacttttcaaaggaataactattcctagaaaagatttatgtccctgaagtttttgtcttaactaccaatttgtatccaaggaagtgctaaaaatgaagtctcttcgtttttgctctctaaagggattacacaggactttgcttctaaacaggatggaataacggggattaaattttctcaccattttattttaataattattcctatttgggggctgttttccaatgcrttttcctttagctttattgaggtataattaacaaataaaatttgtatacatttaaggtgtacagtatgatttttatatatatatatacacacacacatagttaaatgattatcacaatcaagttaattaacacatccttaacctcatatagttgccttttattgtgtatagtgagaatacacataattaaagtctactctcttagca

SEQ ID NO: 354556 - DNA, 494 bp, Homo sapiens
ggattaaaagtgttaagtataggggcttcaaaaatagattataatgaagaaaatatttgacttttcaaaggaataactattcctagaaaagatttatgtccctgaagtttttgtcttaactaccaatttgtatccaaggaagtgctaaaaatgaagtctcttcgtttttgctctctaaagggattacacaggactttgcttctaaacaggatggaataacggggattaaattttctcaccattttattttaataattattcctatttgggggctgttttccaatgcgttttcctttagctttattgaggtataattaacaaataaaatttgtatacatttaaggtgtacagtatgatttttatatatatrtatacacacacacatagttaaatgattatcacaatcaagttaattaacacatccttaacctcatatagttgccttttattgtgtatagtgagaatacacataattaaagtctactctcttagca

SEQ ID NO: 354557 - DNA, 583 bp, Homo sapiens
gaagtcgcagtgagcccagatcgcatcattgcacgccagcctgggcaacaagagcaaaactccgtctcaaaaaaaaaaaaaaaagaactttgtcttcaatagactgaatgctatcctgcaacccagtagcaccagggctgaggtgcgggagaagcatgagctgctgccctcagggcttaggcacaagcaaccgtgggctaccatacccaggtaggaggcaygatcaagatgcaggctacaaccagggctgagcaaggcaccattctagagccctacccccaacagagtatgcactatcctggaagccagcagtgctgggacagaggtgcaagagaagagctggctgttgaccccagggcttaggaacaagcaaccatgggctaccatacctggggctgaggcacaagtggcacacatgcttaacatctgctggcctaggctgccatcactaaaaacattgcctctccaccaacaccacccagtggcattctgccagtggcctagaggttgccccattcctgcctaccatggccaacacctgtacacagaactgcagggccctgaggaccagccagcctagccc

SEQ ID NO: 354558 - DNA, 583 bp, Homo sapiens
gaagtcgcagtgagcccagatcgcatcattgcacgccagcctgggcaacaagagcaaaactccgtctcaaaaaaaaaaaaaaaagaactttgtcttcaatagactgaatgctatcctgcaacccagtagcaccagggctgaggtgcgggagaagcatgagctgctgccctcagggcttaggcacaagcaaccgtgggctaccatacccaggtaggaggcatgatcaagatgcaggctacaaccagggctgagcaaggcaccattctagagccctacccccaacagagtatgcactatcctggaagccagcagtgctgggacagaggtgcaagagaagagctggctgttgaccccagggcttaggaacaagcaaccrtgggctaccatacctggggctgaggcacaagtggcacacatgcttaacatctgctggcctaggctgccatcactaaaaacattgcctctccaccaacaccacccagtggcattctgccagtggcctagaggttgccccattcctgcctaccatggccaacacctgtacacagaactgcagggccctgaggaccagccagcctagccc

SEQ ID NO: 354559 - DNA, 633 bp, Homo sapiens
aaagataatacattatgaccaagtgggatttacaccagggaaacaagaatggtttggcatgcaaaagtaaataaatgttatacatcacatcaacagaatgaacgrtaaacaacatatgatcatctcaatagatgcagaaaaagcatttgataaaatccaatatccttcctgattaaaaactctcaacaaactacgcatagaaggaacatacctcaacataatagaggccatatagaaaaatatcaacttcagccaatatcatactgaaggtttttcctccaagaaatggaacatgacaaggctgtctacctgcaccactcaaattcaacatagtactggaagtcctagccagaacaataagtcaagacaaagaaataaaaggcatacacatttggcgggggggaaaggaagatgtacctctttgcagatgacaggatcttatatttagaaaaaccaaagactcaggtatgaaaactaaattcagtaaagttgcaggatacaaaatcaacctacaaaaatcagtagaatttttatacaccaacaatgaaatagctgaaaaagaaatcaagaggacaatcctatttccgatagctaccaaaaaaataaaatacctagaaaaataatgtgaccaac

SEQ ID NO: 354560 - DNA, 633 bp, Homo sapiens
aaagataatacattatgaccaagtgggatttacaccagggaaacaagaatggtttggcatgcaaaagtaaataaatgttatacatcacatcaacagaatgaacgataaacaacatatgatcatctcaatagatgcagaaaaagcatttgataaaatccaatatccttcctgattaaaaactctcaacaaactacgcatagaaggaacatacctcaacataatagaggccatatagaaaaatatcaacttcagccaatatcatactgaaggtttttcctccaagaaatggaacatgacaaggctgtctacctgcaccactcaaattcaacatagtactggaagtcctagccagaacaataagtcaagacaaagaaataaaaggcatmcacatttggcgggggggaaaggaagatgtacctctttgcagatgacaggatcttatatttagaaaaaccaaagactcaggtatgaaaactaaattcagtaaagttgcaggatacaaaatcaacctacaaaaatcagtagaatttttatacaccaacaatgaaatagctgaaaaagaaatcaagaggacaatcctatttccgatagctaccaaaaaaataaaatacctagaaaaataatgtgaccaac

SEQ ID NO: 354561 - DNA, 633 bp, Homo sapiens
aaagataatacattatgaccaagtgggatttacaccagggaaacaagaatggtttggcatgcaaaagtaaataaatgttatacatcacatcaacagaatgaacgataaacaacatatgatcatctcaatagatgcagaaaaagcatttgataaaatccaatatccttcctgattaaaaactctcaacaaactacgcatagaaggaacatacctcaacataatagaggccatatagaaaaatatcaacttcagccaatatcatactgaaggtttttcctccaagaaatggaacatgacaaggctgtctacctgcaccactcaaattcaacatagtactggaagtcctagccagaacaataagtcaagacaaagaaataaaaggcatacacatttggsgggggggaaaggaagatgtacctctttgcagatgacaggatcttatatttagaaaaaccaaagactcaggtatgaaaactaaattcagtaaagttgcaggatacaaaatcaacctacaaaaatcagtagaatttttatacaccaacaatgaaatagctgaaaaagaaatcaagaggacaatcctatttccgatagctaccaaaaaaataaaatacctagaaaaataatgtgaccaac

SEQ ID NO: 354562 - DNA, 582 bp, Homo sapiens
cgtctgcttcgtaaactgttttctttttttccagtgtccttagaaagacacgctaggttgtttagaagagatgtagtagatgtggttttcctctgtagttttttaatttgttgttccttatagtacacttctcccttaggtcagagtgctttttgtggttttgagtaaatggatgggctctgttaatagccagactttcttgcaggatgaataggtgtgaactgtgtagacagtttgggatcatcataactgccaaagtagtaaggattttattttggaggtggattttacttactatattcagtaaaggctactgcttaatattcagtgcagcaggtagtgatagcaatgayaatggttgtcactttttgtgtgcttaatatgtatcagagcttttctgagtgttttatgtatttgaagtcattgaatctttacagcaatctgatatagaaactgaggtacagaaagttaagtttgacttaaaactaagtctgactgcagtactcctgatcttaagtgaacatactccctttttaggaagcagcatgtagaagatgagtcatttttcaagcaggttattgt

SEQ ID NO: 354563 - DNA, 514 bp, Homo sapiens
tgtgacttttttattgctttgataaatgayggccttttaagggtggtgactttcttgcaatctgcttttgtaagctcatacctacacttttttaaaaaaaaacatttttatgtttatttgtcctgttgttatcatagtaagttaatagcctttgctttaccacttcatttttgttgtctatgatcataaaaagcctgacggatcaatatgaggcttttaatgtactttttctgcctttttcattaaaggtttgtagccagagtattaaaatgcagttgagacataatctcttttgagcttggttcccataaagtgcttcccagggagagagagggtcgctggcagtaagggtctacacatgctagctttcataatacaaagaaggggagcttccgctccagcagttttatgaaatttttttctcaaggattagagaatgttgagcagatgtttactgcatcctccactgtgcattctaaagcattgtcctcatttgaatgtttagttctcattg

SEQ ID NO: 354564 - DNA, 522 bp, Homo sapiens
tcatcaggcttgctgtcccagcacaaagagaggcagagagagagacagacagaaagagaaaaagagagaggggaagaggaggggaaagagtaagggatgaggaggccamgacaataggggaggagagaagtacagtttggtaagtagggaagggattgataactagaaagaaggaagctgataggttattgactaaaaccagtagctccctactcaaaagctcatattgtgcagcatgagtgtccacctttagtgaactggaatacagttcatctttcaaagtaaaaaattcagcacagactgtaaggtattctaattcagtttaaaaatatgccattttaatctcaagcattgtattttgtttattgccatggacaaacagcaggttttggtcaaagatgggctacctcaggaagtagagaatttcctctcattggagagtactgattagaaagaacagtcatccagcaggttccatagcatgaggtgagaaaccaaattagacccccttgacatttcctc

SEQ ID NO: 354565 - DNA, 563 bp, Homo sapiens
acacaaaaagtttaccgaaaacatttatcccatttacacgtactcagttctttcatttttgtaacagtttatgtagattacttctgtaaactgagacattagacactaycgtttaaagttagtcatttccttgttaaccatgtttttgtttttgtttttttttgagacggagtctcactctgttgcccaggctggagtgcagtggtgcgatcttggctcactgcaagctccacctcccaggttcatgccattctcctgcctcagcttccagagtagctgggactacaggcgcccgccacccaccacgcccagctatttttttgtatttttagtagagacgcaggttcaccgtgttagccaggatggtctcgatctcctgaccttatgatccgcccacctcggcctcccaaagtgctgagattacaggcatgagccactgtgcccagctgttaaccatgtttttaatagccagtgaacattaggtactcccctcaacctaagtaagagtctcaatgttaaatacataggtaattttgccaataactcggacgatttagctaata

SEQ ID NO: 354566 - DNA, 563 bp, Homo sapiens
acacaaaaagtttaccgaaaacatttatcccatttacacgtactcagttctttcatttttgtaacagtttatgtagattacttctgtaaactgagacattagacactaccgtttaaagttagtcatttccttgttaaccatgtttttgtttttgtttttttttgagacggagtctcactctgttgcccaggctggagtgcagtggtgcgatcttggctcactgcaagctccacctcccaggttcatgccattctcctgcctcagcttccagagtagctgggactacaggygcccgccacccaccacgcccagctatttttttgtatttttagtagagacgcaggttcaccgtgttagccaggatggtctcgatctcctgaccttatgatccgcccacctcggcctcccaaagtgctgagattacaggcatgagccactgtgcccagctgttaaccatgtttttaatagccagtgaacattaggtactcccctcaacctaagtaagagtctcaatgttaaatacataggtaattttgccaataactcggacgatttagctaata

SEQ ID NO: 354567 - DNA, 587 bp, Homo sapiens
acataggtaattttgccaataactcggacgatttagctaatattaaattactctcgtttgtcaaaaaaaggcatgcaaaccaagatcattttgttttggctgggtttttagttttataacyttctatgccaaaccctgatgcctcaaaatatctagcagagataaatataaattccagacaaaaatgtatgctggcaattctgaaggcatttctatttttattttacaaataattttaaaaccagcttgtttagtaaagctaaacttgtcacatgaacttgaaaattgcttagaattatttacttaatttatgagcactcctttacttgtaagccaatttggtagacacaacatataacaacaagtgtacataacaaataaacttatctagacatgtatacactcacaggcacatgaagatccaatggcttttatgctgaaaccatagtcatgagctagcaatacatgctcacctgttttactttgtttgccccaatagataatccaatgaaggctgtgaaccaaaatttcaggtaaagctgttttcatggcagtttgatttttaaaggcaaaccctccccagattc

SEQ ID NO: 354568 - DNA, 587 bp, Homo sapiens
acataggtaattttgccaataactcggacgatttagctaatattaaattactctcgtttgtcaaaaaaaggcatgcaaaccaagatcattttgttttggctgggtttttagttttataactttctatgccaaaccctgatgcctcaaaatatctagcagagataaatataaattccagacaaaaatgtatgctggcaattctgaaggcatttctatttttattttacaaataattttaaaaccagcttgtttagtaaagctaaacttgtcacatgaacttgaaaattgcttagaattatttacttaatttakgagcactcctttacttgtaagccaatttggtagacacaacatataacaacaagtgtacataacaaataaacttatctagacatgtatacactcacaggcacatgaagatccaatggcttttatgctgaaaccatagtcatgagctagcaatacatgctcacctgttttactttgtttgccccaatagataatccaatgaaggctgtgaaccaaaatttcaggtaaagctgttttcatggcagtttgatttttaaaggcaaaccctccccagattc

SEQ ID NO: 354569 - DNA, 573 bp, Homo sapiens
caaggatgcagaaacagatactaagggcaccaaaactaaactttgcctcatttatggaatgtagtgaacactaaatatattgcccatgataaggagtttagacttgcttattgaagtagcccacacattaaaataataataagaagaaatgggttgaagattatattgttggcagaagttttatgttggactaatcttagtttgcactttcacattgagcatgagtggaaattgggaagctcatcttatcttccagcaccatcattctaagggaacaagcagaaggagcatgtcttcaggtctcagaggcacttgcaaatccccacagatatctctgcttatgttgaattagggtacccaggaacttcttatcacttagagaatgggcctgattgccaaaataacattcagrctatctttaaaatatttgattatctgtagagtaattttctcctcatttaaaaagcttgagtgtttactatctttaatgtcaccaagttgttgtattgtcattttgttttaaataattcaatcattaaggaagaactttctattaattttttattataaaaa

SEQ ID NO: 354570 - DNA, 602 bp, Homo sapiens
gtatcaaaacatcacattgtaccccagaaatatgtataattgtacgtgttcaataaaaatacaaatgaaagaaaaacatgcagtttctaactcagtaggtctgggctgggcctgagaatctattaataaatttctaagaagctccaagatgatgcaggtgctacttgtcctcagaccactttttgagtaaaaagtggccaggcgatcttctcttcttttgttttattttatattatttgttcattttttttgagataagatcttgctctgtctctcaggctggagtacagtagtgagatcatagctctctgcagccttgaactcctgggctcaagcgatcctcctgcctccatctcccaagtggctgggactacaggtgcacaccaccacaccctagctaatttttaaaatttttgtagagacaaggtcttactatattgctcaggctggtcttgaactgctgagctcaagcagycctcccatcttggcctcccaaagtgctgggattacaggcgtgagccacggtggctgcccaatccccttttctttagtgcagtctttgcacagaaatctaaggctgtcgaataagctacattcaaaaa

SEQ ID NO: 354571 - DNA, 410 bp, Homo sapiens
cataaattctcagacacatacaacataccaaaattgaattatgaagaaatagaagatctgtaacagatcaataatgagaaagatgaatcagtaatatagtctcccatccaagaaaatcccaggacctgatgccttcactgctgaattctaccaawtatttaaggaagaataacaattcttctcatactatttcaaaaaattgaagaaaagaaaatacttccaaattcattattatataaggccagcattatgctgatactaaaaccagacaaggacacaaccagaaagagaaaactacaggccaatatatctgatggacatagatgcaaaaattttcaacaaaataatagcagactcatttcagcagcacagtaaaaggccatgatcaactgagatttctcgcaggaatg

SEQ ID NO: 354572 - DNA, 569 bp, Homo sapiens
acaattgtctgtggatgacaaaaagttttaggacaaccatggtcaaagacacaattgacaaagaaatttgttacctctgtggcacacaataatttaacataacaattataattattactaataacacacactaagtcatatcaaaattttaggattttcccataattttggaacacataccaataacatatttatgcaaatgcagyccaaagaaaaccaaataccattttatatttgacaatgctttctatacgtatagtttttataccgaataagccaagtatgttatttttggactttagggagcctattaatatcttaaagggttaattaggtcaacaaaagacatattttataatttggtttttgaaaatttgtgaaatatcaaaggttatgacaggtctttgtaaaataactatttcatttaaccaaagtttaacaaaggatttccccaagaaaggagacaaccttcattctttgagaaaggagacttaattttccaaacaagcactaataaaaacagcatgaagccaaattaatttgttttccaaaattttgtaaacaatata

SEQ ID NO: 354573 - DNA, 628 bp, Homo sapiens
gttttccaaaattttgtaaacaatatataaaattttcatcttggtcataaaatataacttccataatcctttataaccttccttaaggagtcagttaatgcttcaggaaaaccttgttaatctgacacagaagcccacattctggtcttgcatcagtgtgcctttgacattaatgatcaatttatagagaaactgaacttattttattctcaaaatcagcccttacaatctcacatgctcacctcttttgtgatagttcctgggcctygaggagctgaagagctttaacttttggccctgtgattcaggaatgcagtttacattgattggcatcttctaccaggcctgaagatggggctttaattgctgtcagtgtttaaaatttaccaggacttggtgtgcttttcagactgagaagccaaagccctgtaactcaatgtcacagggactttaaaaacacatacagggctgggtgcagtggctcatgcctgtaatcccagcagtttgggaggctgaggtgggtggatcacctgaggtcaggagttcaagaccagcctggccaaaatggtgaaaccctgtctctactaaaagtacaaaaaattaggtaggcatggtggtgggcacctgt

SEQ ID NO: 354574 - DNA, 337 bp, Homo sapiens
ctagtggcattctgtttaaaatctgttttgagtttatggaaatagatgctatgaggctgggttatttttaaatttatgtagtgttttcaatgtacaattttgcacttgatccttaggcatgcacgtgttgggtattgtcactttatctgtgaagccgacttcaarcaatagggtaatttttctcaaagtcacaagagaagtaacccaagaattgaagccaggacttctggcaggcaaatcctgtgcctgagagctgctgggagtacctggggcaggtggcacaaaactacttaagaactgggcctctaaagaacaattgtttttgtttatgaaaaat

SEQ ID NO: 354575 - DNA, 532 bp, Homo sapiens
ttagcaaactaacacgggaacagaaaatcaaatcctgcatgttctcacttataagtgggagctgaacaatgagaacatatgggcacataagagggaacaacaaacaccaggtcctgttggagggtagaggataggaggagggagagggtcagggaaartaaggaatgaaaataactaatgagtactaggcttaatacctgggtgatgaagtaatctgtacaacaaacccccatgacacaagtttacctatgtaacaaacctgcacatgtacccctgaacttaaagtaaaagttaaaaaaaaaggataaatacttgaggtgatgaatactccatttatgtttatgtgattattatgcattacatgtctgtgtcataaaatctcatgtaacacataaatatatatacctactatgtatccataaaaatttaaaaattaaaataaaaaacaactgtcttgttgcaaaaaaatgcagattctggaatttatccatttcttctatgttatccaatttgttggcacacaattgttcat

SEQ ID NO: 354576 - DNA, 532 bp, Homo sapiens
ttagcaaactaacacgggaacagaaaatcaaatcctgcatgttctcacttataagtgggagctgaacaatgagaacatatgggcacataagagggaacaacaaacaccaggtcctgttggagggtagaggataggaggagggagagggtcagggaaaataaggaatgaaaataactaatgagtactaggcttaatacctgggtgatgaagtaatctgtacaacaaacccccatgacacaagtttacctatgtaacaaacctgcacatgtacccctgaacttaaagtaaaagttaaaaaaaaaggataaatacttgagktgatgaatactccatttatgtttatgtgattattatgcattacatgtctgtgtcataaaatctcatgtaacacataaatatatatacctactatgtatccataaaaatttaaaaattaaaataaaaaacaactgtcttgttgcaaaaaaatgcagattctggaatttatccatttcttctatgttatccaatttgttggcacacaattgttcat

SEQ ID NO: 354577 - DNA, 566 bp, Homo sapiens
tttttattaaatgtgtaccatgtgctgacactattctagaccccaaatataagaaaataagagacaaaccaccctatcctagagtatttttctgctgattgaagaaggtagaaggggaaatatcccctatgatcattgcatcattgaggcttgaaagggtgcatctgacaatgaagcttttctgaagtaagtgacatctgagctatatttggaaggagaagttgaacttagctgggaatcaggtattccagacaaagaacaacagagaatttaaagtaaacacattggcttttatgggagaggagtgtggaaaratatgtctgggcagttagtggccagctgcaaatctggagagatcttcactcccatgcttggtggctgacgctgctgtcggttgaggtctctccaaataccctaggcctcttcgtaccatgctggtttcagaatagttggatttcttatatggaagattaggcctccaaaataagtgaaccagtgaataagacaaaagctgcatcactttttatgacttagcttcagaaatcaggcattgactttcatgtcat

SEQ ID NO: 354578 - DNA, 599 bp, Homo sapiens
taaataaatatatagtaaagcccaaggcttctctatttattaattttaacttcccaagtgattctaaagctcaaccaggtttggaaaccaccaaaatagataagcttatatgttgtaaagctaaatttgcaggttctgctgtgttttcaaaaatatccttaagtagagcatttttatttaaaccatatcaaggccaggcatggtgcctcactgtaatcccagcactttgggaggccgaggcgggcagatcacctgaggtcaggagttctagaccagcctggccaacatgatgaaactccgtctctactaaaaatacaaaaattaggtrggcatggtggcaggtgcctgtaattccagctactcaggaggctgaggcaggagaattgcttgaacctgggaggcggaggttgcagtgagctgagatcactccactgtactccagcctgggcaacagagtgagactctgtctaaaaaaaaaaaaatcataattctgtgaggttggtattcatattccagctttataggttaaagaagagttattgctcaatttctcactcataatagtaacaaacgcagagctgagtaattcttccaacagt

SEQ ID NO: 354579 - DNA, 599 bp, Homo sapiens
taaataaatatatagtaaagcccaaggcttctctatttattaattttaacttcccaagtgattctaaagctcaaccaggtttggaaaccaccaaaatagataagcttatatgttgtaaagctaaatttgcaggttctgctgtgttttcaaaaatatccttaagtagagcatttttatttaaaccatatcaaggccaggcatggtgcctcactgtaatcccagcactttgggaggccgaggcgggcagatcacctgaggtcaggagttctagaccagcctggccaacatgatgaaactccgtctctactaaaaatacaaaaattaggtaggcatggtggcaggtgcctgtaattccagctactcaggaggctgaggcaggagaattgcttgaacctgggaggcggaggttgcagtgagctgagatcackccactgtactccagcctgggcaacagagtgagactctgtctaaaaaaaaaaaaatcataattctgtgaggttggtattcatattccagctttataggttaaagaagagttattgctcaatttctcactcataatagtaacaaacgcagagctgagtaattcttccaacagt

SEQ ID NO: 354580 - DNA, 607 bp, Homo sapiens
tttatccatctctcatgtgtcagtttatccctatgttcttctatttgaaagacttaaaatcaagggtgtattggcatatatatctgcttcgtaagctatattaccaagggaaaaaaggtcaagcatcagctataaagraaaaaaataacttatttattacacatcactcaattttcacaaaaattgtgaaagaactttaaatgagatggtaaatctcaccaaagatttttacacataggaagatctaaaaaaaaatgattactcagaattcacttttcttgaaatctgtgaagtaaacagcatgatctctgttggttccaatccagtcctctggtttcagaaggaggtagaaggagctggcatgtgacacccatatttgtcctttggttctcagataaagatgtgcagtatgaggaagcatcctggtttctcttgcactggccaatggaacattgtggtgaggctgaggggaagcaaaggtcatctgtctctggcacagttatgggctgcagtggtcatcagactgaccctcatttacctaggtatgtaactttcctatcttggggaatcctaatggtggagggatgatttatgcaaagcaaaggaa

SEQ ID NO: 354581 - DNA, 567 bp, Homo sapiens
gaggcccagggtgtctcttgaggaatgtctgttttagtgttcttacagtcagtgcattgctgtaccggggccatgaactggtatcctccrccctatccccagagcccaggaaatagagaaatctcctggctgcagtgctggccacagagggcactactcctctaggtctccctccacccctgctgtgacaccagagattttataaaagacccaggaatctcagaaggcaagggactgaaacttgaaaatctttagaaaccacagtttactgttttccaacctgaggaggtccctagggtcgctggggacctaaaccctggcttcccttggtgttcataggttcctcagagtcactggttcacaactttggctgctttagagatagtcatttaggccgggtacagtggctcacacctataatcccacttttggaggccgatgtgggaggatcacctgagcccaggagttcaagaccagcctaggcaacatagtgagacccatcccacgccccttgcatctctgtacaaaagtttaaaaactagctgggcatggtggtgcacacctgta

SEQ ID NO: 354582 - DNA, 567 bp, Homo sapiens
gaggcccagggtgtctcttgaggaatgtctgttttagtgttcttacagtcagtgcattgctgtaccggggccatgaactggtatcctccaccctatccccagagcccaggaaatagagaaatctcctggctgcagtgctggccacagagggcactactcctctaggtctccctccacccctgctgtgacaccagagattttataaaagacccaggaatctcaraaggcaagggactgaaacttgaaaatctttagaaaccacagtttactgttttccaacctgaggaggtccctagggtcgctggggacctaaaccctggcttcccttggtgttcataggttcctcagagtcactggttcacaactttggctgctttagagatagtcatttaggccgggtacagtggctcacacctataatcccacttttggaggccgatgtgggaggatcacctgagcccaggagttcaagaccagcctaggcaacatagtgagacccatcccacgccccttgcatctctgtacaaaagtttaaaaactagctgggcatggtggtgcacacctgta

SEQ ID NO: 354583 - DNA, 592 bp, Homo sapiens
taagacttaatatatttattaagtgtaaatactaaatgtaaatataaagtaaaagttatcattttcctcttacattttaaaattcaacacacccatcagtaacataaaatagaaagctgtattacttgtcaagcttctctgtgttttgacgccagtgagtcatatctttcctccacctcaaattttcttgacttccaaaggcacttccagatgggcttctctctgtcaaataaatttcaaaaccaattttcaaatgttatttcagttggaccacatatatgtatacttgcaatcatgtaagaaatatacaacaataatttgtacaagccattttatcctcagtacaagtkgaaaaacctgacaatggtgctttttattaaaaattttcacaataatttcagaagaaatgtacttgctatatgcagtatcttttctttaaaacaatacccacttaaataagcaaatgttctaacattggtttgcttaaaatcttaaccatggcttataaggccttacatgatatgactttatttcctaccattcttcctcttgcttaccgctttctgttatccttgcgaatctatcagtatat

SEQ ID NO: 354584 - DNA, 606 bp, Homo sapiens
ctttcaggaatttccctaagtcaaaactaatttcatattaatgccaaatattggccttttctcacttattttcttgtgagggtacagtggagatttctacaggttgagatgtgacattggaaaagattgactatagaagcacatgtgagaacataggcattaagccacactcctacatgagtaccactctcctaaagcttcttgcagatcatttttaataagcaatgctatttatagtaacatgtaatgggttattttatagtaacttaagatgttcttagttttaatttctgrtatgataaacatccatatatagcccacataaaagattcctggggttctcaataatttttaagagtgtaaaagggacctgagacaaagtttgagaactggtttaagacttaaaatttaataaacacctgccttttgccgtgtaaaaaaccccaaatcttttcctgaaatctctcccattatcccttaagtccttgtcttgtttattacaatatctgcagcatcagtcagacaaacgaatacaaaagaccagtaagtggtgactgtaatacacttctatagctaaatctataagccaaaatataaggcagagta

SEQ ID NO: 354585 - DNA, 602 bp, Homo sapiens
gtcaaatcctgctgactgattaaactgttttccctattttcactagggccaaaggtgaaattggtcatctatcatgagaaagtctattctaacagtatggtcaacaagataataaatgggttacactcgctagaatggtctttttaaaaaacgttgtgcctaaaattgtgtatcaatgtacgctttgactaagagatcacatttctaggaaggaaaattggcaaaaatatgaaaggctaagtgcagagttattcattgcagcattatatataatagcaaaaagttgggctcaaccaaaatgttcatcaatagggtactatttgagtagattatattacatttatataaggtaaatgaaagtgtgcatattatgccwctgttcagctaagaaagagggggagcggcatcttgtcataccagaaatcaaggaaggtgtcaaagataacaggttgtgccaaaaaattggggcttcaattaaaataataatttcaatggattaacacccatacgatatgttcaaatccatgggttcatactggtattttaaaaacagtcatttttcacctttggaggatactagggaacttatttatgtgcattag

SEQ ID NO: 354586 - DNA, 581 bp, Homo sapiens
tgatccagcaatcccagtactgggtatatatccaaaggagatagaatcattatgtccaagacatacctgcattctcatgtttattgcagtaccatttacagtagccaagatatagaatcaacctaagtgttcatcagtgaatgaatgcataaagaaaatgtggtgcatgtacacaatggaatactattcaaccataacaaataacaaaaacctgtcttttgcaacaacacggatgaacctagaggacattattttaagtgaaataagccagacacagatggacaaatactgcataacctcacttatatgtggaatcttaaaaacgctgatctcmtaaaagtagagagcagttaccagttgctgaggagggtactggggaggagagatagggtgaggttggtcaatgagtatgtcacagttagccaggagaaaaacgttctggtactttatagtgcaccatggtgaatacagttagcaataacgtgttgtatatttcaaaatagctagaaaagaggattttgaatattcttatcacaaaaaaaatggttaagattacggatatgctaattaccctgatttta

SEQ ID NO: 354587 - DNA, 501 bp, Homo sapiens
aagcagaaaacctaagaactttttaggaaatgaagatttaaatcctaaaacctaattctgcctatgtttagaacacctgaaataataaaatatgttccatgtattttgcagttaatctcggactcgttttacagcatgttctttttacattttattaatgatatttttaaaatgttgatacacttgtaaaatgcactttttaaagtgctttggatactgtcaaygcttcagaattttgcttataaatattacagggtgaagtgtgtttcaaatacagcaaattttgtatcagttgcaatattctgtttatttatttttatttttatttatttatttatttgagacggagtcttgctctgtcacgcaggctggagtgcaaaggtgcaatctcggctcacttcaatctccgcctcctgggttcaagcgattctcctgcctcagcctcctgagtagctgggattacaggcatgcaccaccacgcccagctaatttttgtatttt

SEQ ID NO: 354588 - DNA, 405 bp, Homo sapiens
gacatacctgagactgggcaacttacaaaaaaaaagaagtttattggacagttccacatggctggggaggcttcacaatcatggcagaaggcaaggaggagcaagtcacatcttacgtggatggtagcaggcaaagagagaaagcttgtgaagggaaactcccatttttaaaaccatcaaatatcatgagactcattaagacccaccaccataattcaattgcctcccaccaggttcctcccatgacaggtgggaattgtgggagttacaattcaagatgagatttgggtggsgacacagccaaacaatgccattccaactctggcccctcccaaatctcatgtcctcacatttcaaaaccaatcatgtctttccaacagtccccaagagtcttaactcatttca

SEQ ID NO: 354589 - DNA, 573 bp, Homo sapiens
ctttgtcctgcctctgtattcctgctttcatgccactgtaagcttgcttcaagttatcccaccccgttttgtgaagtgcatataaaagtcaagtgctgtctttgttctgggcctggtctttggaggtgagtctgctgggcccgagtgcactcaataaaagattcccctgttttaacccaaggtctctctcatcctcataaatcccacaacacagccacaataaatagagcaccaggaagagcgctgaggcctccatctcaggccttagctcctagaagacatttctagacacatcctgggctagaaggagacctactgccttgaagggaaggacctgtttttggcaggattcttcacctgctgactaaagagcccttggaccctgaataatcaatagtggtagctatgcwgtacattctgcaggccttgtgagagattcagagctgtgctggcttcaggtgtgacttagcacattcccagctgtggtagccatggagagagacccttctgtttaaggaaaagagagggacaagtaaaggggactttgtcttgcaacttgggtaccagcttggc

SEQ ID NO: 354590 - DNA, 573 bp, Homo sapiens
ctttgtcctgcctctgtattcctgctttcatgccactgtaagcttgcttcaagttatcccaccccgttttgtgaagtgcatataaaagtcaagtgctgtctttgttctgggcctggtctttggaggtgagtctgctgggcccgagtgcactcaataaaagattcccctgttttaacccaaggtctctctcatcctcataaatcccacaacacagccacaataaatagagcaccaggaagagcgctgaggcctccatctcaggccttagctcctagaagacatttctagacacatcctgggctagaaggagacctactgccttgaagggaaggacctgtttttggcaggattcttcacctgctgactaaagagcccttggaccctgaataatcaatagtggtagctatgctgtacattytgcaggccttgtgagagattcagagctgtgctggcttcaggtgtgacttagcacattcccagctgtggtagccatggagagagacccttctgtttaaggaaaagagagggacaagtaaaggggactttgtcttgcaacttgggtaccagcttggc

SEQ ID NO: 354591 - DNA, 573 bp, Homo sapiens
ctttgtcctgcctctgtattcctgctttcatgccactgtaagcttgcttcaagttatcccaccccgttttgtgaagtgcatataaaagtcaagtgctgtctttgttctgggcctggtctttggaggtgagtctgctgggcccgagtgcactcaataaaagattcccctgttttaacccaaggtctctctcatcctcataaatcccacaacacagccacaataaatagagcaccaggaagagcgctgaggcctccatctcaggccttagctcctagaagacatttctagacacatcctgggctagaaggagacctactgccttgaagggaaggacctgtttttggcaggattcttcacctgctgactaaagagcccttggaccctgaataatcaatagtggtagctatgctgtacattctgcaggccttgtgagagattcagagctgtgctggcttcaggtgtgacttagcacattcccagctgtggtagccatggagagagaccyttctgtttaaggaaaagagagggacaagtaaaggggactttgtcttgcaacttgggtaccagcttggc

SEQ ID NO: 354592 - DNA, 552 bp, Homo sapiens
ttaattaaagaattggatttgcaagtttgaaaactggaaaagcaagagatgggatgccataatagtaaacagcccttgtgttggatgtaacccaatcccagatttgagtgtgtgttgattatttttttgtcttccacttttctattatgtgtaaatcacttttatttctgcagacattttcctctcagataggatgacattttgttttgtattattttgtctttcctcatgaatgcactgataatattttaaatgctctattttaagatctcttgaatctgttttttttttttttaatttgggggttctgtaaggtctttatttcccataagtaaatattgccatgggaggggggtggaggtggsaaggaaggggtgaagtgctagtatgcaagtgggcagcaattatttttgtgttaatcagcagtacaatttgatcgttggcatggttaaaaaatggaatataagattagctgttttgtattttgatgaccaattacgctgtattttaacacgatgtatgtctgtttttgtggtgctctagtggtaaata

SEQ ID NO: 354593 - DNA, 604 bp, Homo sapiens
tctctcctatagatgccaacccaactgaaagaacacacatgtgttccycaggtgacatcaccgaggtctggccagccctggagttggaaaccctctcctcaggcccaaatctcaattctgaaaatcccgaatctcaggctgttgggagcaaacaagctaagaagttatgtaattcaatactgctctaaaagcgatgtgaagtcatgcagtttggcttgtcctcaagcatgggcgtaacactaatttcttcatttgaaccaaaattaaactctaccgaaaactgggagaatgttaaatcaagtggcagttgttcatttagtaaagtatcaaatttcacatcaccacgtgtgcacatcttccccttgcccataacctggccctccaagaaatcactgactccattcaaatttctgaaaggtgaaatttaggcagaaactggtgggagaggcaccaaggagccccaaggaagtccagcaacccccttaatattacccctttgttacaagctctgagagttatccatgaggaattattcttgtaggattttttccacaagcatatacatacattcatatatatatatatatatatatatatatatata

SEQ ID NO: 354594 - DNA, 582 bp, Homo sapiens
acaatgctctgcctactacacatttgcacccatgctcctaaatgaagacaaggaaaaggttgcagtcctattggaccatgagtctcatgttaaatttatgagcacaaacctcaagtggaagtggaatgccatctgtcaatcacactatccctatcccattttctctcttgcactcttccagatagcaattttgtgtcttctccttcctcaaatctccaatacctcctcctcattcctcactctcagttgaagayctcacttattattttatggagaaagcaagaatgacaagaagacttcacaagctcccaccctaacatacactcaggcattcctccttagaactctacctctcttacctactcaatgccatgcctctagaaattctctccttctcttcctgcattatatcttcctctctaatgcactgcatcttcctttcagcataaagcatactttttaaaaattactataagttctgggatacatgtgcagaacgtgcaggtttgttacataggtatacacatgccatggtggtttgctgcacccatcaacctgtcatctacattaggtatttcccct

SEQ ID NO: 354595 - DNA, 601 bp, Homo sapiens
cctccaggcctgggctgatgagaacaatggagctgtattttggatactttattcatgaataatcaagtcaacattctggtataatatacatctgtgaaatctcttataaaaacaataaaatacacatttacttgttaaaattattcttactgttctatatgctactaatgaactaaktatccctaaaattcttttgtctttcagaattgttttctttagaatacatacatacatttatgtatgtatacatatagacatatgtgtgtgtgtgtgtgtgtgtgtgtgtgtattttactgttgtttatcaaaggtctccccaaaaggcctgtgtttatgattacagaaagcagaatgaaacggtccagcaaattctttagtgtgagctacggagatgcaaaataacaaagaactgacttcctgggtagaaactgactttcactgcttgagggtttctgtaaactgaagagaaaggaccaaagccttggctgttaaccatgaatattagctctagggccatttaaatctaagcagttcaggtcacccccctcaccccccacaaaattcctaaatatcctcatatgaatgaggcagatttcaatcc

SEQ ID NO: 354596 - DNA, 601 bp, Homo sapiens
cctccaggcctgggctgatgagaacaatggagctgtattttggatactttattcatgaataatcaagtcaacattctggtataatatacatctgtgaaatctcttataaaaacaataaaatacacatttacttgttaaaattattcttactgttctatatgctactaatgaactaattatccctaaaattcttttgtctttcagaattgttttctttagaatacatacatacatttatgtatgtatacatatagacatatgtgtgtgtgtgtgtgtgtgtgtgtgtgtattttactgttgtttatcaaaggtctccccaaaaggcctgtgtttatgattacagaaagcagaatgaaacggtccmgcaaattctttagtgtgagctacggagatgcaaaataacaaagaactgacttcctgggtagaaactgactttcactgcttgagggtttctgtaaactgaagagaaaggaccaaagccttggctgttaaccatgaatattagctctagggccatttaaatctaagcagttcaggtcacccccctcaccccccacaaaattcctaaatatcctcatatgaatgaggcagatttcaatcc

SEQ ID NO: 354597 - DNA, 601 bp, Homo sapiens
cctccaggcctgggctgatgagaacaatggagctgtattttggatactttattcatgaataatcaagtcaacattctggtataatatacatctgtgaaatctcttataaaaacaataaaatacacatttacttgttaaaattattcttactgttctatatgctactaatgaactaattatccctaaaattcttttgtctttcagaattgttttctttagaatacatacatacatttatgtatgtatacatatagacatatgtgtgtgtgtgtgtgtgtgtgtgtgtgtattttactgttgtttatcaaaggtctccccaaaaggcctgtgtttatgattacagaaagcagaatgaaacggtccagcaaattctttagtgtgagctacggagatgcaaaataacaaagaactgacttcctgggtagaaactgacwttcactgcttgagggtttctgtaaactgaagagaaaggaccaaagccttggctgttaaccatgaatattagctctagggccatttaaatctaagcagttcaggtcacccccctcaccccccacaaaattcctaaatatcctcatatgaatgaggcagatttcaatcc

SEQ ID NO: 354598 - DNA, 442 bp, Homo sapiens
ttccaactttttgaggtagtgtagtgatattatcatccccrctttagaaatgtggctggtcttgttggcagtgagaatttagacgcttcctttagaagtcctggctagagagtggtccagtagatacaatgtgcagcagagtgacccaagagcaccctgcacttacactcgacaacattcactgtgaaggtaaaactatgaaagtgcaggagagatgcatggtgatatgagatgggcagagccaacaggtgagggtttttctgtggaggctgaaatctgaaggccaaacaggagtaatttgatgcaatggggaactgagaagcacatttcactcagaaggaagagggacagacaactgtggtgggaggaagatgagtataagggactgagagaaagccaggacaagtggagtggacaagtaggtaggtgccagaacatgggg

SEQ ID NO: 354599 - DNA, 564 bp, Homo sapiens
atgaaagtgaggaagtatagcattttgggaaaacagataaacttcattttgagaaagtatagtattttgagttgcctggatttttgacagtttttcctcctgaactcttagttacattcctctaatggactgtcagaacaaggcagaaaaggtctgggtgrcatctaattttctctatcacctgaaattcctttagagtgggtgtgtgcactcccattattagccaaatgaagaagctagagacagtctcctttctgccacataattttagaaagaaagcattcctaaaagaaactattagttgcctaaattggaaatgggagtgggaacaccataaacgacttcccaaaaatatctgctgcactgatgcggaagtcaggcttactcttacatcacagtaaagctgtgggctttcctccttgacctggtcagtgtagtgttttcaaagctttcttggggttatacatagcccagaaacacgttgctacaaaacagagtggaaaacaccaggccctgtttaactcgatttctctggatcagggtgggtcactgttatcctgaaat

SEQ ID NO: 354600 - DNA, 564 bp, Homo sapiens
atgaaagtgaggaagtatagcattttgggaaaacagataaacttcattttgagaaagtatagtattttgagttgcctggatttttgacagtttttcctcctgaactcttagttacattcctctaatggactgtcagaacaaggcagaaaaggtctgggtggcatctaattttctctatcacctgaaattcctttagagtgggtgtgtgcactcccattattagccaaatgaagaagctagagacagtctcctttctgccacataattttagaaagaaagcattcctaaaagaaactattagttgcctaaattggaaatgggagtgggaacaccataaacgacttcccaaaaatatctgctgcactgatgcggaagtcaggcttactcttacatcacagtaaagctgtgggctttcctccytgacctggtcagtgtagtgttttcaaagctttcttggggttatacatagcccagaaacacgttgctacaaaacagagtggaaaacaccaggccctgtttaactcgatttctctggatcagggtgggtcactgttatcctgaaat

SEQ ID NO: 354601 - DNA, 624 bp, Homo sapiens
catggtgaacatctgtagatccacgtaatactttgtggcataaggctgagtgagaacaagtgtccaaggacctctagtcagtgttccatatacacagtcagaaatcaaatgtactttgttggccrggtgcggtggctcacgcctgtaatcctagcattttgggaggctgaggtgggctgatcacttggggtcaggagtccgagaccagcctggccaacatggtgaaaccccgtctccactaacaatacaacaattagctgggcatggtggcgcatgcctgtaatcccagctactcgggaggccgaggcaggagaagtgcttgaactcaggaggtggagattgcagtgagccattgcactccaacctgggcaacagagcaggactccatctcaaaaaaaaacaggaataaagaaataaaatgtactttgtaacttaggaggatgggctggcgaggtggataacagcataatcatcaactttcaggagctgttagagaattgaagttcagtcaaggacaaaagagaataaccagattagtgttggagacaagaaaggaggttcagtttattgactgtgtatgaatgcgactctgcctcccagtggtttttattatccacttccatg

SEQ ID NO: 354602 - DNA, 336 bp, Homo sapiens
aagtatctaagttttacaaattttacaaaaatatttgaccatgwtaatcactttgttagagactctcacagacattgcaagggcctcgtgcaagtgagagaccttgaagtttaagccttacaaacttcatcataaatcgtctttgtagtaaggcataggggacaatgaaaagcatagaactctctcctatggcaacaggagcttgacacttgcatgcttctcctatctttcttttactacttttggaattcaggctgaatctatttgcatggcttaaaagatgagaataaagacctctgctctggtgaaggattttgcgtttgtttggaacccact

SEQ ID NO: 354603 - DNA, 622 bp, Homo sapiens
agatggcaacacctttgctttctgatggttcagtgtacacaaactttgtttcatgcacagaattatttaaatattataaaaattactttcaggctatgtatataaaaaaactaatcttgtgttttgacttgggtcccatccccaagatgtctcgttaggtatatataactattctaaaatctgaaaggaatccaaaactggaaatgcttctcatcccaagcatttcagatasgggatggttaacctgtagtttgatatgtcttgacacttattcactagtgtaactaccaatccaaatgaggtataaagcatttctatttcctcaaagattcctattgtctcttctcagttaacactggcaatccctgtacccagacaaccactgatcctatttaggctctaatgttagattagattttccccccattctagaatttcatataaacataatcatattgtgtgtacttttttctatctggcttctttttcacagcataatgttttgcagcttcatccatgttgcagtgtgtattaataattcatttctttttactgttaagtattattcaattgtatgaatataccatcatatatggtatccactagcttttttgacatttaa

SEQ ID NO: 354604 - DNA, 604 bp, Homo sapiens
tctgtaacaggcttattatatcgcataataagaagtcccaggttggctgactcagcagtattaagagcccaagtgcttcccttctttctcttctgccatccttggcttttgtttgcgggcttgtctccttgtagtgacaagatggttatcacagctctatccttacacattcttttcaaatgcaggacacacagtttcacctcatgggtctctttatttgagagaaaagaaattttccccaaagggtcccccagcagactctttatgtcggtgtttcagagttgctttgtatgcttatgcttaaacttcctggcaaagggaatgtcggttccatgtttaaactactaagccgtcaccgtctargatttgactttgagaaacctcttagactttaaagcaatttaaaagcatggccaataagagaagataaaatgtttattttgttagaaatttagcttacattggaatgtgccaatatatgtttactctaaaaaagaatggatagataatatgtaattttagagtgagaaaaaatttattatacaggccatacaatctctgtcacagctatttaactctgccattatagggcaaaagtagccat

SEQ ID NO: 354605 - DNA, 545 bp, Homo sapiens
cacaatcttggctcactgcaagctctgcctccggggttcaagcgatttttctgcctcagcctccctagtagctgggattacaggtatgcaccatcatgcctggctaatttttgtatttttagtagtgacagagtttcaccatgttggccaggctggtctcgaactcctgactttaggtgatcctcccaccttggcctcccgaaatgctgggattacaagcatgagcccttgcacctgaccagggggatgactytggggaagatcttaaaagcagccagtaagaaaagacaggtatgactgcccacttcccagcagcaacgatgggatgcagtcaactgaaatatggtctcccagattctcttctcttcctagagccatggcgatcctgctgcaacatcagaccatgtcacttccctgtttaaatcccgctaatggctccccagctcacttgaaaaaatactcagtccttttttttttttttttttgacagagtctcactctgtcacccaggctggagtgcagtggcatgatctcagcttaagcaa

SEQ ID NO: 354606 - DNA, 545 bp, Homo sapiens
cacaatcttggctcactgcaagctctgcctccggggttcaagcgatttttctgcctcagcctccctagtagctgggattacaggtatgcaccatcatgcctggctaatttttgtatttttagtagtgacagagtttcaccatgttggccaggctggtctcgaactcctgactttaggtgatcctcccaccttggcctcccgaaatgctgggattacaagcatgagcccttgcacctgaccagggggatgactctggggaagatcttaaaagcagccagtaagaaaagacaggtatgactgcccacttcccagcagcaacgatggratgcagtcaactgaaatatggtctcccagattctcttctcttcctagagccatggcgatcctgctgcaacatcagaccatgtcacttccctgtttaaatcccgctaatggctccccagctcacttgaaaaaatactcagtccttttttttttttttttttgacagagtctcactctgtcacccaggctggagtgcagtggcatgatctcagcttaagcaa

SEQ ID NO: 354607 - DNA, 585 bp, Homo sapiens
caacacacaccaaataagacatagttaatcagaacagcaccaacaattaactggttttaattacaccatctgacaacacaaaatatatattcttcttaagcctacctggcacattcaccaggatataccacattctargtcacaaaacacagcttaatgaatttaaactattgaagttatttaaagtatactgttacgccagaatgaaattaaagtcaaagtcaaaaataaaaagaagctgaaaattccaaaatatttgcagaatacaataaattttaaggattacatgagtcaaagaagaagtctgaagaaaaaataaaaatagtttgaagtgaaaattaaaatacaacttttcaaaatgtgtgggatgcgacaaaaccagtgatgagagagaaatttgtagcactgaatgcatgtattagaaaagaaagatctaaaataaataaaagtttctgctttagaaagtgagaaaaataacagcaaaataaatctgaagtaagcagaagcaaatctataatacaaattagggcagaaagaaatgaaattgaaaacaggaaattagtagagtaaatcaatgaaaccaaa

SEQ ID NO: 354608 - DNA, 569 bp, Homo sapiens
actgtcatctctgaccaattttacacattttaaagctagcagttctagaaggacccttgtgcatcattggatgtctcagaacattcgtaatgggttttaggaccttaaatttttaggggcctgatttgaatccaatccaagtcgttaccattgaaaagccatgtttccattgttcaaagtagtcactgaatttgcccattttatayatctctgaacactgttgaatttacaggttaaacaatttaattcatgccaacttgaccattgcaagacatagagatttgagatgagagtgaatgcaaaagggggaggagagtttcggggttggtagtatgggtagaattacgaacctggctctaacattcagtaaagaaacattggaaacacataaagaatcctctgccattttgttaaaaaggaaactacaaaccctccctgacttacgattatttgccttacaaattttcagctttatgatggtgcaaaagcaaatgagtattgagtagaatcatactttgagtgcccatacaactctgcgttttacttttagtacagtgttcaatgaatta

SEQ ID NO: 354609 - DNA, 592 bp, Homo sapiens
ttttgatcaccactcatagagaagaaactaaggattagccaaatggagtaatttactcaaggttacccgagtaaccttgtgaaatgttactcatcagagggcaagtcaaaaggaaacaatttttagtaaagtatatataactgtatataacagcatatgtgtatgcctcctaaattctgataygaagagacttttcaaatacattcgtgaaaaagtgttttaaaaatgccaacatttataattattttttgaagcatcatgtaagctgtataataaaagatgaacatagaaagttttcatagctaaatatcttagttttacatactataatttttaccagacattttttacatgcatgctgtaatcagctaacaagaatggtagctaactgatgaagagttttgatttacttcctagtataattaggatagtcattaatagtctttgtttttatgtcatttcatggcaacattctccaattggtatgtgtcaggcctctgagcccaagctaagccatcatatcccgtgacctgcacgtatacatccagatggcctgaagcaactgaagaacgacaaaagtgaaaaatagtca

SEQ ID NO: 354610 - DNA, 503 bp, Homo sapiens
acatgccaccactcctgggtaattttttaaaaaattattttgtaaagacagtgtctcagtatgttgcccaggatgatcttaaactcctgaactcaacagatcctccagtgtcagcctcccaaagtgctgggattacaggtgtgagccatcatgcctcacctggaatatttttttctgaatcccaaggtcaatattacactaagtgttattaaatagattaaacaaagtagaagaaycaaatacatttgctagtatcaatactaccattgaacacataattgtagagatatagactgaatgttttcctctttcagctcattttcacaaacatcaattataaacagttctttccattaggcagataattatttctaagtttaatagaaaatatatcagtaaggaaaatggatatacacatgtcttagatgtcaaaagcattttttttttctaattcacctagaaacctttttaaaccatcttttgcacctcaggacagaataatt

SEQ ID NO: 354611 - DNA, 503 bp, Homo sapiens
acatgccaccactcctgggtaattttttaaaaaattattttgtaaagacagtgtctcagtatgttgcccaggatgatcttaaactcctgaactcaacagatcctccagtgtcagcctcccaaagtgctgggattacaggtgtgagccatcatgcctcacctggaatatttttttctgaatcccaaggtcaatattacactaagtgttattaaatagattaaacaaagtagaagaaccaaatacatttgctagtatcaatactaccattgaacacataattgtagagatatagactgaatgttttcctctttcagctcattttcacawacatcaattataaacagttctttccattaggcagataattatttctaagtttaatagaaaatatatcagtaaggaaaatggatatacacatgtcttagatgtcaaaagcattttttttttctaattcacctagaaacctttttaaaccatcttttgcacctcaggacagaataatt

SEQ ID NO: 354612 - DNA, 620 bp, Homo sapiens
gctgaggatgaatcatgggatcaaaatcatgagtcaagttcatctcttttccctggaggtgggaaaaacaaatggcacactcatgtagttaaattttaaaaattaatgattgtaagaygagtagctgagcatacagagcagagaggagagattatcaagatgtccgagatcattcaatctctaattccaagggaggagggtgaggtaggggtggaaagagaagagaagcagattctcaaactctcaaataggagaacaaaatggaatctgtatgatcaagcaatatcagcataggaacatcaggatgtggtaagaatatgagttgatgttgagataatttggcttgtttgggccaggatttgattgttcagatgttggcagagcaatcctttgctctatgctactagatgaattctggtgttagctaatttatgaggataaccacttgtacattccaggacctcacagatctgggagtctatgtgagaaaatataaaaggaaacccatggctcatctttaaacatgaagaaactgtgcctttcatcaccactactaggttatctttgaaaacatgccatagcattggtccaggtgagatactgagaagataacaagggac

SEQ ID NO: 354613 - DNA, 525 bp, Homo sapiens
gttaatttaatattctactatcatctcaaaatatgacaatattttaaatcccatttttgagacatgattgcactttcttcttaatagctcctcctctaataatcttgatttatatctatgcaaatctagacttctaatggttccggttgttttaaacatgtaatctggtctctgaactcaagtagttattctagatttagaaacagtgctagtcatctgttagcactttaacacgtaaacctatcctgaattggaatatgttttgaaaatgttccatccccagagtaattttgttcttgccttgagcccctggtgccccaatgctgtttatacattaatttagtctcttatatgcttaagaagaaagtatatgaatgcaaatgagaaagtcccaacctctgggatttgaatctgaaatttaaaacaagctaaaagagcatcaraaatggaagcaggattaccaataacatttatgatttaatgatttcaggaagcattaaaatgatagttgtgtatttataagca

SEQ ID NO: 354614 - DNA, 465 bp, Homo sapiens
  misc_feature (1)...(465): n = A,T,C or G
actcattaagctgcaaaattgcctatattcaggacacctgccaagcaagcattccctaaattaccacctgttaccataacatcaaagacatccaaaatacttgcttactaactctagtctccctaagtatatataattttcctataatgctgcttgatggtagagcagtatcttaatttcatatacataaatcaaagttgtttctggacagctagggctcgaacctggttttcaacagctattcctgaggtatagttgatctttagtgttctatttgatgttgagttatagtcacactttttaacttgtccaggtgtaaatggtagttgctgaggcctttatataaagcaaatttactatcactgatacatgaaagaaaatcattttactgatattgtagcackgaaagttgtcaatggattatctaagatgattagaagctgtggataaattagtagtagnnnn

SEQ ID NO: 354615 - DNA, 375 bp, Homo sapiens
caagaaaaagccaaatacagagaatatgattctttggttatgagcatgaagcggtgctgcagtgtttggggaaaagggccacaatcatgtctgctggggattcaccctgtaattatatcaccatccrgctgaatgcaaacctgcagggaaaatggttaaggtagtcttgtcaaatgttgtgcttgcaatctgtttctctgcatgctgacaagaaggcaataaagtcaaagacaactacacaactaatgtatactggagaagaaaactaggctcagttgcaatgtactgtaacaattttgaagttatatagtaccactaacttgagtgacctagaaaaattgaagttcaagatggtagcattatataaaccagtga

SEQ ID NO: 354616 - DNA, 619 bp, Homo sapiens
gaagtatttgtagctgcttaaatgattcttaacactttgatctagtttctgtgagatgactattttgctccggggctcttaatactaggtccttctgtgctcatatacttgatcgaagtacagtctctaaatactatcctatgaatgtaacaggaaagttctactctctctaaagtgctcaagggttcatagttttcttttttcatttttttattttttaaaattgacataaaattgtatgtatttactatatgccacattatattttgaagtatataaacattctgaatgactaaattcagctatttaacatatgcattacctgacataattatttttgtattgacaatactttacatccwctctcagcatttgtcaataatgtattgttaactatagtcaccatggtgtataatagatctcttaaacatctctatttaattaaaatattatatcatttgatcaactactctagctcctggtaaccactattctactatctactcttagattagctttcatagattccgcatatgataaacaaggtgctctaaaattttgttgggacaatctgatactgtggctcttgagttctctaatgttatactacagatttatc

SEQ ID NO: 354617 - DNA, 339 bp, Homo sapiens
aaactcctttcatctgtgctttctcttatttcctcttcaaatattttaagtgrgagacttttataggtcatatgtctactttgattgttacctgtgttgtatttttaaatagactctgaacaaattaatataaaaaatgcagctctaagagaaaagaacaaaatgtcaaatagtaaatacattttgtaaattgcaatcatggagagacaaccttttttgcattgacacacatggtcagttttcaagtatgtcattgccactcattgtaaaaattacttaatgatgccacacagcacacagtctccagtatgctacatgcgttataagctcagcctcatt

SEQ ID NO: 354618 - DNA, 537 bp, Homo sapiens
ttcttcttgtttgattttctgcagttggaatattatgccaggaaggagatttttaactgtttatcagagagtttggcactctctgagtttcctagaactgtgatttgttgtctgtctttgaattcgaaaaagcatcagcattatttcttgggctsttccttctgttcctttctctctctctttctctctctcctccatatattatttgcgttatgcacattacacatttcgtaacactcatacatgtgtagaatgtgctcttccatatttttcatttttttactctttacattgtaatttagaaagttcctattgacatatcttcaaacacattatttccttgactgtgtccagcctactaatgaacccatccaaagcagtctttatttttatcttttttttctttctttctagcacttcttttcaattctttcttggagttctcatctctatgcctgcattacctatgtattctttcatgttgtttgtttttatcatttgaggttttaatatactcatgatagttattttaaattc

SEQ ID NO: 354619 - DNA, 537 bp, Homo sapiens
ttcttcttgtttgattttctgcagttggaatattatgccaggaaggagatttttaactgtttatcagagagtttggcactctctgagtttcctagaactgtgatttgttgtctgtctttgaattcgaaaaagcatcagcattatttcttgggctgttccttctgttcctttctctctctctttctctctctcctccatatattatttgcgttatgcacattacacatttcgtaacactcatacatgtgtagaatgtgctcttccatatttttcatttttttactctttacattgtaatttagaaagttcctattgacatatcttcaaacacattatttccttgactgtgtccagcctactaatgaacccatccaaagcagtctttatttttatcttttttttctttctttctagcacttcytttcaattctttcttggagttctcatctctatgcctgcattacctatgtattctttcatgttgtttgtttttatcatttgaggttttaatatactcatgatagttattttaaattc

SEQ ID NO: 354620 - DNA, 463 bp, Homo sapiens
ctgaagaacttggtagacctcttggatrtaaaatgaataagagtgtagctccttccaagactggacctcaaagggttttcatccctcaaactagtcaacacccggtgtccagtcattagtcaattatcccttcagttttctggttgttggatctagtgttgacttcttttggtgtgctttgactcattctgtgtgttcacctgtccttctggttttcaaagggggcagtggtttgccctgtgatcctgattatctgaaggatctaagaaaaattactaattttcagtttagtcagcatttttcttattgtgaggaccagagtgatgatttctaaactctttaaaagtcagataagactaatcttgttttttaaattaaaaaaataagtatgtagtaactagataacttcagtaatctgaaagtctgaccttcaggaagctcaattatacctaaaggcattgta

SEQ ID NO: 354621 - DNA, 463 bp, Homo sapiens
ctgaagaacttggtagacctcttggatgtaaaatgaataagagtgtagctccttccaagactggacctcaaagggttttcatccctcaaactagtcaacacccggtgtccagtcattagtcaattatcccttcagttttctggttgttggatctagtgttgacttcttttggtgtgctktgactcattctgtgtgttcacctgtccttctggttttcaaagggggcagtggtttgccctgtgatcctgattatctgaaggatctaagaaaaattactaattttcagtttagtcagcatttttcttattgtgaggaccagagtgatgatttctaaactctttaaaagtcagataagactaatcttgttttttaaattaaaaaaataagtatgtagtaactagataacttcagtaatctgaaagtctgaccttcaggaagctcaattatacctaaaggcattgta

SEQ ID NO: 354622 - DNA, 555 bp, Homo sapiens
agttgagcaagtatacatgtattcacacacacagagagagctacagagagagagagatgacaaaaagataattgcatgtcttcattagtagcttaatctgtttgcagcaaagtgatatcatatgagtcaaagttgcaatgagatatggacaaaaagaggcattgaattgggatctcaatgtacamaaaattgtttcttctaaaggctatgagaaaatgttgaggctttttaaataggagattgacataataagccataatacttttgttttctatcttgattagttcagtcttttgggcaatcattctagtagtaaatattaattgattaaggtgtttataatttgccttttgaagtcagaaatcaaggaaaatatttcaagaatatttttccaaagttgacatactttagtcatcaattcacagaagagatctgagaggtaaagtcttggcaaagcctacctaacgcctttaacaacagctgcttttgtgtttctttctcacattggcacacctgttaagccactcagcccctgtctgtttgggaaaccaacag

SEQ ID NO: 354623 - DNA, 576 bp, Homo sapiens
gttttacttagttcctttgccaggkgaaattgtttggaatgcagaacgagtgtgtgtgcaatgatcttcacagatggaaaagaaagggtaataagagatgaactttggccttcagccaaaagaccataaacgttgaaacatgcagaaccagtcagaatgattgaaggttgttttggtggttaaccgggttgcggttttactctgtggtttgtctttagcacgggatagtaaattacaaatttttgaacactgcctgtttgctgtctgtttttgagaaattataactgataatagacaatacaaaagcatgaccttgctatgcttcagtggaaatcacccaaacaaaacctatcccatttttttttcctatttctagagagatgctcagagaagacaaggaaagaaaagtacacaaaccattgtcacattaaattttattttatttaatcaagaggaaatcatagaatactggtcttatgaggattctactttacaattagccatacattcataagagagagttttcatggatatctttaaaaggacttcacagataaatagaaaatcaaatagcaa

SEQ ID NO: 354624 - DNA, 644 bp, Homo sapiens
aacctctcaattttcatcatttttttcatctgtaatcacctgaacagaatttctagctttataagtcacagtatgccttgtaataaagcaagttacattgtatttaaaacagaggctgtgaatactaagccctgctgactaaaaaggaaaggctttttcaaccatattggttccagaaagactccacagtctctggatggaagcaagatagtgacaacataaggaagttatccagccttcttcacgacaacgaagtcttcaaagctgatgaaatacagttgccttctttttcctcccaaccacaaaattataatgtcaaatcaaaatagactgaaatgatccagtctctttactttattgtaattctacactttgatttctgtcatgatctatttggtctgaaaattcaaattcccatttctactacttcttgaagttcaaagttatttttaatgacttgtcttactgtgaaataagtctataatattctatttctcttcctttaagaatacatcagtcattaataataacccaaattggaaacacatctccagaagtaaaargattgttaaaggggtcatgacagtaaaatttttcagtgaagtcaaatgtcttgaaatcctacttactaatcatacctgtca

SEQ ID NO: 354625 - DNA, 577 bp, Homo sapiens
ggttgacagtttccagaaaggtttctcccaaaaacacactctcctttgatttcttcctgaaaatcatgtatctggtactttatcattttagctcatatatccacaggcagccctgggtgaaaccacactttcactaattttaatcatctatacttaagggcttttaggttttttttttaattgggttcattaaatcatactttaatgcattgaaattcaccattttcatgtgtacggttctacgaattttggcaaaggtatgcagtcatgtaaccactgcccccaaaaggacccccatgctmcgatgtaatcaatattctcccccaatccttaacccctggtcaccactgttttgctttctgtctctgtagttggaccttttctagaatgtcacataaatgaaactatatagtttgtacccatgctatttctgcttctttcatttaatatgatgctcttgagatctgtaagttgtatagcatgtatcagtagttcccttttttgcagagaatttttccattgtatcataatttatgtatgtgccagagttgtttgcttatccactcactaggggatg

SEQ ID NO: 354626 - DNA, 482 bp, Homo sapiens
tgctatctactaatacttcaaaatattactaagaaagtacgtaagayactacttataaaatgtctgacacatagttgctaagtaaatagcacttttccccatactcctatgtatgttatttccattaaactctctaaggcagttctgaggtcttgaaagagcactagaacttagatttttgaagattttagaaagtttcctttgaatcttggtcatgttagtttagtagttgtagctgatagttacttcatgcattcattcagtcagtctttcattatgcaaatgtttattaaacaactaccatttggtgacatcatgctaaatatcagggaatgaaatttagcacctctgccagggacgaactaaaagtattcataacagtaagtacataaaggttttagtagggttatgtacagaatgtaagtaggacacactctgactggctaatttgatcttgggtttgtttgtttagaaattggtgt

SEQ ID NO: 354627 - DNA, 482 bp, Homo sapiens
tgctatctactaatacttcaaaatattactaagaaagtacgtaagatactacttataaaatgtctgacacatagttgctaagtaaatagcacttttccccatactcctatgtatgttatttccattaaactctctaaggcagttctgaggtcttgaaagagcactagaacttagatttttgaagattttagaaagtttcctttgaatcttggtcatgttagtttagtagttgtagctgatagttacttcatgcattcattcagtcagtctttcattaygcaaatgtttattaaacaactaccatttggtgacatcatgctaaatatcagggaatgaaatttagcacctctgccagggacgaactaaaagtattcataacagtaagtacataaaggttttagtagggttatgtacagaatgtaagtaggacacactctgactggctaatttgatcttgggtttgtttgtttagaaattggtgt

SEQ ID NO: 354628 - DNA, 482 bp, Homo sapiens
tgctatctactaatacttcaaaatattactaagaaagtacgtaagatactacttataaaatgtctgacacatagttgctaagtaaatagcacttttccccatactcctatgtatgttatttccattaaactctctaaggcagttctgaggtcttgaaagagcactagaacttagatttttgaagattttagaaagtttcctttgaatcttggtcatgttagtttagtagttgtagctgatagttacttcatgcattcattcagtcagtctttcattatgcaaatgtttattaaacaactacsatttggtgacatcatgctaaatatcagggaatgaaatttagcacctctgccagggacgaactaaaagtattcataacagtaagtacataaaggttttagtagggttatgtacagaatgtaagtaggacacactctgactggctaatttgatcttgggtttgtttgtttagaaattggtgt

SEQ ID NO: 354629 - DNA, 471 bp, Homo sapiens
aacatactaatggagaaggtgggcttactgcctgttcttcaaactgcttctactacatcccaataactcaatttcaaggctttgagaacaaagccactgtgcagtcaaagtggctatgagagatgaaagttgtcataaagtttctgaattttttaattagtggcataattaacccttacgtttcttaagttttcytgaatcattcaaaatatattatcaggaaagtattattgtatccatttatttgatatttatagaatatgcaggaacagaaaaatatactttcaggtacacatgaaatatttaacaacatagaccatattctgagacaaaaaatgaatttgaaaagaattaaaatgattgaaatcatacaatatgggctaactagcaataaagtgagaaagaaaacccaaataaaaatcataaatgaaaaaggaggcatcataacaaataccacataatacaaaggat

SEQ ID NO: 354630 - DNA, 503 bp, Homo sapiens
atttgatgcagaaagaatagagatacatagcaacaatataaacaatagattgcaggtgaggtggttgggcaggagagaactgaaatctggagacaaaattcttacccttatctagagccagcacagcttacgaactctctgccaagctggtagttatggacagaatgacaaagaaggggacaagctgaatcatttcccattaagaagcaagctacaaagcaaatggcctkccagagaagcaaaagtattgattgaccatttagtgcaaatgatggaacactaattaataactgcagctgtcaggaagcagtgattgtttggcttccatatagatttcttcccctcactttcatttgctttaatgttcaaagctttctttgatgtgaatttaatgcttccttttctcattctgttaattctttcagtattttgtactgtatctttttgagtatgcctgcttttatatgttttatctctcttgcattactaatgttatatttagg

SEQ ID NO: 354631 - DNA, 624 bp, Homo sapiens
tatttttctagaatcttcactgcatttatgacattgactgaggttgctgctgacagtgttgacacagaagaggctctgccttaactaagtttatctcccaaggacttattcctttacattctggcagctaggtacctatttttcatgttgataaacccaaagaactcaattcaatttctctgagagttttatcctcctatcttcccactacaggcaactcacagggctatgaccttttcagggctatgacctttccatggggaagttgttacataaaaatattttaaaatctcagagtcacagactgtcagaactattagagaccttaaaaatcatttagacatactcctaacaatgggaatgaagtcmcagagaaagtaatggttaattaactagggtctcctgactcttttatttggaactttttctatgataccttaaccatagtccaatagtcattaaatttgagagtttggggtagagggacaaggaggatgagctcaactgcacaatttgagttatcagaactatcactggctttcaagtcagacatactcaaggttgaatcctagttccacctctacaagctttgtgacctcaggaatgtaacttgatttctctgaa

SEQ ID NO: 354632 - DNA, 580 bp, Homo sapiens
taaaggggccaagtaggagacagacttgtggactgaggggactgtatgcagtttactgttggtggagcataatctaaagaaccaaatcttggcaggctgtgtaggctatgtaaaggagtataacctttattccatagataactggaaactatttatctattttttattgtttatttttttagtcaagttcttgctctgtcatccaggctggagtgcagtggtgtaatcacggctcactgcagccttgaattcctggcctcaagcaatcctccctcctcagcctctggagtaactgggactatacrcatgcagcactacacctggctagttaagaaaaaaaaaaattgttttgtaaagatgaagtctctctatgttgctcaggctagtttaaaactcctggcctgaagtgatcctcccactttggcctcccaaagtgctgggattacaggtgtgagcctctgtgactagtcccaagataagggaaatgataatcgttattatgaatacattaactaggcattcatgtttgatacttcataatgtaaaacacactttcacattttttcctcttatttggtcc

SEQ ID NO: 354633 - DNA, 578 bp, Homo sapiens
aggtataaaatggaagaacttggagggcattttatttacatgtctcaaaggtgttttaaatatacataatctcaattttgtatctggaaatttgtcctactaaaataatcatgataaatacaaaaatgcttatatcactgtttattatggaacttaattatcccaaactaaaggataggtaaaataaattgtgatgcattcaaacaatgaattcctttagaagcaccttagaaaaaaacatttaatgtataaaaaaaatttaaggatatattgccaagtggaaaatagagcaggtttataaaattgtatccttttatctaattattaagaaaaaaacatatatagcattttacatttttgtctctatatatctctatcatccatctatctgtttatatctatgtatggagagaaacraaaaagtaaaattacaccaacatgttaactttgtttatgtatttttaaattgggttatgagccggattttttgttttcgtctttttggttatctatattttcaatgatttctacaaataataggtgttgttttgtggtaagaaaaagtataatgtagtgtt

SEQ ID NO: 354634 - DNA, 563 bp, Homo sapiens
gggattcaattgaagatgaaaattgggtggggacacagctaaaccataccaggataaataatcttactcactagtgcagtctctgaggttacctccactttgaatctgttaggacctacagaacctacttggtcctccctgcctttgaccccatcccaggcccagatttactgcctgaacttggggattaatgctatatccttacaccctagaaaagtttctgttatacagtaagcactcaaaaaatattttctaagttaaatttaaaaatatatataaatcaagatgtcaaacctcataatcagacaaccataaattaaaacaatgagatgcccttttctactcatcaaactgataacaattaaaaagcatgataatgttaagtgctggtcaaaaagtatggaaaacagtattctcatacactgccagtaagactgtaaactaataatccagtttggaaactatatggcagcctytaatgaaatagaaaatttatatatcctgtgacccaacaatcccacttctaggtatatgacttagagaaatgctcacatatgagtaaa

SEQ ID NO: 354635 - DNA, 600 bp, Homo sapiens
ttaaaaatatatataaatcaagatgtcaaacctcataatcagacaaccataaattaaaacaatgagatgcccttttctactcatcaaactgataacaattaaaaagcatgataatgttaagtgctggtcaaaaagtatggaaaacagtattctcatacactgccagtaagactgtaaactaataatccagtttggaaactatatggcagcctctaatgaaatagaaaatttatatatcctgtgacccaacaatcccacttctaggtatatgwcttagagaaatgctcacatatgagtaaaaactaccacatgcatatgcttaatgcagcatgattttcaatgtcagaaaaactggaaacttgttcaatgtccatccataggagaaagggtttataatgtgttatgttcatacgatggaataatagctaagtgcttgagacttctattactcactataccgagttctcctttccttctgaacatacttctatatatcctttgcattcaggtggggtaatgtgattatcgttggccaataacttatgaatggaaatgacacttctgcactgaagcgtttaattgcttatgtgagaccctaca

SEQ ID NO: 354636 - DNA, 594 bp, Homo sapiens
cagtacctgctttacagagtcattaagaggaaagatgtaaaggttatgtatataagcattcagcacagtactcaggacataataaaatgcaataaataatagctattgctattattatagtaggttctttaaattacatgaaattaaataatattattataagtgatcaaaacttctagactgacctcaacactgcacaaaatactggtaaccctaagagaatcgttaagtctagaatagcattgtctattggctttccaacttctgtatcacaaaagaaaaagtctagaaaacacaaactgtggccttcaaccaggctttattctcagaggtattatttacatttcagatttattattgtctcccatggtgctgacatgaaataaccttccattctcttccatgttaaaagagtacagtgtttcttggctccataaataattcagggctatattaatattttaagaagaataagcaatatatytgaatcctagaaaaaccatgaggattgaaattagttatttgtagctgaaaacttaattgctccaacatattgattgttttttcttccaggttttattgcccacacaatga

SEQ ID NO: 354637 - DNA, 580 bp, Homo sapiens
tctgctccatgcttgtcaacaaagaggcaatcagaaaatgcttgttgaatgaatctatgaaaaacacggaatgaaaagaaaggtgaggaaattagacatccatgttttatactcattgtgatatttcctatttggaaccaaaaatgtagctacataacctcctttaaaattcttttggccagacatggtggcttcgcacctgtaatcccagcactttgggaggccgaggtgggcagatcacctgaggtcaggagttcaagaccagcctggccaaaatggtgaaaccctgtccctactaaaaatacaaaaattagctgggcatagtggtgcacacctgtaattccagctacttgggaggctgaggcaggagaactgcttgaacctgggaggcagagrtggcagtgggccaagatggcgctccactctgcacaagtctgggtgacagagcgagactgtgtctcaaaataaaataaaataaaattcttctgagagaaaaaaagaaaatcccatgacataaaagcatttaaatgaagtttggagtttcatttgtcttttaggctccaagtctaataatgctatt

SEQ ID NO: 354638 - DNA, 580 bp, Homo sapiens
tctgctccatgcttgtcaacaaagaggcaatcagaaaatgcttgttgaatgaatctatgaaaaacacggaatgaaaagaaaggtgaggaaattagacatccatgttttatactcattgtgatatttcctatttggaaccaaaaatgtagctacataacctcctttaaaattcttttggccagacatggtggcttcgcacctgtaatcccagcactttgggaggccgaggtgggcagatcacctgaggtcaggagttcaagaccagcctggccaaaatggtgaaaccctgtccctactaaaaatacaaaaattagctgggcatagtggtgcacacctgtaattccagctacttgggaggctgaggcaggagaactgcttgaacctgggaggcagagatggcagtgggccaagatggcgctccactctgcacaagtctgggtgacagagcgagactgtgtctcaaaataaaataaaataaaattcttctgagagaaaaaaagaaaatcccatgacataaaagcatttaartgaagtttggagtttcatttgtcttttaggctccaagtctaataatgctatt

SEQ ID NO: 354639 - DNA, 410 bp, Homo sapiens
ggaacgacaatgtaccaagcagtcctcagatattttcctttatcctgtctctggtgacaagattccatagttaagtcactagctagacatgttttacactgatctcaccaaggccacccctaaggcgtgcagggctccaggcaaagattttttgtgatgcctatgtctatataaacagtttgattaaaaattgtattacaaaatttatagacctcatgtgtctatatttatagacctcatgtgaggtccatgaatttagatgaagatgtagaataatgtgtagagaagatacttaggtatttgtttattgttcaatgagtgcatgtgaagtatccggagccatcttttcatattctttgttgtcaaatgcatagtttctgragacaattttatatctcccacatgcagaa

SEQ ID NO: 354640 - DNA, 516 bp, Homo sapiens
acacttttaaacaaccagatctcatgagaactcgctatcccaagaacagcaaggggcaaatccaccctcatgatccagtcacctcctaccaggccactcctccaacacttaaaatcataactcaacatgagatttgggtggagacacagaaccaaaccatatcaggcatagccatatttgttggcatgcaacttacagaaacactttttaagtgcaatamttcaggcaaacctcacaatcaccttggaatccaggggtcattatttccattttataggtgagcaaactgaggctcaatgaggtagagtggcaccattcatttattcattcatccatctaccaatccattcatccattctcttactatttatgagagcttgctatgtgctaggccctataacttagtcaaagttcctcggccagtcctggtagagtgggaattcaaaccccaggctgctcacctttaagtccaaggatcatttcctttccatacagttgtatggaggccatccaatc

SEQ ID NO: 354641 - DNA, 618 bp, Homo sapiens
ggttataaccttgtctgtttttgcttactgtctccttctcaagatataaacacctatatttttcatatccacatactaccaggtccacaaaaagggggctcaaaatctgtttcttgaataaatttatgatttccagttttatagattagggaatcaaagttcagaaggctaaatgaatagcataaagtcacctggtaattaagtggcagaactaaaatttgtactcaggtcttctgactctaatactttttacaatatacttttttgactgagtgttaggcctcactagcaatttagataataataaaacaataaaagttasgtacaacttgatcatttatgaggtacattcccatacattttctagctgactctcaaaacaacactgcaaacacaaattatagataaggaaatctaggcctgaagccctcaagatatgtaaaattgcctaggggcaaagaactaacaaattcagaagccaggcccttctccaggttcaacatctctggcttcttcaccttcatattcacacctttcttccatcaggctgccctgccccaggaaaacaacccaatctttttaagacagtgtattcacaactgtactcattgtgccagg

SEQ ID NO: 354642 - DNA, 459 bp, Homo sapiens
atttggaggctagagtttttagcagtagtttcatgggcagggggatagggaatggatactgttgattggttgggttggggatgaattcacaacagtgctgaaaatgtcttcacatgctgagtccattcctgggtgggggtyatcggtctgggtagcgtcaattggtctgccagaatggaaggtctaaaaaatatctcaaacaacagtcttaggtttcataatagtgatgttatctatagaggcaattagtgaagtttacaaatcttgttcccaccagccacttggctcctgagcaggaagcaaactaggaaacgatgactaggtattgtttaattattcctataccttagcagaattcaagcccctaccataattttaaccttgtgtcctttcattagttttacaaaggcagtttcagtccccaaacagggagggagttagctttgggaagggactatt

SEQ ID NO: 354643 - DNA, 416 bp, Homo sapiens
actcacaacagcccttgtactattatgaaaaaaacctgagatgcaacaatgataagttgrtgaggtaacaccacaacccagagtacctgacgttaaactcactgctctttttattactgcttcaatttcctactcattattggtctgtccaggatttttatttcttcctggttcaatcttaggaggttgtatgcttccagaaattcatccatttcctccatgttttctagtttgtgagagtttgtccacagtattctctaattatcttttgtatttctatgttatcagttgtaatacctttctcatttctgattatgttacttgtgtcttctcattttcttggttagtgtagctagcagtttatcaattttaactttttaaagaaccagtttttcatttcataatgctctgtattt

SEQ ID NO: 354644 - DNA, 621 bp, Homo sapiens
tgttttgtgacctaatatatggtctatggagagtaagtatatttcatgggctgatgatcaaaacatacattctgcaattgttttatcaaatgttcttcaaatgtctgttaggtccatttggtctaaagtccattttttgtccatgtttctttgttgattttctgtctcaatggtctgtttattgctgttagtaggatgttgargtcctccattattattatattgctggttatctttctttatgtctagtaatacttgttttatgaatctgggtgctcctgtactaggtgcatatatacttagggttgttatattctgtttttgaattgatctctttatcattatatactgacctttcttgtctttttttttaccatttttgatttacagtcagttttatttgatataagaagagcttctcctgctcatttttggtttccatttacatagaatatgtttttcacccctatactttcagtgtatatgtgtttttacaagtgaggtgactttcttgtaagcagcatataattggatcatgattttatttccattcatccagtctatattttttaagtggatgatttaatccatttacattcaaggttaatattgatatgtgag

SEQ ID NO: 354645 - DNA, 540 bp, Homo sapiens
ctcgcttctggatctagccatccaacaagtctaccaggctctgggctggtactggggattgtctgcagagtcctgtgatttgaactgtctattggtctctcggccatggataccagcacctgttctggtggaggtggctagtgggtgaaaytgactctatgcaggttcttagctttggtggtttaatgttctatttttgtgctggttggcctcctggctgggggtggcactttccagagaacatcagctgtggagagaaaccagcagtgaatggggccctagaactcccaagaatatatgccttttgtcttcagaagttgggtaggaaaaggctatcaggtgggggcaggactaggcatgtctgagctcagactctccttgggtgggtcttactacagctgctgttgaggataggggtgaggttcccaggtcaaaggagttgtgtatttaggagtattatggctgcctctgctgagtaatgcaggttgtcagggaagtgggggaaagcccacagtcacaggcctcacccagctcccatgc

SEQ ID NO: 354646 - DNA, 595 bp, Homo sapiens
actccattcataaaagagtaaaatagaattttcaggtctaaactatgggaataaatagaagtagaaggaataaagaaaatctcaatagtcaaaaattcagtcaagagtcatgtcacttacaggaaaagaaatcactaaaagtgagagtcaatagaaatgataaaggtcagaatcataccagcraagacttcagatatttgacttttcaggcatattacttgtgttataaaaaaaaaaaaggaattgacaccatgagaaagaggaaataggaataaaaagattacctaaaagtagcccagaaaggcaatagctggaagctatggaagaaagaaacacaatgatagtgaaaaggtcttaatatgtctaatcagatttttttgagtgagaaagaaaatgggatgaggcaacatgtgaaaagatagataattgctaagattttccagaattgataaaatttaccaattttaagattcttaaagaccagagaaatccaaaaagaagaaatacctgtgcacatcatattgaaaatggaaaatactaaaaccaaaaagcagccagagagaaaaagaaagtaactataaaagtaggaaaacca

SEQ ID NO: 354647 - DNA, 595 bp, Homo sapiens
ctctacactacaagaagtttcaggcatgcccactgtgcatgtcagaggattcagtcagctagtgtactgctcatttttaacctggtgtccttaaatcttccagagtagggcagagttatttctcaagtgtggagttgttacgattcttcakatagggttgggcagcatctgtcagaagatgaagggtaaagatttaagagggcagggagatcctgactgaatgctacacattaaagggtagtgtttttgcataaaagcaaaactgattatttctttttaacgtagtattactggcagtcattgggctacagaatacatttcagactgctttggatgtttatcaagatacttctaaattcgttataatttgccttcgtagacttatctaatatttttcccatacataccctagattttcattcattcctcagtgagcacctgtacatctatcatataccaaatttctgtgataggcagatataatagtgagaaagacagacatagccccgtagctcagactgctttagcagttgagtatcatttgcccctttccaaacttaagatgctcttcattcatgctccttcccatgactaa

SEQ ID NO: 354648 - DNA, 628 bp, Homo sapiens
aattgacgaggattataggaatgtatctattatttttatgagcatatttaattgtacgtgtttctttaggtttctaattaaaaccggcagtaaaaataacgcctttgtgtttaagcctacagttttagacttaaacacatctcataattagcgctaatatacacatagttcagaaagatataatgctaacacattgaagtggattggaaatctttttattcgtcctattattaaaacagactcttgtcagcagggaagggggcaactaaataaaccactgtaaatagaacgtgtgctgcttcagtttctttcacagatttcctgatattatagattaaatgtcagagagatcaggacataaatgatggcatgatcccaaagggaagagtttatcagttccactgtatttaaaactacattgaacactgcatattttaaaatactgtctcaagrttttactacagacttgaagtgtaagatgtaaaagtccacacatttctgcagactggtgtgagaatttaccaaataataatctctaactatttctactcagtactaggcagccaccaattagaggactgaattctcagagtctctaagggcagttccacacttcacattttcaatg

SEQ ID NO: 354649 - DNA, 623 bp, Homo sapiens
tagtaataatattttctccaaagaattgtcatgggtattaacgatgtcatgtataaaactcacttattccaatgcctagaacacagtagctattagtgttatcatcacttggttcttttcttcctcccccaggcatgagggagggcaagtttctscaaattgtgaagtccttttgctgtatttttctggttcatatccttaaaataggaagcacaaaattgtactgtttatctgcaggttttcaatgttacatgctactctgtaagttcaatattttatttcatttattaaccagtcggtttttaagattccttagagcacagaatatgtcttagacatttttacatctccagaacaaggtcccatatttttacctgttttattgttacaggctttataattccaaaatattatatatgttaaaggaaactttagtatttaaaattaactataactagttaccaatttcaataaaaaaaagattttcttattatttgaaggccaatagtctattacatctaatcaaacaatgcattaaaatacaaggacattagtaagtgccaccagtatgagaataaatgttacttttaaatacttagcttctgaggttgaaagaaagacat

SEQ ID NO: 354650 - DNA, 590 bp, Homo sapiens
gagtaaatttcagatgtctcatcataaaaatatgawacgtaagtgaggtgatggatatcttaattagcttgatttaattatactatattttatatacatatcaaagcattatgttgtactacataaatgtatacagctacaatttgtcaatagaaaaagcacaaactaataatctcaatactagaaagagacagaaagggagaaaaagagagagagaataagggaggagagcaaaaataaaatataatgtaattatgtatcttaaaaagaatgactttttaagaaatattatgttgtgtgtatttaagaaatattattttgtttatgccctaaggaccaagcactggtgcttgaaaatgaatacacacacacacacacacacacacacacacacacatacacacacacacacttcttcttttacaagagattttaacataaaataagttattttagaaatcaaattcagtgtaccatttatatttgagagtaggaaaaatgtgcctggagtttatacttaaagattatttcataacacccctacatggcatcttatgaaaagtgcttcacatgcattcctactaaaatct

SEQ ID NO: 354651 - DNA, 590 bp, Homo sapiens
gagtaaatttcagatgtctcatcataaaaatatgatwcgtaagtgaggtgatggatatcttaattagcttgatttaattatactatattttatatacatatcaaagcattatgttgtactacataaatgtatacagctacaatttgtcaatagaaaaagcacaaactaataatctcaatactagaaagagacagaaagggagaaaaagagagagagaataagggaggagagcaaaaataaaatataatgtaattatgtatcttaaaaagaatgactttttaagaaatattatgttgtgtgtatttaagaaatattattttgtttatgccctaaggaccaagcactggtgcttgaaaatgaatacacacacacacacacacacacacacacacacacatacacacacacacacttcttcttttacaagagattttaacataaaataagttattttagaaatcaaattcagtgtaccatttatatttgagagtaggaaaaatgtgcctggagtttatacttaaagattatttcataacacccctacatggcatcttatgaaaagtgcttcacatgcattcctactaaaatct

SEQ ID NO: 354652 - DNA, 558 bp, Homo sapiens
caataactccttgaaattttactgaagatcctttgctactgtgtccagtttctcctgctatcttcatgagtcaatgctccttttgatggctctcaacccatgtatgtgtgtgcacatgaatgtctgtgggttttccctctgacagtcccagaaacagcccttaagggttgtaataacatttgtatttgtttatgaagaatatttagaacaacagaggaccttaggacattgtaaatagagcgagaagtaccaatttggggagtatgggactgagcacaagctcataaaaatgagttaagccaaagctatattaccttctcagaattcacmatttcaaaaaaggtcaatttaatcatgaattgaaactttgctaactcaactgtgcagttctcatgagtcataatcatacttctggcaactttaatctctccagttattatgtgtgatatgtggattttattattttcctttctggtaaaaagcagtgtataaataaccaagatgctttaaattgtcacaattagctatgaggttgttatttagtactttgaattatat

SEQ ID NO: 354653 - DNA, 582 bp, Homo sapiens
tatcatactatttcagaggtggagcccctattctgcttttgttccttgrttaatgcttacactctatattgccctcactattttaaatatttagtattttattatttcattttcactggttattgcttttagctgtatatgaatgtcacattatagggcctatttggcacactgagttaattactattacgaaaatgagggccattgagctgtggatcacgagcacattttacgttgttggtgctgtttgaaccaaaaagaccaactgaagaataccctgattgtattccatatttcctttatttattcagtttttgaaaatctacggattatcttgggtgtgtctaagaaacggaaaagaactcttacctaactctatgtttgaaaactcactacaggtagtcataaaagcttggcatctttcacaagaacaggcaaccttatattaaaaatgaatccacaattaaaacaacaatgatatattgctacagatatcaaaatggctaaaatccaaataaataaaaattaataaaaacaataccaattctggtgaagatacagattgatgggaactctcattga

SEQ ID NO: 354654 - DNA, 582 bp, Homo sapiens
tatcatactatttcagaggtggagcccctattctgcttttgttccttgattaatgcttacactctatattgccctcactattttaaatatttagtattttattatttcattttcactggttattgcttttagctgtatatgaatgtcacattatagggcctatttggcacactgagttaattactattacgaaaatgagggccattragctgtggatcacgagcacattttacgttgttggtgctgtttgaaccaaaaagaccaactgaagaataccctgattgtattccatatttcctttatttattcagtttttgaaaatctacggattatcttgggtgtgtctaagaaacggaaaagaactcttacctaactctatgtttgaaaactcactacaggtagtcataaaagcttggcatctttcacaagaacaggcaaccttatattaaaaatgaatccacaattaaaacaacaatgatatattgctacagatatcaaaatggctaaaatccaaataaataaaaattaataaaaacaataccaattctggtgaagatacagattgatgggaactctcattga

SEQ ID NO: 354655 - DNA, 582 bp, Homo sapiens
tatcatactatttcagaggtggagcccctattctgcttttgttccttgattaatgcttacactctatattgccctcactattttaaatatttagtattttattatttcattttcactggttattgcttttagctgtatatgaatgtcacattatagggcctatttggcacactgagttaattactattacgaaaatgagggccattgagctgtggatcacgagcacattttacgttgttggtgctgtttgaaccaaaaagacyaactgaagaataccctgattgtattccatatttcctttatttattcagtttttgaaaatctacggattatcttgggtgtgtctaagaaacggaaaagaactcttacctaactctatgtttgaaaactcactacaggtagtcataaaagcttggcatctttcacaagaacaggcaaccttatattaaaaatgaatccacaattaaaacaacaatgatatattgctacagatatcaaaatggctaaaatccaaataaataaaaattaataaaaacaataccaattctggtgaagatacagattgatgggaactctcattga

SEQ ID NO: 354656 - DNA, 561 bp, Homo sapiens
agaatgcatattgccttagttagcttttgcagcataacaaatcagcccacaatttattcacttaaaataaaatagcatgtattctttcytacaattccaagggttagagctcggtggttcttctggtctgggcagcctcagtttatctctgcagtacccatgacgcacttgatggtgttatttggccttactcacattgcttgtgattgatgccttgttagcaaaggcaatgggaatgacttggtcatgtctctgatcatccagaaggctagcttaggctctttcatgtagttgtaggctttttaggtacaggaagaaacaggaaaatacccagtttacaagcacttttcatgcctctgttatatttgctaatatttcattggacaaagcaaatcccatgagccaagatcagattcaagaggtggaaaagtagattcaatctcttcaagagagtagctgcaaaagcacattatacagagagcacgtacagcaataagaaaaacgtgggctcattttttactctaacacatatttatatatgtctgtgactgtttcacatgc

SEQ ID NO: 354657 - DNA, 561 bp, Homo sapiens
agaatgcatattgccttagttagcttttgcagcataacaaatcagcccacaatttattcacttaaaataaaatagcatgtattctttcttacaattccaagggttagagctcggtggttcttctggtctgggcagcctcagtttatctctgcagtacccatgacgcacttgatggtgttatttggccttactcacattgcttgtgattgatgccttgttagcaaaggcaatgggaatgacttggtcatgtctctgatcatccagaaggctagcttaggctctttcatgtagttgtaggctttttaggtacaggaagaaacaggaaaatmcccagtttacaagcacttttcatgcctctgttatatttgctaatatttcattggacaaagcaaatcccatgagccaagatcagattcaagaggtggaaaagtagattcaatctcttcaagagagtagctgcaaaagcacattatacagagagcacgtacagcaataagaaaaacgtgggctcattttttactctaacacatatttatatatgtctgtgactgtttcacatgc

SEQ ID NO: 354658 - DNA, 460 bp, Homo sapiens
agaatttctccagccaatgggtttttttaactatcatattctttttagactatggccagtaattattctaatttctttataagtatttaacatttcaataagtatatcacaataatatttagtacaaatagcttcctttttgtgaaatataaattgttctttattcatgtgtttgggcttaaagaacaataacccaaaatatgatgctttgtcatgctgagcactttcaacttgtcttaaaggaagttggaagcccctagaagccgcctcataaccaaggactttccacctttcccttgtttctctcctcccaagggcactttctgtggaagtgccyttatctgactgaggaaatttcttccaaaagaaatgcaattgtcttaaagcctcctcctcagaaatctcatcaaatgatcaggcaatattaactagcagagaagagaaaaagactaaaagttgt

SEQ ID NO: 354659 - DNA, 560 bp, Homo sapiens
gactggcatctctgggcaaatgtgccagcttcctgggtaccttgcacaactgtcacctctaagattttatcagcccactcttaaggtccattaactagtgcatgagtccaggacagtctagaaacttactaaactatctttctttcttccattttccagaaattttgcccttctcaagtgttgccttaaagggcaggcrtttagctttctttcctcttacgcctggcactttgcatcatcatttctatgaacttaagtttttggacaggagaaagctttgttttccaacagtttctactttgtgatctggaaaatttcctgagggaaaaaaaatatgaaaggtctagctatctctttgaaattaagaaggtggagagagaaagagtagcaataaaatgcaaattaatatgccaaaagcttattaggacacacttgttttaatctatctctttttcataccttacaattcatttttaaatgaagaggttaaagaggtaggatgtaaagacaggaattaatttatctatgactgcaaataaatttgtgggcttttaatactc

SEQ ID NO: 354660 - DNA, 560 bp, Homo sapiens
gactggcatctctgggcaaatgtgccagcttcctgggtaccttgcacaactgtcacctctaagattttatcagcccactcttaaggtccattaactagtgcatgagtccaggacagtctagaaacttactaaactatctttctttcttccattttccagaaattttgcccttctcaagtgttgccttaaagggcaggcatttagctttctttcctcttacgcctggcactttgcatcatcatttctatgaacttaagtttttggacaggagaaagctttgttttccaacagtttctactttgtgatctggaaaatttcctgagggaaaaaaaatatgaaaggtctagctatctctttgaaattaagaaggtggagrgagaaagagtagcaataaaatgcaaattaatatgccaaaagcttattaggacacacttgttttaatctatctctttttcataccttacaattcatttttaaatgaagaggttaaagaggtaggatgtaaagacaggaattaatttatctatgactgcaaataaatttgtgggcttttaatactc

SEQ ID NO: 354661 - DNA, 594 bp, Homo sapiens
ttaaacctcttttctttatacttacccagtctcaggtagtatctttatagcagmgtgagaagggacaatgatacatttaggccaacacaatcaaagtattgtccttttaatagcaatcaaaaattattaatggggaattttacatttattgtacttattgttcaaactctgttgtgtatatcttaaggtcagactagccacgtttcaaatgctcaatacatggctagtgtctacagtattggaacggcacgggtagagaccatggcttaatttgtaagttataaagtctattaagactgagccttatgtctttcagtttgtactctatcactgtgttcattatattctttggatgtgggaagacatgctttgtacaaatggctccaggagttttcaaaatctttatgaagacatgatgacattccagctacacttaataattgcattattgtttacatatgattgtgctgcccgagttcccactcagtggtccagtaacaaccacactcactaaaactgcatccccactgtgccgggtatccagcttgaatttatacaagttgtaggttgtggtgattttctttccccaccagt

SEQ ID NO: 354662 - DNA, 618 bp, Homo sapiens
aacatgaaacaacaccgtttgtctcatctaatgcttttggcctaaattctacttcctctcgtattaggtttgttgtcttattgtttccatttgactgatgtgttttttccattcatttaactttttggaatgactgtattttagatgggtctggcatacaacatagattttggttttatgtgccaattttaaaatctttttattgtaataggtgagttcaacctattacacagaacggatgtgtttgggtttggtgctttcattttttggtatactttctgtttgaattatattttgtttactgtgtttctcaatgtattgtctccttttaaaaaattactttggtatttagaaaagtttacaagtttgttctatggattatttttgtatttatagtttatatagtccccatttccctaaagctgcttcctcccacccctgcctcatatttttagcattgtactaactggctttcatttttagtagtattctttgactcacctatgacgtaccccacaattaatatctttytattttcacttatctctcttctcttttcattttacacttgaatactttattttgccagaatgtataaaacttacatattgttcaccc

SEQ ID NO: 354663 - DNA, 565 bp, Homo sapiens
tcagtattcctaaggacacagtacaaaatacattcattaaactattgtaatgagaataagcctatgaggagacatgctgataaaccaaatgagggttcagaagattaccatcaaatttccctgttaacttttctttagttcttagtataytgagatacaattttatcttttgatcaccaaagttaacaactgaagacagaatatcaacttctcacccttaatttacaagtttctgtaacatcttcattaaacagtatttttaaatgagaactacagttatttaaatgatgtatgtcagaaacaaaggttttgatagctatccaggttactacgcaccccaatatcaatttataaatcaaatagtatatatcagtacaaataaatacagataccttagtgcacagcttttatcttttttttttttttttttgggatctttctctgctaaacattctttttctccactactgtttgttggtaaaactagttgagatttcttttatggaactatgcctcccttttctcaactcatatgacattcttggattagacccgagaccctggg

SEQ ID NO: 354664 - DNA, 565 bp, Homo sapiens
tcagtattcctaaggacacagtacaaaatacattcattaaactattgtaatgagaataagcctatgaggagacatgctgataaaccaaatgagggttcagaagattaccatcaaatttccctgttaacttttctttagttcttagtatactgagatacaattttatcttttgatcamcaaagttaacaactgaagacagaatatcaacttctcacccttaatttacaagtttctgtaacatcttcattaaacagtatttttaaatgagaactacagttatttaaatgatgtatgtcagaaacaaaggttttgatagctatccaggttactacgcaccccaatatcaatttataaatcaaatagtatatatcagtacaaataaatacagataccttagtgcacagcttttatcttttttttttttttttttgggatctttctctgctaaacattctttttctccactactgtttgttggtaaaactagttgagatttcttttatggaactatgcctcccttttctcaactcatatgacattcttggattagacccgagaccctggg

SEQ ID NO: 354665 - DNA, 580 bp, Homo sapiens
aagagggctagctggacagctgacaggcaccagccttctccctactgaagcccccattgcctgggcaaggcaggagaccagagagtgagatgtcactatccctttgtctcctttggattcaatgacagaaccaagtgaggaggcaagatttacaagagactgagtggtatttacattgaccaatcaaaatacaaatggattaaactggatctgggaaccagagacctgcttctgtgcctacctgatgttactgttttagctgctggatatcaggaaaggtggggaaggggaagattgcactcttgaggatggcagccatttatccactttaccaactgggttttgttcttgttgttgtcatttgtttgttggtttggttttgagacaaagtctcacttgttctgtcaccaaggctggagtacagtggcacaatcttggctcactgcaacctccttctcccgggttcaagtgattctctggcctcagactcckgaatagctgggattacaggcacatttcactatacctggctaatttttgtatttttgatagagatgtggttttgccatgttggccaggc

SEQ ID NO: 354666 - DNA, 461 bp, Homo sapiens
tcttcataggtgggtttaagtcatttaaaatattatctaataagaattaaaaattcatagatggtagcttaatagctttcttattcttttacttggcagatatatcagcatttggaaacaccataggaaactgcccatttaagacattaactaagtcactctcactatctcttttacaaaataagaccaattccctctcattaattaaatctcttgatttaaaattcccattttctaaatttgtatgtggtgtcgtcagaaactatttttctctcttgggtagaagtcasttttaaacaatatacctactaatgatgtatcaacattcttacgagtgaattctatctatcttttaatttttttcttgcctgtggaagacttctacactctacttaactgacctttttaatgaccaaaagacagaggtgttcttcctatcataatcaaatgttgatttattt

SEQ ID NO: 354667 - DNA, 469 bp, Homo sapiens
atttattactcaggaagcccctggtatcaaaaggaaactacaaaagcaggctatgggaccaaagggtaccttataaaaacctcctgaagacagcctccttggtcttttacaagagaaaccaggaggaggaggcccaggaaaaagaggggaagcacaagaaaagaacagaagcagtagtggccacttcacaggcctataaaatccagagtcctggctgggtgcagtggctcacgcctgtaatcccagcactttgggaggccgaggcaggaggatcacttgaggtcaggagtttgagaccagcctggccaacatggtgaaaccctgtctctactaaaaaaaaaaaaattagctgggcgtggtggcagggacctgtaatcccagctactygggaggctgagacaggagaattgcttgaacccaggacgtggaggtttcaatgagccgagattgtgccactgcatttcagcct

SEQ ID NO: 354668 - DNA, 572 bp, Homo sapiens
ggaaaacctatttcaggatattgttcatgaacatttcccaagctcactaacaaggctaacatctaaattcaggaaatgcagagaatccctgcaagataatatacatgatgaccttacccaagacacaaagtcatcagattttccaaggttgaaatgaaagaaaaaatgttaaaggaagctagagaaaatggagcagatcacctacaaagggaactccattaggctgacaatagatctttcaacagaaaccctaaaagccaaaaggcactggaggcttgtattcggcatacttaaataaaagaaattcaaagcaagaatttcatagccagtcaaactaagcttcataagcgaaggaaaaataagattcttttcagaaaagctaatgctaaaggaatttattaccaccacacctgccttagaagaggtcctgaagatagggctaaaagtggaaaaaaaaaaaaaaaaactattaccagccaccacaaatacacacttaagcacacagatgwctgatacaataaagcaaacacacaaacaaatctgcataatgaatagcttataacatgatgata

SEQ ID NO: 354669 - DNA, 611 bp, Homo sapiens
tggggcccctctgttagggcagtgtggaagggaaatgtggggttggagcccccacacagagtccttactggggtactgcctagtggagctgtgagaagatggccaccatcctccaaaccccagaatggtagctccactggcagtttgcaccatgtgcctcgaaaagccgtagactctcaaagccaattaataattaattaggtaaatgtaatggaataaatgcttgtagataatcctgtcatataatttaaaatctaaagttatattaagctaaataattgatagttattaaatgtctgggtcatttccaattttttttaattacaagaaaacactttttctgaaaaaaagaaatgtgttcttattaaaaaatactttttgtctaattcaaaggttatttaaaagttattttaaaaattatgtaaaggtaatcagtgaataagaacaatgtaaagtaagttataaacataaagaggaatttttggcaagaaaggttaaaagaaaaataattttatatgagaaaaaaatcttgtayggtaaatttttgtcctaaaataaaacaactagttatttaagaaagacgaatgtctaggataaaacagtaagttcaa

SEQ ID NO: 354670 - DNA, 586 bp, Homo sapiens
gaaaataatagcatgttatcaggtaaataacaatgtcttaagggtattttaccttgtcactgggctaatttttgtgtaagattcatttttttaaaccttaagaaaaaaccagactattttaaatttttacttgaaatgcatttaattgattgtttataagagtgyattttaatatcattgatacatgttcacttgaaaatatttgagcaacagtaaaaaatacaaatatgagcgaaacatattacctttaattctaccagcatcaacatttgaagaaccactttctggagcactttgctctcactgtgcatgcatcatagggacgttataaataaataattttacaccatagggagagacagattgcaatgcaataatagtagggggcttcagcaccccactttcaatcatggaaagatcatccagacataaaattaataagcaaacactggacgtgaaaatactttaggccaaatggacctaatagccatatactgaacattctatctaatggcaacagaatacacattttattaagtacacacataatattctacagaaaagatcatgttagcctacgagacaa

SEQ ID NO: 354671 - DNA, 673 bp, Homo sapiens
gtcttcaatagtgcctcaaagttatttgtggaaaagcataacgtttatttcaaagagttatggttaaacccacaaagatttgtaggtttctttaagagattattattaaaaagagctaattaacctaaatccttctttaagagattattattaaaaagagctaattaacctaaatccttcttaaacacatcacaaagagctgaaaagtaaaggacactaaacttgccaagctcttaccaagcgttagggattattaggccatttatattctttctgccatttaattctagctatcatttgaggcagatattattacctacattttaaagatgaggaatctgagacttaaataaatgaagtaattctttccaggtaacattgcttttaagtggtagaagcatgataaaaatcctaggcctaactggttccaaaaaccatgctctactctttctattataccaaactgcctttcaggaggtttgctatactatcccatacttagagtaaacaaagacaggttgctttaaragtgaatgtgtctagtgcctagcggcacctcaactaaacttccctaaacggggtctacgattatcccaaatacaaatataatgaacactgcctatagagaatcacatcataatttctcattatatttttagtccgcatcttcaca

SEQ ID NO: 354672 - DNA, 652 bp, Homo sapiens
atattttatatctctgggttttcttgacagtatctagggaaagatctggcaaaaaaataagagctgaagaaatacttattgaaataacatagacataatattgaacttttgccattcacaagtgatagtaactggtgttttaaagaaaaaaaaggttgatataagcagcaagttcctgatttccatggtccccaagctttctgagtatgaggagctattttaaacaccaaaaagattcacacaaccccacctgacagttgtcatcttcagtgtcactgactgaataactatataacaataacactaattcagtaacagctctaagtaattctgttttaaaaatatgtacatttgtataaggcattttattcaagctacagtcaattcttgttgccaataaaaacatatcaacctcttgcaatgactcagatcagttggtggaagataatcactgctcaaatgtgtacagctttggcaaagatatacataaaatttaaatcaattgactgcaataaataattctcaaatacctacgaggcaccgggcactatgacagaccaacaagataaaagatgaatagaatctctgccttcaaagagttcartagagttggaaacaataacccaaaaagtataaatacaacctgccagta

SEQ ID NO: 354673 - DNA, 530 bp, Homo sapiens
aaacccaagggtccaatagtctactgcaccgagatctgaagtccacatggccctctttgcctaccctctacccaatgccttttcccgcgctccctccggctcctcccccttcctgttttcccctccctgggggccgaccatgactgagcttcactatgggacagctccttcccagggtcactrtggcccttctgtcctgttggtcattcaaggggtgaccaggtgggaggaaaacacactcaggatcataacatggatcaaattccacagcatggccctgcctcagagcacacacactctttccttgccacaggccagtcagttcccttttcaaccctccttcctttttctggccaaaataccctggctgatcttcccccagtcaggccactccctcccaggtactcactcttttcctggggacgggctccagccagggattggtagctagcctgctggagaagatgggagtctctctgcatctccttgaaggttcacagatggttcttgctttcagagttgatttgttt

SEQ ID NO: 354674 - DNA, 594 bp, Homo sapiens
ctctgttggcacacttccctacaactagccctcgggagtaggcaccaaattgccaccaagaaagctctgggtgaggggttaagggacaaataatagagattccctagaaccaggagctgaggggaatagggcttcaattaccaagcatggggaggtgctatgcaaatagcgtgcaaattatatgcaaatgaccacaggttactgatgaatcaacaatttgagcttaaaaagaaaaaawtttgtaactggatcatattatatggtgtgaatctcttttctctcttggttttctgccaagtagaaagaaagaaaatttgtggttgactgaccaaaccatgccccacttggtgatagccagcagacacctgtatccgggtgccccagacacgcctcaccagtgctcggtcagtacgactctctgtgcccagggccacatctacctttgactggcatgtcagggcagcaagcctggtgcctggggacctctggccaagaggagtttcgtagacccagcagcctgctgactccagccacgtagaggggagcaaagcatgctgttcctcctggaagggacctgggcagtgccacgcagga

SEQ ID NO: 354675 - DNA, 530 bp, Homo sapiens
tctggctttcacagtgtgtccaggacccttagacaagatgaccctccccacaccagggtcccctcacacactgcagccatgcaaccctccaagcttcacctgccttcaaaagctgagccttggtttccccacctgtaacagcagtgtaggaatacccctcggtgtaggatggttatgagaacataatgagctggcttttggaaagcgtccagcactgatattttatcaaaaaggcaagtaggcagcaccaggccagtgaagcgtgggggtggaaagggaaagagaatrcaaaattatgaaatctgccctgcacagccagggatgctaatgttggtaccaaatcccacaggtaccaagtttaggtgccctccaagatgcccaatgcaaagcttctattttccatgtgactcagggggtgagataatgccacagtaaatgtaaagatcgcctgtggtccttttaccgcttgatcctacttcttttcttcctaagcccctgtcctgggtttctccactggccccttgcacctg

SEQ ID NO: 354676 - DNA, 538 bp, Homo sapiens
ctgtacaaattcacactatcttgctggttctagaaacctaaagccaataatttgctttcttgtgatccagggctggcagttccctcaggtgactggctgatgcaaatgaaagactctcctggaggaaaggaaaatatctttaagccaggcatcagagaattcccagagatacagttttgtttttcttttaatttcagttttcaaggtacatgtgcaggctcgttacaaaggcatattgtgtgatgctgaagtttgggcttctactgattccaycacccagacagtgaacacagtacccaatagaaaagtttttagccctttcccctcttcctcccgccctccttttggagtccctagcatctgtttttcctgtctttatataaatgtgtgcccaagatttagctcccacttataaatgagaacatgcagtatttggttttctgttcctgagttaatttgcttaggataatagcctccagctgtatccgtgttgctgcaaaggacatgatttcattctttttcgtgactgtgtagtatt

SEQ ID NO: 354677 - DNA, 538 bp, Homo sapiens
ctgtacaaattcacactatcttgctggttctagaaacctaaagccaataatttgctttcttgtgatccagggctggcagttccctcaggtgactggctgatgcaaatgaaagactctcctggaggaaaggaaaatatctttaagccaggcatcagagaattcccagagatacagttttgtttttcttttaatttcagttttcaaggtacatgtgcaggctcgttacaaaggcatattgtgtgatgctgaagtttgggcttctactgattccaccacccagacagtgaacacagtacccaatagaaaagtttttagccctttcccctcttcctcccgccctccttttggagtccctagcatctgtttttcctgtctttatataaatgtgtgcccaagatttagctcccacttayaaatgagaacatgcagtatttggttttctgttcctgagttaatttgcttaggataatagcctccagctgtatccgtgttgctgcaaaggacatgatttcattctttttcgtgactgtgtagtatt

SEQ ID NO: 354678 - DNA, 556 bp, Homo sapiens
ccctggctcaagaggcacctcctcttgtcactccagactgtcagcaggcatccaacctgctttctaggtcccaaccccagckggtgcctttgggctgatctcgagtctgcatgggatctctccagtgggggtcggatttacagttccttggtggaaacaggccttcaggcagatgccctgtaccctgcaagcgttcagggttccaggcaagccaagagatactctgaagggaggtgggaggaaaggcgtgggctcaccctgagtccgcctcccatatctccagtatcctccctggccacttccccagtggagctttactggggttctccagggagcgtgacttctccaggaccctgtgtagggtttagtgctgggctgagcaggttcccaaacccccaccccagactcagacactttcatcagatagatcagggaacacagacccgttctgtacgaaggttgaattaggtaggagagctggctgtgaaatagatatggaaaccatgtgactggccttccaaagtgaaacagaagtaattttttgtttatctatgtc

SEQ ID NO: 354679 - DNA, 586 bp, Homo sapiens
cccattacactaatgacctaatcaatttatccagctcttttctttcaagacacagagtgtctgccctcctccctgtagccctgcagactggccctggggtgtcagcccgagtctccttttggggattggtgggcactgatgttytagatggtgagtgatgccacagagcccctcacagcgggattcaaggcaggattcttaggcctgacatcctgccccctccccagggcccctgaagcagactcccctgggcaatgttactgttaaatatttggcccctggagtgtgcccagcacctttgattatatctggtttcctgttctccttggggaggaagaatttctccacaggaagtagtttaatagtctgaaagccttactttcctgctcttgagatccaagtttccagttacaagtggctgagatccttgataagagaggaggcgggaaggaggggaccagagctatgaactgtcactccctcccagccaagagtgagggaacggaagagggaagattcaatccctgactatccaaaccgcaggatggtggaaagacgtggacctctgccaccccccggccctcca

SEQ ID NO: 354680 - DNA, 586 bp, Homo sapiens
ttgtaatgtggtgtgtgtgtgtgtgtgtgtgtgtaactacaaatgtcttcttctcctctggtttgctttttcactctcttaagcatgtcttttggtgaacagaaaatttttatttaaatgaagtctagtttgtcagtctcttactttagggttaatgcttttcattcctgttaaatctttgstcattgtaaggtcacgcagatactgtttttctgttttctcccagaagttttattgttttatgtttcacacatatgtcttcatatgcctggaactgaattttgtatgtggtttgaggtggaggaataaacatttactttttcccatcatatggatgttcaaccgacatcatatgatttattgaaaagatgattgtttccccactgcaatgcgatgatatcttcgttgaaaatcaagtaactatatatatgcatttctggactatattgtctcccatctacccttgcaccagttgttttgttcttcttcaagactgtcttcttcatttagaaccagcttgccaatttctaccagaaaaccaaccaagcaaacaacaaacaaaaagactcctagaatttgggaaagg

SEQ ID NO: 354681 - DNA, 595 bp, Homo sapiens
gcttcatttctattgtatgtattaaggctttatttctaataatatgaatataaatttccttctaagaactgctttagttgtgtctctcatgttttgatatcttgggtctctataaccatttagttcacagaattgtctaatttccattgtgaattcttctgtcctctgtgggtgatttagaagtatgttgtttaatttccagacatttggtgatattcgagttttttgttactggtattttgcttagtttctctatgggcaaaggacatactctgtatgatttcagttatttgagggacgttgtctgtctcgttcctcaatgtataccagtttctagtgcagtgaccagaatatattaggagcttaataaaggggtggtccagttcttgacttcaacatggggcacagcagtgatctgatttgccccctgtgctacaagtgaacctcaaaatctggaaagatttcacacctgaacacatcctgggattttgagattttgattgaaaytgcattgaaactacagattaatataggggagaattgacatctttataatttgaagataatcgacatatttataattttatgtatttca

SEQ ID NO: 354682 - DNA, 538 bp, Homo sapiens
ctgcacattgtaggcactaaggaaataggtgttgactgaatcttccaggccatatttacattacttcagaggccatactccttaagtgacatagtcctccttgggggaaaccttgagcygtggccacttgcactgccttggtcttgctggtggctgctcactgtttcccagcccctggggcactgtggggactgtgcgtctttgccgaggctggtccccatgagttcactcattcctgcacccacacctgctgcctgccagctgctgagctggaggctggggcatagctgtccgagaggcagacacggctgctgcctctcagggctgacttgagatgcctggagctccttaactaaagccatatccaagttccaacgtctcctttctaaaagaagtctccctttgctccctgtccttcattggaactttgagccactttttgctaacacctaaatcctccatcctgatgtgttgaggccaggagggcaggcgctgaccccatcttcctcatctttaagccttcaccagggactggctg

SEQ ID NO: 354683 - DNA, 538 bp, Homo sapiens
ctgcacattgtaggcactaaggaaataggtgttgactgaatcttccaggccatatttacattacttcagaggccatactccttaagtgacatagtcctccttgggggaaaccttgagccgtggccacttgcactgccttggtcttgctggtggctgctcactgtttcccagcccctggggcactgtggggactgtgcgtctttgcygaggctggtccccatgagttcactcattcctgcacccacacctgctgcctgccagctgctgagctggaggctggggcatagctgtccgagaggcagacacggctgctgcctctcagggctgacttgagatgcctggagctccttaactaaagccatatccaagttccaacgtctcctttctaaaagaagtctccctttgctccctgtccttcattggaactttgagccactttttgctaacacctaaatcctccatcctgatgtgttgaggccaggagggcaggcgctgaccccatcttcctcatctttaagccttcaccagggactggctg

SEQ ID NO: 354684 - DNA, 538 bp, Homo sapiens
ctgcacattgtaggcactaaggaaataggtgttgactgaatcttccaggccatatttacattacttcagaggccatactccttaagtgacatagtcctccttgggggaaaccttgagccgtggccacttgcactgccttggtcttgctggtggctgctcactgtttcccagcccctggggcactgtggggactgtgcgtctttgccgaggctggtccccatgagttcactcattcctgcacccacacctgctgcctgccagctgctgagctggaggctggggcatagctgtcygagaggcagacacggctgctgcctctcagggctgacttgagatgcctggagctccttaactaaagccatatccaagttccaacgtctcctttctaaaagaagtctccctttgctccctgtccttcattggaactttgagccactttttgctaacacctaaatcctccatcctgatgtgttgaggccaggagggcaggcgctgaccccatcttcctcatctttaagccttcaccagggactggctg

SEQ ID NO: 354685 - DNA, 566 bp, Homo sapiens
tgcccttttaacagttccttcctgtaccaccttgatccaagccaccaccatttctagcagagattattgtatctacctccctctctcccggcctctgctcttgccctcctgcagtccattctcaacaaagcagccagaggaatcccttcaaaatgtaaggccagttgtgcrgctcctgtttctgtgagggcagggactctgtgtgctcactgctctctgtgctcactgtgtgctcacagcacctagaagagtggctggctcatagcaggaacccagtaaatatttattgggggagggattaaagtcattgagtcctcttctcttttcactcacactcagtggtctagtccatacttttagtcttagcaccttctgcatattggtatctcatattattatcctgcagacataggtatccacacagcattccccatagccacttcaaattcagcctgcccagcactgatctttctactctccacctggctgatttctctcatttgagaacaattattttttgttgtatatgaagaaactttgccacccaagccagaatcactcttcct

SEQ ID NO: 354686 - DNA, 557 bp, Homo sapiens
atcgttgtctaactctgcttcccagggaagaggtgtgagcagccagagtgggcgccacgggcccacctcagtccatcactggggagctgcccgcaaaccccacccatttctttaacagtccccaagggtccctgacactctttccagcctcagaagyccccagggacccaagtagccaattctcatcttccttgagctgtttctcctggaagaacatccacttccgcaaccactactgctggttgtggttattaactactactgcgttaaaaactcaaacccccaaatctgaaggtgtggcctcagggctcgttgcccttgaccctcacccgtcaacagtcgacccctctgccttcacagccttttcctcctctgacattcctgacctccccgtggcctgccttcccctgtctccttggccgagccatcctctgtcaccttcactgtttccactaggttattgaggccttttggtcatgagctcctgccaccaaatcagtgcctgaggctgctgcataacaatctccttccttgattagagcatcttaattatgctc

SEQ ID NO: 354687 - DNA, 497 bp, Homo sapiens
aatgagtgctgattctgacctctggaggcctgacctaatgatcacagtgtcacagctgagtttcctgcctgttagacacaagctgtttaacgtggtcaccaaacatggtgacaggcaaagaaagatgaactatggatatggagaatatcatttatgatgttcatttagggttccctagagtcaaatcaagtctaagactcactggaargaataagaaccaaatcaaacctgttatcacagtgaaacatctctttccaagacaccttataaccaggcataactccaagtcatgtaatctgcaaaacagagataattacacctgccgctctgtgtcgcacagagacagtgtgaggattaattaaataatgactgccaagaacaccgagctcctttgagataaacgctctacaaatgcaatcttagatgattagtcaaaattttattctgtaaatatcaggacagacctgcagcttatgagaccaggttcataaagacca

SEQ ID NO: 354688 - DNA, 593 bp, Homo sapiens
ataaccaaagatacaataatttaacttgctgaggaactagggctattaccaatggttacaaaatataactaggaaaagttatatcttgtagggactacatctcattctagggcaaaacagaaaataatatatttttacactatccattttattttggtctttctgtcatacatgccttcctatattttgaaacaactcctaataagttttcaaattaataattttttaaaaggctcctcaaatcctgcatatactttatagctaaaaaccccaagagtcctcaggagwtgagtgctgtagagcagaggggcaacctctgggaatgacaccctgcatgactctctcctccaagtaagaagttcttttcttctctagaagaaaacttagtataattaagaggcaaggaccaaatctcattcaagaattagtgtacggagcagcaaggacaaattagtttatgaaaggcatgggatctcatcctgcagaatcacaggatggtggctattacaccaccaaaccagtcccttagagctgtccccagtgcttcaggagctcctaatgaatctgatgatagtggtgctaaaataacaatc

SEQ ID NO: 354689 - DNA, 645 bp, Homo sapiens
atgtaaaacagtcctgcatctaaaataaagctcgtttaattatataagacacagaagactaaagcagaaagctttactacctatgaaaagagacgttttaaaatgatgaaactggtcaatttaacagaaacatgtaacagttataaatttgcaggcaccaaatagcatgccctcaaaaacatttaaagtaaaaaaatatataagaataaaaagattgaactacaataatcatgaagtcattgctaatattatcagtaccacacttaatcaacaggcaggtggcataacaaaaatatataggttctgaagtaggctgtcctgagttgtaaaaaacaagcctactcccaaactagctatttgaaggtagacaagtgacttaacttctctgagctttagcttttttatttatagagtgagggtaacttcacctcattatgaggattaaaaataatattatacaggattttcacaagatagctactaaaaatgatagctattattatttccsaataattattcttaataaaacaaggagtttaaaactataaatttgtggtgaccaaataaggcttcagagagggctgaattttgagtcaaacattaaaggagaaacaatattaatatacattccaaaaactctattca

SEQ ID NO: 354690 - DNA, 628 bp, Homo sapiens
tgggtaatttataaagaaaagatatttaattgtttcatattctccaggctttacaggaagcatagtgctgacatctgcttggctcctagcaaggcctcaggaagtttacaatcatggcagaaggcaaaaggggagcaggcatgtcacatggcaaaagcaggagcaagtgacaagagtgggggtgaggtgctacacacttttaaaccaccagacctcacgacaactcagtatccagaagacaacaccatgccatgagggagcctcccccatgacacaacacctcccatcaggccccacctccagcactgaggattacaatttaatatgagatttgsgtaggaacaaatatctaagctatatcaaagacatacatgcagtcaacaaatatgtgaaaaaaatgctctgcgtcacttatcattagagaattgtaagttaaaatcacaatgatataccatctcacactagtcagaatggccattagtaagaaagtcaaaaaataacagatgttggagaggttgcagagaaaagggaacatttatacaccattggtgaaaacgtgaattagttcagtgactgttcaaacagtttagagaattctcaaagaaattagaactaccatttgacccaa

SEQ ID NO: 354691 - DNA, 628 bp, Homo sapiens
tgggtaatttataaagaaaagatatttaattgtttcatattctccaggctttacaggaagcatagtgctgacatctgcttggctcctagcaaggcctcaggaagtttacaatcatggcagaaggcaaaaggggagcaggcatgtcacatggcaaaagcaggagcaagtgacaagagtgggggtgaggtgctacacacttttaaaccaccagacctcacgacaactcagtatccagaagacaacaccatgccatgagggagcctcccccatgacacaacacctcccatcaggccccacctccagcactgaggattacaatttaatatgagatttggrtaggaacaaatatctaagctatatcaaagacatacatgcagtcaacaaatatgtgaaaaaaatgctctgcgtcacttatcattagagaattgtaagttaaaatcacaatgatataccatctcacactagtcagaatggccattagtaagaaagtcaaaaaataacagatgttggagaggttgcagagaaaagggaacatttatacaccattggtgaaaacgtgaattagttcagtgactgttcaaacagtttagagaattctcaaagaaattagaactaccatttgacccaa

SEQ ID NO: 354692 - DNA, 561 bp, Homo sapiens
ggtacctccatcatatcacaggcatacatcaaataartgaatatatttaagaaaacatggatatctttttcacttagactctcatactcaaaatagaaggcaatattctttacctgacaaattgtggacttttttttctagtgaccctttgtgcagaaaagagttaatgtggcaggcctgagcctgtctagccttagaaagtcctgcttgctaggttgacccttagctgacatctgggaacttggctgatacagagtttccaacatggatataaaacttttcttaaaataagaatggcttactgtacctaaaaagtgctacaagcaacgtggtttatgctgaatacttgctttccctttgggattttggaatgtaggtatctgctaggcagaaggtgcctatgtgagccatctccaacgaaaaccttggatgttgaatcgttaatgagcttccttggtagaaaatatttcatatgtgttcccacaacctccttactagaggaaatagatgtgtaaagtgtgactctattggcagaggactcttaaaagctggtgccagatt

SEQ ID NO: 354693 - DNA, 561 bp, Homo sapiens
ggtacctccatcatatcacaggcatacatcaaataaatgaatatatttaagaaaacatggatatctttttcacttagactctcatactcaaaatagaaggcaatattctttacctgacaaattgtggacttttttttctagtgaccctttgtgcagaaaagagttaatgtggcaggcctgagcctgtctagccttagaaagtcctgcttgctaggttgacccttagctgacatctgggaacttggctgatacagagtttccaacatggatataaaacttttcttaaaataagaatggcttactgtacctaaaaagtgctacaagcaacgtggtttatgctgaatacttgctttccctttgggattttggaatgtaggtatctgctaggcagaaggtgcctatgtgagccatctccaacgaaaaccttggatgttgaatckttaatgagcttccttggtagaaaatatttcatatgtgttcccacaacctccttactagaggaaatagatgtgtaaagtgtgactctattggcagaggactcttaaaagctggtgccagatt

SEQ ID NO: 354694 - DNA, 594 bp, Homo sapiens
ggacctactcctaagctgacctgttctagtttttaaaaatggatgtgaaattttgcttagaatcctagaagttaaaaatgtgacatcctacagaatgccacttcatacrggcaagtctggtgcccttaaagttagttttaccctgagaggaaaacttagaaatgaatacaagttcaagtttgctcaatttcttgttttgcttaaaatttgcctacataacacataaattcatcaaactcctttcctagtgacaatacttcattagattactttagtgagtattcaggagattttcatcttatgagtcataaaattcttttattccccaaagaatttctggtgtctgattggaatttcacgtctttgtagttttagctggactctttgaagcagttacttcctaaatgactgtattcctgaggcctgcatgtaatacctggggagctgggtcacaggttgactcctgtttttcaagaaaattgaaaaatcaatctctttcattgctttagtcttagtaattttattcagaaattttcttaaactttttaacctcctcctgtcatgacagagaggttttcacttgctgcctataca

SEQ ID NO: 354695 - DNA, 594 bp, Homo sapiens
ggacctactcctaagctgacctgttctagtttttaaaaatggatgtgaaattttgcttagaatcctagaagttaaaaatgtgacatcctacagaatgccacttcatacaggcaagtctggtgcccttaaagttagttttaccctgagaggaaaacttagaaatgaatacaagttcaagtttgctcaatttcttgttttgcttaaaatttgcctacataacacataaattcatcaaactcctttcctagtgacaatacttcattagattactttagtgagtattcaggagattttcatcttatgagtcataaaattcttttattccccaaagaatttcyggtgtctgattggaatttcacgtctttgtagttttagctggactctttgaagcagttacttcctaaatgactgtattcctgaggcctgcatgtaatacctggggagctgggtcacaggttgactcctgtttttcaagaaaattgaaaaatcaatctctttcattgctttagtcttagtaattttattcagaaattttcttaaactttttaacctcctcctgtcatgacagagaggttttcacttgctgcctataca

SEQ ID NO: 354696 - DNA, 583 bp, Homo sapiens
agattattaaaagagataaagttcrattgtccttgtcttgactcctgctaccagcactctccttggtcctgacaaagatttccccaaaccttggcttttcatgacttcccaacaaacgtggtgaataatgtgttctatacacctgttctctgtctccaggctaacctacgtggtctccagcttttcttcctaatgtaatcaatcatttgctcatgttccgtgtgacatgttatatatttacaattaaaggttctagactaatttcatgaagaatctggaatcttccttgagatctttcttggataaattcacctttctttgattccttagctgccattatcattagtgccaaggatggcaaatacacaatgtacctgttgccagcacattcttctgagtccacagcagacattactaattgaacacagtgcattttctcatgaacagggacagagtctcagagtcactttgaacacattgtgcaggcaatgattctcattgaattggagcagtgcatcggggaaaatccattagccatctgtctacaccatttgacttgttacctctcttggacttgtgaacg

SEQ ID NO: 354697 - DNA, 207 bp, Homo sapiens
tgttcagacttccaaaaaactaaaaatgtttactactaaggccttcatggaaagaaataccaaaggatatattttagcaggaacaaaatttaacccagaaaaaaagaatgaagtgcaagaagcattgatgaraaaagaaacatatggagaaatttaggtaagcattgttggtggaaatgcaatgccctatcagcaataatacagatg

SEQ ID NO: 354698 - DNA, 578 bp, Homo sapiens
tatcattcttgcctgtgtacatacatctcttctccactgctcagaacacaggaagacttaccctggttgtgattctatctcctcgttctaaacagagtcctggaatttgaaaaacacctatccattaggtactgcaggaatctttgtgaycccatgtaacaatgtatagatgtgttgcttaatgatgggagtacgtctgaagaagtctctcattaggtgattttgtcattgtgtgaacattggagagcatatacaaacctagatgggatagcctactacacacctgggctctgtggtatagcctattgcttttaggctactaacctccacaacatgttaccgtactgaacactgtaggcagttgtaactggttaagtctttatgtatctgaacagatctaaacatagaaaaggtaatgcattgcactaagacgttacaatggctaagatgtcactaggtgtaggactttttcagatccattataatattacggtaccaccatcatatatgcagtccatagttgacctaactgttgttacttagcatgtaatcctttgtgacacttatgataggaatat

SEQ ID NO: 354699 - DNA, 599 bp, Homo sapiens
acatctgttcagggtcactgtcagccagtaagacagagacctgtgagcttgccagttgattgcgtgggrcagctagaggcgcccaagcagcagagaaagtgaggaggagaagaaggaggagcagcagcagcccacagcctgtcaggccctttctcaccacgtttccttccccgcagtggccaccattggattctgtttagctcatggtcgggaactcggccccttgaaaatgaggcactgttccctgccaggtacagagagtctgagaggaaagctctacatcttcgaaggcaatgtgagcatcaaaactgaatgtcttttaattaacttaggtccacatttctgccagacttctcaacttttttttaacattctctctcttgacctgcctcccaaggaccctcatgttctcctgtccatttcatccctctccccaaggagaggactggacaccccagcaacattccagatctttctatctctttgcaagctgctgaaaagcagctgttcggacaacagtttctgaggtcctgtggaatggaaggcaacgcctacccaatgctcagggacaaatttaaaaaataataacaataacagct

SEQ ID NO: 354700 - DNA, 499 bp, Homo sapiens
ggctgcaaattttccaaacttctatgctctgtttaccttttaaatacaagttctaggccaggcgcggtggctaacgcctgtaatcccagcagtttgggaggccgaggcgggtggatcacgaggtcaggagatcgagaccttcctggttaacacggtgaaacctcgtctctactaaaaatacaaaaacttagccrggcgcagtggcaggtgcctgtaatcccagctactcaggaggctgaggcaggagaatggcatgaacacaggaggcagagcttgcagtgagccaagatcatgccattgcactctggcctaggcaaaaagtaagactctgtctcaaaaaaaaaaaaaaaatacaagttctagtttcaggtcatttttaattttttgcttatgcaaatgagcataggcttttagaagcagccaggcccatcgtgaccacttttctgcttagaaatttctcccaccggataccataaataatctctctcaagttcaaagt

SEQ ID NO: 354701 - DNA, 499 bp, Homo sapiens
ggctgcaaattttccaaacttctatgctctgtttaccttttaaatacaagttctaggccaggcgcggtggctaacgcctgtaatcccagcagtttgggaggccgaggcgggtggatcacgaggtcaggagatcgagaccttcctggttaacacggtgaaacctcgtctctactaaaaatacaaaaacttagccaggcgcagtggcaggtgcctgtaatcccagctactcaggaggctgaggcaggagaatggcatgaacacaggaggcagagcttgcagtgagccaagatcatgccattgcactctggcctaggcaaaaagtaagactctgtctcaaaaaaaaaaaaaaaatacaagttctagtttcaggtcatttttaattttttgcttatgcaaatgagcataggcttttagaagcagccaggcccatcgtgaccacttttctgcttagaaatttctcccaccrgataccataaataatctctctcaagttcaaagt

SEQ ID NO: 354702 - DNA, 599 bp, Homo sapiens
gatgggttaaaatgctcatcttaatattatgctccaaaacttatgtatgtattacattatttgtattaaatattaccttataaattatactaatcctgtataaagaaaagtgagattcctgagtcctcctccctgcctgctgtaatcgagtgacttgcccacctccagcctcaccaatgtatgtgaaaggagcagttgtaccagggaaactctagactcagggacagcaagagattggagaaaaactacatcaccacagaggaaaacaataacaaactgtttcccaaaatagttgtaccagtttatactcctgtcaaagtaaaaacaatcaaacatgtggagtcacacaaaaaagaaaaaaaaaaggaggaggaagagaaagaggaggaggaagagaaagagaagaggaaggaggagaggaaggaggaccgcttctaccatgaaacccatgggtcagcaaacttccatcagacataattgacagtttgatrtttccctgttactggaactggacagccaaggaccagtaggatcttggggaacatctcctcatagaagacgtgggcctatgcaaattgaaaaggcactcaaagaaacac

SEQ ID NO: 354703 - DNA, 584 bp, Homo sapiens
tgctgttttagacattataaattcatttcttcttatgaaagattaagatttagtactyatacctacataatctcccctccattcccctttccaatcttttaatactcaggttatttttaatttctttaaaacctaattgggtaatgtctgcctcttgaactagaatgtaagtaaaaataaaagcagggagtttgtttcatttaccattgtactggcaacaaactaaaaaagtgcctgctacataaaaggtgttccaaaaaaactatctcataaatgaaaaatcgaatgcatgaatatctagcttaagtagatatttagtagcttaagataataccattcagctccccactctgtaagacagccttagcaccctcatcttccctccacctatcctttgccccactccagtgaccaaccataattaagtcttctgtgcttttctatagattctaagagctgaaaactaataaacattatttgtgttattctgccaaatccttactgcaacaagtaatcctaggagaccgaaaatcaaattgattttccattttttatacagcaacacttgttaaaaggcatgccac

SEQ ID NO: 354704 - DNA, 550 bp, Homo sapiens
tctaaccttgttccctactcttatgcctcctagtactccaaagacaattactcacctaccattccgacagttattttgattaatcttctacacatgtctatatccagaaacaaaatataccattttaaatgttcagaattttatataaatgacattgcattgtaggtatttttttggcaacttattttttcacattattcttacctctggctttcttggtaacagtatcatcttattttataaacaaagtatcttttcaartatttctgagaatattaactagagagttgttttattttagtttttctatgattccctaaaatatctctgctccttctgggaaattgttctctttatcttgatttttaaatttcaagctcttagtttccttcatctgtctttggggatctttgatcaacagttcctatttaaacatggaggccaaggtcagttatcctacacatctgatggaggttttctctgccattagatgtagtatgggtttgtatccttagcaagcctttcctctgaatataaaagctgcctggga

SEQ ID NO: 354705 - DNA, 238 bp, Homo sapiens
atagagcaatcaagagagcaaagtttactgattttggtgattgcrgtacatgcagggcagtgaagaagggcaggatcacattattactaggtttccagcttgtgtgactagctgaatcatgctagagatacatttttacagagaaaataacaaaatcagtttcttgtggatctaggagacaaaggaatatgtgggctcagaaatgagagccaagctcaagatgcagattggaaagtca

SEQ ID NO: 354706 - DNA, 610 bp, Homo sapiens
aagaaaatattttatacttactgggcctatttcatgaaagggctaacaatcataaaaatgagttccaagttaaaatttaaaatttaaatttaaaaagtttaaaagttgcaaattttccaacattttctgtgatgacaagcatctgccagtagtgtgctatttaaaaattatctttgaaaaatacattcaatccattcctttcaggtaaaaatgccatctcaacaatgaataattgcygctgctttttttttttttaaagaaaatcagatctggagaaaatattttgaacatgaatgtttggaactgtttccattgtgtgattttttattgaagaaaaagatgtttgtgtcttaccttaaagaatctcatgtttgggccttaccttaaagaatcttatgtttgcgtcttaccttaaagaatctttcatagcttcatgctcaaaaaacttgagatcagaattttaaaacctggttttaatggtgttcaatggcatttgaaaatttttcaagtatttaaaaaatacctttgaataattgtcagtcatacttattgacatctgagaatatgaagatctgctagccaaaattccacatacaccattgtacgccag

SEQ ID NO: 354707 - DNA, 575 bp, Homo sapiens
tggggttattttgtttggagatagctgtctatgtttattttgggggtgctaaagggagaaagctgatatctcctactctgccattgtggttacatccctattattcatttattcttttaaacaccaattcaacacttgctctaatggactgggcattgagtatatatggtacagcatagactcaggcccttccttaattaagtgagtttttaaaataagtttacaaacaggagtacgacattattggcactagcaaatctaatcatgtaacccctctgcccagagtttttccaagggcttctaattgactatgggatgaaatatcmctccctttgcatgcaatcaaaggctttcatgacctagacctttctctgtctatgttcaatttctctacttcccacccccatctttagcaattggtattttagaaaacgctaaactaattccccagaatgcattgtgctgttattgttgtttcgtgcccctacatatggggtgtcctcccttggaatatcctttttttccccataagatagacatggggtttctttctactagaattatatgccccttgt

SEQ ID NO: 354708 - DNA, 574 bp, Homo sapiens
tcctggttaacagtcatgaactctgtggtatggaattcaatgcaataggtattgagaaaaggcagggaggcatgttgttgctggagtagtctgaaaaggttttgggaagaaattgaacactgacctggaccatgaaagatgaataaagtctgcacattgacacaggtagaagaaaggcagatagaatttccagagcaggacatggcctaagcagagaaagagctgcctcaaattttcactacgtgagctgacatgcacagataatagcgggatcccattagaatgaaccacatctcagggtctagctgcaacaccagagagattttatttcttgtctgcctttgactatgaccagttttgtctataattattgcaaatggttacaatctgtttttatggaaaccaatttaagtattagatatttgttaatctctatttaattttctagaatatgttactaattaccatratgtttagaatattacagcaacaaatatctattatctcacgtcatttataagggtcaggaatccaggagcagtgtggctggctggttctggctctgggtccctga

SEQ ID NO: 354709 - DNA, 584 bp, Homo sapiens
ttccagagcaatatagtgccagaaatttgggaattgtttttctttagccaacatatttctttgtccaaggaacaggacagaaactcacatctcccttgtgccctggctttagcaattttctccgtaattggtcccatgtttcccagcaagcttatctttcagcccaccctttcttggtatctttgtgcaccctccactcccaccctataaaatgcttcctttctccaaatgataactgtcctgcccttagttcctytttctgtcttgtaaactctgtctccttaggctttgactgagtataaatggattcatttgattatgcttttatttttgttataatttttgggttttcttgttccacagagggacagggagaaactctgggcttgtagttgagctgaataagaagtagtgccttaagtccagttaactccttaccagtgatatggcaggtcttcattcatctacagttaaatacgtgatatggtgagaatttatcttcttatggacattgcatagtctggtctatataagggatgcatagttcccctgtgactttgagccttctctctaaataataaatc

SEQ ID NO: 354710 - DNA, 546 bp, Homo sapiens
tcaggactcctaacctgtcctctacatctttgacactggcagccccctgatgtgccccaacacttttacaggtatatcattgcttaggaaaaggttgggaaactttgctctgtgctgttatggtctagctttttctcataacacggttccagacagtagttagtaatcaagccaaaccagctaatcccacattgtggcaggctgcgtggttaggtggattctaacgcttcccaggtgtggctctgctggccttcaaaatacccacttgcctatatccccagggtaaagaagaatttgtactgattggtgagagaatgatattctgtttaccttaacacagtgggtcctaaaccaggwtgatcatcataatcacttcagatattccttaattatgtagattctaaagcccactccaagaattggtcaatttaaaagctccagggctaatttggaagctcatccaggttacaaaccccagtgcagtgaatatgcccatgggtgctgggagcagaagacttgggtttaaattctcatctgccacagtgt

SEQ ID NO: 354711 - DNA, 527 bp, Homo sapiens
caactactgcaaaacagggaatttagacttgtgtggccacagcgggcatgatgaaaagtggatgaatttgggatattgttggaggcaagggtccttaataaatatttattgaattaatgagtatataataagcattaaacaattagcacagttattggtccacagcaagtacccactaagtggtggttactcttactatcatcatcattgtctcttctacctcctgagaggtgaaattacagtattaacactcataaatcatcagcttcccactctgcacgttatcctccatcccttcagctctgtgtcttactctacagaggctactctcttaaagtgacccccaagctgttgaattcagtgtaattttctaatttttcattccctgatgcctgtctgccccctttgacttcctactccttgcaatgccttgacgcctgagatgatatactctcttaactyttcctgtacatctcttggggctccttcgctgtggcttctttttctccttttgcccttccagtata

SEQ ID NO: 354712 - DNA, 568 bp, Homo sapiens
aatagccaatagtttcttgataacacaaaagtaataaatatcagcttttgcaatcatgtactctttgtgttgtcaaaaaaatgagattggctaacacagaaaaggtggatttggtggatttccttgtgcattctgtgaccaaaacatttaagggaacagaagttcaaacttaacccctgcaccactgattcctacctacacacatacaagttgatatttcacatttatgctgtagtttcactgcaccactggagggaaaatgctggtcagtttcttgagacaccatttgcatgttaatgtctggttgacttttagtaaatatyggcaagaaaataattgccgtcgtttgctgaccacttctcacaggagaggcgcaatgccaaaggccacgtacccatcctctcctctcctctccaccacactgatgctaaggaggatgcttatctcactgagccattatgaggattaggtgagctcatcataatctgcaatcaactttagctaatattaactaagttgcatatgctattttctttaatccccctgataatctcctgattaataaatt

SEQ ID NO: 354713 - DNA, 554 bp, Homo sapiens
ggaccacattatgggcagagcactggttctttagtagagattgtagatgggcagctggccttataaggggcttctgatgtttgttcagtgtagcacccagcagcatctagctgacagggcaagaataggcaaacttaccatgtttgtgtgtgtcaaaacagtccccattatctagttagtttttttctatattttataacaatattatttttatcattataaaattgaagtatctttattgaaatacatttggaaactaaagaaaagcacaaataataaactcttattggattttaaaatcayatcttaaagaagtttaatccattcatatttattgtcacaaatgataggcttgtatcactctaattttattttacactttttacattttatgcttactttacatttctttttgccatatggaatatttttctttgctcccctcagtaatttaaaaacttttaaccctatttttattcagtatagttactgcatatgtagcccagtgtctctgggttttggggtacgcactgtgaagaagtacccacctgtaa

SEQ ID NO: 354714 - DNA, 363 bp, Homo sapiens
aaaatgtagagcttcttggtttatagtgaaatggacttgactccggtaggaaaaccaaggaccttggttatcatgttgcttagacattttggatgatgttacactcagcatgcatcctaytaatatttggagctatatttcctttttctaattcttaatatttaatcatttttcaaacagaaaaacatagcctgtattcctactgaatttaccagggagaaattcttttaaagacacagtagtttattggtagaatttgttggatatcctgcattcaccttcaaaatggtgcttatatgtgcacatctcatgtgtcattaatcgattttaatactccatgactaacaagttcttctagaaacc

SEQ ID NO: 354715 - DNA, 574 bp, Homo sapiens
caatttggaagtctcattaaaaaaatgaaaacaatataaccctattatacttaggttagtactttggatatagaggtactcaataaagcttgttgtattcaactctgaagttgaggcaaatcataaatgtgattggatattgaatatagaagattgaatggattttcaacatttaaaataccatctgatcttttttggcatctggcacaactttccataagtcttcatttctttttgttggttctactctgcttcctcaccacaactctagaccgttagcccttcctcagtctctgggaaggcctgaaacataccctgcatggatcctggtggggctgttgtgctggcagctgcctggctcacctcaycagccctggaggggcccacacaccctccccagagtggctcctgggaagcctgcacattctcctgccttttagtgctattgggctttttcttttaagatgattcttctatgtctattctcctaatcaatgtactctagaacacaggagtcaaggtagtataacagtttaaagtgtggactttggagatctgagcttgaattctaact

SEQ ID NO: 354716 - DNA, 193 bp, Homo sapiens
actctatccccttatcaatactagattgtgaattccacaatcttgtagaatttttttgccaatcattaacaaagtttactgactgaacaraagagtgcaaaacaactcctgctacagcagccatagctgtgactgcaattaatcccataatcactgcaattaaagtaaaaatgaatcttttggatctatttaa

SEQ ID NO: 354717 - DNA, 193 bp, Homo sapiens
actctatccccttatcaatactagattgtgaattccacaatcttgtagaatttttttgccaatcattaacaaagtttactgactgaacaaaagagtgcaaaacaactcctgctacagcagccrtagctgtgactgcaattaatcccataatcactgcaattaaagtaaaaatgaatcttttggatctatttaa

SEQ ID NO: 354718 - DNA, 558 bp, Homo sapiens
cttgtgtatttgtgttgcatgtctaaggtgtcattataataaggtgtcattatccttaggaatgagaaaaccaagataattcaagcaagttctctacagtcaaacaactggaaaatggcagagggagaatttgaatgcaggactgtccgatactaaagctcatgtccttttcatatggcatacgatgggccaagatcaggtagataaatggccttttagtagagcacaagcccacagactagttatcctaatcttgtggtagtgtaattgagaagctgtgactcctaattggtattttataacctagggcgagtgcagtaataagacgctgtgtgttagagcaagaaaggttacctggatctcaggtgtaggttggggagatgtggctggtgagaaagcagttttggtaggcatataaggagtttcaaggagcagctgcaggcatgggcttcccaggacatgtcaggagctccgtcacaaataggctgaccagtgctgcagtgtgggggaactgcaagagacatgagaagctgmccacggagactccctaactgatga

SEQ ID NO: 354719 - DNA, 559 bp, Homo sapiens
ttaggagctttatttcaatgcattcattaaaaatactttaagcttaattattgcagccttttacttatgtgtaagtaaagtattatgtgtatttgggtattaaaagtcactgttctctttcttgggaattatatgttttcataaatcattttttggtgttgtcctcctagtatgctaaaggagaccttgattgtaaaaggttaaattgaagatgaagtagaataaaccatctagggtttctgctgtgtaaacttggtgtaagtgttgagtcagctgcctttactgttgagtggaatctgcagagcctgttgctctgtagcctgaatttgttcccagtgtctctggttccctattggtttatggccaatgactaatgctttacccacgagtcattaaacccattctgcacttttctggttccctaatcttcttggaattcatccttgtgtccagtggtccaatgctctaacttggtatttggatgactgagtgaacagaaatggcaataaaaatgtatatgtgatataacagytcaaaatgcaattccctttagagaagt

SEQ ID NO: 354720 - DNA, 588 bp, Homo sapiens
ccaggagctgatacttgtcacaattccatttcagaaaaatttttctaacatgggagacctcattgtcgagatatttctttgcatcagttctatcttatattttcttggctagcaaggccaatccatgaagtcagaccccatcgtagagctgaggtaggagaagaaaacccagaggataactgggttaccttaggattttactctatcaagttatatttcaagagatgtgatttaacasttaatatgtctccaaatccatgtaataagaaattatatttttgactgcatttgctactaatatttttaatgtttcatgtctagtatttccccaatagaatatcttaaatattttgattactttctattacacactctattatttgctgcattaaaaacccaaacaatgttaagtcatttcaatgtaatttaattaatatatatacatatataaagatacttaggtaccatgagaattcctgctttcaaagattcaaagagttgaggatggtagaatattctaagttaacttaatacagcacaaaacaggcagaatagattacaggataaatttttaccaaaagttgaaaa

SEQ ID NO: 354721 - DNA, 588 bp, Homo sapiens
ccaggagctgatacttgtcacaattccatttcagaaaaatttttctaacatgggagacctcattgtcgagatatttctttgcatcagttctatcttatattttcttggctagcaaggccaatccatgaagtcagaccccatcgtagagctgaggtaggagaagaaaacccagaggataactgggttaccttaggattttactctatcaagttatatttcaagagatgtgatttaacagttaatatgtctccaaatccatgtaataagaaattatatttttgactgcatttgctactaatatttttaatgtttcatgtctagtatttccccaatagaatatcttaaatattttgattactttctattacacactctattatttgctgcattaaaaacccaaacaatgttaagtcatttcaatgtaatttaattaatatatatacatatataaagatacttaggtaccatgagaattcctgctttcaaagattcraagagttgaggatggtagaatattctaagttaacttaatacagcacaaaacaggcagaatagattacaggataaatttttaccaaaagttgaaaa

SEQ ID NO: 354722 - DNA, 481 bp, Homo sapiens
attcaattggttattagctcttcaattccttggagtgccagtccaggagacaggattgctcaattattactcctgccatatattaagggtggaaatagtgaaataaaaakaataggagggcttggaagcactgatccaacaggaaaggctgcatattgggcaagtcaggtctcagagaacagacctgtgtgtaaggccattattcaaggaaaacagtttgaagggttggtagacactggagcagatgtctctatcattgctttaaatcagtggccaaaaaattggcctaaacaaaaggctgttacaggacttgtcggcataggcacagcctcagaagtgtatcaaagtactgagattttacattgcttagggccagataatcaagaaagtactgttcagccaatgattacttcaattcctcttaatctgtggggtcgagatttattacaacaatggggtgcggaaatcaccatgcccactc

SEQ ID NO: 354723 - DNA, 564 bp, Homo sapiens
aaaactggaggctttacatttattagcaaatgaacagttagaaaagggtcatattgagccttcgttctcaccttggaattytcctgtgtttgtaattcagaagaaatcaggcaaatggcgtatgttaactgacttaagggctgtaaacgccataattcaacccatggggcctctccaacctgggttgccctctccggccatgatcccaaaagattggcctttaattataattgatctaaaggattgcttttttaccatccctctggcagagcaggattgtgaaaaatttgcctttactataccagccataaataataaagaaccagccaccaggtttcagtggaaagtgttacctcagggaatgcttaatagtccaactatttgtcagacttttgtaggtcgagctcttcaaccagttagagaaaagttttcagactgttatattattcattatattgatgatattttatgtgctgcagaaacgaaagataaattaattgactgttatacatttctgcaagcagaggttgccaatgcaggactggcaatagcatctgataagat

SEQ ID NO: 354724 - DNA, 564 bp, Homo sapiens
aaaactggaggctttacatttattagcaaatgaacagttagaaaagggtcatattgagccttcgttctcaccttggaattttcctgtgtttgtaattcagaagaaatcaggcaaatggcgtatgttaactgacttaagggctgtaaacgccataattcaacccatggggcctctccaaccygggttgccctctccggccatgatcccaaaagattggcctttaattataattgatctaaaggattgcttttttaccatccctctggcagagcaggattgtgaaaaatttgcctttactataccagccataaataataaagaaccagccaccaggtttcagtggaaagtgttacctcagggaatgcttaatagtccaactatttgtcagacttttgtaggtcgagctcttcaaccagttagagaaaagttttcagactgttatattattcattatattgatgatattttatgtgctgcagaaacgaaagataaattaattgactgttatacatttctgcaagcagaggttgccaatgcaggactggcaatagcatctgataagat

SEQ ID NO: 354725 - DNA, 564 bp, Homo sapiens
aaaactggaggctttacatttattagcaaatgaacagttagaaaagggtcatattgagccttcgttctcaccttggaattttcctgtgtttgtaattcagaagaaatcaggcaaatggcgtatgttaactgacttaagggctgtaaacgccataattcaacccatggggcctctccaacctgggttgccctctccggccatgatcccaaaagattggcctttaattataattgatctaaaggattgcttttttaccatccctctggcagagcaggattgtgaaaaatttgcctttactataccagccataaataataaagaaccagccaccaggtttcagtggaaagtgttacctcagggaatgcttaatagtccaactatttgtcagacttttgtaggtcgagctcttcaaccagttagagaaaagttttcagactgttatattattcattatattgatgatattttatgtgctgcagaaacgaaagataaattaattgactgttatacatttctgcaagcagaggttgccaatgcwggactggcaatagcatctgataagat

SEQ ID NO: 354726 - DNA, 586 bp, Homo sapiens
aatgcttaatagtccaactatttgtcagacttttgtaggtcgagctcttcaaccagttagagaaaagttttcagactgttatattattcattatattgatgatattttatgtgctgcagaaacgaaagataaattaattgactgttatacatttctgcaagcagaggttgccaatgcaggactggcaatagcatctgataagatccaaacctctactccttttcattatttagggatrcagatagaaaatagaaaaattagccacaaaaaatagaaataagaaaagacacattaaaaacactaaatgattttcaaaaattactaggagatattaattggattcggccaactctaggcattcctacttatgccatgtcaaatttgttctctatcttaagaggagactcagacttaaatagttaaccccagaggcaacaaaagaaattaaattagtggaagaaaaaattcagtcagcgcaaataaatagaatagatcccttagccccatccaacttttgatttttgccactgcacattctccaacaggcatcattattcaaaatactgatcttgtggagtggtcattc

SEQ ID NO: 354727 - DNA, 534 bp, Homo sapiens
tggcatgttggaggaaatgcaagcaggccagtgtggctggaacagagagaacgaggagagaatagcaaggacacagaggacatgcagggccttgaaaatcatagtaagggtttttatttagagtgaattaggggagccattacagagtcttgaccagagaagtggcatactctgacttacattgtaaaaggattattctggctgctgtattgagaatagactgaatggagaggccacagtggggtatggtgggtaggtggagataaaagcaggaagatcagttaggaaactattacagatgatggtgacccaggccaggaaagtagcagtagcaattgtgagaatgtggagttgtggatatatttgcrgatagaaacaataagattggcagctacattagatgtagggtataaaagaaaggagcctcagtcttcaaggttttgaacctgaatagctggaaagatgaactgaagactaaaagagaagcaagcttggaatcgatgaccagaagttccatttgggacatgttaaatc

SEQ ID NO: 354728 - DNA, 630 bp, Homo sapiens
gtggataccaaaatctgtgatgctcaaattccttacgtaaactggtatagtggttgcatataacctgaacatcttcctgtatactttaaatcatctatgggttatatgtaatacctaatatgatgtaaatgctgtataaatagctgttgcactgtattatttagggaataatgacaaggaaaaaagtctgtacatgtttggtatagatgaaactatgctgggcccagctccattacactctgtggtttgttgaatctgcagatgtggaacctgcagatatggaacctgcagatatggagggctgactgtattagttagaaaacagttaatttaaaacatatttgtgttcgcacagttatttatacctggattctgtaggtgtgtttcttggtttactcaacagtgcatcctcactgggggtttataatctccctccaactaaggacacctggaaccagagagttgctcctccttttgattcttcacatctttgatgtcatcctcttctctcctgaacaagatgtcctcttcttgaatcaaaggtgrcctctcttcactgactatgagagcttagactctgaatttacttaatggattcttaactgcaaaaatgccattactactacaaac

SEQ ID NO: 354729 - DNA, 547 bp, Homo sapiens
acatccttttctgtcattttgacattgayagcatttgggatgatgtcaattctgcacacacaacgtacaaaacatctactaaataaggcaatagagcttatgctgctataatatttatgttaatgaaggtactgtacacctacagcagagatgaagctaaaccgcaagctcataatacataaatgaatcttagatttggggatttagacattgaaagaattgcagtccttccctgggctaacggtatctgtaacaactcattctgaataacatcctagggaagaggaaagggaataactggataatcagaaaccaagaatttttaatgtgtatatgcataaatttatgaatactaactgaaactctcagttaaaagacagctacaactgtgcacatattgagccaatttttaactggaccattggcccttgatggaaatgattaaagtatctttgagagctgttgcacggatcagcaacagggtgttttccacagtaaaggggagaactagaccacattctgccccggggaatgatacgtggcagat

SEQ ID NO: 354730 - DNA, 465 bp, Homo sapiens
aattttgatttactgtatgattttcttctttttaccacatttgagtttggtttttgtcactaatttcttttatgtggtttccaaggcaatacatatttttgtaatgaatgtttttaaaacacctcttctattttccattagagctatctacagaacaatatcctcttatttgcctagcaaacatattttattgtggattgtttgtgtttttccattttaacctacttctttatacaatcaaacttacaaaacgccctgttttatataatgtgagaaataaaatactgagtgttggaaaggtccactcctggtstaatgctctatagatcagcacatctcagctgctcttccccacatgtgctggcaagattcactagggaaactccagcatttactcagtgagccagtaaatgaaatgcttccttaaaaatatccagattacttagataacctagaatgttgcca

SEQ ID NO: 354731 - DNA, 458 bp, Homo sapiens
cagaaaaacaattctggtaacataacaaaacaaggttctttaacacccccaaaktatcacaccagctcaccaccaatggacccaaaccaagaagaaatatctgaattaccagaaaaaataattcagaaggtcaattattaagctaatcaaggaggcaccagagaaaagtgaagtccaatttaatgaatacaacatatgaagggaaaaatcttcagtaaaatagatagcataagtgaaaaacaatcacaacttttggagaggagggacacacttagagaaatgcaaaatacactggaaagtctcaacagtagaatggaacaagtagaagaaagaacttcagggattgaagacaaggcttttgaattaactcactgcaacaaagtcaaagaagaaagaattttttaaaaaatgagctaagtctccaagaagttatgttaaatgacaaaacctaagattag

SEQ ID NO: 354732 - DNA, 480 bp, Homo sapiens
cctctgtctcagaggcttgcaggcctgtgactgaagaggtgcagctcccagtccccctcactyagcactgtcagttggcggaagttaagagtacaaaggatcttggtggatggctcagagttcctgcagctaagttatggccagattaaggcctttagattgagtcacaaatgtgagagagattctggaagtagaggaaggcaggtttagaaagaaaaagtggttccttatgagctgatctaatcacaaatgagcaaagaaagctcctggagcctaggcgacatgctggctgagtaaatgaggaagaggattttcaccaaataaactgtctccacctaccactcctcaattacccttaactcttcggggctagcatggtaatgatgcatttagttcccaagacctgtaatggaaaagaagaaggcaaactggttaaaacaaataatgactcacgtgactaaaatgtctagcagtagagag

SEQ ID NO: 354733 - DNA, 580 bp, Homo sapiens
tgtggtgaattggtttttttgatgtgctgctggatttcacttgctaatattttgttgaggatttttaaatctatattcattggagatattggcgtgaagttttccttttttattgtgtttctgtcagattttgatatcagaataatgctagcctcctagaatgagttagggaggagtccttccttctcaatttttttggaatagtttcagtaggattggtatcagctcttctttatacatcagtagcaatcagctgtggacccatctggtccagggctctttggggttggtatgtttttttattactgatttaatcttggaactttttattggtctgttcaggatttcagtttcttccttgttcaaccttgggaggttgtatgtttccaggaatttatccatttactctaggttttctagtttgtgtgcataggagtgtttattatagtytctgagggtttttaaaaattttttgtggggttggtggtaatgttccctttgtcatttctgactatgtttatttctattttttattagcctacctagttgtctctcaatcttatttattcttttaagggac

SEQ ID NO: 354734 - DNA, 572 bp, Homo sapiens
caaatattatactatttaatcctcataaacatcatgcaggatctgtaccgttagcctcattttaccctggagaaaagcaagactcctaaaagttatagaacttgtcaagagtcacccagccagtgaacactgactttagtggaaggcagttagaaaggcaggattccaggtcattttttttccctcttagttagacctatgctggttttgctgtgcttgtgatgttatgaaggaccacaaacccaaactcctacagaatccaggcaggtaatgtaaaagagggagggagctgcgaagccaactgttagacaagtagagactgtggggaactgaggggcagggaacatgccctttctgaagaagtgagctgctccctctccagccacacatgctgtgccaagcaggagtgccagctcmgtgtggctattgcccgtgatattcccaaagaagcagaaatttgaatttaaaagtggatctgacggtgaagtatcctgatttttattgttaaatagtttaaaattagtaaaaattttgtgtaggcctaactgaacacattgtgggtttagtttgca

SEQ ID NO: 354735 - DNA, 561 bp, Homo sapiens
caccttctccaaggtgagaagaatctctccattccctgggacctcacagtgccttgcacctggtctacaacacttatctcaagtttcattacatttgaagattttgtgtacttgatacagcccctccattagattgaaaatcttgaaagcaaaggacctatctcataacttctgtatctcttgcagcacctagtagacataatagttgacagatagtagttggtaggtgaatgtatcttatgttgaatagctgcattcaaaaacacctgatttcctgaggaaaccaagkcagaacttccaatttggccacttatataacacttggatcaaccagtcagaaactacacagagaacctctcacctgattttctcctcctcatctcatgggaggcttccctggcccctgactcacactgaaattccagcacactcctaactcagacctcctttggcgttgtccctgctacccttcctgaacgtgtatccctgggtctctggtctctgagtcacttaccagctatgctgcagctgcctgccgtgggagtacatctgcaggtgtcc

SEQ ID NO: 354736 - DNA, 606 bp, Homo sapiens
cctctgccacagatggcagagtcgatggagacaagaggatgcagatgagagacatttcagaggggtcctccacagggtgtggggggattagagggagcgtgaaggagagtccagcatgactcccaaggcacttgcttagggataggaccgggggtggcatcgttctctagtcttgccacctttcatgcctcccatctccctttccaagacatgcccatcttggtttctatcttgtctcatgctgtatgagttcattcccttgaggttaagaattgtgactctcttctagcccccctgcatctccactaatccactaagctgccttctgtagccctgggcacttgtggtttcccagaacagagggtttggggattaaacaasttgtgtgggtataaagtgagatccttggttcctgatcagcctagcaataatcagagccaactggaaattttgacacaagattcccagccctgagaccaggagtcttgggtttaaaaggttgtgaaagggtgccctgtactgagtccaggccagtaggacccacttgtggttcttctctgcctccccaggtgcaccatggtaaggctgaaaatctccccatcatcc

SEQ ID NO: 354737 - DNA, 426 bp, Homo sapiens
gttgagatcgtgtggcccttggagacctgtgaagaactttggcttttactctgagcataatggggaattatttgcagacactagacagtagaggtatgatctggtttgtgtcttgagaaaggtcactttggtggtgagttttagaatacattgtgaacgggtggggaagccattaggaagctaggggtgtgatctagacgagagatgactgagacagaagaaagaggtgagactttctgggcaatgtcttgagcagggtagtagagatgggatttgctgcacaaatagagggattggctttaaaaagccatggcatggtaccgggcctctgaaaatatttataatttcaattctttccgattactgcaaatttaaagaacatagcaaaatatctggcggacrgaaggccctcaataaaggtcagtt

SEQ ID NO: 354738 - DNA, 536 bp, Homo sapiens
ttgctcttgtttagaatcctgcctaggaaattgtaaagaatgaagctacacataaagtcatagatccatacaggcatagaaagtaagaggttggagtacccttttaaaaattctcatttcaccctctcaatttattaacaaaataacagagraatgttgacttggtcaaagttacccaagaatagctgaatcgagaatccaagtgacttgtgtctcaggtcaccagttttcccattatatgctgctgggaggcaggtgtccttagattaggatagggagtgtcatgatccagcttttgaaacaaaaggtagacacggagtatgtactgaagacatttgatgtgacatttaccatccctgggagttcaggtttacaagctccaccacatttaagagccctttaaactctctaattgctcatttatctgatgtacacaaatagtccccacagatacagactgacaggtaaacagcttgttgggaatttatttaaaatgataaactaacataatgcatcttctcttgagagaattacca

SEQ ID NO: 354739 - DNA, 536 bp, Homo sapiens
ttgctcttgtttagaatcctgcctaggaaattgtaaagaatgaagctacacataaagtcatagatccatacaggcatagaaagtaagaggttggagtacccttttaaaaattctcatttcaccctctcaatttattaacaaaataacagagaaatgttgacttggtcaaagttacccaagaatagctgaatcgagaatccaagtgacttgtgtctcaggtcaccagttttcccattatatgctgctgggaggcaggtgtccttagattaggatagrgagtgtcatgatccagcttttgaaacaaaaggtagacacggagtatgtactgaagacatttgatgtgacatttaccatccctgggagttcaggtttacaagctccaccacatttaagagccctttaaactctctaattgctcatttatctgatgtacacaaatagtccccacagatacagactgacaggtaaacagcttgttgggaatttatttaaaatgataaactaacataatgcatcttctcttgagagaattacca

SEQ ID NO: 354740 - DNA, 536 bp, Homo sapiens
ttgctcttgtttagaatcctgcctaggaaattgtaaagaatgaagctacacataaagtcatagatccatacaggcatagaaagtaagaggttggagtacccttttaaaaattctcatttcaccctctcaatttattaacaaaataacagagaaatgttgacttggtcaaagttacccaagaatagctgaatcgagaatccaagtgacttgtgtctcaggtcaccagttttcccattatatgctgctgggaggcaggtgtccttagattaggatagggagtgtcatgatccagcttttgaaacaaaaggtagacacggagtatgtactgaagacatttgatgtgacatttaccatccctgggagttcaggtttacaagctccaccacatttaagagccctttaaactctctaattgctcatttatctgatgtacacaaatagtccccacagatacagactgacaggtaaacagcttgttgrgaatttatttaaaatgataaactaacataatgcatcttctcttgagagaattacca

SEQ ID NO: 354741 - DNA, 548 bp, Homo sapiens
gttttcaggcatttctggagcttatttaaatggagctgtccaagccttagtgtttgcttctcagtgagaggatgacatttgatcttgtgtctcttttccaagtgtgcrtgcaatgtccctgggagcagaaggcattctaagcaaagactcaggtatgcttcccctcaaaaatattcctttggaaaggacaaatttattggtcctcactttccatgcttgctgctcaccccctgacttgtgtcctcaggctgtaccccttcctttccagtccaattccccctccctccagcttttggataattccagcaaaatttcatttctggatttatgttctgcattgatgaaccaggtcataaaagttgtttctccttgcttggctacccaacccctccccttacacttcttaggaattgtcttttacctcctaccttctaccttaccccaaatcctacccactcttcaaggtctcccctaggccaacctcctccaaggaatcttccctgattgttgcagtcctgaaggcttttcctcctcaaggtcattgactt

SEQ ID NO: 354742 - DNA, 564 bp, Homo sapiens
cttcagaaaaaatggatgcacttattgcaatgcaaaatgctctggaaagcctcagcaatagaatcaaacaagcagaagaaagaacttaagaactcaaaaacaaagttttcaaattaacccaatccaacaaagacaaaggaaaaaaaataagaaaataccaacaaagcctccaagaagtctagcattatgttaacctaacaagaattattattcttaggaagaagakaaatattcctgagaaagaagagaaatctgaaagtttggaaaacatatttggggaaataatcaagaaaaacttccctggccttgctagagatctagatatctaactacaagaagctcaaagaacacctggaaaattcaccgcaaagagatcattgcctaggcacaatgtcatcaggttatctaaagttgagagaaagaaaggaatcttaagagctgtgaggcaaaagcactggaaaacctatcagattaacagcagatttctcagcagaaatcctacaagtcagaaaggaatggggcatgatcagcttccttaaacaaaacagatatcagccaagaatt

SEQ ID NO: 354743 - DNA, 545 bp, Homo sapiens
ctgaggtcatctgggtgtctctatcattagaatgcttagggatggccaggagtctctcctgctaaaatgcctgaggttggccaggagtctctcctgttagaatgcctggggtcggccaggtgtctctccttagaatgcctggggttttcaatgtttaattttgctcaactgaatcataaatttacacattgttcaaatcaacatatatatgttttatgcattataattggttaatatgcctcttgtctctcaggtctctcttatctatgcattcccttcttcacrtatccatgtctctctgtccttctgttggtccctgctcccctccccttctctctctctctccaaccccccatgtcaataactttgttgtagaaaccaggccatttgtcccgcagagatttccacaatctggaatttgaaaattgcatcactacaatattatttagcttattcctctgtccccaaaaattggtacttagatctagaagcttggtaagattcaggttagacgtttttgcaagaatactacaggtagtattgtg

SEQ ID NO: 354744 - DNA, 483 bp, Homo sapiens
tgaatcataaatttacacattgttcaaatcaacatatatatgttttatgcattataattggttaatatgcctcttgtctctcaggtctctcttatctatgcattcccttcttcacatatccatgtctctctgtccttctgttggtccctgctcccctccccttctctctctctctccaaccccccatgtcaataactttgttgtagaaaccaggccatttgtcccgcagagatttccacaatctggaatttgaaaattgcrtcactacaatattatttagcttattcctctgtccccaaaaattggtacttagatctagaagcttggtaagattcaggttagacgtttttgcaagaatactacaggtagtattgtgtacttccatcagggggcacataatgtctaattgtctccccttggcgctattagcagtcactgatgatcttggtctagattcttcttttcagtagaagcggcaaaggg

SEQ ID NO: 354745 - DNA, 565 bp, Homo sapiens
aagcatgagaagcagcagaaatatttgtgtgccccctaagtaaggtaatcccgacagctgccagttctgacagaccattagtgaccgagaatcagaactggtgagcacaatttccacaatgcatggaaaagttcctggaggctccgctgaaaactctagcactttrcaaatctccctgcaatcagccaagcaccctacagaaaatgaataattgtaaattagcagcacttaaatctcccccactcaggttgactggggacttgaactgaaacaaggctggatgtgagaaagacaatttttaaatttgtgtattgagattcttatctgccacacttaaaactttaatagatgaggttttcaaagttaggtaacttgaccaaagccacataaccagaagtgagtgaagccaagattcaaactcctaagcttgcttccaagcctttggcctacatgccagacaatgagatgtggcttggaaggttcaagggggaatttcttggagggggatgggttgggactgactcaatgctgggggaaaatattcagttatagtgggctctgtgga

SEQ ID NO: 354746 - DNA, 596 bp, Homo sapiens
atttttaaatttgtgtattgagattcttatctgccacacttaaaactttaatagatgaggttttcaaagttaggtaacttgaccaaagccacataaccagaartgagtgaagccaagattcaaactcctaagcttgcttccaagcctttggcctacatgccagacaatgagatgtggcttggaaggttcaagggggaatttcttggagggggatgggttgggactgactcaatgctgggggaaaatattcagttatagtgggctctgtggacacagaatggcttcagcagcaactcccagaaactggtgttaaggttgctggaatacatggttgtcttaaaaaacagttgtatttagcaaacacaatttaatgcagactgtcttattctgagtcggagtttgcatcaggaatgaagagctacacactcattcccccagattcctttcatttgagaggtggggctcacacatgataaatacagcttttgaaccagtgtgtctacctcttctattttgaggtaaaaatatgcacgcatctatgtagtgtgaacatactaagtctcttcctgtgcaaagtgtgttcaggatgctgctgg

SEQ ID NO: 354747 - DNA, 660 bp, Homo sapiens
ccccctgcaaactcttgacctaatagggaagaactgcattaataactcctttaagatgtttcacagagtgagttctatggctgcataagattgaggaacctgaatcaaagtcaaacagattgctttactggagtacttttgagagcctttaataagtgaacatgcattgtgactctcaaatatggtggtttgggaatggcttatcctgtttccccgacttgaccttggcctttttgtgaaagggtatcctgtaggactggagcttcatgaagaactccttggaaaacatgacctgaatgtaaggcagactctgctagcatgtgcctctttcttccagctgtagacaccctagggactcaggataatttaaacacagactttattaagagaagtttgtactaaattagaccaagcttattaaatgaaggcatgcactccaagcctctgtactaaygctgttgtctggcagaagaaaatgacctgaaaatgtgcaaccacatgatctcaggaccacatgaggctccagtttccctatacccacaaatcgtacgttactgcttactgcaactctcaggggttatttctgccttcttatccctttttgacccttcctattctttgctttggcttttcccttggcttttcccaaaagccacagtg

SEQ ID NO: 354748 - DNA, 660 bp, Homo sapiens
ccccctgcaaactcttgacctaatagggaagaactgcattaataactcctttaagatgtttcacagagtgagttctatggctgcataagattgaggaacctgaatcaaagtcaaacagattgctttactggagtacttttgagagcctttaataagtgaacatgcattgtgactctcaaatatggtggtttgggaatggcttatcctgtttccccgacttgaccttggcctttttgtgaaagggtatcctgtaggactggagcttcatgaagaactccttggaaaacatgacctgaatgtaaggcagactctgctagcatgtgcctctttcttccagctgtagacaccctagggactcaggataatttaaacacagactttattaagagaagtttgtactaaattagaccaagcttattaaatgaaggcatgcactccaagcctctgtactaacgctgttgtctggcagaaraaaatgacctgaaaatgtgcaaccacatgatctcaggaccacatgaggctccagtttccctatacccacaaatcgtacgttactgcttactgcaactctcaggggttatttctgccttcttatccctttttgacccttcctattctttgctttggcttttcccttggcttttcccaaaagccacagtg

SEQ ID NO: 354749 - DNA, 580 bp, Homo sapiens
cctcattgattttcagtaaatatgaagtgagaattattttaggaactgagagttggggcttgttgtcattgcagtgcaacttaacttattcttattgattttagttccttataaaatcacattttattttgtggggctacttccccactctgggcagtaggcatgtaactcagcagcagttgctgtagctggccttgcagacatgggggtgggtttccattgcacactggggtgacagggattcaaatgtggtttctgaggggctcttgagaagaagcatggtaacatggaaggggacatgattagggcartgttttcttaggggcattatccaggctatgttccataacacccacaggctggttggagtgtgtctggctagggcactaagccacaccaggggaacatttctctagcatagttgtgttcagtgttattgattcctgcgcaacctctgaatcactgccctgctatactaaatagtttcatgaactcttgccatgtgacacggtctacctggcattctggggagcctgcaactgaagatactctcattgccaagctctactgaaatatttaa

SEQ ID NO: 354750 - DNA, 519 bp, Homo sapiens
aagtgtggcagaaggacagagatggtaaaagcaaagattagccatgtgagcatctcggcagtggtgtgctggtaaatggttaacaaccccctttggggttggggcaggtctaatttgtaaagtgttgattcccatggtgcaagtaccaccatrgctggttttaagccatcaacatgatgtcactgagctcagagttggaaagagatgctaccattggcttttgggagccagctctagctcacatcactgtttaaagatcagatatcaagaaaaacccaagagcacctttaaccatgaacaaataagcctgccaccttcctaatgactcaatctagtattgggaaggctcatgacctacatgaaaacctccttcacacaaccagggataaaatgctgccactttcattgatgactgtaatctctgttaatagctaaataacttgaatgggggctgctggttacattaagtgaggcttagtcactgaagactctgtggggagaaggaaccagaatggagag

SEQ ID NO: 354751 - DNA, 519 bp, Homo sapiens
aagtgtggcagaaggacagagatggtaaaagcaaagattagccatgtgagcatctcggcagtggtgtgctggtaaatggttaacaaccccctttggggttggggcaggtctaatttgtaaagtgttgattcccatggtgcaagtaccaccatggctgrttttaagccatcaacatgatgtcactgagctcagagttggaaagagatgctaccattggcttttgggagccagctctagctcacatcactgtttaaagatcagatatcaagaaaaacccaagagcacctttaaccatgaacaaataagcctgccaccttcctaatgactcaatctagtattgggaaggctcatgacctacatgaaaacctccttcacacaaccagggataaaatgctgccactttcattgatgactgtaatctctgttaatagctaaataacttgaatgggggctgctggttacattaagtgaggcttagtcactgaagactctgtggggagaaggaaccagaatggagag

SEQ ID NO: 354752 - DNA, 519 bp, Homo sapiens
aagtgtggcagaaggacagagatggtaaaagcaaagattagccatgtgagcatctcggcagtggtgtgctggtaaatggttaacaaccccctttggggttggggcaggtctaatttgtaaagtgttgattcccatggtgcaagtaccaccatggctggttttaagccatcaacatgatgtcactgagctcagagttggaaagagatgctaccattggcttttgggagccagctctagctcacatcactgtttaaagatcagrtatcaagaaaaacccaagagcacctttaaccatgaacaaataagcctgccaccttcctaatgactcaatctagtattgggaaggctcatgacctacatgaaaacctccttcacacaaccagggataaaatgctgccactttcattgatgactgtaatctctgttaatagctaaataacttgaatgggggctgctggttacattaagtgaggcttagtcactgaagactctgtggggagaaggaaccagaatggagag

SEQ ID NO: 354753 - DNA, 519 bp, Homo sapiens
aagtgtggcagaaggacagagatggtaaaagcaaagattagccatgtgagcatctcggcagtggtgtgctggtaaatggttaacaaccccctttggggttggggcaggtctaatttgtaaagtgttgattcccatggtgcaagtaccaccatggctggttttaagccatcaacatgatgtcactgagctcagagttggaaagagatgctaccattggcttttgggagccagctctagctcacatcactgtttaaagatcagatatcaagaaaaacccaagagcacctttaaccatgaacaaataagcctgccaccttcctaatgactcaatctagtattgggaaggctcatgacctacakgaaaacctccttcacacaaccagggataaaatgctgccactttcattgatgactgtaatctctgttaatagctaaataacttgaatgggggctgctggttacattaagtgaggcttagtcactgaagactctgtggggagaaggaaccagaatggagag

SEQ ID NO: 354754 - DNA, 558 bp, Homo sapiens
aattttcaaaagaggcccaacccctagtgctcctgtttgctctccttttggaatttgttgtgaattttataatcttctctagactcagtactgccctatttaaagccaagctggaaatgtggacagctcggtggagggcggggcccctgtagaaactgcctgtgttcatcaggattctttttggtggcaaattggacaaatctaagcaaaaggatatgtatttttcgctctcataacccaaaagtgacaagagctgaggtgtggctgggcctcactgatgacgaaaagcttaggacttgctaaggtggttaatatctaaatcattacataaatctaactaatcattgtacataaccatatataattccatacttacatattatgtgcttacatacaattaggacttgctaaggttattgagatatatatatatatacacctatattttatataactatataaaattatatatgtttggtattgtatatattgtaataatacrttatataattttataaattatatataatatatattaaccttagcaagacctaaatc

SEQ ID NO: 354755 - DNA, 589 bp, Homo sapiens
ggtccaggtaacagagatgcattttcatttcaagataaaagcaaacagacattaaagctaacacgtttctgttgtctgtgattaatacacactgtctgcattttggctcttctcaagtctgttgccctcttttcattagtctactgggaattgaacttcatgttgatgaatctgctctgcagtaaatctgatraaaggaactggagagcagcacaaggctgggtcattaacaaattagggttttctctcctcagttgggatgctgcccatgacctcgacggtggagcaagcaggcctcacccaggcacatctacccctgctccttgcttaggggctccatttactgactatagctaggaaggggtagtccccaaacaaccccactcctgttttctcccacgtgcatcacaaatgttgtcctctgttcactgcacttccaccctcgtcgatctgattttacaaaggaccttgactcacaaaccgagaaggaagttggaggaggctttctccactggggggtcttaattcttcaaacccagtcccttcactgaggtcaagtgatctctgggattcaattcaattcaacatt

SEQ ID NO: 354756 - DNA, 589 bp, Homo sapiens
ggtccaggtaacagagatgcattttcatttcaagataaaagcaaacagacattaaagctaacacgtttctgttgtctgtgattaatacacactgtctgcattttggctcttctcaagtctgttgccctcttttcattagtctactgggaattgaacttcatgttgatgaatctgctctgcagtaaatctgatgaaaggaactggagagcagcacaaggctgggtcattaacaaattagggttttctctcctcagttgggatgctgcccatgacctygacggtggagcaagcaggcctcacccaggcacatctacccctgctccttgcttaggggctccatttactgactatagctaggaaggggtagtccccaaacaaccccactcctgttttctcccacgtgcatcacaaatgttgtcctctgttcactgcacttccaccctcgtcgatctgattttacaaaggaccttgactcacaaaccgagaaggaagttggaggaggctttctccactggggggtcttaattcttcaaacccagtcccttcactgaggtcaagtgatctctgggattcaattcaattcaacatt

SEQ ID NO: 354757 - DNA, 589 bp, Homo sapiens
ggtccaggtaacagagatgcattttcatttcaagataaaagcaaacagacattaaagctaacacgtttctgttgtctgtgattaatacacactgtctgcattttggctcttctcaagtctgttgccctcttttcattagtctactgggaattgaacttcatgttgatgaatctgctctgcagtaaatctgatgaaaggaactggagagcagcacaaggctgggtcattaacaaattagggttttctctcctcagttgggatgctgcccatgacctcgacggtggagcaagcaggcctcacccaggcacatctacccctgctccttgcttaggggctccatttactgactatagctaggaaggggtagtccccaaacaaccccactcctgttttctcccacgtgcatyacaaatgttgtcctctgttcactgcacttccaccctcgtcgatctgattttacaaaggaccttgactcacaaaccgagaaggaagttggaggaggctttctccactggggggtcttaattcttcaaacccagtcccttcactgaggtcaagtgatctctgggattcaattcaattcaacatt

SEQ ID NO: 354758 - DNA, 564 bp, Homo sapiens
cttgctttggactttataggagcaagttcatgtaaagaaattaaaaaagaattaaaacatgtcataggacaaaactaagagatgtaacatttcatcatctagtaaccattgtatacacttggatttgtgtgtttaggtttctgcatttccttaatcagatctgttacatctgcctgcttacctcaggaattaaccaaaagagtactcctcattttatttcttaaataatcaaacgtcgttttaaaaaataataagaaatacccaggtgagaaatattcaaatgtggctctctttataggggtggaagctaaaatgaggccacttatgaataaaaatccaatatttctaatgtgctggtcaaatatatrcggttatattaagtttttaattatacaagtggctttattttaactcacttaagttcgtgagataaccctaattgcctatttagtatccatttccactttcttactaacaaaacaattcaaactattcagcctccctgctgtccttgctgctaggcatagtgattcaattcagtctggcaataagatgtgagtggcc

SEQ ID NO: 354759 - DNA, 424 bp, Homo sapiens
agctgggttctggtggctttgccgagccacaggaacagcctggactccctgctacccaccaaccctaccctacttcttataatctgttagtcagtgttagttggttttctattatttgcagaaaaayagattcctgataccatgttaatctttctgcacaatttcaaatacaaggacttctgttttcttaaaaaagtggggatggtggagaaagccatgagcttagtgttctataatttatataaatgtcttgtaaagtaatttaaatgtatagttttaaaatgatattcagaaattaagttgagggggaaaaaagattgtctgataagtaagggtttctcctgaatatccaacataaaatatgaaattgaaaatctaaaactctatttataaaagtgtattttttaaaacttcttttaaaaag

SEQ ID NO: 354760 - DNA, 424 bp, Homo sapiens
agctgggttctggtggctttgccgagccacaggaacagcctggactccctgctacccaccaaccctaccctacttcttataatctgttagtcagtgttagttggttttctattatttgcagaaaaacagattcctgataccatgttaatctttctgcacaatttcaaatacaaggacttctgttttcttaaaaaagtggggatggtggagaaagccatgagcttagtgttctataatttatataaatgtcttgtaaagtaatttaaatgtatagttttaaaatgatattcagaaattaagttgaggggraaaaaagattgtctgataagtaagggtttctcctgaatatccaacataaaatatgaaattgaaaatctaaaactctatttataaaagtgtattttttaaaacttcttttaaaaag

SEQ ID NO: 354761 - DNA, 591 bp, Homo sapiens
accaaggttccttgaaaccactgcttcagtgagtataaactggagccaaaaaggcccaggatgggggctgggggtggtttgctttggcaccctcactgcactagtcattgattttaccttgttagttaatagtcagttcttcccgatgccagctcaagtcatctcctcatcctctgcatcagtggttctcaaactttagtgtgtgtcagaaagctcattaaatcacagactgcctgcctccagagcttctcattcagtaggtctggggtggggcccaagaatatgcacttctcacatgttcccaggtgatgcagctggcccagggaaccactgctcctcagcaccaaatgtaagccctcagcaggtctcgyggaggtgggccctccttagatcttcagctctgatgttgggcctcaggagggctcccttgcatcagtctggcttgtgccttttgagacttggctcctgctggcccctctacctgcatcacccttcctaaatttccaggtccacctggctgctgtttatatttaaggactgcttctgtcttattttctctgaatgtcagctgtcaaccatgttatttctgcc

SEQ ID NO: 354762 - DNA, 646 bp, Homo sapiens
cacatacttttcacagacttggccactattttcctatactatgatttctctctactgcagacattagctggctagtagcaaaggggtgtaattatagtggccacatttattgawtgcttactatgtaccagcagttaagcacttacatggattatcttttagactttataaaaacctcacaaagcaagtagtactgtgagctttgacttatagttgagaaaactgaacatgagagaggtttaaaaaaacatctcagaaggtacaactgtaaagtggtgcattttttatcacatgcattctgcctctaaagcccagatccattaccattacctattgctctggttggcagatcacacaggttctaggcttggctcaggtacagacttgctctgtgttccatctatttacaataaataatgtcaatgtcctccaggaaaaaaaaaacactgagaacacacctgtagttggacaagattgaatttattgactcattgcaacaagtgagaacataaagcatgggaaagtgtaaggtaccttgaaaagttattacaggatttgggctcatgttaggtaaggacacgggagtaaatctattgaatatcttaataaatcttatctagaaggtaggaagaacagagtgacccaa

SEQ ID NO: 354763 - DNA, 646 bp, Homo sapiens
cacatacttttcacagacttggccactattttcctatactatgatttctctctactgcagacattagctggctagtagcaaaggggtgtaattatagtggccacatttattgattgcttactatgtaccagcagttaagcacttacatggattaycttttagactttataaaaacctcacaaagcaagtagtactgtgagctttgacttatagttgagaaaactgaacatgagagaggtttaaaaaaacatctcagaaggtacaactgtaaagtggtgcattttttatcacatgcattctgcctctaaagcccagatccattaccattacctattgctctggttggcagatcacacaggttctaggcttggctcaggtacagacttgctctgtgttccatctatttacaataaataatgtcaatgtcctccaggaaaaaaaaaacactgagaacacacctgtagttggacaagattgaatttattgactcattgcaacaagtgagaacataaagcatgggaaagtgtaaggtaccttgaaaagttattacaggatttgggctcatgttaggtaaggacacgggagtaaatctattgaatatcttaataaatcttatctagaaggtaggaagaacagagtgacccaa

SEQ ID NO: 354764 - DNA, 625 bp, Homo sapiens
  misc_feature (1)...(625): n = A,T,C or G
ggaagacttcatattaaaggaaccctgcnnagaccacattaccaagaaaaggtagaactgttggttccaaagggttttctgaaggtgggactcactgcctccctaggccagggcttggctggattctttgggtcctcagcatggtgaaggcactgccgcctacaacctactgtgccttccatccctctgtagagaacctcgtccttaatacaggagaaacttaggatagttttctgagtccagggcacctaaaatttgagcagacaacaaagctcaattcaaggtggggggaaaatgcctgtccaaattccaggaaacccagcagttggaaagggaaaaagggataattggtaaattagatattagctgtaagtaaagaatttaacctttcatccttgctgaagaaacagacacacaaaaattttttaaccagggttcaaacttgttcgtgagcatwtgattcacttttctgggaggtaccataaattggcattctaaacagatctccaggttattcaaaagcaagtgatctgggaatacacattgagaaactgggggacctagggagaagatccattctagaagctttactaaaaactgatgcccctgtcccatccacatagag

SEQ ID NO: 354765 - DNA, 574 bp, Homo sapiens
acaatatttaaggttgagggaaagcctgagtttgcaatggtaggtatttatatttatattagagttttaggtatcagaagaaatacttaacacatccttggttctgtaccttcacaataaacttttctcagctggtgctggtggggaggatttctgcaattgaaagaagcaaaaatatatattattgctgtacattcttgattttttatttttttactcagtctcgctctattgcctaggttggagtgtagtggcacgatcttctctcactgcaacctccgcctcccgggttcaagcgattcttctgcctcatcctcctgagtagctgggattacaggcgcccgccaccacgcctagttaatttttgtrtttttagtggagacagggtttcatcaagttggccaggctggtcttgaactcctgacctcaggtgatccacccacctcagcctctcagagtgctggaattacaggcatgagccactgcacccatccatattgctatacattcttaacacgggagataactacccctaaggaggtgaaaattggtttgtgtatgtgagtaggtgtaa

SEQ ID NO: 354766 - DNA, 574 bp, Homo sapiens
acaatatttaaggttgagggaaagcctgagtttgcaatggtaggtatttatatttatattagagttttaggtatcagaagaaatacttaacacatccttggttctgtaccttcacaataaacttttctcagctggtgctggtggggaggatttctgcaattgaaagaagcaaaaatatatattattgctgtacattcttgattttttatttttttactcagtctcgctctattgcctaggttggagtgtagtggcacgatcttctctcactgcaacctccgcctcccgggttcaagcgattcttctgcctcatcctcctgagtagctgggattacaggcgcccgccaccacgcctagttaatttttgtgtttttagtggagacagggtttcaycaagttggccaggctggtcttgaactcctgacctcaggtgatccacccacctcagcctctcagagtgctggaattacaggcatgagccactgcacccatccatattgctatacattcttaacacgggagataactacccctaaggaggtgaaaattggtttgtgtatgtgagtaggtgtaa

SEQ ID NO: 354767 - DNA, 574 bp, Homo sapiens
acaatatttaaggttgagggaaagcctgagtttgcaatggtaggtatttatatttatattagagttttaggtatcagaagaaatacttaacacatccttggttctgtaccttcacaataaacttttctcagctggtgctggtggggaggatttctgcaattgaaagaagcaaaaatatatattattgctgtacattcttgattttttatttttttactcagtctcgctctattgcctaggttggagtgtagtggcacgatcttctctcactgcaacctccgcctcccgggttcaagcgattcttctgcctcatcctcctgagtagctgggattacaggcgcccgccaccacgcctagttaatttttgtgtttttagtggagacagggtttcatcaagttggccaggctggtcttgaactcctgacctcaggtgatccacccacctcagcctctcagagtgctggaattacaggcrtgagccactgcacccatccatattgctatacattcttaacacgggagataactacccctaaggaggtgaaaattggtttgtgtatgtgagtaggtgtaa

SEQ ID NO: 354768 - DNA, 581 bp, Homo sapiens
tggagttaagtaaaaacaagtgagatgtaattatgcaatacaaattataatttatgataaacttataatctattatattttaatgtaaatttcaaatcttaatatgtgtttttggctgggcacagtcgctcatgcctctaatcctagcactttgggaggctgaggcgggcagatcatctgaggttgggagttccagaccagcctgaccaacatggagaaaccccgtctctactaagaaatacagaattagccagacgtggtgacacatgcctgtagtcccagctgcttgggaggctgaggcaggggaatcgcttgaacttgggaggcagaggttgcagtgagcagagatcacgctattgcactccagcctgggcaacaagagcaaaactccgtctcaaaaaaaaaaaaaaaargaaagaaaaatgtgtgttagtttttaagtatgccaaaatgtaatgaatagaaggaagttgagtgtgtcaccctttatatagaaaattggcatcttaagtccatcagcagcaatgcacagtttatttttggtttatttattgaaatggctgcactggctgtcaccagat

SEQ ID NO: 354769 - DNA, 629 bp, Homo sapiens
gtgcccttttctattcaaatacaaatgagtcactatagaaatacatggttccactcactgtgagtttaattgcatgttactctgtgtaatttaacatcttgtgatttgtattgatatgtgtatatttttcttcattttgcctccatgaaaraataatgcttttttacatagaacaaaatactggtgctgtttaagcattatctatttgatcataacggttcctatatcatttataaatgttaagagctttagacatcttgaccaaaattccattatgctcagtaggcccagagagccagtggactgggtagtcttgatgtgtctgtcactttgcagatccttctggagagtgcaacccagacttgcgtctccgtggacatcagaaggaaggctatgggctttcttggaacccaaatctcagtgggcacttacttagtgcttcagatgaccatgtgtgtatccttcccattttgaagcaaatctgggctagttaccagttggtttcttttttggggtgtgtggggaggtgagaatcttccttttatataatggttaattttacatttaagaccatctgcctgtgggacatcagtgccgttccaaaggagggaaaagtggtagatgcgaag

SEQ ID NO: 354770 - DNA, 617 bp, Homo sapiens
tgcagctggatgtttttaccctcagcggctttcggactgtacagatcctggaaggacaaaagatcctggctaactgttcttctccctaccaggtaagtgtaaaacaagcctgagcaaatatggagagggtttcttaatctctttattatctagataagctataaaagctactgtttactgataccgactcctagaatagatgacctagttttcaaatatcaccaagtcaagtaaaatgtaacatttttgtgttacagcattgaagaatatacacatacaygtgcaaacacatgactaactctgtaaccgagtgccagggccactcctactgcctaccacccatgtaatcttttataagtcattttctgtgatcttctctgtaaaatagggataacagtctctgctatgtgtttatcagaattgttatgaggagtaaatgaagtaatgtatataaaaagaacattagcacaaatgtaaagtcttttgtatggtggcattatatgcagaaattccttctaactcagctttagacataagacatttgctgattgaatatgtagcacaaacctgaactaatcatgtggaccccatttagatcacagctggagttcatgcaa

SEQ ID NO: 354771 - DNA, 617 bp, Homo sapiens
tgcagctggatgtttttaccctcagcggctttcggactgtacagatcctggaaggacaaaagatcctggctaactgttcttctccctaccaggtaagtgtaaaacaagcctgagcaaatatggagagggtttcttaatctctttattatctagataagctataaaagctactgtttactgataccgactcctagaatagatgacctagttttcaaatatcaccaagtcaagtaaaatgtaacatttttgtgttacagcattgaagaatatacacatacatgtgcaaacacatgactaactctgtaaccgagtgccagggccactcctactgcctaccacccatgtaatcttttataagtcattttctgtgatcttctctgtaaaatagggataacagtctctgctatgtgtttatcagaattgttatgaggagtaaatgaagtaatgtatataaaaagaacattagcacaaatgtaaagtcttttgtatggtggcattatatgcagaaattccttctaactcagctttagacataagacatttgctgattgaatatgtagcacraacctgaactaatcatgtggaccccatttagatcacagctggagttcatgcaa

SEQ ID NO: 354772 - DNA, 554 bp, Homo sapiens
ggagatgaatgggaactgagtaaagaaaatgtacaacctttaaggcaagggcggatcatgtccacgcttcagggagcactggcacaagaatctgcctgtaacaatactcttcagcagcagaaacggtgtgtagaatggctgagtctcaacctgtcgtcattcatcctaaatgttgtagataacgtgggtgtggatccatgagagatggcataatgagtacttttcaaaaattggtagtatgagaatctgttctctacctgctttcgtatcacatgacagctatctgaagatgtcctcaggtataattaagaacaagggctataggatttcatttcactgtggtgcagcgaaactctttttatyaatagaaatacattttatacagggggcagtgataagcatagtaaagcaagtattatattgcaatgcttcccaaaagtattatgttaggaacttatttttgagagtatgacaaaaaaagaagtggtctccaaagacatgtaaacctcagaacaattgaatttataccagaaagttctcaataattttaacaa

SEQ ID NO: 354773 - DNA, 449 bp, Homo sapiens
aagttttatttaccctgtggatacttaatacatatttttcrttgctgtttctcttgtccagttgggcttatcttgcccatgaagttgcctctgaagaaccaagtccaactgtgtatgctgagagatgtctggctacttcctgattgacagttctggcaaggtggcattgggccctggcttttcctctggaggcatcatcacttataggaaaatgtcccctgaagtccaaggatcaaagctgctggaacactgagaagctgaacaaaggagaactgtttctcatcaaacccagacttccagacttccaatagggtagaatgagcaagtcagcaaatcatcttccttggaaacagtgataaaactagatgacattgtcaacaacagccatttcagaaatctagaaaatgaccaaaggcaaacaacaaactgagaagcatttttttttccat

SEQ ID NO: 354774 - DNA, 614 bp, Homo sapiens
gaatttactaaatggagtttgatacaatcatagtgccctaacaagaccagcagctattaaatactaaagtgctaaaattccagrtgaatctctttaagcaataatagaagtgcaggctctgatgctactgacctttggtgttcttcggatcactctctcacacacacatactcacagacacgcactcacgctcataattttctgggcaatttgccacttgtgtgtcctctggagcaatttgttttttcactgataaaagtttcctggtggggaatttagttgcagaagggttaagccagtataagccttgttagtgagcaaaaagacatatgatatgaaacaaagttttaatttttattttacatatttatacataaaactttcaaggaaccctctgaatccaacagaatgttaatagcacatctaaaaaggaacttcaggtagtcaacattcacaaaatgttgaaaactgagtaaaatatacatattacggagagctacaacttcactacgaggcaggcatgtattttttgacttgtatagcaccgtcatttacagttcttctttaaaactacagtgaagaatgaaaagtagtcaatgggaaaatactgttcc

SEQ ID NO: 354775 - DNA, 454 bp, Homo sapiens
aaaccaaaccaaacctscttcatagcattaatatgctctaaaaatctgatgatctgggcaaatcactgacaaccaagttcctactattttaaataggagaaattgtgacatgaacatccaccccaaatactcaaccatttcttaagacgtaactaaaacaagtaaaatgcctgtatgtaagcaacaaactatgacgttagtctatgaatgcttaaaacttgatactaaacacaaatgaatatggttgtcacaagaaattgcttttgtctgcaaacatcctccacatcctctttgtggatgcttgttctctttccaaactgtctgtgtgggtcctaacatttaactaaatctgtaaggtaagacaatgtaaggaatgtctcaagatatttcccatgggttgttttgttaaatatgttatattgcatttggggacagaaatgtaaatatttcctat

SEQ ID NO: 354776 - DNA, 488 bp, Homo sapiens
tacagctaaaacaatagttacataaggaaaaaaaaggaatgttttaaggtttgtacacttaaattttttttttttttttttttttttggccatcaaacttgcagactttttttactcagttgctcactcttctgagtctaaatwtctaatggagatttggactttgtgttctgtttattgtcctcagtaatctgaaggacaagcttgccttcaactctcacatagtacaaccctcatttagacagttaacaggtactattaaaatctcccatagggcgggaactggcaattgcagcaatagacttggctatcagatttcatcaaagggagcctaagggcagtgtggccatggatgccagcactcatggggacagacagagagcaggaggaggaggccttggtttccaaaaagagccatagaaagaactccggggagtggctctgcccactgtctgatgcttgaatccttacataactgctctgagaaa

SEQ ID NO: 354777 - DNA, 488 bp, Homo sapiens
tacagctaaaacaatagttacataaggaaaaaaaaggaatgttttaaggtttgtacacttaaattttttttttttttttttttttttggccatcaaacttgcagactttttttactcagttgctcactcttctgagtctaaatatytaatggagatttggactttgtgttctgtttattgtcctcagtaatctgaaggacaagcttgccttcaactctcacatagtacaaccctcatttagacagttaacaggtactattaaaatctcccatagggcgggaactggcaattgcagcaatagacttggctatcagatttcatcaaagggagcctaagggcagtgtggccatggatgccagcactcatggggacagacagagagcaggaggaggaggccttggtttccaaaaagagccatagaaagaactccggggagtggctctgcccactgtctgatgcttgaatccttacataactgctctgagaaa

SEQ ID NO: 354778 - DNA, 558 bp, Homo sapiens
atccttaagtctctttcactaagaaagtgttcagaatgtttaatttcaaatccaggtagagtcacgggatgccacacagagcagaataagatactgggatgactttaacagtcatggtagctggagcttattctgttcttaacctctgtctgcaaatgtcatgtcaatcttagcaatgtttttagaactctttggtttgtttaatttttaagctactactttttggatatttcctatgttccaggcaacatactaaatgctgtgtgtgtgtgtgtgtgtgtgtgtgtgtgtgtgtgtgtgtgtattttaatttagttttcaaaatataataagccggatattactgacttctcttgtacagacagagaaatgargcttacctaggctaagtaccttgcccaaggacacacaatgggttaggagcagaaccaggactccagggctggtatgtctccagagctgtgcactttaagactctgcttctctgaagcaaactttccaagtcatcctccaacagggaaatcagttgtctcctgcagtaaggcataatcattgcta

SEQ ID NO: 354779 - DNA, 558 bp, Homo sapiens
atccttaagtctctttcactaagaaagtgttcagaatgtttaatttcaaatccaggtagagtcacgggatgccacacagagcagaataagatactgggatgactttaacagtcatggtagctggagcttattctgttcttaacctctgtctgcaaatgtcatgtcaatcttagcaatgtttttagaactctttggtttgtttaatttttaagctactactttttggatatttcctatgttccaggcaacatactaaatgctgtgtgtgtgtgtgtgtgtgtgtgtgtgtgtgtgtgtgtgtgtattttaatttagttttcaaaatataataagccggatattactgacttctcttgtacagacagagaaatgaggcttacctargctaagtaccttgcccaaggacacacaatgggttaggagcagaaccaggactccagggctggtatgtctccagagctgtgcactttaagactctgcttctctgaagcaaactttccaagtcatcctccaacagggaaatcagttgtctcctgcagtaaggcataatcattgcta

SEQ ID NO: 354780 - DNA, 584 bp, Homo sapiens
actttttgtctaatgtcatttccatagattaaaataaacatataataaacagcaagtaataagtcgttagcaaaaaaataaaaataaaatgaagcgagagatgcccattaaaatgatgtgtaacataatcacatttaagaatgtattccaatttcaaatggcatcatatgaatgactctactaagaaatgccaatatagtttccaaagtaggtacactatttacaatccctctagcatcatatgagaattttagttttgccacmtcctcaccaacacttgctgtttttgtttttgattataaccatcctagtgggtgtgaagttgtatctcattgtttatttgcattttcctaatgattaatgatattgagcatcttttcaaatgtccaataagtgcttattggacatttgtatatgttatttgaaggaaatgtgaatttaaatcctttacccatttttaattgagatgtctttttatttttgagttgtaatagtcctttatacaagtatatgtatatcggtatataaagcacctgtataacagataagtaaattgtaaatgttttctttggttctgtagtttg

SEQ ID NO: 354781 - DNA, 651 bp, Homo sapiens
ttattttcttttacatgtatgctctaacaatactcaaaaggaggacctcccacaagtaattattttccctttgccattcaaacctgccttgagaaatttcagggactcccttatgaagaaagcttttaagaaccatagaaatcacattgcttttgaaagtgcgagcgtgtgtggtgtgctgtgctggctgaagcagcaggcttcagactgctttatctcttatcagtggtttggctttgtgcatgagaaattcagaggcaactgtataattttaaattccgattaccacaaagaaagagaggcatctgacatcccaatgccgtggctttgactattttaatggaaatatgttggaactaggggaaccttccaccacggagatagtgatgaaagaccacaagaragacattttatctttgagataaaaggcctgttttcgaaggttgtttcttatattataactttttcccaacctgctactagggcactatgcaaatgtatcattccaggagctgtttccttatccttttcatgcctaagatttcttgggacagggggaagagggagaactggtcttgtttaatgaaatttttgacctttcatagagccttgaaaaatcagtatcaggtgctggaatggatctatttacct

SEQ ID NO: 354782 - DNA, 595 bp, Homo sapiens
tgctgtctttattaaaaaaacaaaacaaaacaaacaaacaaaaaaaacagaaaagaatgctacatgactgtaagaatctctgaaagaataccagtattttcatggaaccctccagaggctccactcagaggttttggcaataaagacacagtagctacttgggattgatgtggctctaccaggaagaatgagaaaacgaaagcaaacaaggtgtctgaatggaattaaacaatgagtatagtctttccacaactcaataactcagaaagggcaaatkccacccttcccatgcagtttgcagacttcagacatcatactgctcttttctgcaaagtccagacatggcctcagaatcctttcaaaatagccctctaggaactcaatattggtaggcaaaataagcttatttagcatccctggcatactcaggagtccccatacttcatccttttctcttgttcctctccaacattccagaaccttggggacatctttgacattctaaagaccggtggatttaaattgcctagtagggtctatatgggtatgtttaaatcacaggatgctgctctacttgtttttgttccatttaaaa

SEQ ID NO: 354783 - DNA, 647 bp, Homo sapiens
atgtaaatagagtcctagagtcaaataaatgtgaaaatgtgacatttaacaattttctttactatgggacttcccagatcctactatgactgtgtgcaaggtgagtgttcaagaagagaatagagtatgtaacattttccaacttttaaatgctagtgagcctttctgctttttttttttctaacaatttatggggctgatggtctatagaatatactttgagaaaaacatgcctataaaaayatgcctataaaaataagcagttgtggaagctgccattagatttacgattataactgattcctccagagttcaaattctgatagctataaactgcatatgtgaggtagccactatttttatatgtgtgtggtttgcagtttgtagctgcttgaagaggcagttgtgataactgaatgttctgactatctcttctaaaacaaaataggaaatgccataccaatcaaaagggggacttttatatccatcgagtggatgtatagaagcaggtagagactgataacctctctcattgaatagtcaggtggaatagcatttttcttaaaaaaaaaaaaacacacagattttttaactctatgattaaatagcaaagttcacttatgagcactttgaaggcatttttaaaa

SEQ ID NO: 354784 - DNA, 647 bp, Homo sapiens
atgtaaatagagtcctagagtcaaataaatgtgaaaatgtgacatttaacaattttctttactatgggacttcccagatcctactatgactgtgtgcaaggtgagtgttcaagaagagaatagagtatgtaacattttccaacttttaaatgctagtgagcctttctgctttttttttttctaacaatttatggggctgatggtctatagaatatactttgagaaaaacatgcctataaaaatatgcctataaaaataagcagttgtggaagctgccattagatttacgattataactgattcctccagagttcaaattctgatagctataaactgcatatgtgaggtagccactatttttatatgtgtgtggtttgcagtttgtrgctgcttgaagaggcagttgtgataactgaatgttctgactatctcttctaaaacaaaataggaaatgccataccaatcaaaagggggacttttatatccatcgagtggatgtatagaagcaggtagagactgataacctctctcattgaatagtcaggtggaatagcatttttcttaaaaaaaaaaaaacacacagattttttaactctatgattaaatagcaaagttcacttatgagcactttgaaggcatttttaaaa

SEQ ID NO: 354785 - DNA, 563 bp, Homo sapiens
agcctaacatggcttctgaactgtgaatagaagctgggattttgtagcaaatggtgttcctcagaactcgaggtttccaaggtgactgcatatgaaactacaaacatcacaatagcagtttccagagggactctctttatggtcctccccataccctccatccccaaactattacattctttacactgtgattctttctaaagtgagatagaaactaaataattgatttgaatatcaaagaaaagatgtacatttccatcttctcaattttcattagagtactgatttttcaagtcttcccaataagacctaatgctctcagaacatctaatgacccatgcaactaacttgactccatgtgtaacagacagctaggctgttgattattttaattagcaattaaaagtaatacattcacaaatgttatttggatttttcatttaaatgaaatctctagctttgatcaggaytgaaaatcggttcagcctatggggcagtgcatcatagaaggagctctggattaggaggagatgcctgtcattgagttagccactaactcgcga

SEQ ID NO: 354786 - DNA, 648 bp, Homo sapiens
catgcatgcatacacacacacacacacacacacacacacttggcttaaaacacttcagtggactctcactgctcatcagctaacaagtgaaaaaacttaacatggcccacaagccctgcrttgtctggattttccttacctctgatctctaaccttgatcatgccttcctttcacctctcatacatgccactcccgtgccagtccttctcctgctcatcctcaagagcgcaagtcaagcatcaccccctcaggggaggctttcctcctcatttgaactagctcaggttccttctattacatgcttttgtagcatcctgaatcttcccttcatagcatggttaactgctgcaattttgcatatatttacggtattgctggattcatttattctcctcactagaatattaactgcacaaagagaggaatgttttttcctattgttttgttcactgctaatcccattggtaggatgatgctggcaacgtttaagtctataataaataggtgttgaatgagtaagtgaaagaatgctcaccgttgaaactctggcacctagctcaaagattggagcctgcagccactgaatgaatgtgtgacagaggaaagatgttcaggagcaggatggaggtgacagttcagtgggatgc

SEQ ID NO: 354787 - DNA, 438 bp, Homo sapiens
gccgtcaccctctgtgcttagggcctaggctaaagggtcatcttgttggttccctctacctatcacccctcttacagaccttcactagtggatgttctgggaactttcctttcatcatatgacagccgtttaaattgctgggtcctggctgtttcctaagtttctattgtatagtgcaacaccatccaccacagactatgcatttaggtatgtactctgcagtactgtatgtccactcgaaaaataattattaatgtgctagatacagcagttaggcatattaaactgaatcttgccctcattcaggttacaatctctaatggttaattatatgtgtaaacttggctaggacacggtgtccagatatttggycaaacattattctagatgtttctctgtgtgtgtgtgtgtatatatacatcatatatatatctataa

SEQ ID NO: 354788 - DNA, 522 bp, Homo sapiens
caattcataataattgcattgaatttaatcattattcatcttacctatttcctactttcccctttccgttattatttcttaattaatttcaggaccaagacaagtggcaagccatatgatgactgaccagaaacattagaaagaatggaagatggtttcctgaagcttcgctactctggaggtggaatgaattgtgccaaatgtcaacttctatggctcaatgagccctttcctgagcctgtcaacagtgaactaaagaaatacaatctctgtttctccagtcaacggtagaacagtgcttgcactcccgatatttatggatatatttatacaattctcacaaacctgacaccaatggcctgggatcaatgtagacaagtggtaaagaaaaacagaatgattctctgaaaggatgcatattaaaaaaaataaaagatttgtgttctgaatggcttgttttgagaaaaagatatgcttcaactgakatctacatgatgtagcaaataaaaacaggtatgaaaa

SEQ ID NO: 354789 - DNA, 507 bp, Homo sapiens
ggttcacgcctgtaatcccagcactttgggaggccaagacgggcggatcacgagatcaagagatkgagaccatcctggccaacatggtgaaaccctgtctctactaaaatacaaacattagccaggtgtggtggcaagtgcctgtagtcccaattacttgggaggctgagacaggagaaccacttgaacctgggaggcagaggttgcagtgagccgagatcatgccactgcattctagcctggcgaaagagtgagactttgtctcaaaaaataataataataataaacagtaccaagtcatgtccagtgaattaagcacacaagaaacctcatgcaactcgtgttgaatgaatctatgaatcagttgacaagtaaggcaaacacccatagcctaagtcattctgcatacttctactagatgcttctccctggaaaggttggcatcaaccaatctttccagtcgtaccttagttgctttctcaaacactccactttagccaaaccagt

SEQ ID NO: 354790 - DNA, 566 bp, Homo sapiens
cccagggccattgtgtagtcctctcaagcccttcattttacagatgaggaaaactgaggtccagagagcttgtgtcttgcctatgatccctcagctcctttgtggcaataccaagactagaccctaacttcatatctcctgacctatttgctttttcccaagatctccagttgctcctggtaacatcaaatgaagacagaaattcttgtattgcccatgcragattccccaagtccctcatcctacagacccaagaaggaagcatgtgaagagagcgaagctaaacgttgaaggtcctggttggagttggtggtcaactccactgttgcttggatcactaggcattaaagggttctgaggctgcatttaggcctttccagagagaacactgtcatccattagcaatggctgccattgctatgggcacaggattggacagtagaaagatgaatattatatatttgtcgggttaggtcatctccgaagtcccttccagttctaagattttgcaataagagccttgagcaggaatcaggtttctttcttgaacttaaatgagaaaacta

SEQ ID NO: 354791 - DNA, 595 bp, Homo sapiens
gctaatcgctgacattcttgaatgaaagttgaccttgcttcttttctcattaactgtcttgaaagcatgcttttcatttctgctcaatggggctacttcccccccattcattcttgtgaaacaatccttgcccactgttcatctgtctgggaacaggtaagtccccagagatggtttggtaaatcagggcacgacaagtatgtatgagaattctctcgtagagttagaaaaagaaaaatctggtctcctctctttgcttcaggctttttccatacagaaacycaacagatcaaaccatttcaactgggatgaaaccatctggctcccagaatcacacattgttttacaaggcacatggctgaaacggcctttttctgtcttggtggaaatgaaccagacttttcccatttgctattcatggtcattacacgaaggttaattaattcatttgtaacccgtgtagacagcatgtaaggtgtcacaggtgatctggaacatcaaagacaacatcccttccttctgcctgaaatcattttgagccctcagtttttctcagaaagcaatgtttacaaatctccaggcagcaggaatttga

SEQ ID NO: 354792 - DNA, 633 bp, Homo sapiens
ttattaggcactcagtatatttaccaataaaatttatatatatacatttttgccaaaaaaaaaatatatatatatatatataaaatatataaatgctaaagcactgtgacaccagtagaaatggtactaaactgtaggtcagcagtagccctaaattcaaagtctaatcagggtgatgatggaaaaatcactgttctactctaggcctcagctcccttacccaaaaacagagataatattggtaacctatctcataaagttaaaaatgtttaaggagatggtgcagaggaaaaattcagtaagtcctagctattgctattgttagatcatacacagagttaaatatggtaccagggggccaccaaccatctcttagccttctttgcatccccagctcccaacataatgcttggcatattgtcgatgctcatttcaartttattcaataaatgagttggctggttggctgagtggctactctgtgaccatactgaaagctcccaattgcatcatcataaggtcctgggaggaagacgctagcttgttcttttccaccactcaggatattgcttgaacacagatgatcctaacaaatgcctgctgatttttactggaatgaaatactcagtatca

SEQ ID NO: 354793 - DNA, 601 bp, Homo sapiens
gggaacatttacaatatttatcataagaaatttttaatttaaaaaaataaaggaaaggaaagttcatcccctacaattaagcccaaaagaattttataaaatttcagatcacgttgcaatttttaaccattagaaggtgatgggccatgccatactttcaaaattgttgtcaatttttctcagatttcattatattttaaatttggtgtayactgaatttcatagatactgagctgccattatctgttcagctgcattctaagtgatgtgagactacaaggaaaatgtcacctatatgactcctttcctcaaattacctgtagtccatctaggatcaacaatacttgtgaaagagaaactaggactaattcaaggccgctcctgataaagtgtcaaattataagagaaagctgctgaattgtatagaggttcagcgaaggagaaaatgactatatatcagaatggtcaggaaaatcttcacacaaaaaatagatggaatcaaaggcagaaaggcagcaaggatgaagaggtttcagatgcagcaagaggccagtgaagcttaagcaccgagttcttgctgaaggctgcacatagtgggcac

SEQ ID NO: 354794 - DNA, 601 bp, Homo sapiens
gggaacatttacaatatttatcataagaaatttttaatttaaaaaaataaaggaaaggaaagttcatcccctacaattaagcccaaaagaattttataaaatttcagatcacgttgcaatttttaaccattagaaggtgatgggccatgccatactttcaaaattgttgtcaatttttctcagatttcattatattttaaatttggtgtacactgaatttcatagatactgagctgccattatctgttcagctgcattctaagtgatgtgagactacaaggaaaatgtcacctatatgactcctttcctcaaattacctgtagtccatctaggatcaacaatacttgtgaaagagaaactaggactaattcaaggccgctcctgataaagtgtcaaattataagagaaagctgctgaattgtatagaggttcagcgaaggagaaaatgactatatatcagaatggtcaggaaaatcttcacayaaaaaatagatggaatcaaaggcagaaaggcagcaaggatgaagaggtttcagatgcagcaagaggccagtgaagcttaagcaccgagttcttgctgaaggctgcacatagtgggcac

SEQ ID NO: 354795 - DNA, 569 bp, Homo sapiens
gttccaataaaactatttatggacactgaaatttgaatttcatataacagtcacatgtcagtattcttcttttraatgttttcagccatttcataaatcattcttagctcaaaggccatacaaaaacaggcagcatgctggatttggccaaaaggctatcgtttgctgacccgtcacttacattatttggggttaaatgtatattgaaatgccatccaccacaatgtctcaagtgtgcaataaatatttgaaaagtttaagaataaacaactaaagaaaacacagctcttgtttatgagaacttcataggatatccatgtatatgatttcctgaaagagatttttcaaataatggttttgtctaatgacggtgggttcagcagaactaagcaaacaaacaaaaattgttgcttgtgacagattagctattaaattatgaaatggaagataaataaaattttgtgttagaatgtgtgggaaatacagagttgaagaacccctcatgaatctaaatgcataaagcatttgtttggatggtaaggaggtaaaagagatcactaatgggtatt

SEQ ID NO: 354796 - DNA, 569 bp, Homo sapiens
ttggtatgttgcaggaagaagaccaatgtgaatgaagtatatgagcaacgtgtagagtaaaagcaggatgaagctagtggggccccagattgtgtgcttgcacgtgcacatgtgtataaagaaaaaatatatatgtacctccatttcagtaattgtctcctcactgggctattgtgttgggctatgtcccctctgtaaaaatgttcaacatcattttaaaaaaggtttgcaatgaacatcagcagcactaagtgaagaagcacttaatttatcattccttgtggctttggacaggtccrggattgtcacagtaaataaatcatatgtcacatttgatttgtgagcaatttacatgctattttatcagaagttaaacaaaaagcaggtttcaaattgcagtataaaatcatctttaggaaagtttattctgagacagaaacaaagagattcttctctttctttttttcctgaactggagataccattaatgatgttaatcctcatgaacattgagatagacatcctatcatgataaatgaagtagaatttctcagctggtttatgtctgg

SEQ ID NO: 354797 - DNA, 556 bp, Homo sapiens
  misc_feature (1)...(556): n = A,T,C or G
gtctcgaactcctgacctcaggtgatctgcccacctggcctcccaaattatatcattcttaaagagcaactttttcaaagcaaaacttccttcctaaatgaacagtagtttatgaagacacttaccctcccagcaccatgataaatttcagctaagcctctgtcgcaaactacatcacctcaacccctcgacctctgcacgacnaccatcagctcatcattacatctaaaactttcaagcccttgtgttatgtcagttgccatgctaagtgcctataagtgttttatatyaccgacggtcacaagactagaaggtaggttgttctattttacagacaaaaacactgaagccaaaggtcccaccactagtgaagactgtctgaatttcagagcacatgcttttaaatgaatgcaaaatcaatggagttgtgtcacgtatatgcagttcagggttaaaataagtaagtaggttggcaaaagtcccaaatatatccaaaagcacagagggaacaaatgtgatttttttcctaccaatttccttttaacctcctgatttc

SEQ ID NO: 354798 - DNA, 644 bp, Homo sapiens
gtatgcattttattctatattgttagctagaccctgccacatgttttagctcattttatttcatgctccaagcccactggaagaagatcaagackggtgtactcagccccatgttacttgtatttaagaaaggagaatggcctgcccaagatcatggctgtggcatgtggcaaagctagactgaaactcagcccctgtctcctccttacttctttagtatgtgtatgaacaaataagaatttgaggccgggagcacgtggctcacgcctgtaatcccaacaatttggaaggccaaggtgggaggattgcttgagcttaggaggctgagaccagcctgggcaatatggcaaaaccccatctctacaaaaaagtacaaaaaattagccaggcctggtgtcacatgcctgtacttccagctacttgggaggctgaggtaggaagatcacttgagcccaggaggttgagactgcagtgagctgagatcacatgactacactccaccctaggtggcagagtaagacctctcaaaaaaaagaatttaagaagccttcttcataagtgcctacatatagaaagaatcatcctccacgaatattacatagagtcttattatattttctatttgctccaatagcttaacttaa

SEQ ID NO: 354799 - DNA, 515 bp, Homo sapiens
ctgcctttggactccaaaacttgcagcagcattcccctagttctcaagccttccgcctcagactgagagttacaccatcagcttccctggttctgaggcctttggacttggactgagccacaccactggctcccctaggactccagcctgtcataggacttcccagcctccataatcatawaagccaatttttgtaataaatccctgcttatctctctgtcctatttatctatgtaactatctatttatctgtccgtatatctagctgtctatctgtctgtctttttggttctgtctctcagaagaaccagactaatacaattacctttcattattataatttgactctagtgaacatctattacccttttggatactaaagctccacttttcttttgaggaacatttccacatcaatctcagtaggccattaccactcagtcttcagggatgagcccatgttttaggcctgatcaagtaaatacacagtgactggccagttcaaggatggccag

SEQ ID NO: 354800 - DNA, 510 bp, Homo sapiens
ctggctggcttgggttccaacacccaggccaaagaaaaacacgcacgggtctgccttatagtcacaccaggatgccataccagcagtccctgccaccatcacctctttgttgtctgctcygcctcccctttctacagtcctaagccaccattcctctcctgtggatgactgcggcagtctctccccgatgccacggccaccaatctagctccccaaacctctgcaatccccacactgcagctgaggggactccttgacgtgtcctctggaattttgaacttatcaaaaaggaaagcaaatactaaatttcccccctcaaataggatctcctcctcgtgttcctctcttactaaatagctcaggccaaaaatgccagggtcaccaacaatgcctctcttcctcacataccccacacccaatccatcagcaaatcttgtcaactctgaattcagaatataccccacatccgaatgcatctttccatccctccaccaatcaccttccttcaag

SEQ ID NO: 354801 - DNA, 564 bp, Homo sapiens
ggctactccatagatagcatccccaagggctgctggttgcccgtttttacagttattttttggttatatgctaaagaaggggtggcttattcatgcctcccctttttagaccatatagggtaacttcctgatgttgccatggcatttgtaaactgccgtggcgttggtgggaatgtagcaatgaggacaaccagaggtcactcttgtggccatcttggttttggtgggttttggctgcttctttactgcaacctgttttatcagcaaggtcttyatgacatgtattttgtgccaacctcctatctcatcctgtgacttagaatgccttaatcgtttggaaatgcagcccagtaggcttcagacttattttacccagtccctattcaagatggagttgctctggttctcacacctctgacaatcttatacctctggccataatgattggttctgaggtgattatgtcctttttttcttttttccttttgagacaggatctctctttgtcacctaggctggagtgtagtggtgcaatctttgctcactgcaacctcgagctcctgg

SEQ ID NO: 354802 - DNA, 543 bp, Homo sapiens
gatctatgggactatgttacaataattgcaacataaacaatggaatagtacagatagctccaagataatctttcatgtacctgactttattagataataaaagtggtcatacaagtctatggaaaaagaagtagcattcaataaatgaccctgggacaattgattaatatttgaagggaataaataaagcaaaattaaatcttcatctcatactatagatcaatgtaaattccagattaattaaagagtacaaaataatttaaaagttaatgaaaactaataaacaatccagacaaacttctggcaccttgatcacttaatcacaggcatctaatcstttgctgtatctgtgctggaaattacagaaggctgatacccatatatttgaaactttaaaatgtttatactcaatatagcatggatgaaacaaaattcaaaaatggatatttggtgggtgttggggatcaatataaaaggaaataaatatttacttaatctgatcaaggagcagtagagggaaaagggacctttaagaataagaaa

SEQ ID NO: 354803 - DNA, 451 bp, Homo sapiens
gagtttgagaccagcctggccaacatggggaaaacccttctctactaaaatactgaaattatgtggtgttgtggcrggtgcctgtaatcccagctactcaagagactgaggcaggagaattgcttgaacccaggtggtggaggttgcagtgtgccgagatcgtacaattgcactccagcctgggtgacgaagccagactctgtctcaaaaaaaaaaaaaaaaaaaaaaagaaagaaagaaatcagaatgatagttaagaagaataaactaataaattaatttaaaaataagagattattatgcataacttcatgctgataaattagaaaatgttgatgaaatagattattaaaaaacatatatggccaaaaaaatgattccaaaagaagaaataaaaaatctgagtaaagccatggagaaaaccgaaaaattattcaaagaatggcagtgg

SEQ ID NO: 354804 - DNA, 552 bp, Homo sapiens
ggagaattgcttgaacccaggtggtggaggttgcagtgtgccgagatcgtacaaytgcactccagcctgggtgacgaagccagactctgtctcaaaaaaaaaaaaaaaaaaaaaaagaaagaaagaaatcagaatgatagttaagaagaataaactaataaattaatttaaaaataagagattattatgcataacttcatgctgataaattagaaaatgttgatgaaatagattattaaaaaacatatatggccaaaaaaatgattccaaaagaagaaataaaaaatctgagtaaagccatggagaaaaccgaaaaattattcaaagaatggcagtgggctcaggtggtttcatggatgaaatcataatgttgtttggaaaaactgctgggagttattggaatctatacttcaatgtctcatccacaaggcatcttggggacccatgggagctaggcaggtgactaaggagcgatcttcaggcagaagatcataaggtgggctggggactgcagtaaacagaggcaggcatgcttcatcaaatgcagatgct

SEQ ID NO: 354805 - DNA, 602 bp, Homo sapiens
gaatagtagtcctatttttagctctttaagaaatctttttttcttttctttttttttttttttttaagacagagtcttgctctgtcatccaggctggggygcagtatcgcaatctcagctcactgcagcctctctgccttctgagttcaagtgattctcttgcctcagcatcccaagaagccggcactacaagcacatgccaccacacctggataatttttgtatttttagtagagatggggcttcaccatgttggccaggctggtctcaaactcctgacctcaagtgatccacatgcctcggcctcccaaagtgctgggattataggcgtgagccactgcgcccagccgagatatttttatactgttttccatagaggctgtactaatttacattcccaccaacagtatgtaagcatttcctttcctctgcatcctcaccaacatctgttattttttgactttttaataatagccattctaactggaaaaagatgataccccattgtggttttaatttgcttttctctgataattagtcagaaaatgtcattctatacatagaatacatttatctttacccaaaggacatcacccccaaag

SEQ ID NO: 354806 - DNA, 540 bp, Homo sapiens
tctgtgggctgtttctagtcaactcggtgtgtgcccatgcatatgccggaatacatagtaataaaaagctggttaaatgctggtcctttgcaatactggctatttccaaggaagagagctttcaggtgtgcaatgccatttgccctttggactaacaagcaaagcagacctaacttcacctgcttcatggtctcacttagataacaatgttaacaaatgatatctcagagacctttgaacaaaatctgacattttcagtgactctcccaccatgaatccatcacccccttcgatgtagatatgytaaaatgtataaaaggcatattcaaaggccaaaatcttatagtcttttgcccaaggtccctaatatgtgtatgacagagtctatgtatatttagcttcttccatcttttaggaatacatgatcatgtatatatgaacagttccgggtctgatctgagcgggttgtcttcggtgtaaaccagagctccagagaaaggagggtagacatattggtttgtttgctggggaaccaaattg

SEQ ID NO: 354807 - DNA, 469 bp, Homo sapiens
tgctggtcctttgcaatactggctatttccaaggaagagagctttcaggtgtgcaatgccatttgccctttggactaacaagcaaagcagacctaacttcacctgcttcatggtctcacttagataacaatgttaacaaatgatatctcagagacctttgaacaaaatctgacattttcagtgactctcccaccatgaatccatcacccccttcgatgtagatatgttaaaatgtataaaaggcatattcaaaggccaaaatcttatagtcttttgcccaaggtccctaatatgtgtatgacagagtctatgtatatttagcttcttccatcttttaggaatacatgatcatgtatatatgaacagttccgggtctgatctgagcgggttgtcttcggtgtaaaccrgagctccagagaaaggagggtagacatattggtttgtttgctggggaaccaaattgagacag

SEQ ID NO: 354808 - DNA, 560 bp, Homo sapiens
ggaaaccccttataaaatcatccagtcttgtgagacttattcactaccactagaacagtaggcaggaaaccgctcccatgattcaattatctcccaccaggtccctcccacaacacgtggaaattacgggagctacaattcaagacgagatttgggtggggacacagccaaaccatatcagagggtgtccactgtcaaggacagctcagcaccaagcccttcttactgggctctggagtttctcagctgaaaactcttcttctttccatctccaattcctctgctcacttgtcttccagctaagtcacctccctgccccctccctgcacatgtcccggccccagctctctctggaatccaggagcaggaagtccctgtctccacctgactctacatcttaggaaagtgactcccttgagtcattrtttctgtgttagtaagcattgaggaaggaaaatacatcccttgggtaccagggagagaacagagggaggcaagaaataaactgaaggtgcccatcctagcacttggagccctgtcttgccatgcacgtaagcaga

SEQ ID NO: 354809 - DNA, 649 bp, Homo sapiens
cccattcctgaatcaatcactgtgaccagcaggatggaatatttccattggctgggacaggcccacttgaccactgctggagccatgttacatggaagccatgttacacccatgttacatggaagaattgaaagagggtggttcttctaagaaatattagaatgctgtcatcacaaaacactagaatagacagaaccacagatgcccactacccaatcaagatgaccgaagggaaagatctgaattaaggaatagatccccctacctctcaggaaatcggayttccccatcttctattaggaccgatccatctctcagccttgctcactggtgcagaaatataaagcattgacattggagtaggtgtttagggaggaggaaagtgtgttgatattggagcaatcttgtgtgctaaagacctacaactgttccccaaaatatcaagctcttctcatcaacacagatgaaaataaaagagaatacagcacatatcctttaggttagagctcagatgtcaccgccttagacaggtcttttctgactgacaccctgcttaaagtgacttcctccaatcactatcttatgtcctctttattttcatcataccacttatcagaatctgtaataatcatgcttacagagtaattgt

SEQ ID NO: 354810 - DNA, 594 bp, Homo sapiens
tgatactttaaaagggggatgaggtggtaaaggagctcaaagtcacacaaacttgtggcaaatcaaggcttagaatatgtctttaaactctcatcctttaagttttccagttcactggggtgcctccgatgatttttgtttgtttcttttgtcttgcttttgagaactgtcatacatttcagaaaaaaaagatacacaaatatttacatatgtaaatgtttagagagattacaagataccagcaaagttcactttattttctaccagaatgtattcacattcatctgttgattttaaagttttgaaaacacatgaataatctatgtaagctgaataaaaatataaaacccaacaaaacaacaaagtaatgattttgtgggtatactacatttcccctgcaataaaggcacattataatgcytaaggaagagtaagtctttacctgccaatattcataaagggtggtaattttgtagcacagcactttacagatctctgcatagtgggcattgacaaaaggataaaaattcaatttatttaattagggaaaaaattgtggagaacttgaactccttcatactaatttagaaaatc

SEQ ID NO: 354811 - DNA, 489 bp, Homo sapiens
ctgtgctccatctattttagtcacgctgagtccctctccatttattacattctaatctgaacttcttggattttcaaatccccactttgtaaaactgatcagttttgtatgtgtgaacacatttccatgctggctgcctcaggcaggctcagtcttgagagctgactgataactgaggtcccagctactgccaactcttctcaggcaacaggtggctctctttcggctttcctttccatgaagtattagactagatagtaacataataggaaacgcttctatttttattttctttctcttctytctctttttctttttggtttgttttgacttgaaatgttgctaatatctctaaagaagttagctttacttgtacacttttacaaaaaaattttaaatgccaaagtataggatcatatcccctccacctccccattgaactatgaagtcaaaaaactataaaacctctgagaaatagcttaaattccc

SEQ ID NO: 354812 - DNA, 543 bp, Homo sapiens
atcatcatggaagtatggatattaggtacggctactccactgatttaagcaattttcttttcttttcttttccttttttttttgagacagagtttcacactgtcacccgagctggagtgcaatggcgggatcccggctcactgcaacctccgcctcccgggttcatgcgattctcctgccgcctcccaagtagctgggatwacaggtgcacaccaccacacccagctaattttttgtatttttagtagaaacaagatttcactatgttggccagacaggtctcgaactcctgacctcgtgatccgcctgcctcggcttcccaaagcgctgggattacaggcgtgggccactgcacccggccaattttcttaatcttcatttccaattaccttccttaaaataaagaccaacttacatttactttataaaaatgcaaatatttgaaaatttcaggcaaggtaacactattttattttgaccattataaactaaaattattagagtagcaagccaacaaacagatagctcatcaaacaaatgtgt

SEQ ID NO: 354813 - DNA, 554 bp, Homo sapiens
ttggtttggatccattgctgcttaaactagtgtaatttttggggggtgttgagccttgttttgtcatattagcagggttggtcttctggttcctcctcatttgggtaggctttgtcagagggaaagtctagggctgaaggctgttkttcaggttactttgtcccacagggtgttcccttgatgtagtactctcccccttttcctgtggatgtggcttcctgtgagccaaactgcagtgattgttgtctgtctctgggtctagccacccagcgagtctacctggctccaggctggtactgggggttgtctgcacagagtcctgtgatgtgaaccatctgtgggtctctcagccatggataccagcgcctgttccagtggaggtggcagaggatgcaatggactccatgagggtccttagctctatggtttaatgctctatttttgtgctggttggcctcctgccaggaggtggtgctttccagaaagcatcagccatagtagtgtggagagggaccagtcgtgggtggggccctagaacaccaaagattatatgt

SEQ ID NO: 354814 - DNA, 563 bp, Homo sapiens
taattaccaattctggtgctcttcattcctttgtgtaaatccagatttcaatctaatatcattttctttctgcataaagtacttcctttaatatttcttatagtgtaagcttgatggtaataaattcttcaagtttttatgtcataaaaaattttttttctctttattttttcaaagatagtctytggtacatacagaattctaggttgacagttttcttctttcattagtttaaagatgttaatatattgtcttctcacttgcattctttcaggcaaaaagtctgccattacctttgtctttattcttcttgcatgtcctttttcctctggctgcttttaaggttttcaccttatcactggttttgagtaatttgattataatactccttggtatagtttcctacatgtttcttgtgcttagcgtttgttgagtttgttgggcctgtgtgtttttaatttttatcaaatttggaaaatattcagttattatttttctttctggcccctcttctctccttcagaaactgtaattacacatatattagtgaaattgacccataa

SEQ ID NO: 354815 - DNA, 640 bp, Homo sapiens
tccaactcatacttagttaattaaaagccatatgggtggggaccccccaaccctctaattgactctcatatatagtgaagattgaggatcactgctaataagatattaagatagatacaaagttttagttataaaaataacatggtacataaaagcaaatatagaaaaatgttgatagaagaatgtagatgatgagtggtcattataaaacttaaaactttgctgaaaaagaaaacacgacacagaggcatggacagaaaaacagaccaaaggacataatagggrgctcagaaacagtcctgcgtatacacaggtatgcaactgtattgatatacaataaagtttgcatcggattaataggaaaaagtagccatcagaagagaaaacttggagctagatctctaccttacatcatattcagtggtagactcaagaagaaaagatctaaatgttaagtaaatctaagtaattaatagaagtaaatgtgggagaaagcctttgaacctttgtgactcaggaatgaagaaaacttttttaattaagaatcatgaagcgtaaatgatagatttgtccttatccatgttaatctttttttctaaacaaacaaacaagagataccataaacaaagagaaagagaaa

SEQ ID NO: 354816 - DNA, 514 bp, Homo sapiens
agccttcatttaaaagacggatgggtgtgtgtcatgtttcttaagtgaacaattgccaaaccggggtagaaaaacaaaaaagccagagtatactttgtggggccagaagagatggggaaaaggggtgagtggcagttaatgggtttcctcaggcagggccattgtcaatgtttggagcctgatttcaagagtatcagtagagaacctccaattctgtgactctgggatgcagaaaaatggagtaatacttttccctgccctctataagaatagcaagaataataacaatgaacgttactcctgtcaatcaaattcccaacacttattaattattttagatatacctaaaaagcaatatatgcaatatatattttttcaaatggtataattgagctaatagagaaaagagtttaaactgtttgcccatagaccatacataactcactttgaatcatcrcaatccccaaatcctaccgtattgtatagccttgtaaattctgtggtaattacaact

SEQ ID NO: 354817 - DNA, 628 bp, Homo sapiens
atacctgacaccaataaaggtgcttcttaaaggggccttagagacagcagccattggggtcccaggctaaattggttaactggacgtagtgggtggggattttgttcaaaatgtatggcagcttccaggaatacagatggcttgtactaattctcagctaataaggaccccactccctctgcttccttgttcttcacaaaaggcgcaaagacagcaggcaagtcattctccaaagaaagtgtamgagtgccctccaagggtgtcctattttgcaggttagtttcaacaatcttcctctcacttgctcccacactttgacatgcaaagcactctgagggaacaaaaactctaccaccattccttacctgagctattattgatctctggagttctgaagtaataacttggactccattcactccagaagcctttaaaatagtgatcagggatggatcgaactttaatctcatacattgctgccggttggagctttctctgcaggagtgtcagctttgtgctggataaattcacatgctagagagtagagtgcagttacattcttaggatgggaaaagaggtgttgcctaaatctcccaaatcatttcaattgggattcctttagtcccat

SEQ ID NO: 354818 - DNA, 583 bp, Homo sapiens
attaatttggcctcaatctatattgttatccaactcactaatgtagaaacattctgaagaccaaaattagagcagaagaaaacaaccagagctagaagagtatgcatcagggaagatccaggttttcatggggccaatattgggagattctttcagtagaaggtagattttgaaagcaaaattgttgggccctcccaggggaaatgcactactaggccaacaaaatagaaaacattcataagtttttattttattaatgtagttgaactacataccgtccatttgttttcatccttttcctggcggtaagctacatcgtgcattaaaacttttacatacttcttttgcaagtgtgatgtattaaatgtcaccacaaagtcattggctccttcccgatagaygacactcaggtcaaaaggagcctcaggtttaactggaaaagaaaaagaaataaattctgtctaaagggcagccaaggaaataattatagtatttaaaattcatctcctctgcaagtcactttgaccctttttgtgtcagtaaatggccaactattcagaaaaccatttcttcttcttgggtt

SEQ ID NO: 354819 - DNA, 423 bp, Homo sapiens
ccagtttaaactcacttaaatggtagttccattaatgaagtgtcccattaggacctagaaggagatgctaccgtgagacatgcctccaccacctctcttcctgcttgtccaggggtgcttgccatagccccaagagactcacactaccccttccaaaggggcctatgccatcagcagtgtgtgtaccatacgtacctctcccccttgccgttcggakgaggcatgtcagatttgcagtctgctgggggatggagactgcaagtgcattgagcatgtgggatatggggatttggaggtggcagatgtcacctggaggctcttggtgtgttgtgagtgcttatgtgcatgtaagggcttgcatgctggtgtggagttttgtaagaatgggctctcccctgatgctccaggaccttgtcagaagac

SEQ ID NO: 354820 - DNA, 588 bp, Homo sapiens
cacaaaagtcaatttcttaatagaaatctctcctatcaatsatctatctatctatcctcctattgattcccttttttttttgtagaaaactctgactaatagagaaggcatatatgctttttaaaataacttgataagttagctaaacttactcagaatgttgtggggatttggggagaagaccacaaggaatttgggagaaggacaggtaaggaaggaaaggacagataaggaaggaaaggacacctgtgatggatgacaggaagcccagctccagttagccacttcatgtaggtttgcacaaacactatctttcacacctgggtttgaagatcctcagaattctttcactgcaggaaagtataaatttcaagcttttcatttattataaaaatttacagtagggaattagctattatctattgccagttgtttccactatttgtctacttttaacctacagaatgtccagacacagtgttttcaggtagcccaaaagtgacaaccatacttttatatacaacttcttacctatagtggttaggtctatttttttgcaggttagactcttttctccaaccttcacac

SEQ ID NO: 354821 - DNA, 605 bp, Homo sapiens
gagtctcagggtctgaaagctgaaccgtgagaggagatttgtatgagtgtttttggtgaaggacaaggagtttcaggaggcctttgggaattccttagatgttaacatttgttaattaggccacatattctttcttttgtggctattaaaaagagcatatgaaaagagagacagaggatgtctaagcaaccattaaaaccaccatccctcaccatatttcaaattccagattggtgrtgttgacatctgggtcctcaaaagcacaggtcagtgagtgctgcgatccattcacttccaactggctatagcatgagaatgagtagtcatccagttctgcatcttccaagtctcctggggaggaacaaacatgcagctgttaatgaaacaaataaatgcatccttttgaaatatggcatgaccttaataaaatagcagactctgtggcagacatgaaatagtaatggattatgtagtattcaaggaagaaaagcccaagggcaaagacaagaaaaatgcttcaaaaccaaccaaccaacaaaaaacaaaaaacaaaaacgctcaatgctaacagagttttccaatagaaaaaaaaaatccatcataat

SEQ ID NO: 354822 - DNA, 605 bp, Homo sapiens
gagtctcagggtctgaaagctgaaccgtgagaggagatttgtatgagtgtttttggtgaaggacaaggagtttcaggaggcctttgggaattccttagatgttaacatttgttaattaggccacatattctttcttttgtggctattaaaaagagcatatgaaaagagagacagaggatgtctaagcaaccattaaaaccaccatccctcaccatatttcaaattccagattggtgatgttgacatctgggtcctcaaaagcacaggtcagtgagtgctgcgatccattcacttccaactggctatagcatgagaatgagtagtcatccagttctgcatcttccaagtctcctggggaggaacaaacatgcagctgttaatgaaacaaataaatgcatccttttgaaatatggcatgaccttaataaaatagcagactctgtggcagacatgaaatagtaatggattatgtagtattcaaggaagaaaagcccaagggcaaagacaagaaaaatgcttcaaaaccaaccaaccaacaraaaacaaaaaacaaaaacgctcaatgctaacagagttttccaatagaaaaaaaaaatccatcataat

SEQ ID NO: 354823 - DNA, 585 bp, Homo sapiens
  misc_feature (1)...(585): n = A,T,C or G
aacaaataaatgcatccttttgaaatatggcatgaccttaataaaatagcagactctgtggcagacatgaaatagtaatggattatgtagtattcaaggaagaaaagcccaagggcaaagacaagaaaaatgcttcaaaaccaaccaaccaacaaaaaacaaaaaacaaaaacgctcaatgctaacagagttttccaatagaaaaaaaaaatccatcataatgagtaagtaacctccaaatatttctgagttaaagaaccagaggcattgaacacattcttttcygtatttaaactggagttttttctgctacatttgttacattgattgttcatattatttcaaagaagagacactttatttccattatccccatgctacctaatctcacttttcactttattacaaatcataatttattccctccctagtattttttttgtcttaaatgaaggacaatgatagctatcttgcagtcagaattttgcttttttaagaggtcactttcccttgcctaaaaaggcatcccaattaaaagtggcactgattatttccattgtcnnnnnnnnnnnnnnnnnnnnnnnn

SEQ ID NO: 354824 - DNA, 602 bp, Homo sapiens
ctacacttgggagtgaaatgcattccttcttgagaatactgaggtcttataaaccacccatagtattgatcccctgccccctgtcatggtggttaaacattaaaaaaaatgactgaatatgtgggaaattctcaaactgcattcaaacccagtgcctgactcaggtctsttagggaactgaataacctgaaaccatactacagataatccaaaatccataagaaaacttagaaatgactcaccattttgagcatagccactttctccagaaacgacttgaagtaaagaaaaaaccatgccaaaagttgtacctagaattgtcattctgagagagatagagagagagagtagatgtgtgagccagtgtgtatgaaatgaatgagagtaagaggaagggagggagggaggaagacagagaagcttagatctagggctttatacttatctaaccacagacaagggaagtataaacacagcaaaaaagaaggcaagttccagaaacaggaagtctgagtaaaagtattgctgctgtaagcagaggtcaaggacatgaagagacagagcctctgaaattattgttcctcctggatattccctgcagc

SEQ ID NO: 354825 - DNA, 571 bp, Homo sapiens
atgtctctttaaattctcttgtttatcatttaagtggactatcattttgattgtatctctttcctttagttgtgaagatgtaaaagaacaaagccaagacacaatattttggtacagcatgtgctggtttgttctggggatttccacaggggtgcttactcttgggtggggcaggagatgctgaaaagacctcagagagaagcctaaagtgtggggagctcaaagaaaaatgacatgcgtcaccagtccttctagagattgtgggggaacaacagtgccttctctctttcctcactcaggtcttgttagtcctttggagacttagaaaagctgaggaagaaccacctagttcaccctatcccccaggtaacaaacatttactatattactttgtcattacttttgtgagacaagcacagaaagaagaaaagaggatgaggaacactatttggggacactcaagtctccaaatgtgaaatcaggagggaagcattggactgtggtagaagcaagcagtttggcrtggcaactgacttggccatatttctatctcctcctcttcacccatcac

SEQ ID NO: 354826 - DNA, 578 bp, Homo sapiens
cctgcccccacctactgtcaacttacctttcttaacaggttttatccttaaggtggaaaacaatcttgggcaccagctatcttattaaaaaaaaaaagccagccctgctcaagagagaggctggggaccacaagagctgtggaaaaaaaaaacaacaaacaaacaaacaaacaaacaaaaaaacccaacatccaagggtgtcaagcaggtgaggatggctgtaggaaagctaatgccactctggtcctaaatgaatagtctctagcatttgataaacatgtgctgagtcagtccctacgattctgagggggagtcccagcatcttgaagtttcatttccaggagcatgacattttccttgttgtggctcttctttcatttccctttcctccttcccccacgtcttcagcytcatgtcttgctgccatttgtcttctttctgggcagagtttgaaatgtcatactattttcacctttatgagattttagcctctgtctctggatgcaataaaaatggaaactttgagtaccaacatttcactctttgctgacgacatttctgccagaaagtgagtggta

SEQ ID NO: 354827 - DNA, 584 bp, Homo sapiens
cctgagggaccacagttggtggccacaccctgcaggtcgtttccaaatctggaccactgggagaactggcaagagtcctcaattctactctgaagcttcctctgctctcttagaacccagtcctctgtgcaaatggagtccccaagaacaactctgctagcctaaaatttcccaagcttaatatgcaaagtcccagcctgggcaatatggtgaaaccctgtctctaccaaaaatacaaaaaattaatcaggtgtgatggtgtgcacctgtaagctactcaggaggctgaggtgggaggatcacctgagcctggraggttgaggctgcagtgagcagagatggcaccactgcactccagcctgggtgacggagtgagaccctgtctcaagaaaaaaaaaagtaaagtcaaccttaaaagcgaccctcagttatactgctcatggaattgtcacagagaatcagcaggtgttcctaaaaaagcaggaacaagggctctgtctttggtcacactgcatacccctgggctaagtgattaagatacaatcattctttccagaggctttccaagaaaatggtaatgtact

SEQ ID NO: 354828 - DNA, 606 bp, Homo sapiens
cttccctgctgcatagccctctaattttagtcagtcagggagatggacttgagacttatctcccatctcctcagttgcagcacccaattaaagccttcttccttggcaaaaattgtctcagtaattggctttctgtgtgatgagcagcaggacctcaactgaacccctggtgttttggtaacagattttagttccctgaccatgaccatgttgctcatggctgggctgctgtgtgtcagcagtctcagaagccttcctaagcagctgtctgctcaattttggctggtgataacttctcatttttctcaggctttgctgttgctggccccaaccatgttcctgattgcctaggaaatamagcccttgaaatatgacatctgcatctggatagatgaatgtcctttgtggatccagacagcaggatctgctccattcactcagggacatttttaaaggcatttccatttataggttgaacaaacccaactgactaagagagggacgcacactgactgtttcagtatgaaaactcttggggacttgtttgtaactgtatgttgtatgtgtgtccaggcaagtgagtgtcttttgtgggtagcagacagt

SEQ ID NO: 354829 - DNA, 562 bp, Homo sapiens
tgtgctttaacaataagactggccgcattttgcccctgccctagagatctttggaactactttgaacttgagagagattatttagggtatctggtgaaagaaatttctttttttcctttttttttttttttgagacagagtctcactctattgcccaggctggagtgccatckcatgatcttggctcactgcaacctccacctctcaggttcaagcaattctcctgcctcagccttccaagtagctgggattacaggtatatgccaccattgtgtatttttagtagagatggagtttcaccatgttggtcaggctggtcttgaactcttgacctcatgtgatccacccgccttggcttcccaaagtgttgggattacaagcatgggccaccatgcctggcctgatggaagaaatttctaagcagcaaagtgttcaagcagaaacagagcataaaagtttggaaaatttgtggcatgatgacgcagtagaaaagaaaaacccattttctgagaagaaattgaagcctgctgcagaaatttgcataactaatgaggaaccaaat

SEQ ID NO: 354830 - DNA, 562 bp, Homo sapiens
tgtgctttaacaataagactggccgcattttgcccctgccctagagatctttggaactactttgaacttgagagagattatttagggtatctggtgaaagaaatttctttttttcctttttttttttttttgagacagagtctcactctattgcccaggctggagtgccatctcatgatcttggctcactgcaacctccacctctcaggttcaagcaattctcctgcctcagccttccaagtagctgggattacaggtatatgccaccattgtgtatttttagtagagatggagtttcaccatgttggtcaggctggtcttgaactcttgacctcatgtgatccacccgccttggcttcccaaagtgttgggattacaagcatgggccaccatgcctggcctgatggaagaaatttctaagcagcaaagtgttcaagcagaaacagarcataaaagtttggaaaatttgtggcatgatgacgcagtagaaaagaaaaacccattttctgagaagaaattgaagcctgctgcagaaatttgcataactaatgaggaaccaaat

SEQ ID NO: 354831 - DNA, 578 bp, Homo sapiens
tataccaacatattagaaatgaatgcatattaagtaaaaatgttcaggttatgattttttaatgattttactctttatcttcttattttcagtatactgatcaatttccactttgataggagcgtttctgcagcagtagtttttgttgttgcttactttgtgcaggtatttattgttttatgtatgcgtcactacaactcttgtaaattgtagtactattcccattttacaggtgaagtatctaaaacttaggaaatttaaataaccagctcaggcatacagttagaatatacatagcaagaaataaacaaataaaacaatttttaaaaacctctatactrgacaaaattcttaaattgtagtattcaattttttaaaaaaatttactgtacaacagggactagatttcaaggatatgcaaacattttaaatatctatctgctcatgatacgaggggatgaagcaattaaaacagataaccacaatacaacatgggaaaggctaataaccattagagagctatcaatcacatcagagatcatttacagggtggtaggaagaacctggctgtgcaagcc

SEQ ID NO: 354832 - DNA, 602 bp, Homo sapiens
atactcaccttttaaggttccctatacatgaggattaaatgatctaattcttacaaagtgcttagaatagtagctggcacatgcaacatatccaataagtgtttattattgctcgctacttctcccagcttccttaggaaaatgcagtctttagaaacatgttatcagcttggaggaaattgccctctgaaagaaaaaacagcaatrtatgcatcttagtattttaaaggaacttgccaagcatgcacctggcacaatgggcaaactttataaagggtagctaaattccgaaataatttgtaaagggctcctgaagcatcagaaagctaaatgatgttttccgattgaggatgctattcccttggatgcttttggagggagcatggtgcaaagctctccttaatttaaaaggacattaccatgaaatgggctcaccgtgaaatctgttgggagaagagtgagcctcactctctggagcgcatggtggagtctgccatatatgagaaggatgttgtggtttcagccaggtttgtgggggcacagcaaggtgaggctgtcgctattttctccgtgtggttagtatgaagtgagcaaagacacaa

SEQ ID NO: 354833 - DNA, 597 bp, Homo sapiens
cttttggggttagtattggtttcttagtctgtgtctgttttttaccagctgtgtgactttgggtaagttacgtaacttctctaaacctcatttcttcatatataaatggcaatcttaagggtacctacttcaaagaattatcagaactaaatgagataaggagcatttagcacagttcccagctcatagtaaaccctcaataatactagctatcattatctattgttacctaatattaatatctccatcttgttaggtgggactcatccttcaagaaattgttgggtcttctttctcttagtaaacataatttaattycaatctcttttaactttgtgtcaactacaattctaattaacatgaattctatacctctctttgagtatctttgttgttggactgtatcacagaggtgaataagacagacgtggtcagtatcccctatagccatcagtccattgagaaagacagttaatgaataactcatgtatgaatcttctgtgtttgctaaagttatttcaccagttacaaattcacttgtctttgcatctagccatatttgtttaccttgttcccaaggatatatggagatatgaa

SEQ ID NO: 354834 - DNA, 602 bp, Homo sapiens
tggatgcagaggttacatgaagcagcaaagctgggcactgttagaggtaagaggaaaagtgaaaaggctcacattggacattcttacagctctcagagattcccatctcgaagggaggcaatgtggtgtggaggaaagagcatgggctttggcattggtctctactggagttgaatcacagctctgcctgagcctagttgggcaatcctgtgcaagtcacctaacctctatgatactctgtgtcctcacctgtaaaggggaaagtaatagcaaacccagagcattattacaaggacaaaataagaaaattatgcaggcaacatagcacacctcataacccatagcaagtgctcagtacatgctattctcatttctgttgcctttataaagaaaatagaggtgggaccaacattgtgggaaataaaaaagacatttggatcagagcttgtgggaaatgcaatgagatgtttactaaagaygtgtgaaaataagtgagtagtagcaaggtcagataagattgcggttatgtgttaaatagatcatgctatgataagcaaataggggtaggagataaacgtgcaaacagtggaagaagtgagaga

SEQ ID NO: 354835 - DNA, 592 bp, Homo sapiens
cttggagtagagcttcaagtgaactttagcccrcaagaagcaaaattaggaaatgtgtctctttgtagaattagaattagaattcccgttaacaataagaattgtcttgggctgctcattgacttagtgatcaatttaaatgtgattttcccacatattttgcacaaatgtatcaacataacataaagctgctatggtttttagtcttaggttctggggcacagcaacaaagcaaatacacaaaactctgacctcacagaacttacaactgactggagtgatagatgagagagtaaatatactgtagtttgttagatgttgataagggcgatgggaaaaaaaaataagagtgggggtaagatgtggtgagttgcttctattttgtatgaggtagtaagagaaggctttattgataaagtgacatttgagcagagacccggaggaatttgtgggacaaataatgcagagatgtgggaggaaaatcattctaagcagagagaatagcaagcacaaaggccctgcggcaggagtgtacccggtgggttctaagatgtgcaaggtagttttgtcacttaagcagtgagaaagggga

SEQ ID NO: 354836 - DNA, 577 bp, Homo sapiens
gggaggagtcaagagaacagaagctattatcttcctttctttccaagttcccctcaccacaagcttatgatagggtgtgtgtggctttagttagaatataagactgcatcttaaaactagatgaattaagctttggtcacttaaaggaatctacttcagaaagggattttcagtggagcatctttggagataagtaattaaagaaatgccagaattattttatatttatatcctactgaattaagattccttcctaaaacctgatacacacatgcacagaaaatatatatttcacatcacattcctgattaaaatcctgccaagcccctctattttctgcaaaatagatgacaacttcttaggstggcatgccaaatgcttaatcattggcccccaccaattctgccaagcctaatttccagccactactctgcagactgcagggactaggtatatcaagtgaaataggtgtccatgcagggcttccactgaaccacctgttgagtgaagcaacactctctgttctctctgttaaatacattgacacattgagacttaaccactagtaggctgtctt

SEQ ID NO: 354837 - DNA, 516 bp, Homo sapiens
tatctcatatatattgagtgctttctatcttccaggaactgagttaarcactttatatgtattatctcctttaatttgtacaaaccccaccccccccaccatgaggtgactatgatcattggccctattttacagatgcagacaccaaggcactttgaggtcacttgccgaaggccacacacttcataggtatgaacccagtcagtgcagctccagagcccactctcataaccaaaagccagtacaccttaaatgcattattacaattatgcatacttatttttttcaaatatgtatcttaaaatgttgtcacttctaaacaagaaccttgtaaacatagagctgttaggcaacaaccttcacttcccactgtttataatagcaaacaacattttaacctgaaaaaccacactctagcttttgctcttcttatcttgaaagatcttcagatgacatcactgtggttgaagtgtattataaaaatgtgatctatttacttgtacatggatatctgaa

SEQ ID NO: 354838 - DNA, 546 bp, Homo sapiens
cctggcagagtacagcttctttctcttccatgccagctcacatttagaaacatcctagcatgtcctgaactggagcccaaccaaattagagcactttggggtaatactcacaggaaacttatagtctgaataatttgaaatcaggtcttgaataaaaggatgcttcaagagaacagcgacttcaattggctccaggttcttggcacctaggtcttgaaatgtttttatgaagccctttaaggaagaaaaaaaatgaagttaatcaacctcacaatccagtagatgttaaaaaaaatggttgtatttactaaagagattctgtataatttcatacwatgatatattttgagagcaattccataaaaatatgctcagaattgaggccaacttttttcaaaataatttaaccaacctctgcataaatgttctctatctttaggtggctggcaaatctattggagtcctgtgcttcacttccccctttgaacactttgagtagtgtttccatggacatcttttcattgtttgcattttcagggatttctt

SEQ ID NO: 354839 - DNA, 561 bp, Homo sapiens
acaaatccagtgtacaaaatcaggttgggatttttactgctgctctttgaaatttggccaaaagccatgaactcaggcactcatgagtatggtgaagagtaaattgttttgatttcttatgtatcaaaagcctgaatgtatatattcttcttatgtatcctatcattgacccagtagttacagaactaggaattgatcctgaagaaatattcatttgcccaaatacktttgtatatggctgttcattcagtgttacagcaaaaatagaaaacctaagattccaaaaaatgggggaatggtaaaataaactctatttctgcaatgtagtattacattgccatgaaaaatgatggtttagcagaattcttaataacacaagaaaacactcatgatagaataagtgcaaaaagcaagcagaaaacaaagtagtacatgcagtaggacagtttgcttatatatctattctattgatgaaaatggaaagcagacgcattaaggagttaacagtggtgacttctggatagcggaatagacaatttcctttgctttgtgcttcttaca

SEQ ID NO: 354840 - DNA, 566 bp, Homo sapiens
cagtcactttcattaggttttgcaatttatgaggcagaatgccatccttttatgtgtctttaggtcccctgtgcctaacagtatgattgacatgtagcaggctttccataaatgcctatcaaggaggtggaaggaatgcttatggaagtgctttgaaaattgcaaaagcactaggcaaacctaagggattatggcattgtatttattactgctggtgcagaggagagcactttggaaagtaaaacattcacctgaagaataagatggtctgatcttaccagtcctttaagccaacagataaggtccattcatccacagttaaaaccccattcacagacaacacaaaacaaaacaaacaagaaaactaaaatatcagaaacacctagtccscctaaataaagtaaaaacagaacaaagaagaaaattcaaaacagaaaaacagtagcaacaaatctcaaacaaaaccatgaacctatgaccccttctctagttttctgtgcagcatctgccctttgtggttctgtgaacagccagggtttggaggcctgtgggagatgggtttgctg

SEQ ID NO: 354841 - DNA, 544 bp, Homo sapiens
cctgcctgtaacacaggttgggaacaacatagtggttatctttcccaaaattattattccaaggagctcaaggaaagtattttctgtgattctgaaaaagyaaaataatacgatatttcaaaattacttactgagtgcagttgccgaacaattgcaggatatcccttgagaaagttctggagggctgcctgtaatccatgaagccacttcctgtctcctatttgagaaggcatcacaggtcgaaggtgaaggcctttgaaagcagttctcagagcactcttatgaagaggagaattgtgataaaagtgataaatgctgtgaaggaggtctttgacatcattgtacagaggaatgttctggaacaccgctttgtaagatagttcaaggtgatgtgcaaagcaatatacagtttgtacacatggttgtatttctcttaatagtagggccacctcgttgttctctccctctatgctatgggtaccatcacttccaaaaccaaccagcttctttgcccagtcttggctcgacagtctaagttgaagat

SEQ ID NO: 354842 - DNA, 599 bp, Homo sapiens
gtactttgtgatcgtctactacgcatcaggcttattctgctacctggacataagcgataaaatgggcacccccaagttcctcatgaagcacaatataagtatyattaaacaaaaatgtaggatgcttgagaagttatgacaggagaatctgactatggacataagaaaacgtttccccgaggaaagtcatttgagccaaaatccaaatacctataataagtggaagttaagtaagtgaggatgccagtggaggtggtttgccaagaacagcatgttcagtcctcagagtgggagaagggatggctcagtagtgaaaatgaacaaagattactattattgggacagataaattaagagggaatcacaggaaatgacaataattatgtgagtaaaaacctactaaatgcttttaagcatggaagtaacaagataagaattagggctcgaaaagacttgcatgcagtaaaaaaaatgaattggagggtgtagagcaagagtgattgcatggagattcattagggggcttttgcagtctagttttgagatgaaggtggctagaaattagattggagtggataatgtacagagaagaagtcaga

SEQ ID NO: 354843 - DNA, 684 bp, Homo sapiens
ttggttccacatctttacaattgtgaattgyctgctataaacatatgtgtgcaagtatctttttcatataatgactctttttcctttgggtggatacccaacagtgggattcctggatctaattgtagatctacttttagctctttaaggaatctctatactgttttatacagagggtgtattcatttacattcccaccagcaatgtacaagtgcccttttcccgatatccatgccaacatctattattttttgactttttaataatggccattctgaaggaataaagtggtatctcattgtggttttaaattacatttccctgccaggcgcagtggctcacgcccgtaatcccaacactttgggaggtgggcagatcacttgaggtcaggagttcgagaccagccaggccaacatcgtgaaacgtccatctctactaaaaatacaaaaattagccaggtgtggtggcacatgcctgtaatccaaactacttgggaggctgaggcaggagaatcacttgaacccgggatgcggaggttgcagtgagccaagatcatgccactacactccagcctgggtgacagagactctgtctcaaaaacaaaaacaaaaaaatgcatttccctgatgattagtgatgttgagcatatttttatatgtttcttggccatttgtatatcttctt

SEQ ID NO: 354844 - DNA, 684 bp, Homo sapiens
ttggttccacatctttacaattgtgaattgcctgctataaacatatgtgtgcaagtatctttttcatataatgactctttttcctttgggtggatacccaacagtgggattcctggatctaattgtagatctacttttagctctttaaggaatctctatactgttttatacagagggtgtattcatttacattcccaccagcaatgtacaagtgcccttttcccgatatccatgccaacatctattattttttgactttttaataatggccattctgaaggaataaagtggtatctcattgtggttttaaattacatttccctgccaggcgcagtggctcacgcccgtaatcccaacactttgggaggygggcagatcacttgaggtcaggagttcgagaccagccaggccaacatcgtgaaacgtccatctctactaaaaatacaaaaattagccaggtgtggtggcacatgcctgtaatccaaactacttgggaggctgaggcaggagaatcacttgaacccgggatgcggaggttgcagtgagccaagatcatgccactacactccagcctgggtgacagagactctgtctcaaaaacaaaaacaaaaaaatgcatttccctgatgattagtgatgttgagcatatttttatatgtttcttggccatttgtatatcttctt

SEQ ID NO: 354845 - DNA, 532 bp, Homo sapiens
ggttgtagtagcaatgtactctgtgtgaacaagttcactatctcttgtggtgttggaatggtagaagtctcttaaaacaactcattctcccatggcatgcactttcttatttatttctcttcccaagtattttatgtactggtttgatggttcaggcttcaggccagtgggagaggtatccctcagtaggaacctgctgtggctaaagcaggtgaataaatgaaggcctagccttgatagaggcagctagaggagctctcaatgagttttaagaggtcttatctgggggaaaggtcggagccaccatagctcccctgccaagtcagcaggaatgttatccacctctcagacacacttctgacccagcactccagctattcagataagacagacacctcttttcatctgcaggaatgttgatgttccaaacagagaggaattgtgactctgtctctcacgcaaacctaaatctagagggtgctcctrctgcgggggtgcagtcaccctaacatgttccagaaaggctgtctat

SEQ ID NO: 354846 - DNA, 600 bp, Homo sapiens
gaatatggaaagtgagagaaatcaaagatgactcagaggcttctaccaggatagttgtgtggatggcagtgccattagccaagacacaattctcagaaaggaatatattttgtaagaaggaatagaatgcattcaatttggagtaagttgggtttgacaagcccgcaagatatccagatggaaatgtccagaaggctggggaacagatgtaaagtgagcaatttactttgcctttctttcttccactgcaaaatggatgggatattgcttgccacttctccccaaggaccagagagwggattaatgaggcagtattcacatttattccacactaaggatcaatgagagcttggcaaagtattaggttggcgttccattatgttaagttgaaaacaaagcagctttgacaggaaagtcattgaaagaagagagtgcaaacctgcaagaccgcaggcgtgggcactaacacgtttccagctgaaagcagtgaaagaaaagccgctttctgttgtctgcccttttctctttgtcttccttccctgagccaccaggactcagccaaatgtgagtttaggagttggtcaaataaagatcttgcaa

SEQ ID NO: 354847 - DNA, 609 bp, Homo sapiens
ctttgctccctctaaccagcacacaccccctaacaaacttctacctataattcaagagtgagctggaaacctcacttcctttggaaagtctccctagtccctcaggcaaattaggcattataacctttggagtcacctgacattttgcatatgactccattttaacaattataatgttgcattatatttgtgcattttccactaggcttccttgaaggaaataactgtttcttaatcacttttgctttccagtacctagtaaataatcaacacagagcaggtattcaaaaaacattgttaaaggaatgaataaaaatctgaaatttaattcttaaatatcctcttccacttagatataatcgaratatttaatatgctacccagtccatggcattttggaggcaaaaatgaatcagaaaatcctatagccactgatttaatcatttattcttctatttattcttttaacaaatattttagtgcccaatatctgccaggcacaattataggggctaaagatatagaaaacagtctttgttttgcatttgatttttaagttcacatttaaattgttttatatgtttaaatatttgagaaatgtgtcattta

SEQ ID NO: 354848 - DNA, 561 bp, Homo sapiens
gggaaaatgtttgaaacatgtaccacagaagaagtgccaatgtcacttatatatgaagaattttataaattgagggacaaaaaaaaccccacaaaaatctgatagaaaaatgggggaaaaaagacatgaacagaccatttttaaaaagagacaaaagttgctctcaaatatataaaaatatccaaattcactcataattaaagaaatacaaattaaagcaacatatgatatgccattctaatcaatcacattggcaaacatttcaaaactatgaaaatactttctgctggtgaagctgtgggaaacagacactaacatatattgctaatgggcaagcaaatgagtacagcccttctggatggtaacttggcaatatctaataataacattatatatttatttatttttggcccagcatcccacttatcagaatagatcctgtagacataccytcagaacatatgaaaatacatatacacaaagctatagtagcattgtttatattgtaaaaaatactggaaacaacttactggcccacccataagagagtgtttgaattaa

SEQ ID NO: 354849 - DNA, 590 bp, Homo sapiens
tttcagaaacttaaaatggcaaatagaattccagagaattagagaattaaaatctaagggctttgtatgaaatrattctaatttacaatataaaaatatatgatattagatatgtgtattacattataaaacatataataaaactcaaaaattttctaagtatcatttagagacttattacctaatattataaaataaagaaaagcttgtgacacttacattgccaaatgttaatggtggactgatgctaacagaaagactagacaagaccagtacttgaatatataaaaatgtactcatctaaaagatacaaaaggaagtagaagcacaaccttccattgtcctaagattctcatcaggatcgacgtgcccagttgcagatgacaacatctgagtgagtgagtcacacaatgcattcaggagggacggctgttccccctaaacccaatctcatattcataaggctaaagaacttgtgccttctaatctagagagcacctgatctcagccaggtatagtttattcttagggttatacaatagaaaccatgattacagagtgtgatgcattatcttacatccaggcaccag

SEQ ID NO: 354850 - DNA, 590 bp, Homo sapiens
tttcagaaacttaaaatggcaaatagaattccagagaattagagaattaaaatctaagggctttgtatgaaatgattctaatttacaatataaaaatatatgatattagatatgtgtattacattataaaacatataataaaactcaaaaattttctaagtatcatttrgagacttattacctaatattataaaataaagaaaagcttgtgacacttacattgccaaatgttaatggtggactgatgctaacagaaagactagacaagaccagtacttgaatatataaaaatgtactcatctaaaagatacaaaaggaagtagaagcacaaccttccattgtcctaagattctcatcaggatcgacgtgcccagttgcagatgacaacatctgagtgagtgagtcacacaatgcattcaggagggacggctgttccccctaaacccaatctcatattcataaggctaaagaacttgtgccttctaatctagagagcacctgatctcagccaggtatagtttattcttagggttatacaatagaaaccatgattacagagtgtgatgcattatcttacatccaggcaccag

SEQ ID NO: 354851 - DNA, 590 bp, Homo sapiens
tttcagaaacttaaaatggcaaatagaattccagagaattagagaattaaaatctaagggctttgtatgaaatgattctaatttacaatataaaaatatatgatattagatatgtgtattacattataaaacatataataaaactcaaaaattttctaagtatcatttagagacttattacctaatattataaaataaagaaaagcttgtgacacttacattgccaaatgttaatggtggactgatgctaacagaaagactagacaagaccagtacttsaatatataaaaatgtactcatctaaaagatacaaaaggaagtagaagcacaaccttccattgtcctaagattctcatcaggatcgacgtgcccagttgcagatgacaacatctgagtgagtgagtcacacaatgcattcaggagggacggctgttccccctaaacccaatctcatattcataaggctaaagaacttgtgccttctaatctagagagcacctgatctcagccaggtatagtttattcttagggttatacaatagaaaccatgattacagagtgtgatgcattatcttacatccaggcaccag

SEQ ID NO: 354852 - DNA, 580 bp, Homo sapiens
aaatggcaaatagaattccagagaattagagaattaaaatctaagggctttgtatgaaatgattctaatttacaatataaaaatatatgatattagatatgtgtattacattataaaacatataataaaactcaaaaattttctaagtatcatttagagacttattacctaatattataaaataaagaaaagcttgtgacacttacattgccaaatgttaatggtggactgatgctaacagaaagactagacaagaccagtacttgaatatataaaaatgtactcatctaaaagatacaaaaggaagtagaagcacaaccttccattgtcctaagattctcatcaggatcgacgtgcccagttgcagatgacaacatctgagtgagtgagtcacacaatgcattcaggagggacggctgttccccctaaacccaatctcatattcataaggctaaagaasttgtgccttctaatctagagagcacctgatctcagccaggtatagtttattcttagggttatacaatagaaaccatgattacagagtgtgatgcattatcttacatccaggcaccagcat

SEQ ID NO: 354853 - DNA, 512 bp, Homo sapiens
tgtaatccaattacattctctgatgcaactccaattaagtttcttataagcaaaaatcaaattttaaaataagagaattatgaaaattgtagctcagcttttaaaacttaaacgtaaaaacatttatattgttmtaaaaatattttaaatatttttaaaacaatataacttaacaaaatgacttaagtagaagtagaaaagctgaataatcttgtaataagtaataaaatgaatagttaaatatgctcaaagaaagcccacatagtgtcagtggtaaattttacctactatataattaattccaaacttatacaaaatctttcagtcaatagaaaaggaggaaaaaactatacaattcatcttatgcacctacaataacagtgacataaaaaaacttagaaaggaccaaatgagacaaaattacagaagaatctcagagctaactatacatgcaaaaatcgtaaataaaatattagaaaaccaaaatcggttgtttataaaagtattagctc

SEQ ID NO: 354854 - DNA, 643 bp, Homo sapiens
aatctcagagctaactatacatgcaaaaatcgtaaataaaatattagaaaaccaaaatyggttgtttataaaagtattagctcttgctcaagttgggattatataagaaatataatcaggtggatcacaaggtcaagagatcaagaccaccctggctgacacggtgaaaccccatctctactaaaattacaaaaattagctgggcatggtggtgtgtgcctgtagtcccagctacttgggaggctaaggcaggagaatcacttgaacccgggaggtggaggttgcactgcagctgagaccatgccactgtactccagcctggtgacagagcaagactccatccccccaaaaaaaaaaaaatatatatatatatatgtgtgtgtatatatatatatatatgtacacataatcttggtttaatatttttcaatgtgttgacataatttaccttggtaacaaattaaaattatttaaatatatgcattgaaagcttctatctgatagccaatttctgaaaaacatatatgatataagcccttcaaaacttaggaataaatgtaaatgttcttacctgataaaacaaatctacatcaaacatatagaaatgcaataatgaaccacaaaaaagattaaccataaagga

SEQ ID NO: 354855 - DNA, 643 bp, Homo sapiens
aatctcagagctaactatacatgcaaaaatcgtaaataaaatattagaaaaccaaaatcggttgtttataaaagtattagctcttgctcaagttgggattatataagaaatataatcaggtggatcacaaggtcaagagatcaagaccaccctggctgacacggtgaaaccccatctctactaaaattacaaaaattagctgggcatggtggtgtgtgcctgtagtcccagctacttgggaggctaaggcaggagaatcacttgaacccgggaggyggaggttgcactgcagctgagaccatgccactgtactccagcctggtgacagagcaagactccatccccccaaaaaaaaaaaaatatatatatatatatgtgtgtgtatatatatatatatatgtacacataatcttggtttaatatttttcaatgtgttgacataatttaccttggtaacaaattaaaattatttaaatatatgcattgaaagcttctatctgatagccaatttctgaaaaacatatatgatataagcccttcaaaacttaggaataaatgtaaatgttcttacctgataaaacaaatctacatcaaacatatagaaatgcaataatgaaccacaaaaaagattaaccataaagga

SEQ ID NO: 354856 - DNA, 537 bp, Homo sapiens
gctttacatacttcagctgcagtcttcctggcaaaagtgactgcatttctggcaaggtgggaagttgtacctctgtacatacttctaggaaggatgctgaatccaggaggctaagcggtgatggtctgctggccccacttccacagcacctcacagggtaagacccactggtttggaattccagccaactaccagcaacagtgtcacccctacctgggacagaattcctgaggaaaggggtggaccgccttctttgttgtttggacaactcagctattccagcctgcaggctttggagagtccaaactgactggggatggaagggatcmgttgctctaccaaaacgtggccagactgcttatttaagtggtccccaaactgttcctccacactgagtggaacctcccaaatggggcctctggccaaccctgccggtgttctcaggctaatagaaatttgagttctccctggacagagttcccagagggagggatgggccaccatctttgctgtttgggcaactcagctattcgagcc

SEQ ID NO: 354857 - DNA, 537 bp, Homo sapiens
gctttacatacttcagctgcagtcttcctggcaaaagtgactgcatttctggcaaggtgggaagttgtacctctgtacatacttctaggaaggatgctgaatccaggaggctaagcggtgatggtctgctggccccacttccacagcacctcacagggtaagacccactggtttggaattccagccaactaccagcaacagtgtcacccctacctgggacagaattcctgaggaaaggggtggaccgccttctttgttgtttggacaactcagctattccagcctgcaggctttggagagtccaaactgactggggatggaagggatccgttgctctaccaaaacgtggccagactgcttatttaagtggtccccaaactgttcctccacactgagtggaacctcccaamtggggcctctggccaaccctgccggtgttctcaggctaatagaaatttgagttctccctggacagagttcccagagggagggatgggccaccatctttgctgtttgggcaactcagctattcgagcc

SEQ ID NO: 354858 - DNA, 541 bp, Homo sapiens
gatgaggaagaatcagtgcaagaacactgaaaactcaaaaagccagagtggcctctttcctccacatgaccacatcacctctccagcacaggtttggaactgggctgagattgatatagttgaaattatagaaatagaattcagaatatggataaaatcccccaacttcactgagctaaaggagcacattgtaacacaatgcaaggctagaaatcatgatacaacatttcaggagctgacagacaaaatagccagtatagagaagaatgtaactaaactgatagagctgaaaaacacaatacaagaattccataatgcaatcacaagcactaatagcagagcagaccaagcagaggaaggaatctcagagcttgaagactctttttgaaatagacaggctgacaaaaatagataaaagaataaaaaggaatgaacaaamcttctgagaaatgtgggattaagtaaagagacaaaatctatgactgattggtgtacctgaaaaagatggggagaagggaaccaatttggaaaacatatttca

SEQ ID NO: 354859 - DNA, 541 bp, Homo sapiens
gatgaggaagaatcagtgcaagaacactgaaaactcaaaaagccagagtggcctctttcctccacatgaccacatcacctctccagcacaggtttggaactgggctgagattgatatagttgaaattatagaaatagaattcagaatatggataaaatcccccaacttcactgagctaaaggagcacattgtaacacaatgcaaggctagaaatcatgatacaacatttcaggagctgacagacaaaatagccagtatagagaagaatgtaactaaactgatagagctgaaaaacacaatacaagaattccataatgcaatcacaagcactaatagcagagcagaccaagcagaggaaggaatctcagagcttgaagactctttttgaaatagacaggctgacaaaaatagataaaagaataaaaaggaatgaacaaaccttctgagaaatgtgggattargtaaagagacaaaatctatgactgattggtgtacctgaaaaagatggggagaagggaaccaatttggaaaacatatttca

SEQ ID NO: 354860 - DNA, 541 bp, Homo sapiens
gatgaggaagaatcagtgcaagaacactgaaaactcaaaaagccagagtggcctctttcctccacatgaccacatcacctctccagcacaggtttggaactgggctgagattgatatagttgaaattatagaaatagaattcagaatatggataaaatcccccaacttcactgagctaaaggagcacattgtaacacaatgcaaggctagaaatcatgatacaacatttcaggagctgacagacaaaatagccagtatagagaagaatgtaactaaactgatagagctgaaaaacacaatacaagaattccataatgcaatcacaagcactaatagcagagcagaccaagcagaggaaggaatctcagagcttgaagactctttttgaaatagacaggctgacaaaaatagataaaagaataaaaaggaatgaacaaaccttctgagaaatgtgggattaagtaaagagacaaaatctatgactgattggtgtacctgaaaragatggggagaagggaaccaatttggaaaacatatttca

SEQ ID NO: 354861 - DNA, 574 bp, Homo sapiens
acacatcacagatattgtagttttttttttttaacaaattgaaggtttgyggcaaccctgcattgagcaaatctattggtgccatttttctaacagcatgtactcacttcatgtttctgtgtcacattttgttaattcttgcaatattttaaccttttcattgttatatttgttatggtgatctgtgatcagtgatctttgacagtattattgtcattgtcttggggtgccacacactgagcccataaaagatgaaaattttaatttataaatgtgtgtgttctgaatgtcccattgatcagccattcccttatctttctccctctcctcaggtctccctattccctgagacacaacaatattgaaattaggccaatcaataatcctgcaatggcctctcagttttcaagtaaaaagaggagtcacaagtctcttactttaaatcaaaagttagaaatgattaaacttaatgaagaaagtttgttgaaaaccaagataggccaaagtcaggcttcctgcaacaaacactaagttgtgaacggaaaaaaaaagagttcttaaaggaaattaaaag

SEQ ID NO: 354862 - DNA, 549 bp, Homo sapiens
tatttaagaaatacattttgtaaggctgtagctaccatagattgattcttmttatggatctgggaaaagtaaattgaaaacctctggaaaagtttcaccattctacatgccactaaaaacatttgagattgtgagaggaggttaaaatatcaacattaacaggagttttgaaagtttattccaacccccagggataacttagagggattcaaaactttagtggagaaaataactgcagaggtaatggaaatagcaaaaaagctagaattagaagtggagcttgaagatctgactgaatttctgcaatctcataaagcttgaacagatgaggagttgcttattatggattagcaaaaaaggtattttttttaagatggaatctacacctggtgaagaatctgtaaacactgtggaaatgacaacaaaggacttagaatattacatcagcacagttaataaagcagtggcaggatttgagagaatagacttaaattttgaaagttctactgtgggtaaaatgctgtcaaacagcatcacatgctacagaga

SEQ ID NO: 354863 - DNA, 549 bp, Homo sapiens
tatttaagaaatacattttgtaaggctgtagctaccatagattgattcttcttatggatctgggaaaagtaaattgaaaacctctggaaaagtttcaccattctacatgccactaaaaacatttgagattgtgagaggaggttaaaatatcaacattaacaggagttttgaaagtttattccaacccccagggataacttagagggattcaaaactttagtggagaaaataactgcagaggtaatggaaatagcaaaaaagctagaattagaagtggakcttgaagatctgactgaatttctgcaatctcataaagcttgaacagatgaggagttgcttattatggattagcaaaaaaggtattttttttaagatggaatctacacctggtgaagaatctgtaaacactgtggaaatgacaacaaaggacttagaatattacatcagcacagttaataaagcagtggcaggatttgagagaatagacttaaattttgaaagttctactgtgggtaaaatgctgtcaaacagcatcacatgctacagaga

SEQ ID NO: 354864 - DNA, 545 bp, Homo sapiens
tttatggactcagaaacaaaaataattataaagagtgatactttcaagtatgtgttcatatcgtaaacattatccacctgtacaattatcacttgagaacttctcttaatatatgttctgcttcaataaaaatgatgaaaattctacaacgaattttaaactcagtgttgagtcttaagaacatttcctttaaaatatgaggaatgcaaggatgcccactatcaatacttcactacaacactatactagaagttctagaaatggaataagaaaaaccatcataagaattgtcaatgtatacacaatgctgtaatcatttaaaaatgatataattgtctacaggaagctcagaaaaagtaaacataaaatattagaattaataagtgcaaggtttctgcatataggataaaaagcataatgaatattttgtgcattagctgaaaacaattggaaaataaattttaaatgatgtmatttttaggagtgacaaagagatatactacccaggaataatcaaacaaaacatgtacaagacctgtatgtaa

SEQ ID NO: 354865 - DNA, 556 bp, Homo sapiens
aaatatgaagttaactagaatttctttgttttctttaatctaatacataatagccatttagttggcattttagttcatgtgttgggagtggaagtctttatcaatggagtttgtgtgtatactgattttgacaactttgttcaaaatcaatttattgaggactgttcagagtctgaggtttaaccgtacctacaaactgacaagtaatactagccacactttcatggatgcaggcagaagacttgagacccctgggtctgagacaaagtactttttactcaaaccaatagtagtaatggttattagcattttcaccagttcctctaactccaattccttcagaataatataactagggccaggtaacagctacaaacacagtgggttttgttacaggagaggaaccccaagcttagaaaatctgaactttttacaatggacaataagcatacctgaagraagcattatctttattatactttggcataagcaaaccaccctttgctctgggagtgaagacagtatgtttattttctagttacttgctatagtacaa

SEQ ID NO: 354866 - DNA, 638 bp, Homo sapiens
ctgctagcttttacaaatatgaagttaactagaatttctttgttttctttaatctaatacataatagccatttagttggcattttagttcatgtgttgggagtggaagtctttatcaatggagtttgtgtgtatactgattttgacaactttgttcaaaatcaatttattgaggactgttcagagtctgaggtttaaccgtacctacaaactgacaagtaatactagccacactttcatggatgcaggcagaagacttgagacccctgggtctgagacaaagtactttttactcaaaccaatagtagtaatggttattagcattttcaccagttcctctaactccaattccttcagaataatataactagggccaggtaacagctacaaacacagtgggttttgttacaggagaggaaccccaagcttagaaaatctgaactttttacaatggacaataagcatacctgaaggaagcattatctttattatactttggcawaagcaaaccaccctttgctctgggagtgaagacagtatgtttattttctagttacttgctatagtacaagcatctttgaaaagacagtccagaacaaaggagtcaatgcttctgcgtgcaagatgtgcagaaacaac

SEQ ID NO: 354867 - DNA, 601 bp, Homo sapiens
tgggaatcacagagatgatgaaattagcagacaaggacattcaaatacctattgtattactcagcaattaaaggaaatgaatcactaatacatgtcgtaacaagaatcaccaaagcattgagtgaaagaagccagacacataagattacacacaacattatcccctgtacttaaagtgacagaaaatgcaaaattatggggacagaaaacagatcagaggttgccaagggccagaggtagagatagggaatttgttgcaatggagcaggaaaaaactttgcaaggtgattaaatcgctttggactttggtggacttaagagcattcttaatttgtgaaaatgtttcttgattgtggtggcaattacatgattatatacctttgtcaaaacttactgaactgagcatgttgaaagaataagattaattgtatataaattatattttaataaacctgactttttaataaaagaaggtacagtcatacattacttattgacaggaatacatcctaagaaatgcamcattagacctcattgttgtgcaaacattatagagtgtgcatacagaaacctagatgatatagcctatgacacatctagg

SEQ ID NO: 354868 - DNA, 598 bp, Homo sapiens
ctggtgaacaaaattacacacaattaatgcaacagaaagccgaatacaatgggaaatgtcatgagtatcaaagagagagaaaaaaaccatgtgcaaagcaaraggggtttataactgggtgacattaggaaaattactttagtaactggaatatcaagaagggcatcatttttatggaaaagatacaaaccacaaattaaaaatgatgttacctctatatagcaaaaaatcctggtcacttagtgttttataagaaaaaaatatatgaagcaaaacactctctcactgatcattcaggtgagcaagtttaaagcattctaattcatttcactattatgctaaatcactagcaacacagttgtaagaaccaattaagtaagaaacttttcaaagttaggaactgtgaggctagtgaaggaattttggcgtctactgaagtaatatgtatgatgatttaaaatcagcatgcatttaataaattcttattgaataaattttttgttatctttagattgtggctgtaggaagtttatgtttatagcttgaaccaacactcctgaccttggtttcacacagaaaattttaaatttggcattca

SEQ ID NO: 354869 - DNA, 641 bp, Homo sapiens
atggtttccttattatataaagtctctcaggtaatctctcaaagctgccctcggaagattagatgaaaagtatatctggtcagggtgatgactttgagtcccttcttatctctggtggttaatctttcccgattatttgatgagattcctagagaggtagtcttaagacaattgcatttattttgaaaagaagtgccctcggtcagttaagaaaattccagagagtctttccttgtgcttagggagaaaagaagcaagagaagatgagagagtcttggttctgaggcagcttctaaggttttataatttcttttaattcaaagtgttcagcctgccaaagtaccacattttggggtctattttactaaaccccrgtagtagtcataaaaatatataaatcagctgctttctaataaaactttatttacagtaacaggcaggagaccagatgtggcccatggaacatagtttagttacccctgatcaacaggattaaagtagtccactggcactctaccctcctctacaatttttcatcttcaatatctggtgacaaaaaaaaaaatacgaggcaagctaaaaaataaaattaattcatagtgaaacagaaacagcaaaaagacagtagaaacagaaacaca

SEQ ID NO: 354870 - DNA, 596 bp, Homo sapiens
cacctttatcatttgattgcatttttacataaatgtctatgaattaactctagacttcaatagctacctttcctacctgcctcctccaagcttaatcccagaaaggagtttgtagccttaatgacctgtctacacctgtttttacagagtgaagcctgcagcatggcagaacagtagcagtgttttgtgcttgtcagatagaaaacccagcatcccagagagatgaaaggactcgtgtctatggacttccccctatgaagtgtggcctacagctggactcttttcatgccggatatttagccctgttatatgactgctctgtcacacatacacacacacacacacacaygagagagagaaggagagaaaaaaaaatctcactggtagcatatgatgacctggtcctacaaaatattaatgctgtctgctagaattctactgtaaaggagctataaaacagtttgaagagtttgagaaatcagactcaaatatgaaataagcaaagtgctatcaggctactagagacctatttttttccctgtcttattgaaaacaggatttacaggacaaggggaagaagataaagtcaagattct

SEQ ID NO: 354871 - DNA, 531 bp, Homo sapiens
aacattatcaatgtcaccttgtgcacttttacaaaacagactcccrggcacaatcaccatctaggtgaaatccatattaaaagaaagagagagacagacagacagataaacagacaggtaacctttcctgacgcctctgataagttatatttaggttccattggtcaaagctacctgttcattaattagcatacacataccacttgtaattaatatcaacctgatgcctcttctaggctaaagtgtaagttccatgagttcagggctcatttctcaatgcatcagctcctgtatggtagcagtgtcatcaaagcaccaattcagtagcgattgcttttagcaaaaaactgtttcttctcattgatgaacccaatcactgggcacaaatataatcaggttttctaaatgatatggaaggggggcatgaccttcattatttagagaatttctctggccatcttaattatctttgtgggagccatcacagagtattctgtgtggctatagattatgctttatttctccttctgg

SEQ ID NO: 354872 - DNA, 606 bp, Homo sapiens
gggctagaattatctctttaaaaagtacatcttaggatgtcaccatgcggcaaggcttccccttgcaaaaagaaaatctgacatcttcaacactttttataaggcacccttgtgcgtctatccagcaacattgtttcagtttccygaatgctataatcttggtgcctttgcatgtgctatacttttggctaagaacacttagacttcacatcacttaaaaacattttttgttttaatacagatggggtctcgctatgtgcccaggctggcctcaaactcctgggctgaactcctcctccccaactcggcctcccgaagtgctgggattacaagcgtgagccaccgcgcccgcccacatctcttcttacaggtcaactggctttccttgacacccagttacttcgttcttcaggtgttgcaaaactcatcagcaagcacctaggcaattactgttcaaaatatctatgcagtctactagacttaagattcagaaaggcagaaaccacatataccttgttcacagctggacttctcagtgtctagtactaggattctcaatacatatctgttgaagttatgatgacattattaccatatagctatttg

SEQ ID NO: 354873 - DNA, 606 bp, Homo sapiens
gggctagaattatctctttaaaaagtacatcttaggatgtcaccatgcggcaaggcttccccttgcaaaaagaaaatctgacatcttcaacactttttataaggcacccttgtgcgtctatccagcaacattgtttcagtttcctgaatgctataatcttggtgcctttgcatgtgctatacttttggctaagaacacttagacttcacatcacttaaaaacattttttgttttaatacagatggggtctcgctatgtgcccaggctggcctcaaactcctgggctgaactcctcctccccaactcggcctcccraagtgctgggattacaagcgtgagccaccgcgcccgcccacatctcttcttacaggtcaactggctttccttgacacccagttacttcgttcttcaggtgttgcaaaactcatcagcaagcacctaggcaattactgttcaaaatatctatgcagtctactagacttaagattcagaaaggcagaaaccacatataccttgttcacagctggacttctcagtgtctagtactaggattctcaatacatatctgttgaagttatgatgacattattaccatatagctatttg

SEQ ID NO: 354874 - DNA, 533 bp, Homo sapiens
caaatctctggaaacttcctatttcctgttttactatctttttccttttatcaaaatgggtgccatgagggtcccagaccaaaactcaccatcctgaaaaacaaaagtctggggagagaactcctgttttattttcagatgatatatttgctaatcatagaataagttcagatcataattataaataggatttctctgaagcaatcaatctgtatttttaaagcttctccttcagacctccagtatctagtcatcgaagtaacttgggtttatttattgagacaaggtcttgctctctcacccaggctggagtgcagtgacacaatcacggttcactgcagcctcgacctcctgggctcaagcaatcctctggcttcascttcccaagtgtgtaggactacaggtacgtgtcaccatggctggctaatttttaaaatttttgtagagactgggtcttactatgttgcgtaggctgggcatggatttattaatggcttttgaattaactaaataattaatgaacatgggcttaa

SEQ ID NO: 354875 - DNA, 533 bp, Homo sapiens
caaatctctggaaacttcctatttcctgttttactatctttttccttttatcaaaatgggtgccatgagggtcccagaccaaaactcaccatcctgaaaaacaaaagtctggggagagaactcctgttttattttcagatgatatatttgctaatcatagaataagttcagatcataattataaataggatttctctgaagcaatcaatctgtatttttaaagcttctccttcagacctccagtatctagtcatcgaagtaacttgggtttatttattgagacaaggtcttgctctctcacccaggctggagtgcagtgacacaatcacggttcactgcagcctcgacctcctgggctcaagcaatcctctggcttcagcttcccaagtgtstaggactacaggtacgtgtcaccatggctggctaatttttaaaatttttgtagagactgggtcttactatgttgcgtaggctgggcatggatttattaatggcttttgaattaactaaataattaatgaacatgggcttaa

SEQ ID NO: 354876 - DNA, 584 bp, Homo sapiens
cattctatttacaggattcagtttttagcagtgatatttccatttacaaaatgtagtaattctcaatcaccaaaaaygtcaaatcctagaaaacatagcattcctatgtataatgttaacactgttttccaacagttgttggccaaagatttatttggcgaatccaatttttccaaaatacatgattctgatgattcagatgattctggtgtttgctctgtttagaaataactccaagaacagtctttatattttattttcacattgaaaattcgtcagatttgcttcagcctcatagagtgtttatgtaaaattaaataagcactggcagtgtgctgcactttttttttctaaacaggaatagggtttataaacatagtttcttttcctttctttaacatatttataataggccattgaaggtctttgtccaagacttccccacggagtttctattcacttttttttccttgtgtataggtcatactttcttgtttctttgggtgtctcataatttttgaaaactggacatttaaaataatataatgtgtcaattcagattattacatattcccagggtttgt

SEQ ID NO: 354877 - DNA, 625 bp, Homo sapiens
taattgacagtctgtccttaaatatgactgtctattcctgctcttccttccctcaaacccaaactcacccttctcatctctcctcttccccaaactgttcttcatctaccgtgcagcccagtacacacgggtagtcccagttcttcctttggaactctagagcataagtaattctcactctcttggttttaccgtcctgatactgatattgttggctaactagtcattatttatttgtcatatgaccttaccagatttttagtacatcagatttgatgaatatgtctagtacaatgcttcaaatgttgtaagtactcattaaatgtgttattgactaattgatatgactttttagttgacaattctctcmagtttttatgcaattccttatggtaaatgaagtgcattaacttttacaggcctctggaataatcatgagtgctgcactgatgcaaaatagtaaatatcaatggatagaattatatttttaaatttaaattttgaagcagcaatgacgtaatagatatgagggctatctccatgtttatatttgtccattcttcatggatatcattgtaagtctggtagcagaatggactcagcgctccttgagagctagaaatta

SEQ ID NO: 354878 - DNA, 597 bp, Homo sapiens
gtcgtggtggggtcagggttaggggcagtttccaggaaaggtggtggaaggtgagtgtttccagacaagggaatatcacatggaaagctcagtgtttttagctaactgaaagtcatgccatctggcaggagtcaccagaggccaaattatgatgagccttgtaagatacacagaaagaaataggagattttgtgatttcctgtttgaatgcaaagcagaataagagtgaccaggtcagacttgcctgtggaaagatcactctggctttagtttggagaatagattacagaagggcaatccaagtctgttgttgctgtaattcaggtaagagattatcccagtttaaatgtagtgtagtggcaatagggattgagagaagtagctttaagagctattttggaggtaaaatcaataagacttattgattcattaaacaagggaaagtgaaaaagtgggatgaaaaattggatttctaggttgtgcacctggatggctggaggtgtaatttgctgagatatggaagatggtaagaggaacaaacttggggtgggcrgtgatttcagttgggaatgtaaataggacaaatctgcatgtcta

SEQ ID NO: 354879 - DNA, 538 bp, Homo sapiens
gtcttctttctcaaagatctgtttgttgtaggtatttggctttattcctgggttctctattctgtttcactggtttatgcatttacttttataccagtatcatattattttgattactgtagtcttgtagtataatttgtagccaggtacacactgaataaattacaatcattactcttaaggttaaaaaagagagtatttacaaggaatagttagaaaagttgataagataaaatataattgaattctaaaagcacaagtgggcctgtgaataatctaagatggggcaaatattctcattctgaagaatgtaagttatcaattactttgcccatttatagcatttaatatgacatcactacttcaaagaagcctcagttggagacacggagacaccataaaattcaaggtttaatgattattatttatattataaatatcaggggatcaaaacatatttagataattggaytgttttatcattctattatgttacttcttacatttcttttcattgttgttttagtggtagtcatat

SEQ ID NO: 354880 - DNA, 530 bp, Homo sapiens
aacatttaggtacagaaagtasagagaaaaccaattaaattcaactcaaagagaaattctccagaacatataattatcaaactatcaaattcaaagacaaaaaaaattcttagagaagcaaaagataagagatacatcatatacaaaggagtctcaatatgactatcagcagacttctcagaagaaactctacaggccaggagagagtgagatgatatattcaaaatgctgaagggaaaacctgccaatcaagaatgccttactaaacaaagctatctttcagaaacgaaaaagtagtgaaaagtttctgagacaaactaatgcttactaggcaaaaaatattttatcatctctaggcttgccacatagaaatttctaaagaagttttttacaacttaaagaaaaagctactaataaataacataaaacttatgaaaacacaaaacctaataatacaagtaatgtattaatccattttcacactactgataaagaaatacctgagactgggcaatttacaaaggaaagag

SEQ ID NO: 354881 - DNA, 586 bp, Homo sapiens
acttttgcttatttttctgtacttttctagactatttatattgtggggaatctttgaacttgggggagatgatttaggacatctggcagaagaaatttctaagcagcaaagcattcaagatgtgacttgaatgctgttaaaggcattcagtttcacaagggaagcagagcataaaagtttgaaaaatttgcagcctgacaatgagatagaaaagaaaattccattttctgtgaagaaattcaagctggctgcagaaatttgcataagtaacgaggacctgagtgttaatcaccaagacaattgggaaaatgtctctagggcatatcagaggtcttcatggcagccccttccattacaagccctgaggcataggcagtaaaaatggttttgtgggccaggtccagggtccctttcctgtgtgcactgtagggacttggtgcccgrcatctcagatgctccagttgtggctaaaagggaaaaggtacagcttggaccatggcttcagaggatgcaagtcccaagccttggcagtttccacagggtgttgagccttcaagtgcacagaggtcaagaattgaggtttggg

SEQ ID NO: 354882 - DNA, 633 bp, Homo sapiens
ctccaactttttgttcaatattgagttgactattctgggtcttttgactctccatatagactttagaatcaatttgtcaacattcacaaaataacttgggattgcattgaatctataccaagttgggaagaatgaacatctcaacaacattgccttcctatccataacattcaatgtctctccatttatttagttcttctttattatctttcatcagagttttgtagttttcctcacatagatcttacacttgtttggttagctttatatcttagtatttcatttttgggggtgctaawgtaattggtgttacattttaaatttcaaattttacttgttttctactgatatacagggaagcaactgacttttgtatcttaaccttgaattttacaatcttgctataatcacttattaattccaggggtttgttgttttgattccttcagatttctactgtttgaacaaagatagctttattttttctttctcaatctgcacatccttaattttgtgctcttgtcttactgtataagctaggacttccaaggatgatgttgaaaaagagtagtaggagacatccttactttattcccaatacatgaagaaaagctttgagtttcttgccattaa

SEQ ID NO: 354883 - DNA, 603 bp, Homo sapiens
tgttgctggtcttgatagtaccttttaattaactttaattaaatttaaatatttctttaaagaaactttcagagggacaaacaccttttcatccctgggctcaagagcaaaatrtatccctttcttcataatcccatgacaagcaaacatcttggctgatagggagtgggctcaacttcatcaacctttctcctcctcagctaattgcccctgtgcaatcgactatttggggtggccctgtcttttgtgtatcctcagacttgctttgtggtcaacaatgtggaaaatttttgtaaatattttgtgtgcatgtaaaaacaatgtgcattatactaaagcataaaatagattctgttatttctagacctataaagtaaaaatacttttttgtctatatataaaaaattatatattctttatacataaagaatatatgattagcccagaggaaaataagaatgaagaaaaaggaagtaaaaaaacctcaaaggattataaaaataattcccaaaacatcagaaaaattgtaataaaatgaaaatttgtgtttcaatattaatatcagaaaaatagatttataaacaagaagcattattggaaata

SEQ ID NO: 354884 - DNA, 603 bp, Homo sapiens
tgttgctggtcttgatagtaccttttaattaactttaattaaatttaaatatttctttaaagaaactttcagagggacaaacaccttttcatccctgggctcaagagcaaaatatatccctttcttcataatcccatgacaagcaaacatcttggctgatagggagtgggctcaacttcatcaacctttctcctcctcagctaattgcccctgtgcaatcgactatttggggtggccctgtcttttgtgtatcctcagacttgctttgtggtcaacaatgtggaaaatttttgtaaatattttgtgkgcatgtaaaaacaatgtgcattatactaaagcataaaatagattctgttatttctagacctataaagtaaaaatacttttttgtctatatataaaaaattatatattctttatacataaagaatatatgattagcccagaggaaaataagaatgaagaaaaaggaagtaaaaaaacctcaaaggattataaaaataattcccaaaacatcagaaaaattgtaataaaatgaaaatttgtgtttcaatattaatatcagaaaaatagatttataaacaagaagcattattggaaata

SEQ ID NO: 354885 - DNA, 575 bp, Homo sapiens
cgtaaggctatctattctgtctcattactttatttgtacattcttgtgaagataacatggtttaaattatttttgatgtcttgctatgtggtagcacaaacttctaatgttatccttaaaaaaattcttgatattcatacagctttataaagtaaattttataatcagcttgtctgtgtttttgcaaattcttataggaatttttgattggaattgcataaaatcataaattatttagagaattttttttaaatgttgaatcttatccatgaacatgttttgtttttctaattatttaattcttckttatgtcttcaatagctttgtgcatattttagctaaaaatcttgtgtattttagattaaactatgtgcttctgagttgttaatattttgaatgaaattttttaaattggctattaagtgtaaaaataagtataaatgtttgaatgaatatcaattgtgagcccagaaactttgctgaattttcctcttagttttaaaacactgcattttgccttccttggatttctctatgtggtaaattttatcaactatgaattgtgacaattttgt

SEQ ID NO: 354886 - DNA, 583 bp, Homo sapiens
gagttctaaaaaagtaccactctttaacaatttttggagctcagaaaaatcaaaccaaaacatatcactagtaaaaccaatgataacattgacaacctctgycaaaccaagaacatgtgtgcagtgaagcatttccttttcctattaacataattattagccattgcctagaaatttctcttttttttctaacccaaagaagtaatctgcttccctgtaattttaatttattgattccagcttttcctctggatatgggcataaaatataaaatccctctttcacctgacagttcttctaatatctgaagatgatcacatgacatccaatatgccactgcagagcctatatttttccatcttggccatagatagatgtagatatagatatagatagatcatgagagacttaatcatgtgcttggctgaaagctaaatgtcaattcactttacctcaagttagatttgcagagccctagaacataaagttacaattccttagcaggcatataccttactctctggccctaacccatgttaaacatgctgatactccctcaggtacacatggtgatactttgagg

SEQ ID NO: 354887 - DNA, 581 bp, Homo sapiens
aatattgtaagccaaataagtgactcaaaatcaattactggtcaatgctaataatcttaatgaacaaatatttcttaaacactttgtgtaggaagaaaaaaatacaagtggtacctatgaaataatattctactttacctakgcacgatgccagttcttctccagctattcatcaaacaaccaactattccttcatttattgattaacttattcatgtacctattaagtgcagaaggctggactgggtaatatgaagaatacaaagatgtatacataatcctgtattgacttactgttgaatgtgacagaatattcaggtattttggataggttagaaagatatcttgatcctgtcttcagttattagcctaataagaatggaaacagcttgcaaaagtaagacgcaagtagggtagcagcaggctcatctggggaattactggtctgaagtttgggcacaaattattggagccaaagaagagagaaatctatatcctttaggaaagttgaagtaaagatcattttcagagatacagatagaatagattatgactcaagcttcagtggcaaggtgtgtata

SEQ ID NO: 354888 - DNA, 594 bp, Homo sapiens
attccgttagtgggtatatatctaaaggaaaatgaatcattctacctaaaagatacattcacgtgtatgtttattgtagtgttactcacaatagcaaaaacacggagtcaaccaaggtgcccatcaacagaggatcggattaaaaaaaagtggtatgtatacaacatgaaatactatgcagccatgaaaaagaatgaaattatgtgctttgcagcaacatggatgtagctaggggccatctcagcaaattaatgcaggaacagaaaaccaaataccacttgttctcacttataagtggaaactaaatattgggtacacatggacataaagatgatactaagagacactggtgactcctagagtggggaggaagagatgtgggcaagggttgaaaaactattgagcattatgcttactacctgsgtgatgggatcaatcataccccaaatctcagcatcacataatatctatgtaacaaacctacacatataccccctgaatcaaaaataaaagttaaaattatttcttaaaaattattatttgtgatgggcttaggacagatattttactcatttttttattctattagcattt

SEQ ID NO: 354889 - DNA, 581 bp, Homo sapiens
aaaggatagtttttcaaaaaatgttgctggaacaactggacatccaatgcataggtataaatctagacattgtccttacasatttcacagatacgaacacgaaatggatcatagaccaaagtaaaatattaaactataaaagtaccagagtataacaggagaaaatcaaggagacattgggtttgaagatacgtttttaaatacaatatcaaagacataatctatgtaagaaaaaattgatgccagacttcataaaattaaaaaactgcttggcaaaaaaaacactgttaagggaatgaaaagacaagccacaggctaggagaaaatatttgtaagacttttctgagaaggaacttgaatccaaagtatacagagaggctgggtgtgatggctcatgcctataatcttagcactttgggaggcctaggcaggaggattgcttgaagacaggagttggagaccctgtctggacaacaacacgaaactctgtctctataagaaattaaaaaatatatttttgtaaaaggaaagaaaataataaaaaacaaactatagaaagaattattaaaatcacatagtaa

SEQ ID NO: 354890 - DNA, 581 bp, Homo sapiens
aaaggatagtttttcaaaaaatgttgctggaacaactggacatccaatgcataggtataaatctagacattgtccttacagatttcacagatacraacacgaaatggatcatagaccaaagtaaaatattaaactataaaagtaccagagtataacaggagaaaatcaaggagacattgggtttgaagatacgtttttaaatacaatatcaaagacataatctatgtaagaaaaaattgatgccagacttcataaaattaaaaaactgcttggcaaaaaaaacactgttaagggaatgaaaagacaagccacaggctaggagaaaatatttgtaagacttttctgagaaggaacttgaatccaaagtatacagagaggctgggtgtgatggctcatgcctataatcttagcactttgggaggcctaggcaggaggattgcttgaagacaggagttggagaccctgtctggacaacaacacgaaactctgtctctataagaaattaaaaaatatatttttgtaaaaggaaagaaaataataaaaaacaaactatagaaagaattattaaaatcacatagtaa

SEQ ID NO: 354891 - DNA, 524 bp, Homo sapiens
acagtgcgtatcacaaggcttatgatgggttaccaaatgaactctgtaattcataaatgttttatacttagaagaataaaaaaactaagaaatggtcagcaaaaatttttaaatgagctctaatctttgttttcttgattatattctttactgttattactaattcttatcataaattagtaatctcaactttaccacttcaaaaaccaatataaatattactatgtaagacatgtcttaaacttttccagattacttttcagagatttatgttttatttgtatacatttacacaggaatgggtcagatgtatttaattttattaaaccaatcaatttgtattaaagccttaaaaagtcatatataaaaatactctgcatgtattaataatagygtatatttgatttaagttaactatgatgcatatagtactcttagctttggtgttttgtttcacttggtttttttaccaacagcactaaaacattgaatcataaagttctctttcgatttgaactttgctg

SEQ ID NO: 354892 - DNA, 542 bp, Homo sapiens
tagcaagcacagttctaatttgagtatgactcctctattcaaattaaactttataattaccaacggtttaattctttcttctaatctcatcatatatgatgaaacttcaaaaatttcatggagagctgggtgccgtggctcacacctgtaatcccagcactttgggaggccaaggcaggcagatcacttgaggccagtagctcaagaccagcctgaccaatacggtgaaaccccgtctctactaaaaatacaaaaattagtcaggcatggtagcatacaactatagtcccaactactttgggaggctgaggcacaagaatcatttgaacccgggaggtggaggttgyagtgagccaagattgtgccactgaacaccagcctgggttacagagtgagactctgtctcaaaaaaaaaaaaaaaaaaagagaaaagacaagacaattcatggaaaatagaattaaaagataaaaatataaaatataaacttctcaacataaaagtcaggacacttttgtaagcaataataccacccatgtagtct

SEQ ID NO: 354893 - DNA, 591 bp, Homo sapiens
atttctcttctactaattttgggtttgcctttcctaattatttgaggtgcatctttagactgtttattttaattttttctacttttttaatttaggcatttattgctatcatctctctcagcactgcttttgctgtaccccataggtttttgatatgttgtattttaattttttcttgttttaatatttttaaatttcctctttaatttcttccttgacccatgagcatgttgcttaatttccatgtatttgtacagtttccaaagtttctcttgttattaatttctagttttatttcattatggtcttacaagacactttatataattttaaattttaaaatctattgagacctgttttgtgtcctaatatatggtctatcctacagaatgctccatgtgctgatgagaaraatgtgtagtctgcagctgttagataaaatattttgtaaatgtctcttggcagattaagtctgatgtttctttgttgattttctgaatagatgatctgtccaatactgaaagtgggatgttgaagtccccagctattattggattggaatgcaaatctctcttcagtctaataatgttt

SEQ ID NO: 354894 - DNA, 601 bp, Homo sapiens
gttttgtgtcctaatatatggtctatcctacagaatgctccatgtgctgatgagaagaatgtgtagtctgcagctgttagataaaatattttgtaaatgtctcttggcagattaagtctgatgtttctttgttgattttctgaatagatgatctgtccaatactgaaagtgggatgttgaagtccccagctattattggattggaatgcaaatctctcttcagtctaataatgtttgctttattcatctacatgctctagtgttgggtgcatatatattttggtttctatttgcacggaatatgtttttcccattttaaaactttcagtccatgtgtgtctttagagttaaagtgagtttcttgtaggcagcatatggttaggtcttaaaaaaatcaattcaaccagtctatatcttttaattggagaatttaaaccatttacatakgttgttattgacagatgaggacttgctcatgttatgttgttaattgttttctttttcatctttttttaagttttattttttcttctttttttagagacagggtctcatgctgttgcccaggctggactctagtggcacagccatagctcactgc

SEQ ID NO: 354895 - DNA, 521 bp, Homo sapiens
caaagctattctctggaaacttctactcagatggtattctaagagctctctaaacagactatttgcctagacatkctgtacttcagataagttctctgatgttgattaaatgttttataattgttattgttgcagaaggtctgattacactttgccatgatcaccatataaatattgtaacgactcttcacctcacatgaacagcctccccattctggtcttgatattacccgagtgtggtgatgatcttaaggatcacatccatagggctgtcggctgttgtgcatcaacaatcatggtttcattgcctgtaagtaaaattcatgcgggcagcctggatcataggtacagtaaagagctggaccaaggtctttgttgctttgaatcagtaggttaatttgtctttggaactggagaatcacgtttcaacacagaagtggctgtggtcttggaaagctgctgtttttccatttggtttgactcgagagatcaaatttagagaaaatgataggagtctccaa

SEQ ID NO: 354896 - DNA, 521 bp, Homo sapiens
caaagctattctctggaaacttctactcagatggtattctaagagctctctaaacagactatttgcctagacattctstacttcagataagttctctgatgttgattaaatgttttataattgttattgttgcagaaggtctgattacactttgccatgatcaccatataaatattgtaacgactcttcacctcacatgaacagcctccccattctggtcttgatattacccgagtgtggtgatgatcttaaggatcacatccatagggctgtcggctgttgtgcatcaacaatcatggtttcattgcctgtaagtaaaattcatgcgggcagcctggatcataggtacagtaaagagctggaccaaggtctttgttgctttgaatcagtaggttaatttgtctttggaactggagaatcacgtttcaacacagaagtggctgtggtcttggaaagctgctgtttttccatttggtttgactcgagagatcaaatttagagaaaatgataggagtctccaa

SEQ ID NO: 354897 - DNA, 523 bp, Homo sapiens
aaggaataaaaatcaccacaccagtgggaacttatcttttaagatctcccatagccaaaattctttgtagagaccttgatgatcaatgtcagaataaagacactggagatttgcagtggactgtttgtgattccttaatgtttgcctgcattttattgccctttctgttcctgaacctatgccttaaaaaaatgtctcctgtgattatgctctgtggggtatcgtgaggcttttaaactatccaaacatctgaaatttgtatggaggtattcaataaatatttyccgaatgaatatatcaattaccctttagtcctactgtataaatgtcatagtctgttcagggtactataataaatataatagactgggtggcatataaaaagcagaaatttatttctcacagttctggaggcttgggagtccaagattaaggtgatatcagatttcacggctagtgacagcctgttcctcataaatggtcctttcttactatgtactcatatcgtaaaagggatgagaga

SEQ ID NO: 354898 - DNA, 589 bp, Homo sapiens
ttcaacacaggaatagcactacataaatgcatgtggcttcagtgaatggcaggggtaaaattgttcactctgcatgcaggggctcatttacaaggtccattgctgtctgcacagctcatttagaattttgggctcccatgttgcagcttagtagagaaaatacatattatttttaaattatcagttatataaagatayagattacgcacattcatatctctatatctatacatccgtttatctttctctctatataatgtctccttatattagtacaaagtattaattttttagtatatttcaaagagtaattacggtaatgcccataattatctaagttaagcacaatattaacaggagcagcactacatttttctgtatactgaaaccctttgggaatttttttttttagttcctagagggaaaagttgaagattttaaagcatcttgtagtcagtttctttttaatataattttggtcaataaattggtttactttacattttaaatttttcctatgtcaagtttattttttcatgcctgattactgtatttctggaaagacacaaacatagaactttcccacaga

SEQ ID NO: 354899 - DNA, 515 bp, Homo sapiens
cagtcaagtcgacatgtaaaatttgccagtacagtacctaatattgttatatctctattgacttttttataacattgaatttataatttattcagaaaattgttgttaaactaaaayatgtcagccattgaataaagcataataaagttaattataaattgaataaatactccaatgaaaagaaaacaattttcaacttgaataatgaaaaccaaactttaaacttttttaaagaaacacatttaaatataaagatactgaaatgtgatcaaagatgaaataatgaaaaaggatgcaatacatttattggttagagtctaaaagcaataggaaatgacccaatataatcacaaatttaatattaaaaattcttaactaggtataagcctattaattggttaatttgataaaacaaacagtgaacaaagatgtatcccagaattggtagctgctagaaggatcaaatctctgcacctttcatgatagaaagattcaaacatgataagcccaccatc

SEQ ID NO: 354900 - DNA, 515 bp, Homo sapiens
cagtcaagtcgacatgtaaaatttgccagtacagtacctaatattgttatatctctattgacttttttataacattgaatttataatttattcagaaaattgttgttaaactaaaatatgtcagccattgaataaagcataataaagttaattataaattgaataaatactccaatgaaaagaaaacaattttcaacttgaataatgaaaaccaaacwttaaacttttttaaagaaacacatttaaatataaagatactgaaatgtgatcaaagatgaaataatgaaaaaggatgcaatacatttattggttagagtctaaaagcaataggaaatgacccaatataatcacaaatttaatattaaaaattcttaactaggtataagcctattaattggttaatttgataaaacaaacagtgaacaaagatgtatcccagaattggtagctgctagaaggatcaaatctctgcacctttcatgatagaaagattcaaacatgataagcccaccatc

SEQ ID NO: 354901 - DNA, 612 bp, Homo sapiens
agtatggagttctctcaaactaaaaatagaactgccgaaagactcaggttcccactattttgtatttattcaaaagaaaagaaatcagtatatcaaatatatgcctgtaccctccatatttattgcggcactattcacaatagctaagatacaaaatatacctaaatgcccatcaacagataattgtataaagaaaatgtgattatatataatgaaatattattgagctataaaaaatgaaatcttgtcattcccagaaacatggataagcatgkaggacactatgttaagtgaaataagtcaaggtacagcaagataaataccacatattttcacttatatgttggagctaaaaaaatagctgagctcagaaatagagagcagaaaaaatattactagaagctagaaaggtcttagggagaagaaaatagagagaggttagttaacggatacaacattatagctagataagaatactctctagtacactatagcactgtagggtgtatatagttaacaataattttcaaaaagctggaaaaaaggattttgaatgttcccaacacaaagaaataataaacatttgagatgtatgcattgtgtacatgtatt

SEQ ID NO: 354902 - DNA, 612 bp, Homo sapiens
agtatggagttctctcaaactaaaaatagaactgccgaaagactcaggttcccactattttgtatttattcaaaagaaaagaaatcagtatatcaaatatatgcctgtaccctccatatttattgcggcactattcacaatagctaagatacaaaatatacctaaatgcccatcaacagataattgtataaagaaaatgtgattatatataatgaaatattattgagctataaaaaatgaaatcttgtcattcccagaaacatggataagcatgtaggacactatgttaagtgaaataagtcaaggtacagcaagataaataccacatattttcacttayatgttggagctaaaaaaatagctgagctcagaaatagagagcagaaaaaatattactagaagctagaaaggtcttagggagaagaaaatagagagaggttagttaacggatacaacattatagctagataagaatactctctagtacactatagcactgtagggtgtatatagttaacaataattttcaaaaagctggaaaaaaggattttgaatgttcccaacacaaagaaataataaacatttgagatgtatgcattgtgtacatgtatt

SEQ ID NO: 354903 - DNA, 516 bp, Homo sapiens
agcaccattcacaccacagaacaaaaaccttcagttaaaggaagaatgactatacgtggaaaagaagggaataaagaatattacaaaggtgaagaaaacagaaaaaaattgkagactaaaactgttaagtatcttcataccattttcttattcaggaaaaacttgaataagttagctagaaatgctaatgtattattaagaaaaggagactgatatcaacagttgaagttgccagtgggtaaatgtaaggcctaacagaaaattccagggctgggtgacatagatagtgtgaaacacataattataggtcagtggttccagaaagttcctgaactcttcttcagttatctccaaatcctctatgtttctgcctcattctacacttcatttccttcactttttttattctttcctctttccttactcctttaagcctaaattaccctagttcatcatttcaaacattatcttgctagcattctcaactttttttttaacattgcacattcctggcca

SEQ ID NO: 354904 - DNA, 516 bp, Homo sapiens
agcaccattcacaccacagaacaaaaaccttcagttaaaggaagaatgactatacgtggaaaagaagggaataaagaatattacaaaggtgaagaaaacagaaaaaaattgtagactaaaactgttaagtatcttcataccattttcttattcaggaaaaacttgaataagttagctagaaatgctaatgtattattaagaaaaggagactgatatcaacagttgaagttgccagtgggtaaatgtaaggcctaacagaaaattccagggctgggtgacatagatagtgtgaaacacataattataggtcagtggttccagaaagttcctgaactcttcttcagttatctccaaatcctctatgtttctgcctcattctacasttcatttccttcactttttttattctttcctctttccttactcctttaagcctaaattaccctagttcatcatttcaaacattatcttgctagcattctcaactttttttttaacattgcacattcctggcca

SEQ ID NO: 354905 - DNA, 601 bp, Homo sapiens
ggtcccacttgccaattttaattttgttgcaactacttttgaggacttaggcataaattctttgctgtggctgatattgagaagacaatttcctattctaggatttttttttctaggattatttttattttaggattattctaggattttttttttttttgagacagtgtctcactctgtcacccagctgagtgcagtggtacaatttcaactcactgcagcctccacctcgtgagttcaaggaattcttctgcctcagcatcccaagtagctgggatcacaggcgtgcactaccatgccccactagttttttatatttttagttgagatrgggtttcaccatgttggccaggctggttttgaattcctgacctcaaatgatctgcccccctccatctctcaaagtgctaagattacacacgtaagccaccacagccagcctctaggattcttatagtttatgtcttacacttaaatatttaatctatcttgagttaagttttatacatggtgaaaggtaggagttcaattcgattcttctgcacatgactagtcagttgtcccagcatcacttactaatagggattactttatctattgt

SEQ ID NO: 354906 - DNA, 586 bp, Homo sapiens
tactcttagcaattttttgtctataaaatatttgcatttctccttcactttagaagcctttttttgacgagatatgaacttcttctttggaatttcttttcttttagaatgccaaaaaaggccccccttttattctggcttctgtggcttttggtgagaaatccactgttgttgccctgatggggttccacttsaatgtaatctgatctttttctctagctgtcttaaatttttttttaattgaccttgtgcagtgcaaatagtgtatgctttggtggtatttattttgtacagtttctcacaggtgttctctggatatctttaatcttgatgtttacctctctagcaaaattagaaaatttttttgaattattctatcaaatatgtttttcagattgtttatgttgtcttcttctctctcatgaatgctaataatttgtgggtttggttgctttacataatcccacatttctcaaagactttgttcatgtattttaaattattactttttaatttttttgtctcagtgggttagttcaaaaaaaccagtcttcaatatttaacagatggattttaaaagagcaaa

SEQ ID NO: 354907 - DNA, 501 bp, Homo sapiens
ttctcataataacaagtgagttctcatgctttgaaagtgtgtagcacttccctcttcactctctctttctcctgctccaccatgtgaagatctgcctgcttcccctttgccttctgccatgattgtaagtttcctgaggcctccctaaccatacttcctgctcagcctgtggaactatgagttaattcaatttttttttcaaaaattacccagtctcatgtagttctttatagcagtatgagaatagactaaaacaacatatatgtgtaaacatttctatatatacctatctgtatctgtagtaagctagatataaattcataccgaggtctccaattgtaatccattatttcatggaggattctagccttcttttcttgctcatccatgaattcctgctcaaactgtgagaagcatgactctcatcacaaatgattcatttayatttaattgtacaattccaatgtacatgatagcactatcaatgtttttaactataac

SEQ ID NO: 354908 - DNA, 579 bp, Homo sapiens
cattgaatggctgatgatamtacttactgatatggaagagaactatgcatgagttcgatctagaagaaaggacgagattactgttttaatgtgctaggtttcaaatactaaattagaaatgcaagtggagggattatgaatgaaactggttaaaaaaattaaagtgcaggatagaggatatagttataaatctgagaattgaaaaaaaatgggatttgataatattgagaaaaaacttaaatagagaatagggagttagaccaggctttcatcatcaataacaggcctgtgtaacaaaataagaagcaggggtcagtatgtcagaaaatccaagcaaagaaagtatcttctacattaaatgtcactgatagataatatacaatgaggtcaagggagtatttattttttggcaacactgagctaatggacgacttttctaagaatgagtttagtagcatgatagagaaataagtcattcttgggtaggtggaatactgtctgatgaaaaaatactttttcactggtttctaaatgcatttatttacagctatttatgttaaatatttcttcatcaatttc

SEQ ID NO: 354909 - DNA, 587 bp, Homo sapiens
aatccagaatcatttgtttatgctttccatatgtatgtggtccctaaactttagtactgaccaaacatctgaggtgcttccttaaaatacaaatagctggatcaaactccagagactcagatkcaggaaatctgggtttggtgcctggaatttgcaacttttacaacatcacagataattctagtgtaatctatctatggaatacattttgagaaactgagtcctcaacctactgtaattctaaagttaaattgaaaaggccatgcttcctctatttttgagaaaaataaatttattgatccaactaactgtcctaaactttaagactgtattaattctttccatctatgagcatgagatggctttctatttgtttttgtcctcttcagtttcttttatctgtgttttatagtttccctttatagagatctttcacctccttagttcaatttattcctcagtattttatttactttttgtgtggctattttcaataagattgatttcttattcagcttgatttcttattcagctagtttgaaattagtgtatagaagtgccactgattattttattaattaattttg

SEQ ID NO: 354910 - DNA, 587 bp, Homo sapiens
aatccagaatcatttgtttatgctttccatatgtatgtggtccctaaactttagtactgaccaaacatctgaggtgcttccttaaaatacaaatagctggatcaaactccagagactcagattcaggaaatctgggtttggtgcctggaatttgcaacttttacaacatcacagataattcyagtgtaatctatctatggaatacattttgagaaactgagtcctcaacctactgtaattctaaagttaaattgaaaaggccatgcttcctctatttttgagaaaaataaatttattgatccaactaactgtcctaaactttaagactgtattaattctttccatctatgagcatgagatggctttctatttgtttttgtcctcttcagtttcttttatctgtgttttatagtttccctttatagagatctttcacctccttagttcaatttattcctcagtattttatttactttttgtgtggctattttcaataagattgatttcttattcagcttgatttcttattcagctagtttgaaattagtgtatagaagtgccactgattattttattaattaattttg

SEQ ID NO: 354911 - DNA, 587 bp, Homo sapiens
aatccagaatcatttgtttatgctttccatatgtatgtggtccctaaactttagtactgaccaaacatctgaggtgcttccttaaaatacaaatagctggatcaaactccagagactcagattcaggaaatctgggtttggtgcctggaatttgcaacttttacaacatcacagataattctagtgtaatctatctatggaatacattttgagaaactgagtcctcaacctactgtaattctaaagttaaattgaaaaggccatgcttcctctatttttgagaaaaataaatttattgatccaactaactgtcctaaactttaagactgtattaattctttccatctatgagcatgagatggctttctatttgtttttgtcctcttcagtttcttttatctgtgttttatagtttccctttatagagatctttcacctccttagttcaatttattcctcagtattttatttactttttgtgtggctattttcaataagattgatttcttattcagcttgatttcttattcagctagtttgaaattagtgtatagaagtgcyactgattattttattaattaattttg

SEQ ID NO: 354912 - DNA, 524 bp, Homo sapiens
ttcatgttttatattcctcatatagaagaaaaatataaaagatattgcatttcacttgtatgtagaacatttagtttggtagtcattaatagactttgtcatctcttaaaatgtaaagcttattatgaaaggaagttatataagaaatgatctttgagtaaacaagttttggcttctagtattttttaaagacttgtgaacctcttctttgcccaagcagcccagggacagattttatatagaatgaagtttgcacattaccattgaaagacacattatgataaaagggaaaatgaggtttaacatggaaaaatgatgtgctcatcaacatactgracattttaaaaataaatattcttgagatactaattttaatctttgtaagatagtcactgacaacctgatctgagactttatttcaccttgctttcctctagtatgcttaatttacgtaatgtattatattgattttttttcttgattgtgcattattgaatattttaacttccttcttcttaatgtaa

SEQ ID NO: 354913 - DNA, 590 bp, Homo sapiens
ttattatgaacaaggacagaaatgaacaaagagaacaaattatccagaggaaacaatatctaggctaagaagctagttagtatttttttatatatttgagagtattaaaaacagtacatagatcttattaatttgaatcctttaccattgtggaatactcttctttttcttttttgatctttgttggtttaaagtcwgttttgtctaaaattataaatgcaacccctgcttttttctattttccatttgcttggtagatttttcttaatccctttactttgagcctatctatgtcattgcatgtgagatgggtctcttgaagagagcataccaatggatcttggtgccttacctagcttgccactctgtgtcttttaattggggcttttagccaatttacattcaagataaatattgatatgtgtggattttatcctgtcatcacaatgttagttaattatttggcagactcgtttatgcagttgctttatagtgtcaatggtctgtgtacttcagtgtgctttgtggtgactggtaatagtctttcctttccatatttagttcttctgttagagatcttgtaaggcagt

SEQ ID NO: 354914 - DNA, 611 bp, Homo sapiens
tataaatgatctttgcaatttagagatatgcaaaagattttttttactctgtaaattaaaaagctataaataagatcatttcaaaatayaaaaaattatccaaaataatgttatctcaattaaaaggacagccacagactataaaatatattttcaaaacatatatcttacagaggattgctattttagctatgaataacaataaaactccaccaccataatagcaatgagaaactttaatagacagttcacagaaaaagatatataatacaaaataaaatacacatataccaaagtattcaaaacaatttttcaccctggagttacaaattaagcaataatgaggcctcagtgtactcccacctcagtaacaaaaattataaagtctgagaacccaaaatgttggtgagaatctggagcaacacaatattgactattataacaacagtcataaaaatttctgagagtttcatattttaaaaagtaaacactattacatgactcctgaatttcacatttaatgtttattctagattaatggaaacacatactctaaaaattgttcaagaattttaatagcagctttattaatataaggcaaaactgagtat

SEQ ID NO: 354915 - DNA, 611 bp, Homo sapiens
tataaatgatctttgcaatttagagatatgcaaaagattttttttactctgtaaattaaaaagctataaataagatcatttcaaaatacaaaaaattatccaaaataatgttatctcaattaaaaggacagccacagactataaaatatattttcaaaacatatatcttacagaggattgctattttagctatgaataacaataaaactccaccaccataatagcaatgagaaactttaatagacagttcacagaaaaagatatataatacaaaataaaatacacatataccaaagtattcaaaacaatttttcaccctggagttacaaattaagcaataatgmggcctcagtgtactcccacctcagtaacaaaaattataaagtctgagaacccaaaatgttggtgagaatctggagcaacacaatattgactattataacaacagtcataaaaatttctgagagtttcatattttaaaaagtaaacactattacatgactcctgaatttcacatttaatgtttattctagattaatggaaacacatactctaaaaattgttcaagaattttaatagcagctttattaatataaggcaaaactgagtat

SEQ ID NO: 354916 - DNA, 629 bp, Homo sapiens
tggacaaaatcaatcacactttttaaaatttagcttattcaagtataaaacaggcataataatacccatcacaaaggactgtggaaataaatacatgcaaatatatgaatacaaatttatgtgtctgtgtgcatttgtgtacttagatcttgcttatcttatgactaatgatatctttaaaatcttatgtattaaaaactacacacatgtataaccattttgagtttggaagtggaacaggaattccagaagttacactatataattttcactgagatgcagtatcaacattttgtaagtggtatagatcttccatctatttaattatcccaaagtcaattcatgcattcagaacattttgcttctattgtgtactcctatgtttattagttaattttcctaggtttcagtkttgcttttgaaactgtttgtaatatcaaaagacttctaccaattgcatgatgatttttgccttctgttctcttgaacacttctttgcttggaacgttgagtaaaacatgttttctgtgtttcattgtggtaataatttcattttgataatcttcttattaattgccaccttgtatcagccactgagtaaaaaccattaggtaaaatgaaaacaaata

SEQ ID NO: 354917 - DNA, 566 bp, Homo sapiens
aagtcttcataaattgaaattattcttttgggaaaaaatattttaactgtcatgtaactgaaagcattatcgttcaatttcttattctaagatataagtatttccagaaaaaaaatctttctttagtaaattgcagtgccaagtacaatttaaaattatataaaattaatggtattatgctgatattcctttacttcccatacctcttttcaaattctgaagaaattttacccttaagggatttaaaaatcaaataaaaagccttcatttttacactattatttaaaattttatctccgattctttgtctctttagtgataaactatatttmtgttgaatctacaatgaataataattgttcagtatctcaatacatttcattttgaagtagggatctactgattattgcagaggagggatagattgtaggtcatagccaactactcaaaattgcccattagttatctattggcttgccttgaacaaaatttagtcaggcatttcttctctccacatgtacctagactttggtttgccccttagcttgagtgaaaactaagttgca

SEQ ID NO: 354918 - DNA, 449 bp, Homo sapiens
tatgctttacatgtattaattaattaaatgctcaaaaaagctytatgcaatatggattattatctcatttttataacaaattgagtgaaatgaggaacagagaggttaagtaacttgcccaaagttatgtttttgaaatagatttggatttgaaccttagcctccaggcttgggatctttcctcctaaaaatcacattttccacagtattctattggggatttgaaaatgtacattttaatcatcagaacttggcaaatgattatttctaaaatagtacacataaaaatggaagctaattatcaatcgagtgcttcagaaacacttgtaaactttgttctcaaggaaagtaagggaattttgtagttgcatgcaactttcattttaaaagggaaacacaattatctagcatgattatatctacttttttgccaattcttttaggaacag

SEQ ID NO: 354919 - DNA, 204 bp, Homo sapiens
gcgtggctatataagacattactgcatcacttgatagttagctaatgggaattgtactgtttgcatgcagccttaaattgtttgttcccatatgacaagcataaagaaaaactaaaaacataaaacaakcaaaacaaacaacaaattttttttttttttgagacaggatcttgctctgtcacccagactgaagtgcagtggcat

SEQ ID NO: 354920 - DNA, 482 bp, Homo sapiens
caatattattttattggaataccttatggttccttttattttttaaattttttgaaaaagttgtgggtgggagcatgaaaagagctaccagtgcttatcaattggtaaaacacaaatatctagtgataataggtggctatcagagatgattaaytgtttaactccttttctatctggttttttttttttttttttttttttttttttttttttttttttttgagacatagtctcactctgttgcccaggctgaagtgcagtggcatgatctcagctcactgcaacatccacctcccaggttgaaacgatactcctacctcagcctcccaagtagctgggattacaggcaggtgccaccatgtccagttaatttttgtatttttatgtagagacacagtttcaccatgttggtcagagtggtctccaactcctggcctcaaatgatccctctgctttggtctcccaaagtgctgggattacag

SEQ ID NO: 354921 - DNA, 511 bp, Homo sapiens
gtgaaaactgatacatggagaactttggtcattttaatctagctttttaaaatatgtgcagtgaaaaaaaagaaaaattacagatacatgagaggcatttaacatattattttttttggctagatcaagacrcccaacatgttcagtttcaaataacatttatatttttataacacatagctgaagtctatttaagaattttgttaagtgaacatattataaaaattttattacatctacaattatttcaactgagaccctctgaaccagaaagagctaaataaaaggttcaataaattattttaaaaaattgaattcatgtaaatatttggaatgtttgtctatatactgatgcaaaaatataaaacagaattgtgcaaattagtcaaccacaactagaacccaataaaaatcttcctattaaaaaaattcttagaaagtaacatttaaaactactaaataaaataggattttatttattttgacagaaaaaaagtagtactataataaa

SEQ ID NO: 354922 - DNA, 567 bp, Homo sapiens
agtgatcttccccttgtaagaaagcagcaacaaggctccatcttgggaggagacagcagtcctcactagacacccaatgtactggtgycttgatctacctagcttgacagctttgaaaaataaatttctattatgtataaattatccagccctaggtattttgttgcagcagcataaagggagcatgacatgtgatttaaacttatgagattaactgaagaaacggaagcatgcaatacaatgcagatatggctttaggagagctttacttaaagcatagaaatgctgttgtgagaaggttgtgcttattttccagagcaccctagttacctacttggggaattggtttcatcatatgcaagatcaaaaagtagattagattacaaattatctgacacttgttggttactaagaaatgtttactattgtatgacacatatattttacagataattttgaaaggaagcatgtttttctcagagcagaagtttccatgtttttaaaatctatgtttatataaaatgtgtaaatgaagattgtcaagggacaggagtcgtaaccctttga

SEQ ID NO: 354923 - DNA, 590 bp, Homo sapiens
atgatattcaacaccatcgtactttatttgaaaagaagttttatgtttcaagttatatattcttctgcttcactccgtaacctttaccatgtcatatactttggttttccctgcttatttrgtaatttcatatatgaaaatgtaaaaattcctggtgaattgcttcacttcttgacttcgcccccaatgagaagtcggctgtatacagaaaagagtcatctgtaagatttactattcaatatcttagactatttttctttaagagacttttaaaaataaataaatggaagcaaaggtttcactcaatttaactaattatttcaactgtatgagcaggtatatgtgtcaggtgctgtatgtattaataattcaaacacagatcctgccctcatggatattttcatcaattaccggggaatatcacagtcttctgagtgtcaatcaccagaagtttgccttgtttaaatcatgttttaaaacttatccatctgttaaaatatcttagaattagagatcctcgcaaattattttttattggttttcacatttatctagatatgattacacatgtgatacagacaatgctaatt

SEQ ID NO: 354924 - DNA, 573 bp, Homo sapiens
gaaaagtatttagcacctaaaagttttagactataacttgccagtctaaagtcaataggaatgtcaattattatagaataaataaactgataatgtctctaattaattttataaaggcagaacatattatctttagattttcataaattattctatacaaaagtgaaacgtctattactcaaaatgcatgcytatgaaatcgttaaggtaaaaatcatcatttttttcaataagatatatttttatatagtcatcttctatattttaatttaaaatgcagctaccctttcaaagtgtacattctttgtgttttttgatctttgttggtttaaagtctgtcttatccgagactaggattgcaatccctgcttttttttgtctttccatttgcttggtaaatattcttccatccctttattttgagtctatgtgtgtctttgcatgttagatgggtctcctgaatacaggagaccaatgggtcttgattctttatccaatttgccagtctgtgtcttctaattggaacatttagcccatttacattcaaggttaatattgttatgtgtgaatttg

SEQ ID NO: 354925 - DNA, 573 bp, Homo sapiens
gaaaagtatttagcacctaaaagttttagactataacttgccagtctaaagtcaataggaatgtcaattattatagaataaataaactgataatgtctctaattaattttataaaggcagaacatattatctttagattttcataaattattctatacaaaagtgaaacgtctattactcaaaatgcatgcttatgaaatcgttaaggtaaaaatcatcatttttttcaataagatatatttttatatagtcatcttctatattttaatttaaaatgcagctaccctttcaaagtgtacattctttgtgttttttgatctttgttggtttaaagtctgtcttatccgagactaggattgcaatccctgcttttttttktctttccatttgcttggtaaatattcttccatccctttattttgagtctatgtgtgtctttgcatgttagatgggtctcctgaatacaggagaccaatgggtcttgattctttatccaatttgccagtctgtgtcttctaattggaacatttagcccatttacattcaaggttaatattgttatgtgtgaatttg

SEQ ID NO: 354926 - DNA, 505 bp, Homo sapiens
cacacaatattttctatattactgtatttgaaatgcatttcttttctaatacatatgcaatttggggcaggtagaagtttcactcacaaaagaaatgtttattttctcaatgtactcagccttgcctacatttgttccagtaaccttgtgctatcaaagtcctgattggacttctagctttgatttttttttttcccatcaaagcactcaaaatgccaaatcttggctctctgacaataccaccaaaayaatctgttgattaaaacaaagtggaatttattgcttatcacaataagatgaagtgttgacagactcttactagcatctcagaagggtataagtgcaatattttttaagttgggtggggagtcttgcttgtctttgagtataaatcttgagagagtcaagagtttcgaggtgtattaattcattttcagactgctataaataactgcccaagactgggtaatttataaagaaaggagatttaattgactcacagttc

SEQ ID NO: 354927 - DNA, 502 bp, Homo sapiens
tcaaaaatccaattcttggatttgttaatcttttgaatgtgttttcaagtctcagtctctttcaattcagctctcatttgagttactttttgtcttgtccttgctttggggttggtatcttcttggttctctagttatattagttgcratgttaggtttttaaatttaaattttagctttatgatatgggtatttacttctataaatttgtctcttaacactgccctagctgtgttccagagattcttgtatgtcgtatctttgttctcattagttttaaaaagatttttcatttctgccttaatttctacatttaccccaaagttatgcaggagcgggtgatcagtatgtcatagtaactatataattttgaagcaaatatcttatttatagatttctaagtttgattgcactagtggtccaacattatggtcgttattatttaacagagaattttttgcatttggtagaggagtgttttgtgtctgattatgtgattgaa

SEQ ID NO: 354928 - DNA, 609 bp, Homo sapiens
tatgtaacaaacctgcacattgtgcacatgtaccctraaacttaaagtataataaaaaataaataaataaaaaataaaataaaatgcttaaaaaaaaaaaaacctaccacagagaaggaatctaaatttaattggatcagacagtggaggtttcagatcattgtcagaaacaatagagcaattatttggcaattagtagaggctaacagcttttttagaaggcagtggcagatagcttgagagagagagagagagagattaggaaaagagatattcacagaaaaccctgctgaaaccattgtctttgttgtcattccatggtgactgtgttcatgtccaaggctgtgccctctgaagagtaaacatcaaaggcttcgcaatgattgataaatagattttactattttcaatagagccaaatcactgaacaaataaacaagcaaacaacaggaagccccagaaagacgggggattcagcttctagttgttgtgtatattatataaaatgtccagcttttaataaataattataatacatgtaaaaaataataaaatatgccacatatctgggtaggtgggcggtgaaataacaaaaactgtccaggagag

SEQ ID NO: 354929 - DNA, 569 bp, Homo sapiens
caaaattacatggaaattaaacaacttgatcctgaatgactgttgggtaaacaataaaattaaggcagaaataaaaaaaaaaaattgaaataaatgaaaacagacacacaacataccccaatctctgagacgcaccaaattcagtgttaagaggaaagtttatagtgctaagcagctacctcaaaaagtaagaaatatctcaaattaatgatctaacatcacacctagaaggaccgggaaaacaagaacaaaataacccaaaagctagcagaagaaatgaaataaatgaaagcaaaactgaatgaaatcaagactcaaatatccatacgaagaatcaatgaaagcaaatgttgattccttgaaagcttaaacaagaccaaaagactgctagctagatgaacaaagagaaaaagagaagatccaaataagcactatcagaaataacaatggtgacattacaactgataccttataaatacaaaaaatcytcagagactattatgaacacctctatgcccacaaactagaaaatctagataatatggatacatttttggaaacacacaatc

SEQ ID NO: 354930 - DNA, 541 bp, Homo sapiens
cccatatatacatctatcctattagtgctgttcctctggagaatactgactattacaagtggcatgatcatagcttactgtagccttgaactcctggactcaagcttttctcttgcctcagcctgccaggtagctaggacgccagggctacaggcgcgtgctaccatacatggctaattatttttsctttttctggcattggggtcttgctatgttgcccaggctgctcttgaactcctggtctcaagtgatcctcctgccttggcctcctaaagtactaggattttaggtgtgcacaatgtgcctggcccttatcatacttttaatccaaaataccttttaaaaaagtacctgtaggatgggggagtctttgcctcaatattctcactgtcatcaatttcgctacacgatccctgatgatatcagttgatcccatgttcagaattcacagaagtatccaaaagacatctaacctgaaagtataaacagcagataaggaagttgttataacatttcaagtacggcttcttgacccaaaaga

SEQ ID NO: 354931 - DNA, 541 bp, Homo sapiens
cccatatatacatctatcctattagtgctgttcctctggagaatactgactattacaagtggcatgatcatagcttactgtagccttgaactcctggactcaagcttttctcttgcctcagcctgccaggtagctaggacgccagggctacaggcgcgtgctaccatacatggctaattatttttgctttttctggcattggggtcttgctatgttgcccaggctgctcttgaactcctggtctcaagtgatcctcctgccttggcctcctaaagtactaggattttaggtgtgcacaatgtgcctggcccttatcatacttttaatccaaaataccttttaaaaaagtacctgtaggatgggggagtctttgcctcaatattctcactgtcatcaatttcgctacacgatccctgatgatatcagktgatcccatgttcagaattcacagaagtatccaaaagacatctaacctgaaagtataaacagcagataaggaagttgttataacatttcaagtacggcttcttgacccaaaaga

SEQ ID NO: 354932 - DNA, 657 bp, Homo sapiens
ctaatatttattagttacgtgggtcacaaacatcttcttccctctgtaatttctctattttgtctcataatttaaatacatctgcataagtacaatgttgagaaatattgatgtaaataacagaaaagccatgtttgttgaaagtgatttttcaccgatttacagctcacagtggtgaaggaaaataggagagaaggytcaagtgtcaccccaatatttaaaattatttaaaacacaaatatatcaaaatatctcctgaagataacgaaaggagaaataaagaaataaagagaaagggagagtgagacagaaagaataaagaaagaaagagagaaagaaagaagaaagaaagaaagaagaaagaaagaaagaagaaagaaagaaagaaagaagaaagaaagagcaagcaagcaagcagcagggaggaaggaaggaaaaaaggagagaatgagagaaaaaaggagagagaggaggaaagaaacagaaaaatgcaaaagaagacagaggaaaatggaaaggggaaagaggaaaaagggaaaggaatggagaggggaggagagaaaaggaaaggacaggaacatatttccttcataactcagtaaatggttctaaagttatcccagttactcaagcccaaatcctaagaggtcagcagtg

SEQ ID NO: 354933 - DNA, 588 bp, Homo sapiens
tttgaggcactgggtgcctatgtggttatattaacatataaccggttatttttgacatgtttattgatattgtatcttattcttaatatccaaatcagtcatgtgaaacaataaaatttgttcattttagaaatgcttaacacatggcttatttatgagagtgtggactggrcagtttctggaactattaacaatgcagagctttaaccaccagggatctgaaggggtaagagggaggagggcaagaatgttaccataacacaaagagagaactgcacaaagagagcctccatataagctgtgagtttttatcaaagcacagcaccagagtgcaataagccttcaaagagggagctgagacaaacgtaccaatttcattcaccttcctcccttccttgtcctgctggtactccactttgaccatcagtcactagggaaaaaagaaaaggagtcttttgatttagtaaagatatgtcagtcttgggaacaaaagtgaaggtagattaatggaagttgcctacacctgttttgcaccataacatctaccattgtcctctcttcagttaaaaaattgtgtaacagaggaca

SEQ ID NO: 354934 - DNA, 598 bp, Homo sapiens
tattaacaatgcagagctttaaccaccagggatctgaaggggtaagagggaggagggcaagaatgttaccataacacaaagagagaactgcacaaagagagcctccatataagctgtgagtttttatcaaagcacagcaccagagtgcaataagccttcaaagagggagctgagacaaacgtaccaatttcattcaccttcctcccttccttgtcctgctggtactccactttgaccatcagtcactagggaaaaaagaaaaggagtcttttgatttagtaaagatatgtcagtcttgggaacaaaagtgaaggtagattaatggaagttgcctacacctgtttygcaccataacatctaccattgtcctctcttcagttaaaaaattgtgtaacagaggacataaaaaggcctgttggttaccaaatttttctggtataatggtaatacagtcatatatccacatgcaaattaaaatgttacctaccactgtactcttaatatagcagacagatataggtcagtgcaattaatatcatagcacttctactgtcctcaattctgcaattgcttattagcttaaattggcaattattgt

SEQ ID NO: 354935 - DNA, 598 bp, Homo sapiens
tattaacaatgcagagctttaaccaccagggatctgaaggggtaagagggaggagggcaagaatgttaccataacacaaagagagaactgcacaaagagagcctccatataagctgtgagtttttatcaaagcacagcaccagagtgcaataagccttcaaagagggagctgagacaaacgtaccaatttcattcaccttcctcccttccttgtcctgctggtactccactttgaccatcagtcactagggaaaaaagaaaaggagtcttttgatttagtaaagatatgtcagtcttgggaacaaaagtgaaggtagattaatggaagttgcctacacctgttttgcaccataacatctaccattgtcctctcttcagttaaaaaattgtgtaacagaggacataaaaaggcctgttggttaccaaattwttctggtataatggtaatacagtcatatatccacatgcaaattaaaatgttacctaccactgtactcttaatatagcagacagatataggtcagtgcaattaatatcatagcacttctactgtcctcaattctgcaattgcttattagcttaaattggcaattattgt

SEQ ID NO: 354936 - DNA, 575 bp, Homo sapiens
atgtgtagtctctcagacagagtaatcaaaatagctgtttaaggaagatcaacaaagcttaaaaaataaaaataaaaaccacagagaacaattcagaaatttatcatagcaatttaacaaatagattaaaatatttttaaattaaaacaaaaattctggagctaaaaataaagttaaaagactgaagaatgcattagagggtcacaacagcagattgatcaaatggaagaaagcatcagtgagctcaaagacaggctatttgaaaatacacaatcagaatagaaaaaaagaaaaaacaactgacaggatctatgaaatttatcaaagaamaggtgtgttattagcattcaagaaggagtagagaactagaaagagggagaaagtttacatgaaggaataataatagaaaactttccaaccataaagaaaagtatattagtctgttctcatgctgctaataaaaacataactgacaatgagtagtttataaagaaaaagaggtttaatgtactcacagttccacatggctggggagacctcacaatcatgacagaaagcaaaggaggagcaaaggc

SEQ ID NO: 354937 - DNA, 595 bp, Homo sapiens
tttgccttctaataatttctcacaatactaccaaacttttcactccttaacaaattgaaagtgtgcaggatttgaaaaaatgggcttcatatgctttggaagaaacttattcccagggataattgtagttaatgatttactatcgagcatttcaggacattatctctaaagatcacatctatattcattgtctacactgatgcttctggaaaaagttgtttgtttctcttatgtccgaggtctgaaactgccattctaatttggttttagaaattggttggactgttgaatttctggtgaaaaaggaatataaactactggaaattgaacaagtggaatgtactctttcctgaacaaagagacttccaagagcctctggctttatattattgacactttgtttcagctcctgcatatcacctgggaaatggctcaagcacagtaacacactttttaaamattatgccccctttgtattcattatattcatgcaggctctgagcatacaaattgatatagcaagatatcttggcctgaggaaccaaaacaatatccaaaagtttctgaattttagctaaggtgtcctgtggtcggg

SEQ ID NO: 354938 - DNA, 602 bp, Homo sapiens
tccttatctgacaaaggaaacttctttttaaaagaaaggcaattgtcttaagaccccctccctaggaatatcatcaaataactagaaaagattaaccactggagaagagaagagacgaaaagctatcaccatgctgagagagacttttcaatcactcttctgagggcagcttcaagagatcatctgagagactttatctacataataagaaaacctttgttcacagtatagctctgcccctcaccttcccataacttgctgtcccattcagtttcctaaaagaataatttacaagataacatctacctcttggatttattcaattccactaaaaatcatttagaacccctcaaattgtctatattttcccttctccttttctcttatgaagagggtatataagcctcatctactgtgtattctttgagtttcrtattttatatggcttccatgcttatgcacattaacaaatgtctatgaattttctcctattgtttcttgtcagtcattgcagtgaaccttcagagagcagcagagggaggggcattttccttctaccctacagttctaaactgtacttgttatatgtatgtttgtagaag

SEQ ID NO: 354939 - DNA, 566 bp, Homo sapiens
tagtggtgatagtttcacagctttgaaaatatcctaaaatccactgaattgtacatcttgaaaagatgtgtattttttggtattgggtgaaatgttatatcaattcagtaattttgtttgattgtattattcaagtcttttatatccctattggtttcttatcctctatttattagattatttcatttccattattttattatttatttatttctcaagacagagtcttgcttcgtcacccaggctggaatacagtggagcaatctgcaacttccgcctcctgggttcaagcaattctcctgactcagcctcccaagtagctgcgattacgggcatgcaccaccacatgtggatacttttyttttcttttgtatttttagtagagactgggtttcactatgttggccaggctggtcttgaactcctgacctcaagtaatttgcctgcctcggggattacaggcgtgagccactgtgcccagcctcatttccattctttaaaaattctcatgtatatatctgtacctttttttgatttcattggtttttgcttcatatattttgatg

SEQ ID NO: 354940 - DNA, 518 bp, Homo sapiens
accacctgctgattgactttttcagtgaagtcatatggacaaatttaatttttcagcaatgttgactgacaacatgcacagactattaccaacctgggaggctcacctgagctttggtgtccagggttttggttgcggctcagtcacacaggcaaagttgagcgtctgcatggctgaccttagtctttagccccttccgaggtcaagttggtgttgcatggcccaaggcctcaccataagccacatcattagtatacattatctggagtggctcaaggcctccaggaaaacagagacacccttaccaggcaaaatattccaagggcatagaggttaccttccaggagatgggtgagggacaaacttttctttgttatgtagatgtacttctaataaatttaaaaaaatggctataacaaatcctttagcaagtcatttggtttccaattcttttcttttgaataatygtgaactgataaatcattaaaactgtttcggatgacagattagtgtgtaat

SEQ ID NO: 354941 - DNA, 583 bp, Homo sapiens
cttttgcctttcacaaaagctttagaatcagtttgttgatatctacaaaatgactttatagcatttttattgggattgtgtttatagatcaagttgggaagatctgacatcttaaacaatattgagtcttcttattatccatgaacatgcaatgtgtctataattatatagacttttttwaatttcttcatcaaagttttatagttttatagtttatatagtttctcatgtatatcttgtacataattttttaaaagatttatgcctaaccacttttttggtgctaatgtaaatgatgtttttaataacaaattactattattgattgatggtatataggagagtaattaacttagatttttcactttttataatatgctagctttattacttatacatctgatttccaaggcaatgttgctctcctataatcaaagcatgaaaatttgttattcaaggactcaatgaggactaaaccttaatttgattacttatgagcgtcttaaaaattctagcttaggcaacttgggaaggagtaaaatcatttctagattctctgctctgagaatgaaaactttctata

SEQ ID NO: 354942 - DNA, 590 bp, Homo sapiens
aattatacttcttcactttgtttctctaatctctagaatytggcagctatatgttttggcatttatattttaatgaggtcagtcagctgaagttatattttcacaaataatttcaaacattgatattccttggggcaaaacagtatgtaatagttattaattttcagcataaatgaaaggtcaaggtcaccacaatagttaattggccaactacacaatcgtttttggaaataatttaactttaatagcaatattgtgctacaatgaaaggcaacatcttaatattgttgctgacaatgagaatcaaattatttataaatatttacttcccttctctattcagcaaagtaacgtattagtaagtcaaagcattctatccagaagattagtttttacaatgtatataacaatgaatccatcacaaatatcagacagattttgagtgtgatataaaataaactttcctcccttccattgcaagctgtcccactattcacacatccagcaacttgcatcagggaagtggaaactaatttatgtggacagttgttactgttattatggatgatttttttgctttcctataacca

SEQ ID NO: 354943 - DNA, 568 bp, Homo sapiens
atcatctcctaccttgctgcccagcatctcattttttgactatctgcaatttttatttcttggcttatttatcagagcatctaaatttagctcccatcagtctccttcctttctcaaaaaattctggaatgatgttctatcttgattactttcatttatttgtaatctttcaacccattgcatctcagcatcaactcctatcattttacccaaactattcctaattgctggatctggcagtcttttttttttttttttttttttttcttggtcattgtcttcttaaacatgtgaacttgatgcaatgaatcctccctttttttcttgaatctctcttggcttctgctctttagtaatcttgttattagggatatgccatttgctcactttarattgtaggttaaataacacttcctcagttttagccataattttaggactactggagaaactcccatcctatatctgcttacccagatatttaagtctggtaaatctacaattattatgtgactagtccagttcaccagccttcccaaatcctatgtcttaaattgaataaatacct

SEQ ID NO: 354944 - DNA, 629 bp, Homo sapiens
aagcctattcaatcaatagaactggtggtgtgctggttcttaaattatgtgtgtcagctcattgtaactcagttttattacagttggttctttatcattgcagtgtgaaatttaattaatttttcacagacwcttgggattcacctgaagcaatgaactctctgaacccgaggagacttaccttggtctgcccacagctccttatggagatatttcaggttgtggataaaacccaactccaagtagaaaattctcatgaaagggttaagttagaagcaattaccattgaaatatatttgcaacaaaatctgtttggagcctcctccctgcctccaaaattgacttttcttttgaggctaacagaaaaagcaatatttgtttagcttcaattggaaaacctgatattgatattgaatatttgagaacagtcaactgcaaacccttttgggagaggaagggttgcgattattatttcattatcttttaaatttttactagttatttaagttctctatttctttttgtacttgtgttggctttttataatttttaaataatttatccatttaatattggtcatcaccttgattagagtatagtagactataatacctttactctgtttgaat

SEQ ID NO: 354945 - DNA, 363 bp, Homo sapiens
ctcgcctgtggaagagacctggggccgctaaggaaacggcggggaggggagcgaggaggagagacgctgaggacctggcgccggcgccgccgccgccgccgccgaaataaagagcaggaatttacctgggcgaatcggcgtctgratccaaggggaggccgaggccgctgtggcgagagactataatccgggccgggagggggggtggctacggctcctcttccgtctcctcagtgcggggaacatgtagagccggggggagaccagccgagaagacaaatcgttgcttcttcttcctcctcctcctccttctcccacatagaaacactcacaaacacccgaccacgggcccgagctaccggg

SEQ ID NO: 354946 - DNA, 549 bp, Homo sapiens
ttgtcagctccactattttytgaggtatgtcagtaatacgtttgattaacttgtcacttgcccttccaaaagcagttttacaaaagtaaaatgtcacagactagcaatactgtaaccagaaagtaaccctaattcaaacctaatctaagagtttgcaggcatacaataagagacaattcaatttcccattattctagttttttcagataccaagaactttcacacagattctagactgcccaaggaaggcatctcaccttgaagcctagaataccagaaaagaatacatcaggctctagaacctttcctgacaaacattaatttctaataactattaccaagtatgtgacttattgccttaggatgataatagtcactatcaactaccactgttttagataaaacccccatgaacattgttttatgaaaagttttgtattcttttaaattgtctttgaaaatttttcaaaagtgggattattggatcaaaggatataaacatttatataactcttgttacctagcaccatattgttctccaaatgagca

SEQ ID NO: 354947 - DNA, 544 bp, Homo sapiens
gcatatggcatatgctcgggttttttttgttttgttttgttttgtttttttaataaagaaatgaagttgcgagaggctgattcattagctttarctgtaagtcttctggagggaatccataccaatttcatttacattgcatgattttttttcctttgccttggaataccgcttggcaggggacctagtaagttcctgttcattcttcaagttccagcgtaattccatcttttctttgatgccttccttgtctcttttaggcagaattaattgttcccttttctatccactccctttttttccccagcctttattttagattccagggggtacatgtgcaggtttgttacatgggtaaattgcgagtcgcagggggtttgttgtatagattattttgtgacccaggtaatgagcatagtacctgacaggtagtttttgatctccacccttctcccaccctcaagtaggctttggtgtctcttgtttccttctttgtgtccatctgtggtctatgtttagctcccacttacaagagataacatgc

SEQ ID NO: 354948 - DNA, 603 bp, Homo sapiens
attggtccacctccttgctaacagttggtatgatcagttctgtggtttgaatgtttgtctcctctgaagctcatgttaaaacttaattctcattgtaaaagtattaagagggtggaaaatctgactatgctatttgagaggtgggacttttagggagtaattaggattagatgaggtcatgagaatgggacattagtggctttataagaggagaaggagagacctaagctaagatgctcagcccccttgccatgcaatgccctgtagcacctygccctgggactccccccgagtccctaccagcaagaaggacctcaccagacatgcctccttaaccttggacttctcattctccagaagtgtaagaaataaattcattttctgtacaaattgcccagtctcaagtattcagttatagcaatagaatacagactaagtcagtcttttaaattaaagcaggtgggccgggcacggtggctcatgcctgtaatcccagcactttgggaggctgaggtaggcagatcacctgaggctgggagttctagaccagcctgaccaacatggagagaccccgtctctactaaaaatacaaaattagctgga

SEQ ID NO: 354949 - DNA, 560 bp, Homo sapiens
ggactctcttggccatttgccatgttacaatgcttccttgtcagtgaacatacaaacttctaaactttgatcaggcacagtgaggcttccccttctaatgaaatcatttatgtaattgatagcaataacaaagtccatggactactaatttttttggcttacactgagttatctctgatagaaaatctctgctaaaaattggtttttaatacccgcatgtgagaaagtaaaagtattaatcagagatcatcactgtccatcaccttgagtattaaaggagatcagasccattaagggatggaagcaatgaccagtttctggatattgcattccacccagacaaatccctttttattctgccttccttaagaaagatagctggagtggaatagagggcaggggatctctaattcctgtttggacctttgaaatcattcaactatttaggaaagacactacactaccagtggtttgagtaattagtataagtaacatttcattatttaccaatattattttgagtagagaataaagagactttgctgaaaagtatttctcac

SEQ ID NO: 354950 - DNA, 586 bp, Homo sapiens
acttttctggccatatgctctgtctaaagtgtttatgaatataccttgcatattatattagtctttagcacctagctcagtatacttcatagaagatgcttaacataggtaattatttaaatattcagagaaatctatgtacatatagcagcaacaggagacttactawtttttgtattttatcatagttatatattagtattttctgaatcataaagtaatattctaatcataataaaagtccaaggagtacagatagaaataccaccaaaataagaattccccagcatctcagcatatacccgacccctaatcattgttaaaggtttaataatgttcttttttttcatgcctagaccatcatttttatgaaaatgtgttttaagcaaaagtatttagcttggttgatgagcttatgatgtgcacactgatattttcagttagcaatatatctttaatatcttttcatgaattttaagaatctttgccattcttctttattttagtgccaatttgctgagagattaaaatatagaatcatcactgtaaagttggttcaggctttaattcaatgattctttctctt

SEQ ID NO: 354951 - DNA, 545 bp, Homo sapiens
tttgtcaactccccaggtctacctggccatgaatttgagcaaatctagggcagcttggcagaagggttaggcatagctctttggctgtcatttctatttctctgtcacattgtgttaggcctgttgcaccagcaggtgtcatactggtctgcacttttccacagaaatacatcaggtaaaagttcagaatcawtttctgttccatatgctctgaaaaacagaacactagcttcaagcaatctaccatacagagtggtaagttgctctatgttaattagtgtatcaaatatgaagaccttttgcctctcctatatctctgatggaaagtgcaccagtattaggggtatcaatgtaggaagctagtctgccttcttcacatgggtcaaaggctttgccgtgctaaggttgaggctgtatttccagagagacatgcatttcactcagtacttttcagactacatcacaatcacttggaggcctgcttgcaacaaggattgctgggatgtacccccagagtttccaaatctgtgttttctacaagttcc

SEQ ID NO: 354952 - DNA, 467 bp, Homo sapiens
gctcacacagtatttctgttgggcagcactggtctagagcctccatagccacaggggtcaggtcaaagttcaactttatttgagaccatatatatctccagaaaaaaagtcaagattggataagcagagggctgaggtcagcctcccagygaaaagtcagaatgccttagcagtttctacatctgaaccgattactctactcagaattcatcaactaaaggagagtctgggtccccacaaggtaaagaccttccaacactatggcaaagatatacagtaatgtgtgcatttgatcaccccattccttcccccaaagacacttgtagctgtttactaggttaaaaatcaactagggaaaagagaatacccacacctgttgagggctactggatacaggctttgaattgacattgacaccagggaactcagaccataatcactgaccccctgttagaataaggacttat

SEQ ID NO: 354953 - DNA, 542 bp, Homo sapiens
tccacattcgtctcatggtgggtccattaggtccatggtgatycattaggtggcagtttttttagttcctaaatgtatattcataatggaacactcacatttgttctttgacctgtaaatccaattattttagcaggaaaagccaagtagaatccttgaagttgttctctccctatccctgccaatacagtaagtcaaattataatgcatcccaaggaaaatgacagagattagtgccatattcaaagaccaaaataatgcagacatggtggtctcaatcataacttcatttaatttactagtataaaacttgcaataacttgatgaattgtgacatatcaaagtggattaccaggcacttaactaagtactagccctaaatgaagtctctatgacacagtttgcagctatcaatcttgtgaatacattctttccataccaccagggaagaataaatgattcaccttcatattgaatagtcaaagtgcctatcacagtctgtctccaggtcaatgttaactcttccatctgctgcacaacat

SEQ ID NO: 354954 - DNA, 542 bp, Homo sapiens
tccacattcgtctcatggtgggtccattaggtccatggtgatccattaggtggcagtttttttagttcctaaatgtatattcataatggaacactcacatttgttctttgacctgtaaatccaattattttagcaggaaaagccaagtagaatccttgaagttgttctctccctatccctgccaatacagtaagtcaaattataatgcatcccaaggaaaatgacagagattagtgccatattcaaagaccaaaataatgcagacatggtggtctcaatcataacttcatttaatttactagtataaaacttgcaataayttgatgaattgtgacatatcaaagtggattaccaggcacttaactaagtactagccctaaatgaagtctctatgacacagtttgcagctatcaatcttgtgaatacattctttccataccaccagggaagaataaatgattcaccttcatattgaatagtcaaagtgcctatcacagtctgtctccaggtcaatgttaactcttccatctgctgcacaacat

SEQ ID NO: 354955 - DNA, 542 bp, Homo sapiens
tccacattcgtctcatggtgggtccattaggtccatggtgatccattaggtggcagtttttttagttcctaaatgtatattcataatggaacactcacatttgttctttgacctgtaaatccaattattttagcaggaaaagccaagtagaatccttgaagttgttctctccctatccctgccaatacagtaagtcaaattataatgcatcccaaggaaaatgacagagattagtgccatattcaaagaccaaaataatgcagacatggtggtctcaatcataacttcatttaatttactagtataaaacttgcaataacttgatgaattgtgacatatcaaagtggattaccaggcacttaactaagtactagccctaaatgaagtctctatgacacagtttgcagctatcaatcttgtgaatacattctttccataccaccagggaagaataaatgattcaccttcatattgaatagtcaaagtgcctatcacagtctgtctccaggtcartgttaactcttccatctgctgcacaacat

SEQ ID NO: 354956 - DNA, 542 bp, Homo sapiens
cagtctgtctccaggtcaatgttaactcttccatctgctgcacaacataatcttaaatggaacttgccaggctggacattcttctgaacattactttcattcaatatatctatggcaatgtgtttaatagacctgaagagcaagaagctctcagccttcagactacyttagtaaactcatgtacaccagaaggtgagagataaataccacaaaaattcagagggctgccacattggtgaagaggttaggggtgcagaaagctgaagcacgctgacattctctccaaagcaaaggatatgatgctgtatcctgtacctcctaccataaagagagaagcaaaatgcttggcattcctttttgttgtttttgaggtagcacttgagaatactgctagttttgagtgggatatagagcaagaaaagactgtgtagcacatcaagaatgcagtataaacatgtctgccatttaggtcatataaaccatggtatcagagataactgtggtagaaaaagatgacactagaaaagtcccagttgaagagt

SEQ ID NO: 354957 - DNA, 583 bp, Homo sapiens
actgcacaggcaatacctaaataattttgatagcttttctgatttagggatgtagtgggggaaaagaaaatacaggtgcagtgtttagaatgtagagactagaaaacacattttcagacttctcaatattgtgaaattaagcactgttttattattttggataccaaattagcctatgactttgaaaatttttccatcttgyagacagaagacttttagaagtgtttaggatatgttttctggcttccaaggtcttaggatgctttaaaaatattatagcattactagaatattatttttgttatttaaatcatgttgaaaggagattcttgtaagttttgtgcctgagaggaaacctctgagacctaaattagccttcactgaatatagtaggcataataatggcacctccaaaaatgtttatgccctaatacccagaacctgtgactgtgttgtcttacatggcaaaagggactttggaggcatgattaagtttacagaccttgagatggagagagcagcctgtattatccaggtgggcacaatttaataacataggcccttaaaagcagagaatgcttcc

SEQ ID NO: 354958 - DNA, 555 bp, Homo sapiens
cttaagtgtataaaaactgaaatacaagtaggcttgtgaaatcaggaactggaaaaccagagatcaagacttcctcaatccaccttttatttgtgtctaagtacctgctccatcttctgcttctgactacatcccacctgcttagttgttggcatacatatagctaaaaaggamtacgtcaggttgcctctatcgaattcaatcacatatctcatttccacaccctacaacttgtgcctcttagtgtaagtatagacaatatgattgatcaccagctggttaaagcactggatactttcagtccaatgcataccccgaattcaatgagctgttgtgttgagaccacatggcacaaatttgactgaaggcacctgcaattttaacaggcagctgctagagaagagagttatggggaggcagacacctcaagacatgtttcttttatttagtcacacttaatcctttaatgtcttacacctgaagagtgagtcaattttttattaggtttatgacctagaccaagggttttcactatttaacttttaagtatttcat

SEQ ID NO: 354959 - DNA, 522 bp, Homo sapiens
tagaattcaggatatgggtggcaaagaaactcaataaaatctgagaaaagttaaaattaatatccagtataaagaaaacagaaataatccaggatataaaatacaacatagctatgttaagaaaaaaaatcaaacactgggaattacaaatttcactagaaaaattwaaaaatacaattagaagccttaataatggattagaccaaacagaagaaagaatttcagagtttaaagagcagtcttttgaattaacccagtaagacaaaaattataaaaacaattttaaaaaggtaaatgaagcctttgagaaatgtaggattatgtaaagcaaccaaacctattaattatgggcatttctgagagagaagaaaaaaaaagtaaggaacttagaaaatatatttgaagatataattcaggaaaacttccccaatcttgctagaggttgacatgcagataaaacaaatgcagataattcctgcaagatattatacaagatgaccatcttcaagacacatagtcatc

SEQ ID NO: 354960 - DNA, 490 bp, Homo sapiens
gctatgttaagaaaaaaaatcaaacactgggaattacaaatttcactagaaaaattaaaaaatacaattagaagccttaataatggattagaccaaacagaagaaagaatttcagagtttaaagagcagtcttttgaattaacccagtaagacaaaaattataaaaacaattttaaaaaggtaaatgaagcctttgagaaatrtaggattatgtaaagcaaccaaacctattaattatgggcatttctgagagagaagaaaaaaaaagtaaggaacttagaaaatatatttgaagatataattcaggaaaacttccccaatcttgctagaggttgacatgcagataaaacaaatgcagataattcctgcaagatattatacaagatgaccatcttcaagacacatagtcatcagactatccaaggtaaatgagaaaagaaaaataatcttaaagacagatagagaaaagggccaaattaactataaaagg

SEQ ID NO: 354961 - DNA, 596 bp, Homo sapiens
cttttcctttttgccacttaaacagctaataatttatatctatatgagtaatcaatatttaatatttacataactggtcaatattataaatattaaattatttcactattaagttataaatatcaaacttttaatatgattataatataattagaatacatttataattgttatratattaatagaagattaaatgataaatcctgaaaacttcataaggacataccatttctcttctgctcatctttgagtttccagttcctattacaggacgtgtgtggtcttagtctgcttgggatgccatcacaaaataccagagactgaatgacttaaacaatagcaacttattttctctcagttctagaggctgaaggtttgagatcagggtgccagcatgttctggctctggcgagggctctctttctagcctgcaggtggctgcttactcactgtgtcctcacaggatctctttctcttttcttccttttatagagccacagtcctattggattaaggccccatctttatgctctcatttaaccttcattaactcctaaagaccctatctccagatatagtcacactgcacctttaaa

SEQ ID NO: 354962 - DNA, 507 bp, Homo sapiens
tatttacctttcatctccctgacatctagttttcagctgatgtttccttctrcatgtatttattggccatttgaatttcttcttacatgagttgtctgtttttaattccttgcttatttttatatgttgttgtttgtgattttcttaaaattttgcaggagctttggatactttagaaatactaaccctgtgtttctcacatgtgttatttttttcaaatctattgatcatctttagagtttgtctatggcctctttttccatatagattttccattttcatggattcaaattgtgtaatgcttacatatccttttctgcttaggaagcatttcccactctaaaattatttattttctaaattttcttcatgtttattttttgcatttaaatttcaaatctattagtaatttatttttatatgttatgtaaaatgggtgtttaactttgttttcctccagagcggccaattatgccagcaccatttatgtattaaacaaaacatctt

SEQ ID NO: 354963 - DNA, 594 bp, Homo sapiens
aaacttgatttacttaattttgcctatgattattttatctctattactttcttgatttatgtcacaatcttctactaaaaagtaataaatcactcaatagagtgaaaatgcaacttacagaatgtgagaaagtatttacaaactatgcctctgaaaagggattaatatctaaaatatataaggaactcacaaaaattaatagcattatacacacacacaaacatatatatatatatatatttaaaatgctgttgagatgtgtgagctcctatatgtgtgtgtgatataaaatactattgagttctgtgagttccttgcatattttagatattaattttttcaaagacaatatacaaatggcgaatgggtatatgaaaaaatgctcaggatcactaatcagggaaatgcaaattaaaagcacagtaagacataatttcacacctgttagggtggctaytgccaaaaagacaaaatgtaacaagtgttggtgaggatgtggaaaacctggaactcttgtatactgtttatggaatgtaaattggtgtagctgctattaaaaacagtataaaattactcaaaaattaaaaatataac

SEQ ID NO: 354964 - DNA, 611 bp, Homo sapiens
tgtgaaagggatacacattcagtagaaagtttacttcaagtacccatacaaccattctgtttttcactttcagtatagtattcaaaaaattgcacaagatattcaatactttgttgtaaaataggcttcatgttagataattttgtctaactgtaggctaatggagatgttctgggcacctttgaggtaggctaggctaagtattgtgttcagtagattaggtgtattagatgyattttcaacttacagtattttcaaactacgataggtttatcaggatgtaactctactgaggagcttctttctattctgccctacttctactaagagggggaaaggtaatttgtaataaatggtaacattgcatttgtacttaagtgtagaatctttgtagcctcttgctatgatgactaaactagctgtaggtgaacccatagccctcaacagacattacgtaactcattagatatataagtaaattataaagtcatatatatgcatgttttctgctaatgtgtttgcctttagcatgaaaataaaatgcttataagaatagctgttgaaagtctattttcatgataattgcatagtcttattttactgagaggtgc

SEQ ID NO: 354965 - DNA, 595 bp, Homo sapiens
tacaggctaaaaaaagatcaagacttatttactttctctgtacggcacttggcctggggaccagcagcaggccaatgctggaatcccctttccattttcatactccatctagggtgcacttgaggttttttttgctcccacatttttctccagcagcctcatccttayctcactttacagcaacctattcttttctagaactttgtttagtttttacttctgtgcctcaatcttttaggaacctgctctctaccggctgacagacagatgcctaatttgatggtctacccaggactcccgggtttcctgagttgtctcagcagttagaggtaggatgatttgtgggtaggactagagctggagaaagtaggcaggctccaggtccaccatatttccaccaaggagaatacctcactgtttatctttccatatgtactatgatgaagatggtattctcaacagattacagtggaattcctcttagagaaggaagtataaagaagctgcctatgttgggaaaacaccttgatatattccacagagacagaaagttagggatggcagagcctgaacaacaatactagatggttaaact

SEQ ID NO: 354966 - DNA, 568 bp, Homo sapiens
aacctacttttctcagcctggcaattaaaatgttaatctcatctggaaataccctcttgagagacatacccagaataatgtttaaccaaatatctgggcgctccgtggcctggtcaagttgacacataaaatgaactagcatagggggtaaagaaaggtgccagcaaaatagtatgaggtaggagactgttgtggtgaaagaatagtggaaagttccctgtggaggggcagaagaaagaactttctagaaggaataatttttgaagccaacttttatgttccctcaataatttgaraaaatttaaccccaaatgatttgtgtgagtatggtgagtgctgaaaatcatgagaggaatgttttcacatcagcacaacacagaacataagcagcatgtatgccggaggtgtctgtctccaagcaaagtataccataccccacccagtcccaagaagtcacagatatctttgcactgccacagagtggggaattcaggggttcaaagcaaacttatatatcttgcaaaaatattgaagaggctggtttatatgtatattttgtttgaaaaaa

SEQ ID NO: 354967 - DNA, 460 bp, Homo sapiens
gtgtaagaaagttttattatttgatcagactttagggtctgagaaaacccaggctgagttgtaatgagtttgttttcacattccagcccttttactyaggtatcaatttctccagttctttaatgtttaatttgtacattcaccagcattatagtaaagggttagtggaaattgactgttctggttgctaatggaaacctggcctgccacattttggatataagcccttttaattggggtgaaattatatctcattgcagttttgatttgcatttctctgatggtcaatgatgttggcaccttttaaaatgcctgtttgccattcgtatgtcttttgaaaaatgtctgtttagatcttttgcctatttttgatcagattattaggtttttttcctatagagtggtttgagctccttatatattctgattattaatcccttttcagatggataatttgcaa

SEQ ID NO: 354968 - DNA, 460 bp, Homo sapiens
gtgtaagaaagttttattatttgatcagactttagggtctgagaaaacccaggctgagttgtaatgagtttgttttcacattccagcccttttacttaggtatcaatttctccagttctttaatgtttaatttgtacattcaccagcattatagtaaagggttagtggaaattgactgttctggttgctaatggaaacctggcctgccacatyttggatataagcccttttaattggggtgaaattatatctcattgcagttttgatttgcatttctctgatggtcaatgatgttggcaccttttaaaatgcctgtttgccattcgtatgtcttttgaaaaatgtctgtttagatcttttgcctatttttgatcagattattaggtttttttcctatagagtggtttgagctccttatatattctgattattaatcccttttcagatggataatttgcaa

SEQ ID NO: 354969 - DNA, 474 bp, Homo sapiens
taaagctttggcatctcttcaccattctttcattttgtacctccagcaattatttctataaagatttccctaaattattggggataataatcttctttatttcatttctccaagtaattggataatcaagagctctaatatcttatactaaagcaacaagtatgtaatattatacctcattacctgatgctgaggatttacgacatctagtggagaatgcttataatctttttttaagattaataaaatgagccagtcatggtggtggctcatgcctgtaattccagtgccttggtaggccaagctgggaaaaagaattcacttgaggccrggagttacagaccaggctgggcaacatagtgagaccccgtgtcttaaaaaaaaaattagccaggtgtggtggcacacatttatagtcccagctaaccaggaggctgaggtgggaggatcacttgagcacagaatttgaggttg

SEQ ID NO: 354970 - DNA, 595 bp, Homo sapiens
tgcacttcttagtagcagtgtgaacttgggaaaattacctaatcttctgtgcctcagtttccttatctagcaaatggagatgataggttatcttcctcaaagagttactgtaaggaatgaataatatttttaaagcatttaaaacagttcctaaccagcaagtacataaaaaagtacgctacatcattagtcaccaaggaaatgaaaattaaagctataatgatataccactatacgtccatcagaatggctaaaattataaagacggaaaatactaagtattggcaaagatgtaactggaattctcatatgttgctaccgaaagtgaacataaactttgaaaaactactaacaatttcttaagaaattaaactatacctacccccatgaccccaaaaatccattcctatgcatatattaaacagaaataataaaacatgaccacaaaatttataaaaattttgatagcagttttattcataacttaaaactggaacgaatgccaatgtccttcagcagaaaaaaaytgataaactgtggtatattcataaatggcacatagctcaggagaaaaaaggaacacactactgacaca

SEQ ID NO: 354971 - DNA, 542 bp, Homo sapiens
ataaaaagtctcacatcaaagtaaaggcccaggatttgtgggcttcactgctgaattctatcaaacatttcaagactaataccagttcttctcaaaatcttccaggatttataaaatcctaaagactccaccaamaaactgttagaactaattaccaaattcagtaaagttgtaagatacaaaatcaatatataaattcagtagcatttctatgtgccaatagagaattatctgaaaaagaaaccaagaatgcaatctcatttgcaataactacaaaaaattagatgcctggaaataaatttaaccaagcatgtgaaagatctctattgtaaaaattataaaatatcgataaaagaaattgaagaggatgcaaatatatagaaagatattctgtgttcatggattagattgttaaagtgtccacagtactcaaggcaatctacagatttaatgcaatccctataaaaataccaatgacatttttcaaagcaatgaaaaaaaatcctaaaattcatacagaaccacgaaagaccccaaatagc

SEQ ID NO: 354972 - DNA, 600 bp, Homo sapiens
tagcattcccactgaccatgacagtcaatatctatttgctttcacctggaataatcaacagtgtacctggacagtcatgcctcaggggttcactgaagccccctcctacttctctcaagtgctccatcaagacttgagcacaccctccagtatcgagggtcaactctcctgcaatacacggaggacctctttgttcgtgcactgaggaggcatcctaagagtatttcatctacatattaacagttaacagagaaaggacataacgtctccatagaaaaattacatttatcatcagatactatttactatttaagacatgatctaagtgctgcaagtatccaagtctcctaataaacttaggctcatccacgattttcccaggcccagaactaagagacaacttaatatgttagtagagttagttgcatattgccatctacaggttcytaaatctttactcttagcatcccaacttattgaactcactaaaaattcagttcctaaacccattccttgtggggggtggggggagacatgaggcagcctttgtagaatgaaaaagggtagtacaacaacccccagccccctgctttagaattg

SEQ ID NO: 354973 - DNA, 613 bp, Homo sapiens
tgaattttacctaaaaatcagtctgtcagcatttacgctaacagtcactatgcatttgaagtggtttgtgattttgaaacactttggaagcaaagatgtttcctcactttttcaggcataccaataaaaagtggcccacaagttgataagctccttgctggatactgatrcccaaagacattactgttataaaagaagaagctcaaacaaagagaactgaggctgaatagcaggtaagtactccaactgatttttgtgccaaagatgttacccaactctgtgaggtcttttacctaaatccaacagctggaaacagtaagacatgctccctgctacttaactttgcttccttatacccagatgctgttagttattggtgggggggcggggtggagaaggcctctaaaaattaaaacaaattttaggaatgagaaggatgttcttataatttcctttccaagttctgggaaggccaagacagccacttggtactccaaaggtcacttaagggatatttgttatgcttcttacattcccttatccataatggtactgacaagatagatcaaatgatcaaaaagttgtggtgggaaaattgttataaagttataaa

SEQ ID NO: 354974 - DNA, 658 bp, Homo sapiens
aatagaataaatgaaagagagttaaactttccttagctttagtttggtaggattttcccctgggactatagcccatagccctggattsgggggggcactttcttgactcaggtgtgatgggtccatcctttctcagtggttcagactgcagtttcagttgttaggagcactagatatggtccctcccaggacagttcaagtttctcttctttccagctcttaatgaggacgtagtctccgggccagtgctgatggactggaaactcaagaggtggggtttgtgctaagagacctttagtcctaaaggaagataaagtagaagatagaccaagtatatagttcctaagtaattgatctttggtctcaaaagtgggaatatcactactggagcttaagtatggtaacccatagagcatttcctaaggggataggccaacatcttttcgaggggcagttccaatcctgagtagagtgatggggagacacttagtccagggtaatagagtttctaaaattaacttagttagatgattcttaaaagtctgattcatcctgtctgttcttcctgacaaggatggatgccagggggtatgatactcccatttgattcctaaagcttgaataagccctttaatgatatttgcagtaaaatgagttg

SEQ ID NO: 354975 - DNA, 658 bp, Homo sapiens
aatagaataaatgaaagagagttaaactttccttagctttagtttggtaggattttcccctgggactatagcccatagccctggattggggggggcactttcttgactcaggtgtgatgggtccatcctttctcagtggttcagactgcagtttcagttgttaggagcactagatatggtccctcccaggacagttcaagtttctcttctttccagctcttaatgaggacgtagtctccgggccagtgctgatggactggaaactcaagaggtggggtttgtgctaagagacctttagtcctaaaggaagataaagtagaagatagaccaagtatatagttcctaagtaattgatctttggtctcaaaagtgggaatatcactactggagcttaagtatggtaacccatagagcatttcctaaggggataggccaacatcttttcgaggggcagttccaatcctgagtagagygatggggagacacttagtccagggtaatagagtttctaaaattaacttagttagatgattcttaaaagtctgattcatcctgtctgttcttcctgacaaggatggatgccagggggtatgatactcccatttgattcctaaagcttgaataagccctttaatgatatttgcagtaaaatgagttg

SEQ ID NO: 354976 - DNA, 620 bp, Homo sapiens
ttatgaattaaatttacctgtttttttctccttatttcatcacaattataatagctgctagcagcaacaatagtgagcacaattgcaaataagcacagttgcaaatactggcagtgttatggtgtgcttgttatgtcttcccaaatcctcttgttaaactaaaaatatttctacataccctttaatactcaatttaaatatcattccctctgcgaagcccttatctctgggcagtgcctactcctccctttcctgtattttcatcacgccttgtttatacctttcttatagcctttgtcatgaaactgattattagctttctgaaaagataataaaagaaagataataagaaaagacaataaaagaaaagataataaaaagattattatcttttctgccatggattgtaatcctcaagagggcagggattgtactttacttmttttcgtctgcttggtgacacagttactataacagcatgtgcttgataaataaataccacttatgctaaatacaataatggacttttcatttgggtcacttttatgttgaataaattaaaactgtatgatttataagtgtcttaatttgtagatacttccaaataaagcaagaaaagg

SEQ ID NO: 354977 - DNA, 563 bp, Homo sapiens
ggagttcaatccagtaatatttaagtaagaaggaacttacttctgtcattttggtatttgttttcttgtccctcattttctgcattactatctttattgtttagctgatgttttttgtagtgagatatttaaaataatttctcattttcttttttatatattcgatagcattttctttgtggttgtcatgaggattgtacttaagatcctaattttatgaccccctactttgaatttatcccagcttaacttcaatgccttacaaaaactgcttatttaagagctgtctccacccttctgagttgttaatgtgacagaattgcacctttctctatatgtgctcccaaatataagctaataattctattaartgttttagtctcttaaattatgtacaaaacaaaatgtgggattacaaaccaaagtaataatagtactaatttttaggctaataattatttttttaaatgtctcttaaatcatgtagaaaacaaataattatgcactattgttataatactagtttttataattgccagtgtatttacatttactgagatctt

SEQ ID NO: 354978 - DNA, 495 bp, Homo sapiens
aagacagttattttaaagtttttattttgtagatctaccatcaggtctttttttcagggaaagtttctgttggaataatttttttcctttaaattggctatactttaatgtatctctgtatgccttttgatttttttgaaaactggagatttgaatytaaaagtgtgataactctagaaatcagaatctacccccttcccagagtttgctgtgtgttttttttttttttttttttttttttattatttaggatatctttgtgccaaggatcagcctgagtgtaaatttaaggtcttctcaggcattttctgagcctgtgccttcccctgggtgtttatggtgatttctaatttccctcatatatgtggttgcttttgaatgtcctacttgtcaatgtatggctctcaaaaaataaaaaaaaagagaaaatgaaaggagggagaggaagacaccaccttttaaatttcctgaaagtcactttagctagaggaggag

SEQ ID NO: 354979 - DNA, 495 bp, Homo sapiens
aagacagttattttaaagtttttattttgtagatctaccatcaggtctttttttcagggaaagtttctgttggaataatttttttcctttaaattggctatactttaatgtatctctgtatgccttttgatttttttgaaaactggagatttgaatctaaaagtgtgataactytagaaatcagaatctacccccttcccagagtttgctgtgtgttttttttttttttttttttttttttattatttaggatatctttgtgccaaggatcagcctgagtgtaaatttaaggtcttctcaggcattttctgagcctgtgccttcccctgggtgtttatggtgatttctaatttccctcatatatgtggttgcttttgaatgtcctacttgtcaatgtatggctctcaaaaaataaaaaaaaagagaaaatgaaaggagggagaggaagacaccaccttttaaatttcctgaaagtcactttagctagaggaggag

SEQ ID NO: 354980 - DNA, 610 bp, Homo sapiens
taaatcaactttgaaaactgaacaaattggaggactaataccaccttgtttcaagacttattttaaaattacagtaattaagacaatgtaataacactgtaaagacaggaagatagatcactgaggtagaatagagagtttagagatagacctacactggaatgggaaactcattttaaacaaaggtgcaaagacaatttaatggagaatggatagttatttttaaacaaatggtgctagaacaattggatagcaatgtattaaaaaataagctttgatgtttacctaggatgatggaaatatkgtgatggctaattttatgtgtcaacttgactaggctaaaggatgaccagatagttagtaaaacattatttctgggtgtgtctgtgagggtatttctgaaagaagttggcatttgaattggtagactgaatgaagatcaccctcactaatttgagtgagcattagccaatctgttgtggacttgaatagaacaaaaagacagaggaaaggtacatttactctcttctctttgagttgagcattcatctttttctgctttcaaacatggggcttctcattcttgagcctttgaactaggaccaggact

SEQ ID NO: 354981 - DNA, 604 bp, Homo sapiens
ggtaatgggagtgaggagcagtaagaggttggccaaggaatgcatctaagaaaaatagctctaaaaggaggacaaaaacattctgaaggttgtatattcttaattttactcagaaactaagaacttactttttggattaggcagcttatccattctggaagggcttctacattcatgtgccacacatgacaaatattttgagcatcaactgaatcatctttatcctgttaaataaaaataaatgwtattactaattaccagttcagaatttatttcacaggtttcatatttaagtaaaactcaaaaatacaaattctattttagctagaaggcaaatatacactgccttcccttcctaactcccataataaaaaaacaagcccacaaaaaaagattttttaaaaatttcttcagggaataacgacctgtgatttaagacaaagcccttccatctcattgaggtcatcaaatgaaatttacaatttagcagttagttactgaatgaacacatctagtgtctttttctgcatgtgagacaaaatagtgtctttcatggcaactttctccagccccaaatctctattctatctgaattctattaatg

SEQ ID NO: 354982 - DNA, 549 bp, Homo sapiens
ctcagctccagtatgaatcagactagaggcccaggacttttagaaagtctttgatttccatctggaatgggttrtgtgcctcctctattgttttcataatattttatgcatatgacatcactgagagctgaaaatatgtagatattaactagctgaaggtgggcaaattagcttcctaggagaggagaatggtctgtgcaaaggtcctgtgctgggagtgagcatgacatgaacatggggttcaaagaggggcagtgtggctggataagagagagtgagaggaggcaaaatgatgcaaagtgaggctggagatgtagattggggccagatcactcaaggagtcataggcaatttgtctttatgctaaaaacaacaggaaaatattgatatattttaagaaaaaagtgaatgtaataagatgagcattttaagatgagcacttggctgctgttagatggtagtaagaaccacttataggcaaccagtcaggaaaccattgcagtaatgcaggttaaagacgatggtagccaggatttctcttgttagtga

SEQ ID NO: 354983 - DNA, 606 bp, Homo sapiens
gaacatattagttgctagagtttcttggtgaaataaaaccaaattgttagcagaatgcaggccaggttacatctaatcaaggtttgggatctgttttaaatatctcttctggccttcagaaaaggatgaaacctgtaatcccagcgctttgggaggctgagtcaggtggatcacttgaagtcaggagtttgagactagcctgccaacatggtgaaacctcgtctgtactcaaaatacaaaaattagccaggagtggtggtgtgtgtctgtagtcccagctacttgggaggctgaggcaggaggatcrcttgaacctgggaggcagaggttgcagtgcagagattgcaccactgcactccagcctgagcgacagagagagactctgtgtaaaaacaaacaaacaaacaaacaaagaataaaaccatccatagttggattgtttccactgtccttcagatagcttatttaaaggtgtaacaatatgtgctctgaatctatcacattatgttccaaagctgtcttctgaattctgtcctctggcaaaggaccaactgcccataattttttctttttactcacggatgttaaaaatccttattgccatcc

SEQ ID NO: 354984 - DNA, 606 bp, Homo sapiens
gaacatattagttgctagagtttcttggtgaaataaaaccaaattgttagcagaatgcaggccaggttacatctaatcaaggtttgggatctgttttaaatatctcttctggccttcagaaaaggatgaaacctgtaatcccagcgctttgggaggctgagtcaggtggatcacttgaagtcaggagtttgagactagcctgccaacatggtgaaacctcgtctgtactcaaaatacaaaaattagccaggagtggtggtgtgtgtctgtagtcccagctacttgggaggctgaggcaggaggatcacttgaacctgggaggcagaggttgcagtgcagagattgcaccactgcactccagcctgagcgacagagagagactctgtgtaaaaacaaacaaacaaacaaacaaagaataaaaccatccatagttggattgtttccactrtccttcagatagcttatttaaaggtgtaacaatatgtgctctgaatctatcacattatgttccaaagctgtcttctgaattctgtcctctggcaaaggaccaactgcccataattttttctttttactcacggatgttaaaaatccttattgccatcc

SEQ ID NO: 354985 - DNA, 641 bp, Homo sapiens
cattccatttaaagcattaaagtctgttgttttagtcctgactaagcagtaggcttctatggattgggtattttttttttttacccacccaaatgtgttttatgttgagatgtttcgagtttttttggggggttgagggtggtgcaggtcgtgaggggcaagagctgctgcataggagataattctctttaactgattaatgtttttgctttattcaacagctattgaattaggcagtctgtacctttagtgttttccagaacaaatgtgttgaagtggcagaagrgtggaagaattgaaaattattcttgcacagttgcacctgagttgtattattgctccatgtctccttatgtgcacaagttttacacagttatcttgtcttcctatctcaattgtgaataaatcagaagttccctgttaatgttatatgtatcgcctcaaaacacctccttcgttgctaagcagaggagttagaagcacagacttcgaagcacagtcgaaatggccctttgagtgacacctggtgaggccaggagtccggctttatcgaggcagcagcagtgcatgctctccagtgtgagactggtcataccctcgagtggcaagggaaggtgaatgtctctgcagtgggttggaac

SEQ ID NO: 354986 - DNA, 646 bp, Homo sapiens
tttatatcccccaaagccttagaattaggggcttatatctgatcatcagtgactaattaattgccgtaaggattaggcactttcgtatgacaagwaggaggatgaactcaggagttgaagatggaaaaagtggtggagaaggcagtagaaaggcagagagaaatacacagagaaggactgtcactgtaacaaaggctaagacagaaacacagggggatagctacacaagtcacacaggttaataatactaactgatcaaaatgagtggaaagggaactttagaatgaaggtatgtggaatgctccctgagcagctgtgcaaaaagggggaaagaaaaaggtgcttcacatgccttagtgccacttggattctttggacataactacatctaaacttatttgggccgggcacggtggctcacgcctgtaatcccagcactttgggaggccgaggcgggtggatcacctgagcccaggagtttgagaccagcctggctaacatagtgaaatcccatctctacaaaaatacaaaaattagccaggcatggtggtacgtgcctgtagtcccagctactcgggaggctgaggcaggagaatcgcttgaaccttggaggcagaggttataatgagccaagattgcgccactg

SEQ ID NO: 354987 - DNA, 547 bp, Homo sapiens
gatttcagtttctatttccaagatgatgccactttgctgcatcttttggagagaaggagcattgtgtactcacctggcagaagagcagaaggtaccaacccattcccacaagccctttttatagtagcattcatccattcatgagggtggagccatcataacctaaacattgtccattaggccctatctcccagcactattagggattaattttcaacatgagctttggagaagaaaaaaatattcaaaccacagcagtaatttgaaaacataaaaagaaatgggtgaaattaattttaataatatattttatttaacccaaaaagtccaaaatactatcatgtaatcaataaayagtataaacattattaacaagatattttatatttttttctgtacccagtctttgaaatccagtgtgaattttatacccatagtacatctgagtttggactactcatatttcaagtgctcaagagccacatgtgggctagcggctaccacataggacaacacagttctagaggaagcatggcatgactttgga

SEQ ID NO: 354988 - DNA, 551 bp, Homo sapiens
ctagtgggtggtgctgagattaggaaacgagaagatcttctgcatcaactcgaagcaaatacacagatttttactaactacctgttatgtgtctggcatagtgctaggctagtgtcacactgaaaagccctaggagtgtgtgatgtgamccttattgcaaggaaaccgcagtctgtaggcaggggttagacaatccccatatcaatgaaagaacaaaaggaatcagatcattagtaaggcccaaaatgtgaggcggaaaaaataatgactagaggagatcaggctggggagacattattgcaaattggagactggtatgggctctgaagaagaggtgggtttctggtcgagtgggatttagatgagcagacaggagtagagaggacattccaggtaggagaacattccagatctgggggcaggccatgtgcagaggctgaaacaagatcaaactttgtttgggggtgggagaggctgtcagtgaggaaaactgagtgtggtacagatttggatagctgctgctagagtttgtggaatgttaatggtcaaaa

SEQ ID NO: 354989 - DNA, 569 bp, Homo sapiens
attgataagggatgagactcaaaatgtaactttttcaaagtcacacagttgaaaaaaagcagacctaggagcccagaccataagtatttatctcagacttttatggtattccctctctaaccctcttctttgagagtcttccagttatttccagttacagtgtagaagaatttcaatccaagaggctgttcttccaccaatggctttctgtctgcctttcatctcctccagggctggagtagaatcattgcagaggtatctgcgcatgctgttaaatgtggcactaatgctgcctgtcctgaaataaacttggattggctatccaagatggcattagctacccttgaaatgaaacgacctttcccttgggttcattgagtgaggccgttgttatcaatgaagacatgcttgaggctgtgctaaaggaagaatgctccaccttcttggagtctgatgtgaccaacatggttctacaaaaatatcaagtcaaagatttgatcttgaagagaaggagtctgatcttagcaaaaygaaaatggttcagcatgtggcatctaaagatattgtga

SEQ ID NO: 354990 - DNA, 575 bp, Homo sapiens
acaatggtatatcttgcaatcatggcaacttagatttggtatatgagcacattgggttttgatgtaaaatatatctctttttgtggtcatggtcaaaagagcttgaagaagacagatttgattcagtctttccaggtttccctctccgctggaagttgggtggttggtcccttgctgcctggaatctttgtgcagagtttctgaccctcaatatcaccccatttcccgatgaggaatggctgggctccctcaacagggaattacacattcaaaaactgtcatctctctgcagcctgtcttggatgttgaagatgrttcaaccaggatggcaataatgtcagagatctcaggtaatgagtttcccttgtgtgaccctccagtttgctgttcataccagtgcctcctggaagggatttcttggtgatgtagagcttggtaggtggcagagagggatgcttttagattttggttttatgggcactatctcataagccttcttgtggtttttcccattagccagggcttcctgtggctactatcaccagtgaggttcacaagaatagtggtcatttaag

SEQ ID NO: 354991 - DNA, 557 bp, Homo sapiens
ttgtgtgaccctccagtttgctgttcataccagtgcctcctggaagggatttcttggtgatgtagagcttggtaggtggcagagagggatgcttttagattttggttttatgggcactatctcataagccttcttgtggtttttcccattagccagggcttcctgtggctactatcaccagtgaggttcacaagaatagtggtcatttaaggatcttgatgtttttaatgtctcagttggcttctgcttcttttttaaggctgaccactcagtgggactcccagcaccctccacccccagaaggtaartcacgggtctctgctgaaccctcacactcagataactttatataaatatataagggaaacaggtctgtattacaccagggtatcatactcctacttttcttctgctctgttcagaaaaggaaagttttaacccaaaggaatgagccacttactggaaattttagattctgtggcaattgagaagaggagttatatttcccctgccattttttgggccctgttcctaccttaaatcttctttaaatgctc

SEQ ID NO: 354992 - DNA, 557 bp, Homo sapiens
ttgtgtgaccctccagtttgctgttcataccagtgcctcctggaagggatttcttggtgatgtagagcttggtaggtggcagagagggatgcttttagattttggttttatgggcactatctcataagccttcttgtggtttttcccattagccagggcttcctgtggctactatcaccagtgaggttcacaagaatagtggtcatttaaggatcttgatgtttttaatgtctcagttggcttctgcttcttttttaaggctgaccactcagtgggactcccagcaccctccacccccagaaggtaaatcacgggtctctgctgaaccctcacactcagataactttatataaatatataagggaaacaggtctgtattacaccagggtatcatactcctacttttcttctgctctgttcagaaaaggaaagttttaacccaaaggaatgagccacttaytggaaattttagattctgtggcaattgagaagaggagttatatttcccctgccattttttgggccctgttcctaccttaaatcttctttaaatgctc

SEQ ID NO: 354993 - DNA, 557 bp, Homo sapiens
ttgtgtgaccctccagtttgctgttcataccagtgcctcctggaagggatttcttggtgatgtagagcttggtaggtggcagagagggatgcttttagattttggttttatgggcactatctcataagccttcttgtggtttttcccattagccagggcttcctgtggctactatcaccagtgaggttcacaagaatagtggtcatttaaggatcttgatgtttttaatgtctcagttggcttctgcttcttttttaaggctgaccactcagtgggactcccagcaccctccacccccagaaggtaaatcacgggtctctgctgaaccctcacactcagataactttatataaatatataagggaaacaggtctgtattacaccagggtatcatactcctacttttcttctgctctgttcagaaaaggaaagttttaacccaaaggaatgagccacttactggaaattttagattctgtggcaattgagaagaggagktatatttcccctgccattttttgggccctgttcctaccttaaatcttctttaaatgctc

SEQ ID NO: 354994 - DNA, 541 bp, Homo sapiens
aaatcacgggtctctgctgaaccctcacactcagataactttatataaatatataagggaaacaggtctgtattacaccagggtatcatactcctacttttcttctgctctgttcagaaaaggaaagttttaacccaaaggaatgagccacttactggaaattttagattctgtggcaattgagaagaggagttatatttcccctgccattttttgggccctgttcctaccttaaatcttctttaaatgctcatcttattaattccccaaatactaccagctagcaacttgaatgctgcataaaaccttaaaaacatcttctgtcagactcagaatttaaatgtaytttgtatataaatcctgcctgctttccttgagttaaactgttacccttcctaagagtaaactctatcctgacttctaagaccatagaataattttgcctggttttgtactgtacataagtggaattatacaaaatgtactcttttgtgtctggcttcttctacacgccatcacgtttatgagattcagctatatt

SEQ ID NO: 354995 - DNA, 541 bp, Homo sapiens
aaatcacgggtctctgctgaaccctcacactcagataactttatataaatatataagggaaacaggtctgtattacaccagggtatcatactcctacttttcttctgctctgttcagaaaaggaaagttttaacccaaaggaatgagccacttactggaaattttagattctgtggcaattgagaagaggagttatatttcccctgccattttttgggccctgttcctaccttaaatcttctttaaatgctcatcttattaattccccaaatactaccagctagcaacttgaatgctgcataaaaccttaaaaacatcttctgtcagactcagaatttaaatgtattttgtatataaatcctgcctgctttccttgagttaaactgttacmcttcctaagagtaaactctatcctgacttctaagaccatagaataattttgcctggttttgtactgtacataagtggaattatacaaaatgtactcttttgtgtctggcttcttctacacgccatcacgtttatgagattcagctatatt

SEQ ID NO: 354996 - DNA, 502 bp, Homo sapiens
aaatagtgttgttatgaacattgtagtaccttctgggatgtatatctaggagcagaattcatgaatcagagggaacgtatattcagttttagtacactgtgcaaatgaactttttcatttcagccattctggtaggtgcatagcagtatttcacatggttttatcttgtgtttccctgatgyctaatagagttgagagccttttcatatgctcttttgttatttggatagcttattttgtgaattgtctacacatctttttgttgggttgtctgtaattttcttattgatttataagagtttttctgaacatgagtcctttattagatgcatgcattgcaagtaccattaccattgtataggatgccttaatgatgtctgttgatgaaaaggtgtttttaattttagtattgtttatcaacattgtataattaatgtttttgtgtactcttgataaaatctttgtctgtttcaaaatcatgaaaataatctcctatatttta

SEQ ID NO: 354997 - DNA, 502 bp, Homo sapiens
aaatagtgttgttatgaacattgtagtaccttctgggatgtatatctaggagcagaattcatgaatcagagggaacgtatattcagttttagtacactgtgcaaatgaactttttcatttcagccattctggtaggtgcatagcagtatttcacatggttttatcttgtgtttccctgatgcctaatagagttgagagccttttcatatgctctttkgttatttggatagcttattttgtgaattgtctacacatctttttgttgggttgtctgtaattttcttattgatttataagagtttttctgaacatgagtcctttattagatgcatgcattgcaagtaccattaccattgtataggatgccttaatgatgtctgttgatgaaaaggtgtttttaattttagtattgtttatcaacattgtataattaatgtttttgtgtactcttgataaaatctttgtctgtttcaaaatcatgaaaataatctcctatatttta

SEQ ID NO: 354998 - DNA, 505 bp, Homo sapiens
acaaggactggcttaggaagcaggaatarcataaataacagaaccagtataggttccagttggatctacctctatctgccctacaatgtgatttggagttcatttctgtcttcatcgtctaggactgccataacaaagtaccatagactgggtggcttaaacaacagacatttatttctcacagttctggagaagtcccagatcaaggtgccagccagtttggtttctggtgaggcctcttttcttggtttgcagatggtcgccttctcactgtatcctcacatggccttccttctgtacacatgtggggaaagagagagagagagagcactcacttcctcttcttataaggttactattcctactggattagggccccacccttacagccttatttgaccttaattacctcctaaagatcctatctccaaataagtcacactaggggttagggagtcaacatatgcagtgcaggggaagacagttcagttcatagcagttacta

SEQ ID NO: 354999 - DNA, 534 bp, Homo sapiens
ttggtgataagacctaatgtgtgcaacattgacacgagatgcataggaaagaaatgactcctagtacctttaagggcaaggaaccaagggatcttatgaagtcacaagttcattctgcttattccagaaatatttatatgaacccyttaaaaagcagagaggttaaagtaaacagattgatcaatagaagaaaacaaaagttctgggaacagaccaacatatagatctttatttgatacttcacaaaggtaatatctcaagaagagaaatgataggtcaatcaggaaatagtagtaataccaatgcctaacatctgctatactctggacaatattttgttaaaatttttttttaacttttaagttcaggggtacatgtgcaggtttgttatataagtaaacttgtgtcatgagggtttgttgtacagattattttgtcacccaggtattaagcctagtacccatttgttatttttcctgattctctccctcctcccaccctccaccctcaagtagggcccagtgtgcgttgttc

SEQ ID NO: 355000 - DNA, 534 bp, Homo sapiens
ttggtgataagacctaatgtgtgcaacattgacacgagatgcataggaaagaaatgactcctagtacctttaagggcaaggaaccaagggatcttatgaagtcacaagttcattctgcttattccagaaatatttatatgaaccctttaaaaagcagagaggttaaagtaaacagattgatcaatagaagaaaacaaaagttctgggaacagaccaacatatagatctttatttgatacttcacaaaggtaatatctcaagaagagaaatgataggtcaatcaggaaatagtagtaataccaatgcctaacatctgctatactctggacaataytttgttaaaatttttttttaacttttaagttcaggggtacatgtgcaggtttgttatataagtaaacttgtgtcatgagggtttgttgtacagattattttgtcacccaggtattaagcctagtacccatttgttatttttcctgattctctccctcctcccaccctccaccctcaagtagggcccagtgtgcgttgttc

SEQ ID NO: 355001 - DNA, 591 bp, Homo sapiens
gtggccttccaggcaggtgtgaagaagtgggagccagggtgaattgcaaacaagagagccacatgtgaggaatctctttgcagactcccagggacacttagaggtgtacctgaagcctctgactatgcctctgaatgagtagacgtttmggccacactgtaggagatggcattattttatttcaggaccattttcactcatttgatagttacccgatatttgtctatggccataccacgttgaaagtgcctgatttcatctgatagttaaccaatattcactgaactcttcttatcagttacacaagaaaattcatcttattcattttacagccagttgtagcttttgccttgaacatgtattagattgaccagtcccctctttcaccagatctggtgctattgtctagatctgctgagacagacaccaagatgggattagatgtgcaaggaaaagcaggaaggaagaaaggcgagaagagactgtatcacaggtctggcatctgtggaaggagagagggaaggaaggaagggtggatgggatgactctcagactgcaacactgttccaagaaatgttcagccaaggagcc

SEQ ID NO: 355002 - DNA, 469 bp, Homo sapiens
catatatttaagagcctacagcaagttctattggttggtgtgatagattgtgaaaatggcctcagttctttctcagctggatccacaccccctgcaatgtgactctgtcactccttctatagaggggaggagtctatttcccctccctttgtgtcagggctggccttgtgactttctatggctaatagatgtggtggaagtgactgtgtgtgctgtctaggcttcaggagaccgtgatgtcttctgctttccagcccctgcctccttcatgggaacaagcctgggctgctctgctggaggatgataggtcacatggagccaaggtgagccatcccagctgaggccattcgagaccagccagcccccagccaacccaccaaccaactgactgcagacgyataagcaagcccagccacaactggctgaacctggcccagatcagtagaactgtccagccaattcacagatt

SEQ ID NO: 355003 - DNA, 532 bp, Homo sapiens
ctgcctcacacacacctgtgtaatcccaactccttgtatcggtccctctggccaaccctgtctttttccacccacaagtatttccattgatgtactcatttatcccttttcttcttatatagctggagaaaagcttgggtagatcaagcattgtttttgtgtttaaaaaaatatagtccttccatcccccttccttcccacatctgactccacaacttacataagaactccagcatgaaagttggagggggaaaaaattgagaggatgtccagatggatacaaatttttggaaaacactgaacactctgtgtttatcttcttgcagggcaaaggactcagagagacctgtcatgcacgttgatatcagcactcaggattaaaatctaaacccyttcctccaagacattcccctgcctgacaaactgttgttatttttaagcaggaaaagcttccttgatcctgaagataaattcatagcttgtggttggaagtacttgtaggaacacagtttgtgtaggcattttgaggaaa

SEQ ID NO: 355004 - DNA, 587 bp, Homo sapiens
taaaagtaaagtacttggcaatatcaggccgggcatggtggctcacgcctgtaatcccagcactttgggaggctgaggcgggctgatcacctgaggtcaggagttcgaaaccaacctggccaacatggtgaaaccccgtctctactaaaaatacaaaaaaactagccatgcatggtagtacscacctgtaaccccagctactcaggaggctgaggcacaagaattgcttgaacccaggaggtggaggttccagtgagacgagatcacgccgctgtattccagcctaggcaacaaagtgagactccatctcaaaaaaaaaaaaaaaaagaaagaaagaaaaaaaaagaaagaaagaaagtaaagtactttgcaatatcagtgatagtgctgccaggcaattaaggcctgttaccaaaggccgtgggagtcaagtgattttgccagagagtcttactttttttagttccttcctgttcttttagatgaatgttttagggttaatacattaatatgtctgtaatatatacaacagtaatatttaatatagtattagtcattctacaaacttaccagcataccataacatt

SEQ ID NO: 355005 - DNA, 534 bp, Homo sapiens
cacctctttgaaacccagccctagttgaagctcagatgatatttctctagtttttatacagaacactgtggttttggtaaaattcacattttgggaagcattcccaccacctcccsgtctccaacctccatttacttgaagggaaatggaatctatctggttttgattcatttacactccacttgttagcattggtttgtaagcatcagccaacatccgagtaactcttggaaccttgttctaaaggctgcattttcaagtctaggaagtttatttttctttcttctttttaaaaaaatgctaaaaggaaactggacttcagtactagtttgagtttgggtttattttctgtgtatgactggcttccaacaaatttggttaaaaaatacactttgccattgcaggttttacaatttcagctcaattgaatttactcttgaaaaaagttttcatattctaacccaagggaaagcttttgtgttctgttgctgttttgctggatcatggaattgttaacttttcaagatttttggt

SEQ ID NO: 355006 - DNA, 602 bp, Homo sapiens
ttggtaagaagtttcattcatgaagacagacttgggaaattacatgtaattatccaagcctatactcaacaagaggaaaaacagaaagaagttggatgcttcccttggagtggagggtttctcagaggtttctactgagcaggacactcactctctaccgtatcattttacccaccaggcctgtataataaacacaaccttaagacagtgcagtctactttccgtcgtgtagtaataggcttcatctgctatttctagctaacaattgttcattgttcatgttgcctcaaggtttagaaaccrgaacttctccctggttcccaggaaattgaaaacaaagaaggaggtaatttccacgtgtatagcagccactccatttgctaaaggtctcaagtcggttatctgtgttttttagatgagtctgtaacagatttgatttttgtgtaaatctcagacaggagataaagtcttctcttgaatttccatttaggttgtttgtttgaggctcaaatgagctttctggacagacttggtaagtattgttaagtttgactaaagtacccatttgtgatttcataaggggatcagtaaatcttaatctt

SEQ ID NO: 355007 - DNA, 583 bp, Homo sapiens
tcgtgtagtaataggcttcatctgctatttctagctaacaattgttcattgttcatgttgcctcaaggtttagaaaccggaacttctccctggttcccaggaaattgaaaacaaagaaggaggtaatttccacgtgtatagcagccactccatttgctaaaggtctcaagtcggttatctgtgttttttagatgagtctgtaacagatttgatttttgtgtaaatctcagacaggagataaagtcttctcttgaatttccatttaggttgtttgtttgaggctcaaatgagctttctggacagacttggtaagtattgttaagtttgactaaagtacccatttgtgatttcataaggggatcagtaaatcttaatcttctagtcctctaccttgctactgtctagagccagtgcataaaatgtcacagtgatmatttttacctccatcttaattatgaacattttaagctaagggagctaagggagacagactcataagtatcaaattggttttctttgttcctatacccagattttcatatggtcaaaatacccatggaatatatgagtggcagcagtaaac

SEQ ID NO: 355008 - DNA, 518 bp, Homo sapiens
cagcttctgaattcctgatttacagaagctatgagaaataaaaagtgattactattgttttaagctacaaaatttggggataatttgttacatagctatactaactggaacacagagatttcttcaaattttcaaaaatttttttactctcagtgatgttcattgtcttggaatgagaatgggaaacatagaggtgggagatagaaatttaatggcttagccagccaaatgaaccacatcaactctgcccattggtggggagacagatatttcagtcatattgtccatcatatatccctactttttgtggccttgcaaaataactaataaccgtaaagctgtatcatcacaatgcaataataataggttatttcagtaaaaaktatgtcaaattaaatgttagaagtatgtcaacacaagtggctgattgaatgaattttttactttagaactgattatttggccaaaacgtagaaggttcttgggatcaaattttaaagctaaaaatactaaactac

SEQ ID NO: 355009 - DNA, 467 bp, Homo sapiens
gacacaatgcaggcacaggcattgggtaaatttttcaattccaaattggagaaattggccaaaacaaaggggctacagaycccatggaagtctgaaaccaggtggggcagtcattaaatctaaaagttctaaaatgatctcctttgactccatgtctcacatccaggtcatgctgatgcaagaggtgggctcctatggccttgagcagcttcacccctgtgactttgcagggtacagcccctgtcctggctgctgctttcatgagctggcattgtctgtggcttttccagatgcacagtgcaagctgtcagtggctcttccattctggggtctggaggacagtgaccctcttctcacagctccactaggctcagtgcggaatctgcatgggggctccaaccccacatttcccttcctttccatggtgcttgggtctagcaccctctgaagcgatagcctgagctgta

SEQ ID NO: 355010 - DNA, 467 bp, Homo sapiens
gacacaatgcaggcacaggcattgggtaaatttttcaattccaaattggagaaattggccaaaacaaaggggctacagaccccatggaagtctgaaaccaggtggggcagtcattaaatctaaaagttctaaaatgatctcctttgactccatgtctcacatccaggtcatgctgatgcaagaggtgggctcctatggccttgagcagcttcacccctgtgactttgcagggtacagcccctgtcctggctgctgctttcatgagctggcattgtctgtggcttttccagatgcacagtgcaagcwgtcagtggctcttccattctggggtctggaggacagtgaccctcttctcacagctccactaggctcagtgcggaatctgcatgggggctccaaccccacatttcccttcctttccatggtgcttgggtctagcaccctctgaagcgatagcctgagctgta

SEQ ID NO: 355011 - DNA, 563 bp, Homo sapiens
gtgacatgtgagccatgtaattaatgmtccatgatacaaggttctataccatgtgatataattcgtagactaatcagggatttagggtaattgactacaaatgttccttagagtaagaaatagtcagagagaccaaaaaatccttcccaagtggactttatttccttagagactttcccctagacgcttacttctaaagatccctaggttatacagatagttatgcaagtcattatagattacccaccaggagtcaggcactgctcttggcaccaaaaatgagaaaaggaaccaactaagttttctaaattaaggttagtttttgttttagtggtttagttacctatttctgatgcaaagtactcatttttagtgaaccatttcaggtctccctggatcccaagggttccctggagataactcaagggcaatgggttgtggtggagggatggtggaacagttttttttgaaggccccatgtatcaattagaggagctttacttcttttttttctatttagcaattttcttttttaacttttaagttcagcggtacagtgcagg

SEQ ID NO: 355012 - DNA, 563 bp, Homo sapiens
gtgacatgtgagccatgtaattaatgatccatgatacaaggttctataccatgtgatataattcrtagactaatcagggatttagggtaattgactacaaatgttccttagagtaagaaatagtcagagagaccaaaaaatccttcccaagtggactttatttccttagagactttcccctagacgcttacttctaaagatccctaggttatacagatagttatgcaagtcattatagattacccaccaggagtcaggcactgctcttggcaccaaaaatgagaaaaggaaccaactaagttttctaaattaaggttagtttttgttttagtggtttagttacctatttctgatgcaaagtactcatttttagtgaaccatttcaggtctccctggatcccaagggttccctggagataactcaagggcaatgggttgtggtggagggatggtggaacagttttttttgaaggccccatgtatcaattagaggagctttacttcttttttttctatttagcaattttcttttttaacttttaagttcagcggtacagtgcagg

SEQ ID NO: 355013 - DNA, 539 bp, Homo sapiens
accaaaaaatccttcccaagtggactttatttccttagagactttcccctagacgcttacttctaaagatccctaggttatacagatagttatgcaagtcattatagattacccaycaggagtcaggcactgctcttggcaccaaaaatgagaaaaggaaccaactaagttttctaaattaaggttagtttttgttttagtggtttagttacctatttctgatgcaaagtactcatttttagtgaaccatttcaggtctccctggatcccaagggttccctggagataactcaagggcaatgggttgtggtggagggatggtggaacagttttttttgaaggccccatgtatcaattagaggagctttacttcttttttttctatttagcaattttcttttttaacttttaagttcagcggtacagtgcaggatgtgcagttttgttaccgaggtaaacgtgtgtcatgagggtttgttgtacagattatttcatcacccaggtattaagcctagtaaccattagttattttgcccaac

SEQ ID NO: 355014 - DNA, 543 bp, Homo sapiens
aatgtggacagtgtaagtttatgcattccaagaaacctgaaatgaacccactattcaagcaacacagctctctgtattccttcagctttatcagggcatttttaagattctgtcaaatgtctttttactacaatgtctrtaagggagaagacacaataaagccctcaacagagactgttgaggaatctccagtcacttgtgcttttgtgatttgcctgatatccacataattatctaattatatttgaatatcttttggctaaatgtggactttcagaagtcacagcaaaatatgttttatctgcctaatttatcattaaatcagaagagttaggtaggatgaacattacccaacaccaaagagtaaacttgtggttccagagattactaagtcatacagcaggaggaaattcaattgttcaggacagaactgctctttgaactctgaagcaggtatgttcctatagtcagaatgaatactgtttggtgatcaacccaaatcctttacagacacaaacattttctcctataaagagaacacaa

SEQ ID NO: 355015 - DNA, 496 bp, Homo sapiens
tagaattagtcctgctaatccctagttgctgcaggcttctgtgctaagttcataatgttgaagtaacaccttttcaattccttacataacagtattttgtgctttggaacagcctcactgacctccctgtyttacttagatagcagtggtggaatggagaatatttggcctgggagttaagaaagttggattccagtttcaagcctaccactcattagctatgtgactggacatttcacctcttaggaccttcctgttctcatttctatataaacagtttggacttcgatgatctctgaaagaatttcaagctttacaatcccatgtaaccaagaaaataagtaagcgcattctctacggggcacctacaaaatttgctggtgtatgtatggtttttgccaaaatgacactcaaaacaacatcttgactatgatgtggtgagaggaactctggaatctcagtgctttttttttttttaacagtctccttcagcttt

SEQ ID NO: 355016 - DNA, 496 bp, Homo sapiens
tagaattagtcctgctaatccctagttgctgcaggcttctgtgctaagttcataatgttgaagtaacaccttttcaattccttacataacagtattttgtgctttggaacagcctcactgacctccctgtcttacttagatagcagtggtggaatggagaatatttggcctgggagttaagaaagttggattccagtttcaagcctaccactcattagctatgtgactggacatttcacctcttaggaccttcctgttctcatttctatataaacagtttggacttcgatgatctctgaaagaatttcaagctttacaatcccatgtaaccaagaaaataagtaagcgcattctctayggggcacctacaaaatttgctggtgtatgtatggtttttgccaaaatgacactcaaaacaacatcttgactatgatgtggtgagaggaactctggaatctcagtgctttttttttttttaacagtctccttcagcttt

SEQ ID NO: 355017 - DNA, 480 bp, Homo sapiens
ctctgggttttaggattctaattatgaattcagaaaacaataagaacaagacaaaaattaaaatttcagtatgaacatgtattatttttaaatttaaaaaattgtgattttgctttgtctttacatatgatgcctcatacatatttaataatttcaaagaatttctgaaatatgttacataatcttgccatttggggaatatgtgtacarctttcaaaagtgattactttgaaagggacaacacacatttagatgagtacattctgtaatgtttgtttcaaaaaataatccaccgctttataatcatgcttctattttagatgtttttgtgaatataagtcatgacatggatcctatgagggacatgattttaaaaataagagaaataaacagatgacacttagggtcaggcacacagccagctgcctggggagtagtttctaaagctgtgctgtcctccagccctgtgaaaccgagcag

SEQ ID NO: 355018 - DNA, 480 bp, Homo sapiens
ctctgggttttaggattctaattatgaattcagaaaacaataagaacaagacaaaaattaaaatttcagtatgaacatgtattatttttaaatttaaaaaattgtgattttgctttgtctttacatatgatgcctcatacatatttaataatttcaaagaatttctgaaatatgttacataatcttgccatttggggaatatgtgtacaaytttcaaaagtgattactttgaaagggacaacacacatttagatgagtacattctgtaatgtttgtttcaaaaaataatccaccgctttataatcatgcttctattttagatgtttttgtgaatataagtcatgacatggatcctatgagggacatgattttaaaaataagagaaataaacagatgacacttagggtcaggcacacagccagctgcctggggagtagtttctaaagctgtgctgtcctccagccctgtgaaaccgagcag

SEQ ID NO: 355019 - DNA, 573 bp, Homo sapiens
aagcctggagataaatataggtgtaattttcttaccatttaaacaatctttttgatttttttccaagattcactcgtcttaaaataaatctggttttagctaatacgcttcaaattgttgttaataaatggagaattgacactacttatccttcctcatcttctggtagcattttctagaaagctggccaatttttagaaagagtgttgtatccacaagccaatgagaaaataattagccaaaacgaggactaaattcacaattatgtytttctttgtaccgtgcctaataaaataaaatagcatatgtgaggcaagaaggctttaaggaggaaagaagaggaaagggggttacagagtttgtggaaaaatctaaatatttaggaaatagacattatactcttattcttaccagtggggctggggttctgaaaagttaatgggaaatatcagtgtttctgtgctaatgagagtgctcatcagagaaaggataatacaagaaacgaaacaactgagcaggtgagagggtatgggatccaggtagagggggactagattttggtaaagcaatgat

SEQ ID NO: 355020 - DNA, 519 bp, Homo sapiens
taaataagcttttcttaacactttctgtgtcatcacattgtctcagacctttgtttccatctagctgtgttatttctgctctttctccccagtggctgcttgttttcttccacatccagccctctaagtgkggtcttctctgaggcccatccttggttttctcttatgatcagtttatacgcccactcttagaaaggtgaatcattcttttggttctagtgctctccttgtctctcactttgtgtttccatagagataaacatcagaacttcaatgtgtctaaaatcaaaacatttgctgtctcttctcctgggtttactacatgggatcacgaagttaccattctcaccatcttataagctggaaaccttgcaatgtcattactttatacttttccttctccattacttccaatctacctccacatcctctccattctacttacataatgtcatttttttatccatgctttcttctccatccactctgccattttcttcaggaactacagctactctc

SEQ ID NO: 355021 - DNA, 528 bp, Homo sapiens
aaggtgtaccttatgctaagtgcctgatctctaagaccctccaccagcgtcagagagacagcatgctcacaacatgacagctggtcatacaggtgaagaagaacatgaagaccagcccacccctgaaaatgacagatcaaactcagcttcacaatgtctcttattccatcgctaatggtgtttaaaaacacactttgtcttaaggaacaaggggaactgaccacgtgttcatgacggttcatttcttaccctctgctttggcttgaccaaactttagtcaggtwtctctcctccacaaagattcctagactttggctgtcccccaagtttaagcaagcactgaaacactaaggagcagaacatctgttaacagctcatcctgaaaatcaactgaccataggaaaaaacactccctattgagatatcctggttttgccacctgctcgcccacactctatgcccttctcctccacaaaggtctggctggttcttctccctccatacaaaggaaaagcttatttctgtttg

SEQ ID NO: 355022 - DNA, 629 bp, Homo sapiens
aatgttatgaaggtaaattacacagtgctacaagaactatagctggggaytgaggttgtatatttaagaaaaatcatgttggcttcaatgtgttggagtgtaaaacagggaaatgcatgcaggaaaactgcctgggaggcttctgtgtagtttaggcaaaatgtggtaatttatgaaagggtttggcgttggagatagagttagtgaatgaatttgaggcatttgggaagtaaaaagctctcacattgtgctcaaacctcccactgtagctatgtaaaactatctgcaggtcccagaagataccagctgtgtcttgctttgtatctgatgtttctttcctgagtcatcttttctttaatgctccatctagctacatctcacttatctttcagcaccctgctgttccgtgaactcccatggctccctgtttttgccactgttgtcacacttgtaacacagatttttgccatctgcttactgttagtcttcgtgctagactgttagctattatacttgagggcactgtcttatctattttgtttctgtaccaccagctctggagccatgatccaaacagagcagaaaacacgtatttcttaaattactacccagccaggtaggattattgc

SEQ ID NO: 355023 - DNA, 582 bp, Homo sapiens
gagggtgaaaagagaattacactatgcaatactttaaaaaaattaaatgaaaatgaacttgtaagacaaatgctattaagtcagtatagggaagacaacttggaaaagattggaaagactataaaaatatagaagaaatctgcacttgtatttccactttaaagaagttgaaactagaaattacagatgatgtattgggaggatggtatgtgcaagaaaactgtagaactctagttagagaatttatattttatgctkgtattctggatactacacctttatcaagtagatgctttgcaatgtttttgcatcctgcggattgtctttttctttttaaatatttattttgttttctaaattgatgcacaacgattgtatatatttatggtgtatgtagtgatgtttcaatatataatatgtagtgatcagagcacgtaattggcatatccatcatctcaaacatttatcatctctttttttgagacagaaccttgtgtttcccaggctggagtgcactctgcctcctggttcaagcaattttcctgcctcagcctcccaagtagctgggattacaggcgccca

SEQ ID NO: 355024 - DNA, 543 bp, Homo sapiens
aaattgctatagtctcttgctgaatcaatccctttattattatataatttccttctttgtctatttttacagcctttgtcttaaaatctgtctgatataartacagttactcccatttatttttggtttccatggaatatcttcttccaatccttcactttctgtctatgtgtgtctttacagatgaggcgagtttcttaaaggcagtgtagagttgggtcttgttttttaaattcattcaggcagtctatatcttttttttcctttttaaacaatttattcttttatttttaaaatagagacaaggtcttactatattgcccaggctggtctggaactcttgggctcaagcaatccttccactttggcctctgagaatgctaggattacaggcatgggccaccatgccagaccatctgtatatcttttaaatgggaaatttaatctgtttacattcaaggttattgttgatacgtaaggacttactcctatcattttattgattattttctggttgttttgtgtatcccttgttccttattt

SEQ ID NO: 355025 - DNA, 611 bp, Homo sapiens
aaataaacctcttttcctttaaaaattactcagctatccctgtatagcaacatgaacagaactaagacagaaattcggtactaagagtggggaggttaggccgggcgcggtggctcacgcctgtaatcctagcactttgggagcgctgaggcagtgtggatcatgaggtcaggagatcgagaccatcctgsctaacacggtgaaaccccgtctgtactaaaactacaacaaaaagtacccgggcttgctggcgggcgcctgtagtcccagctactcaggaggtctgaggcaggagaatggcgtgaacccgggaggcagagtttgcagtgagcggagatcgcgccactgtactccagcctgggctacagagagagacccatctcaaaaaaaaaacaaaaagaaagggagttgggaggttattctggactgtctaaataagcccaatgtaatcacaaagattcttataagaggaagattaagggtgtgatgagacaagcggagaacagagactaaggcaaagactttaagatgctccactgctggcctagagttccagagggaggaatgcttctaccaggagacgcaaccatgatgttacgaaactggaagtt

SEQ ID NO: 355026 - DNA, 611 bp, Homo sapiens
aaataaacctcttttcctttaaaaattactcagctatccctgtatagcaacatgaacagaactaagacagaaattcggtactaagagtggggaggttaggccgggcgcggtggctcacgcctgtaatcctagcactttgggagcgctgaggcagtgtggatcatgaggtcaggagatcgagaccatcctggctaacacggtgaaaccccgtctgtactaaaactacaacaaaaagtacccgggcttgctggcgggcgcctgtagtcccagctactcaggaggtctgaggcaggagaatggcgtgaacccrggaggcagagtttgcagtgagcggagatcgcgccactgtactccagcctgggctacagagagagacccatctcaaaaaaaaaacaaaaagaaagggagttgggaggttattctggactgtctaaataagcccaatgtaatcacaaagattcttataagaggaagattaagggtgtgatgagacaagcggagaacagagactaaggcaaagactttaagatgctccactgctggcctagagttccagagggaggaatgcttctaccaggagacgcaaccatgatgttacgaaactggaagtt

SEQ ID NO: 355027 - DNA, 611 bp, Homo sapiens
aaataaacctcttttcctttaaaaattactcagctatccctgtatagcaacatgaacagaactaagacagaaattcggtactaagagtggggaggttaggccgggcgcggtggctcacgcctgtaatcctagcactttgggagcgctgaggcagtgtggatcatgaggtcaggagatcgagaccatcctggctaacacggtgaaaccccgtctgtactaaaactacaacaaaaagtacccgggcttgctggcgggcgcctgtagtcccagctactcaggaggtctgaggcaggagaatggcgtgaacccgggaggcagagtttgcagtgagcggagatcgcrccactgtactccagcctgggctacagagagagacccatctcaaaaaaaaaacaaaaagaaagggagttgggaggttattctggactgtctaaataagcccaatgtaatcacaaagattcttataagaggaagattaagggtgtgatgagacaagcggagaacagagactaaggcaaagactttaagatgctccactgctggcctagagttccagagggaggaatgcttctaccaggagacgcaaccatgatgttacgaaactggaagtt

SEQ ID NO: 355028 - DNA, 575 bp, Homo sapiens
actcagtattgaagcaaagggggaactgcacccacacaaggccgctggtgctgccacgtgtgtggggcagatgggatcccaggagcactttgcgagtgtccccctccctaaacacaatgttaaaagaaaacctcagacaaattaaatttaacagagtttaattgagcaaataacgattcactgatccggcagcctccgagcctgagtagactcagagtccagcgcggccacgtggtggaagatgtatagacagaacacggaagtgaggtacagaaacagccagagaggttgtagcccggcgtttgccttattggaacacagtttgaccagtcagcgccctttgattggccaaaactctgtgattggccsaagagcaggaggttagtctgtttccacctccacataagctgccgttcactatgtgcagagaaccctttaggctgaacttaaaattcataaggaggcagctttagcctaaacttgatttgacgccaagcatcaaggcacacaattcatattttctggctggtctctgtcatattggatactaccttgcagaagtgtcttcagagctt

SEQ ID NO: 355029 - DNA, 508 bp, Homo sapiens
gccagctactcaaggcccaaagcttttttttttttttttttttttttgagacggagtctggctctgtcgcccaggctggagtgcagtggcgctatctgggctcactgcaagctccgcyttcctggttcacgccattctcctgcctcagcctcccgagtagctgggactacaggcgcccaccaccatgcccagctaattttttgtatttttagtagagacggggtttcaccgtgttagccaggatggtctcgatctcctgacctcgtgatccacccgtctcggactcccaggcctggagctttttaactatcactcagtctcaatttttccattttgaggaaacttttccctgatgaagagttaacgattcccctgccatcctgacctgtctaggactgtgtgtgtggaaaaatcatgcccggatcaggccacatacccctagaatcagagctgtttcctagggatgtctaactttgtgtgactgtagtccttggtattcttaaccagt

SEQ ID NO: 355030 - DNA, 558 bp, Homo sapiens
tcagagggcatctactacatgccaggaggtaccttcagggggatctaccacrtgtcaggagggatccacagggtgatctaccatgagccaagagggacctctagggaaatctaccacatgccaggagggatctgttacagcatgaaaactagagataataatattgtattgtgtactgaaaatttgccaagaaaatcaattttagctgctacaaacaaataaaaaaggtaactatggaaggcgatggatgggttaagttcttgacttcgtcatcatttcactgtgtatatatgtatatcaaagcatcatgttatacaaccttaaatacataaaattaaaaataaatttaataaaaaactctgatgccattcttattcctgaaacatgacattttgatgagaaatgttgaagaagaaacacaaattcaacacgactcagagtacaaaacccctcgggccgtcatgttttcagaggaccgctgtctggaagcctcatccaggagatgaggtttgaggtgggccaggcttcctcctcctgccctgtcagccttccctcccc

SEQ ID NO: 355031 - DNA, 558 bp, Homo sapiens
tcagagggcatctactacatgccaggaggtaccttcagggggatctaccacgtgtcaggagggatccacagggtgatctaccatgagccaagagggacctctagggaaatctaccacatgccaggagggatctgttacagcatgaaaactagagataataatattgtattgtgtactgaaaatttgccaagaraatcaattttagctgctacaaacaaataaaaaaggtaactatggaaggcgatggatgggttaagttcttgacttcgtcatcatttcactgtgtatatatgtatatcaaagcatcatgttatacaaccttaaatacataaaattaaaaataaatttaataaaaaactctgatgccattcttattcctgaaacatgacattttgatgagaaatgttgaagaagaaacacaaattcaacacgactcagagtacaaaacccctcgggccgtcatgttttcagaggaccgctgtctggaagcctcatccaggagatgaggtttgaggtgggccaggcttcctcctcctgccctgtcagccttccctcccc

SEQ ID NO: 355032 - DNA, 558 bp, Homo sapiens
tcagagggcatctactacatgccaggaggtaccttcagggggatctaccacgtgtcaggagggatccacagggtgatctaccatgagccaagagggacctctagggaaatctaccacatgccaggagggatctgttacagcatgaaaactagagataataatattgtattgtgtactgaaaatttgccaagaaaatcaattttagctgctacaaacaaataaaaaaggtaactatggaaggcgatggatgggttaagttcttgacttcgtcatcatttcactgtgtatatatgtatatcaaagcatcatgttatacaaccttaaatacataaaattaaaaataaatttaataaaaaactctgatgccattcttattcctgaaacatgacattttgatgagaaatgttgaagaagaaacacaaattcaacacgactcrgagtacaaaacccctcgggccgtcatgttttcagaggaccgctgtctggaagcctcatccaggagatgaggtttgaggtgggccaggcttcctcctcctgccctgtcagccttccctcccc

SEQ ID NO: 355033 - DNA, 495 bp, Homo sapiens
aagtcagggctcagctctgggcaggggcgtgtgaaaccacctgctgagaacagccccaggtggttgcagaggttagaagggagggaaatttatccgctggcttccaagacgggccagatggcccagtatttgccccaggggccctccttccagcacctccaggctgtggcacttacccctgggtggctggtcccaggtccgtggagccctggagaggcrgagctgccagggcctctccctgatctccagggggatcagggctggtggcttgagtccatgctgagccaggccgtcagatccccagagagcaggcagcaggggcgctgcatggagatgtctgcactggggcctgggaggaactggaggctgccagaaactggacatggaaattaggtctaatagagagggggagtaaaactctgtgtctctccttccactttcatttataccaggttacacatcctctggttttgagctgatctaagtgggttttct

SEQ ID NO: 355034 - DNA, 495 bp, Homo sapiens
aagtcagggctcagctctgggcaggggcgtgtgaaaccacctgctgagaacagccccaggtggttgcagaggttagaagggagggaaatttatccgctggcttccaagacgggccagatggcccagtatttgccccaggggccctccttccagcacctccaggctgtggcacttacccctgggtggctggtcccaggtccgtggagccctggagaggcagagctgccagggcctctccctgatctccagggggatcagggctggtggcttgagtccatgctgagccmggccgtcagatccccagagagcaggcagcaggggcgctgcatggagatgtctgcactggggcctgggaggaactggaggctgccagaaactggacatggaaattaggtctaatagagagggggagtaaaactctgtgtctctccttccactttcatttataccaggttacacatcctctggttttgagctgatctaagtgggttttct

SEQ ID NO: 355035 - DNA, 593 bp, Homo sapiens
ctcattttctgcataatccccaggaaatcaaatttccccaggtggacagctaacagaaggaaatgctgggggttcagttgtgccaggagaaaacttcaagtcaagtcatacttttgtaacgtgcatatgtttgtttttgctctctagtccaggagygttattagcgatcattttaaaaattcagcttttagcaattttatcattctgtttcttatcaataagaaagatagcagcagttctcttaattctagcataagtgtatctattatctcctcaagacttaagagtattcggggatcaacaaaagtggggtacccaaggggtggctgtcaagggcatttcaaaggggttacatggacacctctttaaaaatgcattgtactgtaccttccccaaaatggacaaggcttctgatattagtcttaggcatattctcattgttcctgaactagatgggaacaacttcaacagtggagaagtcgcctgtattattgtaaataattaaacagaagaatttacgagtaaaagaagagaatgaggagagctcagaaaagtaagaaagtggctcctggttagttatttcccttcctgac

SEQ ID NO: 355036 - DNA, 551 bp, Homo sapiens
actaccctttccggcctctgggaaccatccttctactctctgtctccatgagttcaactgttttaattttttgctcccacaaataagtgagaacatgcaaagtttttctttctgtgcctggctcattttacttaacataatgtcctccagttccatctatgttgttgccagtgatgggatcccattccttttatggctgaatagtactccactaggtacacacaccacactttggcatgatattaactaataacgtaagcttattaacccagcactgcatgtgatctarcaaatgtgttgttttggattctcagttggtggggttaaaatatcatctgaacttggtcaaatataaggcagggggcagggacccttgggcctccacaggactcttctccagaactgctacccagaagttcctgaacgcaagggaggagcagtgagctcttgttccagccagtggctcaggccaggggtcactgatgcaaggacattttgtgacttgaggtgagagctcaaagtggagccagtcccccaggtgtcctgagcag

SEQ ID NO: 355037 - DNA, 522 bp, Homo sapiens
tccacacttgcccacttcaccaaagacacatcagtgatgtgtgggtggcacgcattgttctgctgggatacacagtgctgatgggcaagtctctgagtcccacacagtgctcctgagggtcgacggccacacatcagacacacagcacgtgatgcacyttgggaggtgctgaaaaaagagcccagccaactggagtagacatgcatgtgctgggcaggcagtcaggacagtggcttccaggaaggttctacccaaccacaactgggcatgtcaccctccatcccaccatcctttcaacagtggcaggaactccccactcagacttgttccacattaggcacagaagagtactatgaacaatcctccactgagaatgctaagctaaagtgtttaaacacagaactaggcaggaatttaattaatttcatttcactgaccttaaaggtttgtaatgtaaatctcggagttgtaatatgggacaagtcgcctttggaagcagcagctgagagtgaataatccagg

SEQ ID NO: 355038 - DNA, 522 bp, Homo sapiens
tccacacttgcccacttcaccaaagacacatcagtgatgtgtgggtggcacgcattgttctgctgggatacacagtgctgatgggcaagtctctgagtcccacacagtgctcctgagggtcgacggccacacatcagacacacagcacgtgatgcaccttgggaggtgctgaaaaaagagcccagccaactggagtagacatgcatgtgctgggcaggcagtcaggacagtggcttccaggaaggttctacccraccacaactgggcatgtcaccctccatcccaccatcctttcaacagtggcaggaactccccactcagacttgttccacattaggcacagaagagtactatgaacaatcctccactgagaatgctaagctaaagtgtttaaacacagaactaggcaggaatttaattaatttcatttcactgaccttaaaggtttgtaatgtaaatctcggagttgtaatatgggacaagtcgcctttggaagcagcagctgagagtgaataatccagg

SEQ ID NO: 355039 - DNA, 522 bp, Homo sapiens
tccacacttgcccacttcaccaaagacacatcagtgatgtgtgggtggcacgcattgttctgctgggatacacagtgctgatgggcaagtctctgagtcccacacagtgctcctgagggtcgacggccacacatcagacacacagcacgtgatgcaccttgggaggtgctgaaaaaagagcccagccaactggagtagacatgcatgtgctgggcaggcagtcaggacagtggcttccaggaaggttctacccaaccrcaactgggcatgtcaccctccatcccaccatcctttcaacagtggcaggaactccccactcagacttgttccacattaggcacagaagagtactatgaacaatcctccactgagaatgctaagctaaagtgtttaaacacagaactaggcaggaatttaattaatttcatttcactgaccttaaaggtttgtaatgtaaatctcggagttgtaatatgggacaagtcgcctttggaagcagcagctgagagtgaataatccagg

SEQ ID NO: 355040 - DNA, 618 bp, Homo sapiens
tgggcaattttcacataccatgcacaaattttaacatgaaatggaatatatgacatattggcagattctttcaaagctacatatatatttaatcaaacttgtgtcacrtgagaatgactaaaatgttcatagcaattttaatcataatagcccaaaacagaaaacaagtaaaatgaccaccacttcgtgaatgaacaaacaaattcgtggtatattcaaacaataaatgaaaagcaacaaaataaaatgtaccccagctttatttccacatgatagatgaatatctaaaaaataataatgtataaaagaagctagacacaaatgacaacatacggtatgagttcatatatttgaaggcagatcagtgattgccacgagctcaaggtaggggaagttttaaaaactatattatttatttttttattatttagattttaaatggaaaataaatatatttatgaagtacaatgtgatgttttaatatgggcatgctttgcgcaataattaaatgaagctaattaacatatctatgacctcacatacatatcatttctttgttgtgagaatacttaaaatctattctttagcaattttgaaatttataatacattattatta

SEQ ID NO: 355041 - DNA, 676 bp, Homo sapiens
tgggttgtcttccatggtttttatagttttgggttttatatttatgtttttaatccatcttgagttgagttgattttatatatatatatattaagaaaggggtccagtttcaattttctgcatctggctagccagttatcccagcacaatttattaagtaggtaatcatttctccattgcttgtttcagtcagctttgctgaaagtaagatggttgtgggtgtgcaaccttatttctgggctctttattctcttccattggtatatgcgtcgtttttataccggtaccatgctcctttggttactctagccctatagcatcgtttgaagtacggtaacatgatacctccaactttgttctctttgcctatgatttccttggctatttggactattttttggttccatataaatttcagtatagttttttgctagttctgaaaagagtctcaatggtrgtttcataagaatagcattgaatctataaattgtgtgggggcagtacagccatttgaaaaatattgattcttcccatccatgaacatggcatgtttttacatttgtttgtgtcattgctgatttctttgagtagtcttttgtaattgtcattgcagagatgtttcaccttcctggttagctatatttctaggtattctagtctttttgtgaatctttgt

SEQ ID NO: 355042 - DNA, 592 bp, Homo sapiens
caacaaacatctgacttgaactccataaagctcagtcatacatataattaattacacctcatttcacctgcttcagagcataatttaaacttataaagatgtacagattcattgaaattaaatttaggttgttaaaatgaactgattaacaattaatggatcacaattttacacctgcatcaagatttgggatatataaatataaattaaaaaataacttaatatgtgaaatgctggtgaaggaaggaagggaggaaggaggaggagagggagggagggagggatgaataagaagaagaaagaaaggaaggatgggtggaaagaaaaggaaagaaaaaaaaaaagaaattaacacagatgcactgcaaaatgtgttgtactatgaaaagagcaataacacagtgactgccctggagggcaagtctcatctgctgtaayaaacatcaaggtaagaagccaagatgaatttgaacaattttcttgctctagcaaagaaattgaacaaagaagctcttaatcacaactggtcaccttccctgctgttatatcaaattgttctaaagaccttctggcttaaaaagctattgtagtt

SEQ ID NO: 355043 - DNA, 543 bp, Homo sapiens
ggtggccagagggtgcaatggactctgtgagggttcttagctttagtggtttaatgttctatttgtgtgctggttggcctcctgctgggaggtggtgctttccagagagtatcagctgtggtagtatggggaggaactggtggtgagtgaactctagactcccaggactatatgccctttgtcttccactacctgggtgggaagcaaaggaccatgaggtgggggtacggttaggcatgtctgagctcaatctccttgggcgagtcttgctgtggctgcatgtagagggatgggggtaagtttcccargttaatggtgttgtgtacccaggaggattgtggctgtctctgctgagtcatgcaggttttcagcgggaagctgggggaaagccaggagtcacaggcccttgcccagctcccagggcaatccaatggggccggtctcactcccacaccactaacagcaccaagtctgtttccagacagagggcaagcagggatgagaacttgccccaggctacctgcctcccagctgtgaaagaaa

SEQ ID NO: 355044 - DNA, 597 bp, Homo sapiens
cactcttcatagaatgcaacttctaagaatactccaggtgacagaaatcccgcttccacactgcagcctccctccaggccagttctggaacacctcaagaaagcatgaacctgagcgtactactgcgcaggactggcttccctatgaaatcctcaacactccgcaaccccacagctatcaactttgtcctgcggtggctgtcaaagcaccccaccacatctgaatctaatctctttaggaaaacaaagcaaaaggccctgcaccaacatatttgaaccatgtttgtagaatgagttgctaggttccatcccccgcatgttagcgacgtcttgttcactgaacactgttaggagtaaagtgcccagatgtcagccgtgaattcacatttccaactgcagcacctcttgccaggtcacgtcagactgtcaaggcttcagttttctgtctacaaaacaggagtaatatcactcatttcaagggtcagctctgggaactcaaggagcaaactcrtgcagagagctaagccaaaagagccccacacacatgagccacaatggtgctcgtgaccaggaagactgttgagagaaggaagtgacc

SEQ ID NO: 355045 - DNA, 642 bp, Homo sapiens
ctcaaactcctcaagcaatctcccacttcagcctctggaacagctggaactacaagtgcatgccagccacatctggctaagttttttaatttttattttgtaaagacgcagtctcgctatgttgcccaggctggtcttgaactcctggactcaagtgatcctcctgcctcagmctcccaaagtgctgagattacaggcatgagccactgcacctagcctgaattaacgctttaaatgtgaaatgtaaaggcagatggtgaatatatgtatttgattgggtaaggaaattctaagcatgactcacagtcagaaaaagtactctatgaatatttttccccttcacagtggttggtcattattcctaaaatattatactaacccctgaaccctgctttatgtctcatgatccactagttggaaatttttttgtcttcacatctttcttgcataaaaaacttacatatttagaagatttatccgtaatgggctttacatttaccataaatatcatttttttctcccatgaaattataggtcacactttagacatcaggagactttcagtcctaagaagttacatttgaaattaaacttacctagtttttaaaaacttctaagctagcaggatataaataatgtgct

SEQ ID NO: 355046 - DNA, 642 bp, Homo sapiens
ctcaaactcctcaagcaatctcccacttcagcctctggaacagctggaactacaagtgcatgccagccacatctggctaagttttttaatttttattttgtaaagacgcagtctcgctatgttgcccaggctggtcttgaactcctggactcaagtgatcctcctgcctcagactcccaaagtgctgagattacaggcatgagccactgcacctagcctgaattaacgctttaaatgtgaaatgtaaaggcagatggtgaatatatgtatttgattgggtaaggaaattctaagcatgactcacagtcagaaaaagtactctatgaatatttttccccttcacagtggttggtcattattcctaaaatattatactaacccctgaaccctgctttatgtctcatgatccactagttggaaatttttttgtcttcacatctttcttgcataaaaaacttacatatttagaagatttatccgtaatgggctttacatttaccataaatatcatttttttctcccatgaaattataggtcacaytttagacatcaggagactttcagtcctaagaagttacatttgaaattaaacttacctagtttttaaaaacttctaagctagcaggatataaataatgtgct

SEQ ID NO: 355047 - DNA, 615 bp, Homo sapiens
atcataaatgggagcctgcagtggtcagtggattgttcagcatagtccctaaagtcccgcccaactcacaacatcaattattttcttccctaagcaccaggaaataacaaacgttcatatctcaaaaacgtatctgtaagtcaacattttcaggaatcctgctgcaaaaaggcaaggggaacaggggagggcaggcagctctttatgtccccacgaggctcagtggtggagagaggacctggaataggtygatgaatatctttttttcccataagttattgggggtacaggtggtatttggttacatgagtaaattctttagtggtgatttgtgagatcctggtgcacccatctcctgagtagtatatactataccatatatgttgtcttttattcctcacccccccttacccttccccccaagtccccaaagtccattgtaccattcttacgcctttgtgtcctcatagcttagctcccacatatcaatgagaacataggttgtttggttttccattcctgagttacttaacttagaataatagtttccaacaataaaaacaaagataaatagatgggacttaattaaactaaagagcttttgcatggtaaaag

SEQ ID NO: 355048 - DNA, 615 bp, Homo sapiens
atcataaatgggagcctgcagtggtcagtggattgttcagcatagtccctaaagtcccgcccaactcacaacatcaattattttcttccctaagcaccaggaaataacaaacgttcatatctcaaaaacgtatctgtaagtcaacattttcaggaatcctgctgcaaaaaggcaaggggaacaggggagggcaggcagctctttatgtccccacgaggctcagtggtggagagaggacctggaataggttgatgaatatctttttttcccataagttattgggggtacaggtggtatttggttacatgagtaaattctttagtggtgatttgtgagatcctggtgcacccatctcctgagtagtatatactataccatatatgttgtcttttattcctcacccccccttacccttccccccaagtccccaaagtccattgtaccattcttaygcctttgtgtcctcatagcttagctcccacatatcaatgagaacataggttgtttggttttccattcctgagttacttaacttagaataatagtttccaacaataaaaacaaagataaatagatgggacttaattaaactaaagagcttttgcatggtaaaag

SEQ ID NO: 355049 - DNA, 610 bp, Homo sapiens
ctgtaacaatttgatgatattatctttccaatatgggttttataaagattggaagattatctcaagttgtaaatgcaaggatttaataattctatttgttaaaataattatatgaccctattaattcacccagaaatgctttacagaagcatattaaggataacattatcaaaaatagttttataattttttttttaagacagggttttgctctgtcacccatgctggagtgcagtggtgccatcatggctcactgcaacctcartctcccaggctcaagtgatccttccatctcagcctcctaagtagctaggaccatagacacccttaaccacaccttgctaattgtttgtattttttgtagagaaggggtttcgccatgttggccaagctgatcttgaactcctgggcttaagcaatctaccggctttggctttccaaagtgctgagattacaggcatgaggcactgtgcacagccttattattttatttttaatctataccataattctcactccttctatcccgttgtccgcatatatacatatctaccaaagacaggttgagggaacaggaaaatggctgttttaaaatccttgacctttcctg

SEQ ID NO: 355050 - DNA, 610 bp, Homo sapiens
ctgtaacaatttgatgatattatctttccaatatgggttttataaagattggaagattatctcaagttgtaaatgcaaggatttaataattctatttgttaaaataattatatgaccctattaattcacccagaaatgctttacagaagcatattaaggataacattatcaaaaatagttttataattttttttttaagacagggttttgctctgtcacccatgctggagtgcagtggtgccatcatggctcactgcaacctcaatctcccagrctcaagtgatccttccatctcagcctcctaagtagctaggaccatagacacccttaaccacaccttgctaattgtttgtattttttgtagagaaggggtttcgccatgttggccaagctgatcttgaactcctgggcttaagcaatctaccggctttggctttccaaagtgctgagattacaggcatgaggcactgtgcacagccttattattttatttttaatctataccataattctcactccttctatcccgttgtccgcatatatacatatctaccaaagacaggttgagggaacaggaaaatggctgttttaaaatccttgacctttcctg

SEQ ID NO: 355051 - DNA, 610 bp, Homo sapiens
ctgtaacaatttgatgatattatctttccaatatgggttttataaagattggaagattatctcaagttgtaaatgcaaggatttaataattctatttgttaaaataattatatgaccctattaattcacccagaaatgctttacagaagcatattaaggataacattatcaaaaatagttttataattttttttttaagacagggttttgctctgtcacccatgctggagtgcagtggtgccatcatggctcactgcaacctcaatctcccaggctcaagtgatccttccatctcagcctcctaagtagctaggaccatagacacccttaaccacaccttgctaattgtttgtattttttgtagagaaggggtttcgccatgttggccaagctgatcttgaactcctgggcttaagcaatctaccggctttggctttccaaagtgctgagattacaggcatgaggcactgtgcacagcctyattattttatttttaatctataccataattctcactccttctatcccgttgtccgcatatatacatatctaccaaagacaggttgagggaacaggaaaatggctgttttaaaatccttgacctttcctg

SEQ ID NO: 355052 - DNA, 529 bp, Homo sapiens
ccttggtgagcaagggatttaartacatttccagaacattcactggcgcacaggacagaggacacctcagtccacagcccacagcccagaacatatgcagaagaggcagccgccgtacagggagcccacctccaaataacacctccctcagaggcacagtcaagataaggatggggaaaaattgaagcgctatatgtggaaaactctcttatgcagaaaaaaaaaacagaagaattttttgcctaaagaaatggaatccacagcccgcagagaaccacggtggttcctgtgggtgttagcaccttccatactctggaagggcattgcgtaggggctgctcacgtgacacccagctcccagcctgctcatcctaaagtggaaactgccagctgacaggccctgccctggaataagagcttccagtcaacccttgtgctgtccttacttccgtattggagtggacaaccaagaattgccagacccgcaacagaaaacacacagagcagtaccacagatgagctgaaaacaa

SEQ ID NO: 355053 - DNA, 686 bp, Homo sapiens
tgttaggttcccaaaggctgtcctcagcagagagagaataaaaaggaatgcctcagctcatgtgtcacaagcaggctgtgagcctcgtgtgcagcccaggctggccccaggacatggcccgggcaggcatttaagtatgggaagcaggggagctggacgtccgtcacatgtctcagttaggaactaaaactaagcttcaggctcctgttcccgagaatttgctccgtcctgacaaaaaccgcatcaattttcccagttaactaccaayaggtgggagagaagggcacacaccaaaatgtcatttataatttaaaattcattattgaaaagggctctgcagtaatagttcaacctcaatcatttcaaagatgctttcacaaaggcggcgtccgaccgtgggaacggggaggccaggagggttttccagggctgccttccctgttccctgtaccgtgcctccccctcccctgccacaaccctcctgtcagaaagctattttatctctggagaagttttatgccaggggatatatgaccagaatacatgaaggtcttttgaatttattttcaatagccctgctactctcttctctatgaaatatttagcatttaactctttatttctgctgctggcaaagtctcaggtgcaggtggctttgtagagatggcagaatgtcacaccaaggt

SEQ ID NO: 355054 - DNA, 686 bp, Homo sapiens
tgttaggttcccaaaggctgtcctcagcagagagagaataaaaaggaatgcctcagctcatgtgtcacaagcaggctgtgagcctcgtgtgcagcccaggctggccccaggacatggcccgggcaggcatttaagtatgggaagcaggggagctggacgtccgtcacatgtctcagttaggaactaaaactaagcttcaggctcctgttcccgagaatttgctccgtcctgacaaaaaccgcatcaattttcccagttaactaccaacaggtgggagagaagggcacacaccaaaatgtcatttataatttaaaattcattattgaaaagggctctgcagtaatagttcaacctcaatcatttcaaagatgctttcacaaaggcggcgtccgaccgtgggaacggggaggccaggagggttttccagggctgccttccctgttccctgtaccgtgcctccccctcccctgccacaaccctcctgtcagaaagctattttatctctggagaagttttatgccaggggatatatgaccagaatacatgaaggtcttttgaatttattttcaatagccctgctactctcttctctatgaaatatttagcayttaactctttatttctgctgctggcaaagtctcaggtgcaggtggctttgtagagatggcagaatgtcacaccaaggt

SEQ ID NO: 355055 - DNA, 686 bp, Homo sapiens
tgttaggttcccaaaggctgtcctcagcagagagagaataaaaaggaatgcctcagctcatgtgtcacaagcaggctgtgagcctcgtgtgcagcccaggctggccccaggacatggcccgggcaggcatttaagtatgggaagcaggggagctggacgtccgtcacatgtctcagttaggaactaaaactaagcttcaggctcctgttcccgagaatttgctccgtcctgacaaaaaccgcatcaattttcccagttaactaccaacaggtgggagagaagggcacacaccaaaatgtcatttataatttaaaattcattattgaaaagggctctgcagtaatagttcaacctcaatcatttcaaagatgctttcacaaaggcggcgtccgaccgtgggaacggggaggccaggagggttttccagggctgccttccctgttccctgtaccgtgcctccccctcccctgccacaaccctcctgtcagaaagctattttatctctggagaagttttatgccaggggatatatgaccagaatacatgaaggtcttttgaatttattttcaatagccctgctactctcttctctatgaaatatttagcatttaactckttatttctgctgctggcaaagtctcaggtgcaggtggctttgtagagatggcagaatgtcacaccaaggt

SEQ ID NO: 355056 - DNA, 686 bp, Homo sapiens
tgttaggttcccaaaggctgtcctcagcagagagagaataaaaaggaatgcctcagctcatgtgtcacaagcaggctgtgagcctcgtgtgcagcccaggctggccccaggacatggcccgggcaggcatttaagtatgggaagcaggggagctggacgtccgtcacatgtctcagttaggaactaaaactaagcttcaggctcctgttcccgagaatttgctccgtcctgacaaaaaccgcatcaattttcccagttaactaccaacaggtgggagagaagggcacacaccaaaatgtcatttataatttaaaattcattattgaaaagggctctgcagtaatagttcaacctcaatcatttcaaagatgctttcacaaaggcggcgtccgaccgtgggaacggggaggccaggagggttttccagggctgccttccctgttccctgtaccgtgcctccccctcccctgccacaaccctcctgtcagaaagctattttatctctggagaagttttatgccaggggatatatgaccagaatacatgaaggtcttttgaatttattttcaatagccctgctactctcttctctatgaaatatttagcatttaactctttatttctgctgctggcaaagtctcaggtgcaggtggctttgtagasatggcagaatgtcacaccaaggt

SEQ ID NO: 355057 - DNA, 598 bp, Homo sapiens
ttatactatcaaattagtaaagatgtttagaaatgttagcacccagcaaaggacaggtggggaagggggcagcattatcttcaatttctgggatgtgaattgaataacctttcaaaatggcagtttgacactatagttctaaagatctgaaactctgcatatattctgctctacactccaacaattttactactagactctatgttaaggacaaaattaggagtatatggacaaggatataagaacagagatgctgaatgcttgtttttcttaacccgtgcataggaaaaagcttsgttgggagatacatgccaatggtaatggtttttaatgtctggatgataatttaaaaatatttttatgtgctttgctatatttccaaattggctacaatgcaaatttatccattttgtaattgggggaaaaatttaaaatcgttcttaaaaccaaattacaaaggatatttattccctgaccccccatggaatgcattaaattaacaataatctttgtatgtggttagtacttgagtctttcatcaatccagtgaaagaagaaagactattattagcaccactttacaaataaaagtatgaga

SEQ ID NO: 355058 - DNA, 513 bp, Homo sapiens
actcatgctggccacatctggacaatttgagctttaaaaagaaaaaaacatgttaatggatttgtggcatattgtatgtttcaaagctagccacaacagtatcttccatttcacatrttcttcttacaatgtgtctttgaccgtcctcttgttgagaggcagggtctatgtcccctcgtcttgaacctggggacttttgtggaagtgatgctgtaggacttcgaggccaaatcatagatgacagggtagcttccaccatgctggctggaacactcatgctggagcctaagccaccatgtcaactgtctaactgtcctgaggtccctgtgcaaactagtccatgtggaagaaccacatggaaagagcctgagacagcctgaaaagagaagaatgccacatcagcccccaacagcttcagctaccatctgacaacaactgtgtgagaggcttctgagctgaatccacctggctgaaccctccccagatatctgacctacagaaatatcgagaaat

SEQ ID NO: 355059 - DNA, 513 bp, Homo sapiens
actcatgctggccacatctggacaatttgagctttaaaaagaaaaaaacatgttaatggatttgtggcatattgtatgtttcaaagctagccacaacagtatcttccatttcacatgttcttcttacaatgtgtctttgaccstcctcttgttgagaggcagggtctatgtcccctcgtcttgaacctggggacttttgtggaagtgatgctgtaggacttcgaggccaaatcatagatgacagggtagcttccaccatgctggctggaacactcatgctggagcctaagccaccatgtcaactgtctaactgtcctgaggtccctgtgcaaactagtccatgtggaagaaccacatggaaagagcctgagacagcctgaaaagagaagaatgccacatcagcccccaacagcttcagctaccatctgacaacaactgtgtgagaggcttctgagctgaatccacctggctgaaccctccccagatatctgacctacagaaatatcgagaaat

SEQ ID NO: 355060 - DNA, 516 bp, Homo sapiens
aaacaagtactggctaaattgcagaactgctatgcatcagcacctgattgtgcctcacattttctccctttttaaatgaaaatatctgtagaagttgtcctgtgccgccccactgttatgcatgggcctgtggagtgagtgtttacaggtcttcagattcagaggaatggtgtgcgaggagctgaatcctaggaacctcacmtgagaagtcttgtctgaacctggacctgatttagataacagataacctgatttcgatcctggattttgtgctgctgcactaatagatttggggatattagagagaggattattgcatatgggagggatgtgaattgtggccagagggtggatcatagcagattgattttccaaagatggcagcagcaatatctctcatcacgcatatccttataacatgaatttgacctttcttccatgtagagatgggatctatttcccctcttgaatctgggcaggttgtaactgtggcagatgtgattctatatgacttct

SEQ ID NO: 355061 - DNA, 565 bp, Homo sapiens
  misc_feature (1)...(565): n = A,T,C or G
tattaatctaactaaatgaaactattcttcctaagataatcatgaaggtttctctgtcttttcttggtataaatatcagctcacaatccttggaaaatttttcagtgcctggacacacagaagttataggtaagtgcagaattcagtggcccagctggactgcatcagtaaataatactgagcatattttcttgycctgccagaaaaaaaaataaaaaggcagtttcacaaaagagatgctatggggtgctatgaaaataacactggactagagtctggaaaattgagttcttgttccagctctggccttaactcactgtgggacctgtgtattcacatcaactcacccagcctcagtttctttagacataaagggatggagtcgaacctctgaagtcctttccagatgacacatgcaatactgcatgaattgtgcaaccgaaaggaattttgtagataatttctttcaaaaactttgcagtgtttgtacatgagatctagagtaagaaaatttggggagaaagtaatctttagcatcctcttacctctcctnnnnnnnnnnnnn

SEQ ID NO: 355062 - DNA, 565 bp, Homo sapiens
  misc_feature (1)...(565): n = A,T,C or G
tattaatctaactaaatgaaactattcttcctaagataatcatgaaggtttctctgtcttttcttggtataaatatcagctcacaatccttggaaaatttttcagtgcctggacacacagaagttataggtaagtgcagaattcagtggcccagctggactgcatcagtaaataatactgagcatattttcttgtcctgccagaaaaaaaaataaaaaggcagtttcacaaaagagatgctatggggtgctatgaaaataacactggactagagtctggaaaattgagttcttgttccagctctggccttaactcactgtgggacctgtgtattcacatcaactcacccagcctcagtttctttagacataaagggatggagtcgaacctctgaagtcctttccagatgacacatgcaatactgcatgaattgtgcaacckaaaggaattttgtagataatttctttcaaaaactttgcagtgtttgtacatgagatctagagtaagaaaatttggggagaaagtaatctttagcatcctcttacctctcctnnnnnnnnnnnnn

SEQ ID NO: 355063 - DNA, 597 bp, Homo sapiens
gtggtcaatgctgccacatctctatctggacacatcaggaaaaaaaagcattggaattttggcaaacttggcaagtgttatgtatgcccctcaatttatacgtgtattgtgtactttgagttctacaatagaayctgtttttttttccgggtgaattgtatgacattcgctggattacttcagccctgggttttgggtcctaggaactgaaatgtagacagcattttaatcctaacatcctttcctggcctggcatgtaaagcacctgacagttactctgtttctttctgtgaagtctcagaatagtcaccacaccacagtccttcttctgggtttggcttcactggacttgacaagtaactggtgttctctccaatggcagctgactcataggctgacttgtggtctaaaaggagtgttgcctgagagttcagttcagctcttgatgagctaaccagccaaccctgtcacattgtcacctgagtggctttgaacttcagactcttggcattagttggttacagcagggggagaccaattagagactcagccacagggagagtagctgcatcacccactctcgtgcagcacctgaga

SEQ ID NO: 355064 - DNA, 623 bp, Homo sapiens
ccaggccattactgctgccagattagctcgagaactctccaggaccctttaattctttacaccagaccttttccacatttatttatctatttcttctttcccttccacacccctggttctcttctctgcctcctycactttctattccagttatacccttcttaatctaccacacctcagtggtgatggtgggcaaaaatggctgccattatgttatcagcacgaactaagcttacttgggaagtcagaaaacgggatgcaatccccataaacatggaaaaggcatattgattctatgtcatcaagctccacctttcccataggttgcacatggcaagataaaatgccaggatggggacaatttttctgcccagcttccaagcttgccttcatgtgccatatgtcagatttctaagaatactgttcagttttccaaaaatgaacctcacacattcatagggccactcaaacttcctgcccccaccaaagcattcttcataaccaaacagacaaaagagagttgttgggaaatgacctcgtgctcagaatccatgtcagcaaatgccttatgatcaggaagttagtgttatttaagagtgagatggttcctctctaaaacaatg

SEQ ID NO: 355065 - DNA, 623 bp, Homo sapiens
ccaggccattactgctgccagattagctcgagaactctccaggaccctttaattctttacaccagaccttttccacatttatttatctatttcttctttcccttccacacccctggttctcttctctgcctccttcactttctattccagttatacccttcttaatctaccacacctcagtggtgatggtgggcaaaaatggctgccattatgttatcagcacgaactaagcttacttgggaagtcagaaaacgggatgcaatccccataaacatggaaaaggcatattgattctatgtcatcaagctccacctttcccataggttgcacatggcaagataaaatgccaggatggggacaatttttctgcccagcttccaagcttgccttcatgtgccatatgtcagatttctaagaatactgttcagttttccaaaaatgaacctcayacattcatagggccactcaaacttcctgcccccaccaaagcattcttcataaccaaacagacaaaagagagttgttgggaaatgacctcgtgctcagaatccatgtcagcaaatgccttatgatcaggaagttagtgttatttaagagtgagatggttcctctctaaaacaatg

SEQ ID NO: 355066 - DNA, 416 bp, Homo sapiens
atgtcttgctttacaaacaaaaataatgcaacttcataatggcacatttatacataatgtgattacacacmtttagtagtatattttaataacataaaacacttaaagcacatttttaaaatgcaaaacctctggtaactatccttctactctttatgtccacgagttcaattcttttggtttttagatcccacaaataagtgagaacatgcaatgtttgtctttctgtgcctggcttatttcacttagattatgatgcacagattaaagtttattaattttctttccccctttttaaaattaattcttcattctgaattcagaagtttaagaaattttcttctgtttcaagttacaaaagaaatgatccttcatcctatgatttctccaaaattatcctgttcactcttgaaaca

SEQ ID NO: 355067 - DNA, 613 bp, Homo sapiens
gattactgtgggcaataatatgatgtgcacgatagattttgattcctaacaacataaaaagaaatagaaatcctgagataaacattcatttttaagcaatttctgttatatatcttctctatttttaatatggccttgctgatataccttggagaagataaatgacagattcttcctcttttagcactatgtaggaatcataaaagtatccaagaaarattttgtgtgtctttgtgcttgaaagtaatcattattagtgataaaatttcaaatgtcttataaatccctcaaaacatttggattgaaagggattgtttagagttaaataatattattgtgaatgctaattttgttatctgttatttttttcatgataactcactactccatgataatgtcttctcagatttatactcaaatgtactcagtgccatgagatagcaactcgttttctttagacatatttgtttccatgtaacaaatttatgtgaaactgaattgtatatgaattcagaatgtcagaagttggataattcaaatattttgcaacacctactcatgcagatggcaggatattggttttttgtgacaataaaatgtgggcctgatttga

SEQ ID NO: 355068 - DNA, 649 bp, Homo sapiens
tcacacttacatgatagctgtccaagaaagtttcccagtattgctacagattttgagtggtaagaactatgataagccattgtttttacttttgtttttgttttgtatccttacactaaagtttaggggttgcttgttaacacagcattatctagattattctgactgataaagttgggaaccacwgggattctaggaaaatgtagaagaattttgtcatcattaaaatttcacttgattttcatgatcctaaatttaacgcagcagtggtaagggtgtttgcatgtgtgcatgtgtgctcatgtgcacatgcctgcacatgtgttttattatatttactgcattagtttttttttctcatgctactaataaagacataccagagagtgggtaatttataaagggaaagagggtttaaattggactcacagttccacatgggatgaggaggcctcacaatcatgggtggcaaggaaaatggagaagcaaagtcacatattacattgggtgggcaggcaagagagcgtgtggcaggggagctcacctttataaaaccatcagatcttgtgagacttactcactatcataaaacagagtgggaaagacctgcccccatgattcaattacctcccactgggtccttctctca

SEQ ID NO: 355069 - DNA, 576 bp, Homo sapiens
tcaacgctacacataagccaccaaggcttggagctcacaccctctgaagtaacagcctgaactccacattggccccttttagccactgctcagacacaggrcaccaagtcctgagactgcacaaagcagcaaggccctgggcctggcctacaaaaccattttttcctcctacacctcccagcttgtgatgggaagagctgctgtgaagacctctgacatgtcttggagacattgcatttggctcctttttacttatgcaaatttctgtagttggcttaaattcctccccagaaaatgggattttcttttctactgcattgtcaggcttcaaattttccaaacttctatgctctgcttcctcttgaacacttttccacttacaaacatcttcagtcagataccctaaatcacctctctcaagttcacagttccacagatctctagggcagaggcaaaatgctgccagtctctttgcatagcaagagtgacctttactccagtaccaaacaagttcctcatctccatgtgagaccacctcagcctggactttatagtctacgtcactatcaacatttt

SEQ ID NO: 355070 - DNA, 599 bp, Homo sapiens
ttaagatctcattaatttttaatgtggatatacctgtttatttggccttaataacattttcttggacttcttccaaatcctgtagatgtttctatctgtctcttatgaatgccttatctcctttacaggatgctttaacataagattttcccagatctggaatcttggcattattctcccttaaaaaygtctgccgtttccatggcttcagtcagaatcccagtgtccacaattctccatttttacatctaaccccattttttttttcctgatccggtaactttgaaatgccttccggcaccacttttactggaaatcagggggttttgttttgcttgtttgattttcatggctttttttccctttactatttgttttattggaggtgttcgtcaccctatgttttcatttagtcagtttattcactgacttcaagcctgagcattgaggcccctttttcagagaacacttctttattttctaattgtgcccatctcattgccttttttccctcatactcttatctagcttaagaatatgatatacaatttcatagcaccacttttatacaagactatagattcaatgaggctgacagc

SEQ ID NO: 355071 - DNA, 505 bp, Homo sapiens
tgaatccttgttgtgatcttcctaacaccatatttactttcaaaatataattgcactattaatggaaacatattttctctctagagtttcaaccatttgtaattgcctattaaagttaatcttagagagtaataatgacagtggtctagggttttcatgcgctttttctttttctctttctttcttttttttttttggcggagtctagctctgtctcccaggctggagtgcagtgacgtgatctcggctcacagcaacctctgcttcccgggctcaagcgattctcctgcctcagcctcccgagtagccaggattacaggcgccctccaccatgcccaggtaatttttgtctttttaataraattggggtttcactgtgttggccagattcatctcaaactcctgacctcatgatcttcccgcctcggcctcccaaagtgctgggattacatcatgtgctccttcatatgagcaaaattccctaccgttctcatggctggtatta

SEQ ID NO: 355072 - DNA, 555 bp, Homo sapiens
atatgagcaaaattccctaccgttctcatggctggtattattctcatgccaatactcttcccttagtgttcattgtgctttaaccacttggagactgggtaacattatcaccaatagataaaagctttagagtacttataattyagcatacatctattgactgtctcttctatttctatttcttttctagttaccttctaaagaaataagaataaattactttttaaaaattcaatatacaaaggtgtcagttagatctgcatttataccaatcgctactttctgataataaaaaagtaaaataataaatatgtgctttgtaactggagatacaaaatttttaaaaaatattattttcctggccagtctattattttactcagtcttaaatactgacagagtaactcctgtactattaatccattttcttgacacatcgaattcatgcaaaattaataaggcgtaacattggattttgaaaagaagaaaattatttgacaaccctgaaaatagaactcagacaattagttcagatgttttcaattcggcaaagac

SEQ ID NO: 355073 - DNA, 555 bp, Homo sapiens
atatgagcaaaattccctaccgttctcatggctggtattattctcatgccaatactcttcccttagtgttcattgtgctttaaccacttggagactgggtaacattatcaccaatagataaaagctttagagtacttataattcagcatacatctattgactgyctcttctatttctatttcttttctagttaccttctaaagaaataagaataaattactttttaaaaattcaatatacaaaggtgtcagttagatctgcatttataccaatcgctactttctgataataaaaaagtaaaataataaatatgtgctttgtaactggagatacaaaatttttaaaaaatattattttcctggccagtctattattttactcagtcttaaatactgacagagtaactcctgtactattaatccattttcttgacacatcgaattcatgcaaaattaataaggcgtaacattggattttgaaaagaagaaaattatttgacaaccctgaaaatagaactcagacaattagttcagatgttttcaattcggcaaagac

SEQ ID NO: 355074 - DNA, 555 bp, Homo sapiens
atatgagcaaaattccctaccgttctcatggctggtattattctcatgccaatactcttcccttagtgttcattgtgctttaaccacttggagactgggtaacattatcaccaatagataaaagctttagagtacttataattcagcatacatctattgactgtctcttctatttctatttcttttctagttaccttctaaagaaataagaataaattactttttaaaamttcaatatacaaaggtgtcagttagatctgcatttataccaatcgctactttctgataataaaaaagtaaaataataaatatgtgctttgtaactggagatacaaaatttttaaaaaatattattttcctggccagtctattattttactcagtcttaaatactgacagagtaactcctgtactattaatccattttcttgacacatcgaattcatgcaaaattaataaggcgtaacattggattttgaaaagaagaaaattatttgacaaccctgaaaatagaactcagacaattagttcagatgttttcaattcggcaaagac

SEQ ID NO: 355075 - DNA, 386 bp, Homo sapiens
acatcattttttgaacatgtgacctacaatgaggcatgaagctcaattgcacatacacatttctcctttcgtaaatattcatggctcctcctatagcttattgaatatgcatacttagccaaagcatgtagcataaattcctgtcttatctttccctctctcaaagtgcttgcactcagcttctgacaggaggctacccttcccagccytccagggagcaggttacaagatgtccagcctgcaggctgcaaccctttaaaagaaataaagctgttctttccaaatttagacacctcatgatgcttcagttgacacaaccctcacggcttcatgaggaagacaggggatctcagaaaggggtcagaggcacctctcctccattcctc

SEQ ID NO: 355076 - DNA, 616 bp, Homo sapiens
ggtgttgatgggaatataaattagttcaaccattgtggaaaacagtgtgccaattcctcaaagagctaaaaacagaactaccattcaactcrgcagtcgcattactgggtatgtacccaaaggaatataaagtgtttcatcataaagacacatgcacatgtatgtttattccagcactattcacaatagcagagatatgaagtcaacttaaatgtccaccaatgatagattggataaagaaaacatggtatatatacaccatggaatactgtgcagccataaaaatgagatcatgttcattgcaagaacgttgatggagctggaggccattatcctaagtaaactaatacaggaatagaaaaccaaacatcacatgctctcacttataagtaagaactaaatgatgagaacacacggacacagagaggggaacaataagacactggggcctacttgagtctggagggtgggaggagaaataaaagtggaaaaaataactattgggatttaggcataatacctggattgtgaaataatctgtacaaccctcgtgacacgagtttacctatattacaaacctgcacttgtacccctgaacttgaaataagttttaaaa

SEQ ID NO: 355077 - DNA, 616 bp, Homo sapiens
ggtgttgatgggaatataaattagttcaaccattgtggaaaacagtgtgccaattcctcaaagagctaaaaacagaactaccattcaactcagcagtcgcattactgggtatgtacccaaaggaatataaagtgtttcatcataaagacacatgcacatgtatgtttattccagcactattcacaatagcaragatatgaagtcaacttaaatgtccaccaatgatagattggataaagaaaacatggtatatatacaccatggaatactgtgcagccataaaaatgagatcatgttcattgcaagaacgttgatggagctggaggccattatcctaagtaaactaatacaggaatagaaaaccaaacatcacatgctctcacttataagtaagaactaaatgatgagaacacacggacacagagaggggaacaataagacactggggcctacttgagtctggagggtgggaggagaaataaaagtggaaaaaataactattgggatttaggcataatacctggattgtgaaataatctgtacaaccctcgtgacacgagtttacctatattacaaacctgcacttgtacccctgaacttgaaataagttttaaaa

SEQ ID NO: 355078 - DNA, 616 bp, Homo sapiens
ggtgttgatgggaatataaattagttcaaccattgtggaaaacagtgtgccaattcctcaaagagctaaaaacagaactaccattcaactcagcagtcgcattactgggtatgtacccaaaggaatataaagtgtttcatcataaagacacatgcacatgtatgtttattccagcactattcacaatagcagagatatgaagtcaacttaaatgtccaccaatgatagattggataaagaaaacatggtatatatacaccatggaatactgtgcagccataaaaatgagatcatgttcattgcaagaacgttgatggagctggaggccattatcctaagtaaactaatacaggaatagaaaaccaaacatcacatgctctcacttataagtaagaactaaatgatgagaacacacggacacagagaggggaacaataagacactggggcctacttgagtctggagggtgggaggagaaataaaagyggaaaaaataactattgggatttaggcataatacctggattgtgaaataatctgtacaaccctcgtgacacgagtttacctatattacaaacctgcacttgtacccctgaacttgaaataagttttaaaa

SEQ ID NO: 355079 - DNA, 511 bp, Homo sapiens
ggatggagtagcctcttctgccctaaggttaacttacgggtgtttatagcatggaaacacacacacacacacacccacacatataaatacaatgcacaaataatgtattgcttgtaggatactctttgcagtgtatagattaactatgtacaragtttcatatctgttacttctttagaatactctttacacgtttgggaattaggtttagaagaaaagacttccaagcacctaggggcccaggcgatcaaaacatttttcccccctcagggatatttattttgtaaacgatagtgttctttttaatttttctgtaaacatgtatttagcagaaatgttaaatgttttcacttacatttgctaccaggatttatgaagtaaaatgtataagaaaacttttctcagataaagaggaaagaaacaaacttattttttatttttggcacccaccttttcctataggaaaaaaaatagaagaaatattaccatggcacttgctgcatgcctgtag

SEQ ID NO: 355080 - DNA, 615 bp, Homo sapiens
gaccaaaagggggagggaagagacttcaatgataatatgaagcaattattaattagtatattataaatatcatatgtttttactaattttaatacccaagatgtttccaagagaagtcctcataaagtttaatacatttatatgcctrctctattttctagaatcacattaaacgatggtatgtgagcatgattattgtatttataatcaagtaataaaataaatgattcctttaatgatgctttgtatttttatctcaaatttggttactacctctacaaaattttatatatgccaatacttataatgttgttaaataccattttcctcaaattatatatacttcaatgatggaaatatctgtatatgaatttaaaagtcttattttacctgtttgaagggactatctttttttaaataattacattctggatataatcaattttaatgcattgctggacttaaaaagagtaaaaaatgtatatccaccacatgtacactggcccctctaaagaaaaagtgaatgaaaaggagaagaggaagcagtaagcagaatgcagacactagaggtatcttatgatgcatggtgacaccagtgttgctattaatgacaca

SEQ ID NO: 355081 - DNA, 399 bp, Homo sapiens
tcaaagataacaggataaattgtaatgcaaattttaaagacacagaaaagtaaaacgtaatttcaacactactgcattttgttaaatacggtgaatttgggtagataaaagtaaatttataacttcagatgcttaaattagaaaataattacctaagaaaataaaagagcttaaaattaatgagtgtctaactcagaagttaaaaacaagaaaacaacagatgtaaacttagaagataatttttaaataaatgaacaaacacaatggcaaataaayccaacacaaaattaagaatcagcaagtccacacttgaaatgtataataaaatatcaaactttcagtgagattaaagagagagagagaacctggagagagagatggacacagaaagaccaagac

SEQ ID NO: 355082 - DNA, 556 bp, Homo sapiens
gactacaatataataacaggtatacctatagcttttcttcagaaacttaattttttttctctctacagttaccctcatttctaacaaagataaatggaatgaaatcaatttgtttgcaaaaccagtacagtttcattaaacttggtcagattatttacataactacaggaaaaatatatattgatcacataggctcttttgcagttgactttactggaacttttgacagagaatcttagactggactttaaaacctctcaaggctaaaagtcaaatcaaagcagacttcagacttcacctgcagtacctatagattcattctatgtgaattctcaaatgacatccctkttaaagctgtggtaatataaccagtatttctaatggtatcttgttataaagggagttgattataatttagcttatccaaataattatatttccctaaaataacaatattcctgaatagtttctaaattctggatggataagatagggagaaaaagtaaatgtttccatttctgttcacaagaatagactttaccaaatttctgtaaac

SEQ ID NO: 355083 - DNA, 496 bp, Homo sapiens
gtgtatgcctgtaatcccagctactccagaggctgaggcatgagaatcacttgaactcaggagayggaggttgcagtgagccaagactgcgccactgcactccagcctgggcaatagagcaagactctgtttcaaaaaaaaaaaaaaaaaaagacaaaattgagaacaaaatctggccatattttattatgttagtttgtggcatacaacaaattaatataaaaattgaaatattggctgataacatcagatttctatgaattttatatactttttggaacacacattaataacatatttatccaattcatagaactataactcaaagaaggctaacattacttatttaacaatgcctcccacataatttaacatattaaataagcataattggcttactatgtctctttcagacattcctgggacctttctggattatcccaaagtgaattcaaagtcaagagatataaatccaactttgattttgggaagttta

SEQ ID NO: 355084 - DNA, 496 bp, Homo sapiens
gtgtatgcctgtaatcccagctactccagaggctgaggcatgagaatcacttgaactcaggagacggaggttgcagtgagccaagactgcgccactgcactccagcctgggcaatagagcaagactctgtttcaaaaaaaaaaaaaaaaaaagacaaaattgagaacaaaatctggccatattttattatgttagtttgtggcatacaacaaattaatataaaaattgaaatattggctgatawcatcagatttctatgaattttatatactttttggaacacacattaataacatatttatccaattcatagaactataactcaaagaaggctaacattacttatttaacaatgcctcccacataatttaacatattaaataagcataattggcttactatgtctctttcagacattcctgggacctttctggattatcccaaagtgaattcaaagtcaagagatataaatccaactttgattttgggaagttta

SEQ ID NO: 355085 - DNA, 547 bp, Homo sapiens
aattcacatgtcaaagtggagcctttttgagggaattactggcagattaggttgttaggatagggatctcgcactatgattaatgctttttaacaagaagagatgattagggaactctgtctctctgcatgggtatgccaagaccaagggagatcttgtgaggacataaccaggaagagagccttcacctagaacccagttatgctggcatcctgatctttgacttccagcctccagatccatgagaaatgtttgttgtttaagaacaccactctatggtaatttattgtagcaacctgaactaagtcaactataaagaaaatagtcccatttttttcacttttattttcaattagagtgacctttaccagaggagagtctagtctattctgacctaaatttcataaacttcctaaaaaatatttctgatcattctattctatgcagctgaagattaatgggtaccttcttttttaatttttattttttatttattattattayactttaagttttagggtacatatgcgcaatgtgcaggttagtt

SEQ ID NO: 355086 - DNA, 566 bp, Homo sapiens
aatttttctgttattgatttcttgtttaatttccttgtgatctgagagcatacttcgtttaatttctttccttgtaaatttgttaaggtgtgttttatggcctggaatatagtctgtcttgatgaatgctccctgtgtgcttgaggagaacgtcwatttagttgttgttggataaaatattccataaatgtcaattatattaatttgattgatgttgctggtcattttaactgtaagcttactaattttatacttgctaaatatgtccattactaataaatatgtgttaaaatttctaactacagtagtagatttatttattttttattgaagttctgtcagttttttcctcacatattttgacactgttagtcacataaacaataaagattgttatatatttttgatatatatgaacaataaagattgttatatctttatatatgaggttcttctagaacctcttcattattatgtcatacccctctttatccccaataatttcagcctgaagtctgcttttctcaaattaattcagctattccagcttttttgttattaatgtc

SEQ ID NO: 355087 - DNA, 566 bp, Homo sapiens
aatttttctgttattgatttcttgtttaatttccttgtgatctgagagcatacttcgtttaatttctttccttgtaaatttgttaaggtgtgttttatggcctggaatatagtctgtcttgatgaatgctccctgtgtgcttgaggagaacgtctattyagttgttgttggataaaatattccataaatgtcaattatattaatttgattgatgttgctggtcattttaactgtaagcttactaattttatacttgctaaatatgtccattactaataaatatgtgttaaaatttctaactacagtagtagatttatttattttttattgaagttctgtcagttttttcctcacatattttgacactgttagtcacataaacaataaagattgttatatatttttgatatatatgaacaataaagattgttatatctttatatatgaggttcttctagaacctcttcattattatgtcatacccctctttatccccaataatttcagcctgaagtctgcttttctcaaattaattcagctattccagcttttttgttattaatgtc

SEQ ID NO: 355088 - DNA, 566 bp, Homo sapiens
aatttttctgttattgatttcttgtttaatttccttgtgatctgagagcatacttcgtttaatttctttccttgtaaatttgttaaggtgtgttttatggcctggaatatagtctgtcttgatgaatgctccctgtgtgcttgaggagaacgtctatttagttgttgttggataaaatattccataaatgtcaattatattaatttgattgatgttgctggtcattttaactgtaagcttactaattttatacttgctaaatmtgtccattactaataaatatgtgttaaaatttctaactacagtagtagatttatttattttttattgaagttctgtcagttttttcctcacatattttgacactgttagtcacataaacaataaagattgttatatatttttgatatatatgaacaataaagattgttatatctttatatatgaggttcttctagaacctcttcattattatgtcatacccctctttatccccaataatttcagcctgaagtctgcttttctcaaattaattcagctattccagcttttttgttattaatgtc

SEQ ID NO: 355089 - DNA, 586 bp, Homo sapiens
ttcatgttgaactctagaaagaggttcaagtgtataattattagatgttcagaaatgttgccaatggcattaagggcccaattatgctgttgggcagtttcttatttgctgctaacttatctaaaagttcacctattttagctctaacatgcttttatcattttgtccattgtgaggtttggggaaaaacaaacgaaaacaacgaccagaatgtgtatgcrtgcctctgtgtgtgtgtgtgtgtctgtatgtgtgtgtgtacatctgcattcctctgtgtgtctgtgtgtgtgtgtgtgtgtacacatctgtgtgtgcttgtacaattggttctgagtacattttcctaactcagaatcttagattgattttacgtaaccaacgattcatttggagtcctcttggatcctagcaatattaaaatataaatgcttcagacataactgaatatgcatttttcagatttccaaagatactatgtttcatttggttctgaactagtcccagagtaaatgcacttgcattctctcacacaaagttgtaatactaaaatgcatagagtgaaacatctgacttaacacagccc

SEQ ID NO: 355090 - DNA, 625 bp, Homo sapiens
acagtactgtccaatggattttcaagatgcctaaaatttatgtgattattattgtttttctaagtttgaaaaatgtaaaatatcatctatgccactaccatttccatcctatcaagcacagtgttttgaatatcttaaacaaatagtataaatgtgctgactgaatgaaaatattatatmttttagttcctaaacccagcactttatgtctctgtcaactgtgtattccataatttcatctcagtcattggtaaaaatgtacaaatgtgaatccccaatgcattagaacagattgttgtgtcaagagaagatcaagttgaaattttaagacaaatgttctctctcattttgggtgggagaaaagactagacaaatctagaaattggctgttatggaagaactggaccaaatatagggccctaagaagtcaagagtggggagtggaagggaccttgagaaattttttttcatttttacttattgtcagtgatgtatttctacatctcatgcaaaatgtgaaaatgtatgacttaggagacaccatgaaccaagtcgtctcctatgatatagttaatattatttatatagacttgttggcatgtaaacaaacccattgataaacagt

SEQ ID NO: 355091 - DNA, 531 bp, Homo sapiens
tgatatagttaatattatttatatagacttgttggcatgtaaacaaacccattgataaacagttccaagtactatagatcatcaattacttttgactgacaggttactattttccttaagatctgtgaaaatatgagtggaaatttcctcccagaaggaagctatccaataggtagctgtatttccacttactttactgtttgtttttatccttgaaatgcattacttttgctaatataaatatcattctgtaaactgacactttcatgcaggctttttaaatgtgctgaatttataactattattagtggaagacaatayataattatccaacttcatactacaacacattctgaaagctttcggaaagattggaacatattcaaattacagtttacatcaacataagtcaaccattcatgtattttcattctagcttaaagcaagctggcagacctagcaggaaccttactccaagtcacaaacaacttaatttgcaggccaaagaaaatctctatatcagtagggaac

SEQ ID NO: 355092 - DNA, 589 bp, Homo sapiens
gaggtcttctgtagaattttaattcatttttttgctattaattgagattcttatatattttggatattagccacttaaatatgtggtttgtgaatattttctcccattctataggttctcttttcactctgtttcctttgctgtgcacaaccgttttagtttgatgcagcaggagtaaaaatatgcgtgtgaaaattggtgttttgttggtaaaatattattgatcaatttttcagcaatatagggctatttatactgtacattttatrttgtgtctattctattagtgcattttaaataatttgttcattttctctaagttgttgaatttgtataaacttatttattttattactaattatgtttctaatacatttagtgtctcttgtgatatcctcactttcattgaaaatatcaataatttatagatttattttatcttgatattattactagatctttatcaattctactaatcttcaaaaaactttcgttttatttattattttttacttgtgcctggattttaatatgccttctatgtgttttatttttgttgagattctactaattttatttattttgagct

SEQ ID NO: 355093 - DNA, 619 bp, Homo sapiens
aactcaagctactggcctggatcccaggcccgtcatggctctgcattcagcccatgaatggtctggaggacatgctgtgaccagcttccaccttgggcatcagcacccggatgaggtggatgcagcggttcccaaaaacctggagatgctagcaaccatggcaccccaaggggtgttacagcttttgctctgggagtcccgaggtctgagcccccaggaagtgttagcgctctttgttcccactgcccacagttccgtgaacgggagagtgtggtgccctgtggttttttcactcccatagcttgccaagcaggagcgagtgttacacctgctggtagatgtgtttcttgtcccacaaccaggaggaatgaggtgtgcagacactggagaatgaacaaggcagagaagaattttattgagtgacagaagagctctcgaaaatgagagggaacccaaactgggtagccctctgtgtgagagrgggcccgaaagcaggtaaccatctgtgaggctgggttcagggcttttatgagctcaaagtgggagagtacatgctgattggtccatgagcaggcctggtaaaagcactatttgactaaaaggcatagaggaagttctc

SEQ ID NO: 355094 - DNA, 619 bp, Homo sapiens
aactcaagctactggcctggatcccaggcccgtcatggctctgcattcagcccatgaatggtctggaggacatgctgtgaccagcttccaccttgggcatcagcacccggatgaggtggatgcagcggttcccaaaaacctggagatgctagcaaccatggcaccccaaggggtgttacagcttttgctctgggagtcccgaggtctgagcccccaggaagtgttagcgctctttgttcccactgcccacagttccgtgaacgggagagtgtggtgccctgtggttttttcactcccatagcttgccaagcaggagcgagtgttacacctgctggtagatgtgtttcttgtcccacaaccaggaggaatgaggtgtgcagacactggagaatgaacaaggcagagaagaattttattgagtgacagaagagctctcgaaaatgagagggaacccaaactgggtagccctctgtgtgagagggggcccgaaagcaggtaaccatctgtgaggctgggttcagggcttttatgagctcaaagtgggagagtacatgctgattggtccatgagcagrcctggtaaaagcactatttgactaaaaggcatagaggaagttctc

SEQ ID NO: 355095 - DNA, 579 bp, Homo sapiens
tctatgcctttattttgcctgtatttatagaagttcagttattctgatctaaacagagctatgatgttgaagttttcctctaagtctaatattaatgcttatttttaagatgataattcattaatcayctagaaattaagggaatgtaggcagtaagttcaagatcctagacttaagattacacatacataattgtttttaactttatttcagggagaaaagtagctagcatggagataaggtattcattcaagggacaactgtgattggggaaatttttcgagacaaagaagaagtggtatagagtaggaattttaatgaagaagttgggataaatgagaagatgcagtgatggaaagggaattgtgaatggtaaaaatggagggagatgaacataaaaccctcaccatggcattgttaccaaggcaaattcccagcaaactcacaggggctggattgatggcacaaggggaccaagaaaggtgctgataacaggaggaaactgaagtctgctactcttaagaatgtattgtttacaagggataattggggatgagatggccaggcctacagccacaa

SEQ ID NO: 355096 - DNA, 573 bp, Homo sapiens
acccacagccaccaacttgtgaccctgtaaatggctaagttggctcatggaggatggtggaacagggagagaaaaagaacctaggtccttaatgagctgcgcaaataacccattctaaagctgtcctacctcaggatttattttccttcctacttaaatcaattgagttgggtttttctgttactcaaagtagaaaacacatcaaatgaaaaagaagtcgaaatgtaaataaaaacccgatgcattatttgaatggcttcaggcacacagcatgggaggcaaatgctattaatatgggcatcatccccactttccatgtcgagatgcgttttgtacattatttgccaagaaccccaagctggtcagcagttgaagtctcctgactccaacccagtgctgagacatatggtaattttcagttatggagaacatttaattaactaagaccctccatttcctaattgcagtaaataaaaacagtgggcrtataacaactgacatgaacaggatgctttaaagctgacaaatgcatgcacatacatcagcattgcctagccatatgtgacctgcaag

SEQ ID NO: 355097 - DNA, 605 bp, Homo sapiens
gtctttcaagaattggtgcctaaaattctggaatttcatgctttaaaacactgccattttatttatatattttctatgttttgtttataaatggcaggaggggaaagatttcaggccactatttccaagcactctgcaaataacatattgtgggtgtggatacagcctttattctcaacacatgaaaaaccaaactgaatataattgtcactctatttttctctttttaacactgtttttgaagtatgaaagacagcttgatagtctatatataaggatttttatcagatgaatgcaatttacagattggtgaaggtaattttgaagcaaaattgtagacttaacattttttgctcttaattagcttgtatttcatcatcaggttccttatgtttctagtcyttaaacacagcctattatgggcacaaatcaaaatatatgactaagaaaaacaccaatttaaaattataacagtctcaagcatcccagcagtcagtgatgttcaaccaagagataaactgagtaaaggaatcatcagtgtcctcatctgccttcctccacctaaccactgtgtgtgcttgcttgttacataccaacaggctttc

SEQ ID NO: 355098 - DNA, 568 bp, Homo sapiens
tgtgccagcccttgagacagctggagacaccctggggtgctgtaaaaccgacggtgggaatcactgatctcagagagaagaaaaaacagttcagggaaaactagcaaatcagcatcttctgaagctgcagcatgagccaagagcactgcggccctggatagcaccgttaggagccgcagaaaygcctccccactcatgctggaattcaaggttacagcaggttaaaaacaccttgctggactccaggtgcccacctcagcaccttcgctgcctgctcagggacattcacaatggagcagttctcagggcccacgtgtaatcctcagtcacgtgacatgcattgtgtgctcaacactagcctaggtgccttgaagacaaagacaagtaaataagcttaaatgaagcaaatctagtttctgctttcaaggagattgtggtgaggaagaagataagacacaggcgtaatatcttgcatgtgtcctggagaacatatgagtttagctagaaagagaacctcatctcctccagccagaaattgctgtgtggctgtgccacttttaggtggacc

SEQ ID NO: 355099 - DNA, 568 bp, Homo sapiens
tgtgccagcccttgagacagctggagacaccctggggtgctgtaaaaccgacggtgggaatcactgatctcagagagaagaaaaaacagttcagggaaaactagcaaatcagcatcttctgaagctgcagcatgagccaagagcactgcggccctggatagcaccgttaggagccgcagaaacgcctccccactcatgctggaattcaaggttacagcaggttaaaaacaccttgctggactccaggtgcccacctcagcaccttcgctgcctgctcagggacattcacaatggagcagttctcagggcccacgtgtaatcctcagtcacgtgacatgcattgtgtgctcaacactagcctaggtgccttgaagacaaagacaagtaaataagcttaaatgaagcaaatctagtttctgcyttcaaggagattgtggtgaggaagaagataagacacaggcgtaatatcttgcatgtgtcctggagaacatatgagtttagctagaaagagaacctcatctcctccagccagaaattgctgtgtggctgtgccacttttaggtggacc

SEQ ID NO: 355100 - DNA, 568 bp, Homo sapiens
tgtgccagcccttgagacagctggagacaccctggggtgctgtaaaaccgacggtgggaatcactgatctcagagagaagaaaaaacagttcagggaaaactagcaaatcagcatcttctgaagctgcagcatgagccaagagcactgcggccctggatagcaccgttaggagccgcagaaacgcctccccactcatgctggaattcaaggttacagcaggttaaaaacaccttgctggactccaggtgcccacctcagcaccttcgctgcctgctcagggacattcacaatggagcagttctcagggcccacgtgtaatcctcagtcacgtgacatgcattgtgtgctcaacactagcctaggtgccttgaagacaaagacaagtaaataagcttaaatgaagcaaatctagtttctgctttcaaggagattgtggtgaggaagaagataagacacaggcgtaatatcttgcatgtgtcctggagaacatatgagtttagctagaaagagaacctcatctcctccagcyagaaattgctgtgtggctgtgccacttttaggtggacc

SEQ ID NO: 355101 - DNA, 526 bp, Homo sapiens
taacattctcctgcagcacctacttgtcttcatctgttttgtgctactataacagaattatctgagactaatttataataaacagaaagttattggcttatagttctggactcaaggaagtcaaagaacccatcacctggaaaataaactggttgtattaaaaaaaacctgattgtaaaaaaaaaaaaccaaataagtaaattgagtctcctatgaaatagtggagactccatgttaaagctaacaaatcatcctaaactatcagatgcamattatttttctgtcacttgagtttaagaaaaggtcagtaagaaattccctctgctgttttccagtgagtcgaggccttctctgccttctagaatttggttctaactctgggacaagtccaggcacggggcaaactgagttccaggataaaaagtggatcttttctaatacatttaactacagtaatgaattccttatattctgatgtatttcttcacactattcctgttacttttatgcctagtgatgaagtttc

SEQ ID NO: 355102 - DNA, 570 bp, Homo sapiens
ttctgaaatggtggataaatgtgattactcagttttgaggaaagaaaataaattggtccagttaaatccaaggctttctaacccaatgcatttcagtaagtattcaccaaagacatcctagtcccccatactacaggcccacttagaattagaagtcacaaccccaggcaaccccagccccaactgtgggtgaataatagctaacaatgatggctaatatagagcctactcagaaggtgggccagtgctatgctaagctttttaatatgcatttaatccatacaactgccataggaggtagayagaactatcaccactattttagatgtgagaaaaccaaagcacagaagtttaaataacttgttcaaagtaatataaccagtacattggatcatactcagaatgtctggctgtataattttgaaaaactacactgaatagttagagaacacagaaggagacaactctcaactcaatgagatcatatgagtaataagagtaggataaagtcccaatgtaatggtggctggaaatgttatagaaagccaacttttaggtagaatggagttt

SEQ ID NO: 355103 - DNA, 606 bp, Homo sapiens
ctgccaaaaccctatttccaaataaggttccattcacaggttctggtttaggactttgacatgtctttttggggaacaaaattcaacccataatactaagcttacttgaattttcttcagtgcatcagccaggaaaatctaatgatagccatagaacatttctttaaaggtgcctttccagaaccaaagggcccagtgcctcacttgtatattactgggaagggccagaatgaaaaggcaacacccacaaagcaaatgtgtagcttgcacttactttaagaaacaattgttgattaactactggccctgggctagagctgtgaggaatgtggggatgaagaaggcaggagggtctctgatctcaggaaattaacctgataggagcccttccctctccaattagatagggtaagctaaacacttcaagaaagagagttggaaaggatgaaggggaggtggatttgacaaggatgagggacaagcatgcaggaatagtctaaggccagaggcaagaaagctagacwgcatgacatctacggctggaggggaagagggggaaatagggcagaggacaggtttaaggcacacaatgcattcactttgccc

SEQ ID NO: 355104 - DNA, 589 bp, Homo sapiens
gggttactgccttaaagaacagtcaaaggtgggggaggcacagctgccaacactaaacctttaggggcttagatagctgagggagtttgataaaggccaggggtccctgcacctttcagctagccctgcctaggagttgcccaatcagcagaggctgagcttgcctttctcatcttcccagaagaccagatgtgaaggggagagggctgggcatggccatataggcaaagaatgtgcaagtctcctttgagcccacgagttcgagaccagcctgggcaacatagtraaacccccctctctacaaaaaaatatgaaaattagctgggcatggtggtgcctacctgtagtcccagatacttgtgaggctgaggtgggaggatcacctgagcccagggaggtagaggctgcaatggagcgccactgcactccaacctgggtgatagcgtaagactctgtctcaaaacaaacaaacaaacaaacaaaacagtgcaagtctccagcactttggggctgaaacagagatagcacagcaagcaagctcgatgtcccctctattgcctatcttacaataaatgacaataaatggatc

SEQ ID NO: 355105 - DNA, 425 bp, Homo sapiens
acactgccccctttcatcctcaccctagagatgtccctggttccctagccctctctaactcttggctacacagaaagagatatcacaacaaaaaccaaatttttaatgcaataagastttgtatctagctgggagcaaagctgagattcagaactggggaggtggggagtgcatctatctcatcttgtcttccatgatgacaggccaaattatcccacagcagctcaactattttgcttgctggatttggcagggtggtggaccttctaagaagaggcatctggtcaagccatgactcccctcccatgtaacccctctttctttccaagaatgattccagctaaacctcaaagcagctgcactaaggagctccctacagccacaggatatgtatctctggagtcacagggccacaactgagcacc

SEQ ID NO: 355106 - DNA, 554 bp, Homo sapiens
acacaggctgccttagtccattttgtgctgctataacagaatacctgagactgggtactttataatgaacagaaatgtattggctcacagttctggagtctgggaagtccaagattgaggggctggcattttgcaaaggcctccttggctgcatactcccatggtgaaaggtcaaagacagagagcaagagatccaattcccagtctcaagcccttctgtaatcggcattcctgaggatggagcatggagccttcgtkacctaaacacccccattaggcaccatcacccaacttgtggcactggggattaagtttccaacacatgctttttggggaacacattccaaccatagtaccccaggagccaagggcactggcaccaggatggaggggaggaccagggtagtgactggcaaaatgcaagtcggcctgtggaggccaagcctgttttacagcctgtctgcagggacatcctaggaatggataagttgggcttctgagctgcccagccacagacaggccgggttggtgaggtagggtatggcgagggtgct

SEQ ID NO: 355107 - DNA, 496 bp, Homo sapiens
taccagatctgctatcagccacatgcacctggrcagggaatgtctggactatgagcacaagtgtcctgggaccaggcgtggggaatccaggaggcagatggacttctttctttattaagatgtacttctttctaataaagatgtacttccttctttattacttaataaatatgcccacttttctttaggctaaagttgagatcttaatttcgacattatatacagactagaaaaagatcattaactaatgtaggtgattccttctgctaacttggaatccattctgaagcagctgattgctcctacctcccacccccaccccaatggccctcaagcctcaaggatagaatcacaaatcccatttctcttcaaccacttagccagccttagtacagggccaggcacacagctaggtgctcagtggatgtctgttgattactaagatttaagtcaaccagatgtcccgattggccaagccagcccagggctcagagac

SEQ ID NO: 355108 - DNA, 496 bp, Homo sapiens
taccagatctgctatcagccacatgcacctgggcagggaatgtctggactatgagcacaagtgtcctgggaccaggcgtggggaatccrggaggcagatggacttctttctttattaagatgtacttctttctaataaagatgtacttccttctttattacttaataaatatgcccacttttctttaggctaaagttgagatcttaatttcgacattatatacagactagaaaaagatcattaactaatgtaggtgattccttctgctaacttggaatccattctgaagcagctgattgctcctacctcccacccccaccccaatggccctcaagcctcaaggatagaatcacaaatcccatttctcttcaaccacttagccagccttagtacagggccaggcacacagctaggtgctcagtggatgtctgttgattactaagatttaagtcaaccagatgtcccgattggccaagccagcccagggctcagagac

SEQ ID NO: 355109 - DNA, 496 bp, Homo sapiens
taccagatctgctatcagccacatgcacctgggcagggaatgtctggactatgagcacaagtgtcctgggaccaggcgtggggaatccaggaggcagatggacttctttctttattaagatgtacttctttctaataaagatgtacttccttctttattacttaataaatatgcccacttttctttaggctaaagttgagatcttaatttcgacattatatacagactagaaaaagatcattaactaatgtaggtgattccttctgctaacttggaatccattctgaagcagctgattgctcctacctcccacccccaccccaatggccctcaagcctcaaggatagaatcacaaatcccatttctcttcaaccacttagccagccttagtacagggccaggcacacagctaggtgctcagtggrtgtctgttgattactaagatttaagtcaaccagatgtcccgattggccaagccagcccagggctcagagac

SEQ ID NO: 355110 - DNA, 583 bp, Homo sapiens
ctgagctcaaaacctatctctggtctataagcactgaggcacatgaggtgacaatttaagaaagaatcaatattaacatgtacaggtatgtagtacgtgactatgtatatgccatgggtaagagtcgtttagaaaaagttcagtaaaatgcatgaaagacgtataagaccatgtaacgcccaccattcaatctcagagcccagcaaatgggtgagatgctggtgctggaacacgacacccagrccccaaaagtgggaggctcccaccatagcacccaggccccaaaaatggggtggctccaatggcagcaccctagccccaaaaggggaggctcccaccacagcacccaggctgcaaaagtgggggggcggccactgcagcacccaggccccaaaagtggggggctcccacaaatgcctatttctcaaaagcaggtatgctctctggaggctgctaccatatcacttctcaccccttcctggttccttggttccccctcaaatacagaattctatcaatattgattttactactatatttatcttgaccagtgtacagacagtccctgacttaggtttggttt

SEQ ID NO: 355111 - DNA, 583 bp, Homo sapiens
ctgagctcaaaacctatctctggtctataagcactgaggcacatgaggtgacaatttaagaaagaatcaatattaacatgtacaggtatgtagtacgtgactatgtatatgccatgggtaagagtcgtttagaaaaagttcagtaaaatgcatgaaagacgtataagaccatgtaacgcccaccattcaatctcagagcccagcaaatgggtgagatgctggtgctggaacacgacacccagaccccaaaagtgggaggctcccaccatagcacccaggccccaaaaatggggtggctccaatggcagcaccctagccccaaaaggggaggctcccrccacagcacccaggctgcaaaagtgggggggcggccactgcagcacccaggccccaaaagtggggggctcccacaaatgcctatttctcaaaagcaggtatgctctctggaggctgctaccatatcacttctcaccccttcctggttccttggttccccctcaaatacagaattctatcaatattgattttactactatatttatcttgaccagtgtacagacagtccctgacttaggtttggttt

SEQ ID NO: 355112 - DNA, 583 bp, Homo sapiens
ctgagctcaaaacctatctctggtctataagcactgaggcacatgaggtgacaatttaagaaagaatcaatattaacatgtacaggtatgtagtacgtgactatgtatatgccatgggtaagagtcgtttagaaaaagttcagtaaaatgcatgaaagacgtataagaccatgtaacgcccaccattcaatctcagagcccagcaaatgggtgagatgctggtgctggaacacgacacccagaccccaaaagtgggaggctcccaccatagcacccaggccccaaaaatggggtggctccaatggcagcaccctagccccaaaaggggaggctcccaccacagcacccaggctgcaaaagtgggggggckgccactgcagcacccaggccccaaaagtggggggctcccacaaatgcctatttctcaaaagcaggtatgctctctggaggctgctaccatatcacttctcaccccttcctggttccttggttccccctcaaatacagaattctatcaatattgattttactactatatttatcttgaccagtgtacagacagtccctgacttaggtttggttt

SEQ ID NO: 355113 - DNA, 583 bp, Homo sapiens
ctgagctcaaaacctatctctggtctataagcactgaggcacatgaggtgacaatttaagaaagaatcaatattaacatgtacaggtatgtagtacgtgactatgtatatgccatgggtaagagtcgtttagaaaaagttcagtaaaatgcatgaaagacgtataagaccatgtaacgcccaccattcaatctcagagcccagcaaatgggtgagatgctggtgctggaacacgacacccagaccccaaaagtgggaggctcccaccatagcacccaggccccaaaaatggggtggctccaatggcagcaccctagccccaaaaggggaggctcccaccacagcacccaggctgcaaaagtgggggggcggccactgcagcacccaggccccaaaagtggggggctcccacaaatgcctatttctcaaaagcaggtatgctctctggaggctgctaccatatcacttctcaccccttcctggttccttggttccccctcaaatacaraattctatcaatattgattttactactatatttatcttgaccagtgtacagacagtccctgacttaggtttggttt

SEQ ID NO: 355114 - DNA, 564 bp, Homo sapiens
gccttggccttccaaagggctgggattagaggcattagccactgcaccaggccacattttatttatttttaaatgctgtattagtccttttccatgatgctgataaagacatacccgagactggaaaatttacaaaagaaagaggtttaatggacttatggttccacctggctggggaagcctcataatcatggtggaaggcaaagaggagcaagtcttacatggatggcagcaggcacagacagagagcttgtgcagagagactccccctgctaaaaccatcacatcttgtgagacagattcactatcacaagaccagaatgggaaagacccacccccatgattcagttacctctcaccaggtctctcccacaacatgcaggaattctgggagctacaagatgagatttgggtggggaccatatcaacttgtttatcaaatgatcaacttggcttgcaggaagtcacagaactggtccttgaaacacygagagcataaattaagattctgactttcagtgctttctccatttccacatggcaaactttgctttatgtgtacct

SEQ ID NO: 355115 - DNA, 548 bp, Homo sapiens
ctcaggacacctgggggactggctccactttgagctctcacctcaagtcacaaaatgtccttgcatcagtgacccctggcctgagccactggctggaacaagagctcactgctcctcccttgcgttcaggaacttctgggtagcagttctggagaagagtcctgtggaggcccaagggtccctgccccctgccttatatttgaccaagttcagatgatattttaaccccaccaactgagaatccaaaacaacacatttgctagatcacatgcagtgctgggttaataagcttacgttattagttaatatcatgccaaagtgtggtgtgtgtacctagtggagtactattcagccataaaaggaatgggatcccrtcactggaaacaacatagatggaactggaggacattatgttaagtaaaatgagccaggcacagaaagaaaaactttgcatgttctcacttatttgtgggagcaaaaaattaaaacagttgaactcatggagacagagagtagaaggatggttcccagaggccggaaagggtagt

SEQ ID NO: 355116 - DNA, 548 bp, Homo sapiens
ctcaggacacctgggggactggctccactttgagctctcacctcaagtcacaaaatgtccttgcatcagtgacccctggcctgagccactggctggaacaagagctcactgctcctcccttgcgttcaggaacttctgggtagcagttctggagaagagtcctgtggaggcccaagggtccctgccccctgccttatatttgaccaagttcagatgatattttaaccccaccaactgagaatccaaaacaacacatttgctagatcacatgcagtgctgggttaataagcttacgttattagttaatatcatgccaaagtgtggtgtgtgtacctagtggagtactattcagccataaaaggaatgggatcccgtcactggmaacaacatagatggaactggaggacattatgttaagtaaaatgagccaggcacagaaagaaaaactttgcatgttctcacttatttgtgggagcaaaaaattaaaacagttgaactcatggagacagagagtagaaggatggttcccagaggccggaaagggtagt

SEQ ID NO: 355117 - DNA, 524 bp, Homo sapiens
cacttttccagtcctgggaagcatgcggagagggatggacccacagcctcaactgctccaggggcaagggcaatgcggaaagacatggcagggtacatcgccataactcacaaagggtaaagagcatgaggctagttgaggactgtaccacatctgcctctcactgaagcaagaggaagatcatctcttttcctttttctcacttagaggggagtgcactcccaaatctgcaattctttggctgctattggttgttgttgctgctgcttgcattctctggattaaaatgaaacacacgttccaaaccgtgaaaggtcagcaagaaagagagaagtgtccacargctgcagtctgaggatttgatgagctggttcttgaacttttgtgggaaaatctgagaagggaaagccggttaaagggccagggttcagcaagcctggcttcttggggcagcatctctccacttgcaggggtgccctgttctggacagcagaggaataggactgccctcccaaatgcccagg

SEQ ID NO: 355118 - DNA, 524 bp, Homo sapiens
cacttttccagtcctgggaagcatgcggagagggatggacccacagcctcaactgctccaggggcaagggcaatgcggaaagacatggcagggtacatcgccataactcacaaagggtaaagagcatgaggctagttgaggactgtaccacatctgcctctcactgaagcaagaggaagatcatctcttttcctttttctcacttagaggggagtgcactcccaaatctgcaattctttggctgctattggttgttgttgctgctgcttgcattctctggattaaaatgaaacacacgttccaaaccgtgaaaggtcagcaagaaagagagaagtgtccacaggctgcagtctgaggatttgatgagctggttcttgaacttttgtrggaaaatctgagaagggaaagccggttaaagggccagggttcagcaagcctggcttcttggggcagcatctctccacttgcaggggtgccctgttctggacagcagaggaataggactgccctcccaaatgcccagg

SEQ ID NO: 355119 - DNA, 564 bp, Homo sapiens
ccagcaatgttttacagtgttctgcttacaggtttgcaccttattatttttaaaaatttatttacttatttatttattttgagacagagtctcgctctgttgcccaggctggagtgcagtggcacgatctcagctcactgcaagctctgcctcccgggttcatgccattctgctgcctcagcctcctgagtagctgggaccacaggcacccgccaccacacctggctaattttttgtatttttagtacagacagcrtttcgccatgttagacaggatggtctccatctcctgacctcatgatccgcccacctcggcctcccaaagtgctaggattacaggcgtgagctaccgcgccaggccacacattattttgcaaatttacctttattctttagaaaaattttgatactgttttaaataataattgtttcaaatttttaatttcttatttttgttgctactctgtatcctacacccttagtaaactcataagttctaatatcattttgtatatccctttgaattttataaaaaagtattaaatttgtaagtagaaaaggatt

SEQ ID NO: 355120 - DNA, 564 bp, Homo sapiens
ccagcaatgttttacagtgttctgcttacaggtttgcaccttattatttttaaaaatttatttacttatttatttattttgagacagagtctcgctctgttgcccaggctggagtgcagtggcacgatctcagctcactgcaagctctgcctcccgggttcatgccattctgctgcctcagcctcctgagtagctgggaccacaggcacccgccaccacacctggctaattttttgtatttttagtacagacagcatttcgccatgttagacaggatggtctccatctcctgacctcatgatccgcccacctcggcctcccaaagtgctaggattacaggcgtgagctaccgcgccaggccacacattattttgcaaatttacctttattctttagaaaaattttgatactgttttaaataataattgtttmaaatttttaatttcttatttttgttgctactctgtatcctacacccttagtaaactcataagttctaatatcattttgtatatccctttgaattttataaaaaagtattaaatttgtaagtagaaaaggatt

SEQ ID NO: 355121 - DNA, 501 bp, Homo sapiens
gctgggattacaggcgtgagccactgtgcccggccttattgatgttttcatttgcgcttctctgatgacatatgaagtggagcatcttttcctatgcttacttgccgtgtgtatatctttcttggtaagatgtctcttaaggtccggctaattttgaaatctggttgtttgttttgtcattgagtttttaaattttggatattagtcatttattcaatgtttcctttgcaaatagcttcttttagtctgtggcttrtcttctcattctcctgacattgtctttcatagagcagaacttttacattttattgaagcctagcttatcaattacttttctcaaggattatgcctttggcatatatcaaaaaaagttatcaccatccaaggtaatctaggttttctcctatatttcttctagggttttatagttttgcatgttacatttaaatctgtgatccattttgagttaattttttgtgaagagtttaaggtctgtgtctg

SEQ ID NO: 355122 - DNA, 573 bp, Homo sapiens
agttaataacattacgttacgtgataaaggaataacagaaaataaaacaaagatattttcttaatatgagtgtatatagcacatattcctaacaaataaggagaaaatactcatcacaatttcagtctttattactataatctgtcatgcggttgtagctggtatttgtaactatcttcatctactactcattgtgtattcccttggccttcagcaggccctccagctgatcatggttcttcacctagtgaggtgacccaaacctttgttcctgaagggcctgggccattcataatccctcttggattggytgttgtagtttccaattgaccttaattacagggcacagtaatattaaaagaagccctagggaccttgtgtattccagacataatctttcttacttccatgtagtccatttccttttggtagtttggattaatcatcccagccgacactgtaactcccttcttagacttttgactaagaggcatgaggagcccaagtggctgggtggcatcctaacttccagtttcgtaacatcatggttgcgtctcctggtagaagcattcc

SEQ ID NO: 355123 - DNA, 573 bp, Homo sapiens
agttaataacattacgttacgtgataaaggaataacagaaaataaaacaaagatattttcttaatatgagtgtatatagcacatattcctaacaaataaggagaaaatactcatcacaatttcagtctttattactataatctgtcatgcggttgtagctggtatttgtaactatcttcatctactactcattgtgtattcccttggccttcagcaggccctccagctgatcatggttcttcacctagtgaggtgacccaaacctttgttcctgaagggcctgggccattcataatccctcttggattggctgttgtagtttccaattgaccttaattacagggcacagtaatattaaaagaagccctagggaccttgtgtattccagacataatctttcttacttccatgtagtccatttccttttggtagtttggattaatcatcccagccracactgtaactcccttcttagacttttgactaagaggcatgaggagcccaagtggctgggtggcatcctaacttccagtttcgtaacatcatggttgcgtctcctggtagaagcattcc

SEQ ID NO: 355124 - DNA, 625 bp, Homo sapiens
cctggcttactgagagattttatcagggctgagtgttagtttttttctttttttttctgtgcttttttggtatcaattaatatgatcacgtttttatttttttagcctattgatatgatgaattatattaactggcatttgaattttgaaccagccttgcatatttaacataaatcctacatggtcatggtatataatcaattttatacatttatagatttgatttgctaatattttgttgagaatttttgcatctaagctcataagagatagtggtctgtgttttcttttcttgtaatatctttgttttatattggcattagagtgataccrgtctcaaagagttagaaaatattccctctgcattctaccttcttaaagagattatagagacttggtatagtatttttcttacatgattggtacagtttaccagtgaacatatctaagtctggtgctttcagattacttgttcaatttatttaatatatacagttctatttagattggttatttcttcttatgtgagctttggcagattgtgtctttcaataatttgtctatttcatctaggttatcataattgcgggcataaagttatgcatatcatggtttgatttttatt

SEQ ID NO: 355125 - DNA, 570 bp, Homo sapiens
  misc_feature (1)...(570): n = A,T,C or G
acatgattggtacagtttaccagtgaacatatctaagtctggtgctttcagattacttgttcaatttatttaatatatacagttctatttagattggttatttcttcttatgtgagctttggcagattgtgtctttcaataatttgtctatttcatctaggttatcataattgcgggcataaagttatgcatatcatggyttgatttttattttaatatctatgcgaaaattctcgcncagtgatatcctctttttcatttctgatgtccataatttgtataccgttcttttttcttaattacccctagcttagagacttatcattgttattgatcttttccagtaatcacttttagttttgctagtttttaaaaatttatttcctgttttcaattttattgatttctattgtactgcttttttctttttccttctgcttactttgaatttaatttgttattctttttctagttccctaagctggaaacttagattattgattttatgtatttcttattttcgaatacatgcattcaatgctataaatttccctttattcactggttttg

SEQ ID NO: 355126 - DNA, 586 bp, Homo sapiens
taatgcagcagtgaggtgtgggggaggagaattctatagtcctgtggttagttgttcatgttttcataagtctgtgtctctggactttaaacttcacaattgctcattagtcctcctccccttctaaatgagacaggatgggatcagtggctagagttggatatttgtcttctctcatgcagaagactagagctggagttgagtacttccwcctcctcaacatcagttaggctttgataaaactgcagcagattaagcactggttgtattacttcttcagaggggagagcttctgaggaagaatggagtgttctgaactattttaaactgatatgttttgacctacccctgctaggagcaagaggagatttttgtccaatgtttactgtgagaacctggtctagctcctggaggtgaaactcatgaagtgtgggcacatgagtgcactgcataattgggtcttcctggagtttggtgttctcaggcttgtcttttcttagcctccagcagtttgctcattacaacttaggttctactaccatggccctggctcccgtggtggtggtttctgctcctgtgtttctgc

SEQ ID NO: 355127 - DNA, 507 bp, Homo sapiens
ctatagaatacctggggtctartgatggggcttgatagggtttcctaaactgagacaggagggacaagaggccatagcaggcaacctaaaaaatggtttctaccctcaaacaattatttggtaaagattcaaaggcttccatatcaccatctccccaccctctgttttgtcacaatccccacagaggctaagtcctctgttcctcctccacttctctgctcagaagacacactgctagtatcctttctattagggcattagcaacaatagagttttgggacttgacaacttcttacaggcaacttggcttggagtccacagataggtttccatctaggaaaaacacgtgtgtttgtcagtactgttcatggatgtgattggaaggggctgggaaatttctgttttactcaccttgaccatttcccaaatcctgttaaatagagaaattggttgacttgggagaggccacctaagttggaaatgatgggtggtttattccttccattc

SEQ ID NO: 355128 - DNA, 575 bp, Homo sapiens
aggtcaggacacggaagagaggggcctgttggtacaaactgaggtcagatgagagaagtaatctggggacatgaggcactatagaatacctggggtctagtgatggggcttgatagggtttcctaaactgagacaggagggacaagaggccatagcaggcaacctaaaaaatggtttctaccctcaaacaattatttggtaaagattcaaaggcttccatatcaccatctccccaccctctgttttgtcacaatccccacagaggctaagtcctctgttcctcctccacttctctgctcagaagacacactgctagtatcctttctattagggcattagcaacaatagagttttgggacttgacaacttcttacaggcaacttggcttggagtccacagataggtttccatctaggaaaaacacgtgtgtttgtcagtactgtycatggatgtgattggaaggggctgggaaatttctgttttactcaccttgaccatttcccaaatcctgttaaatagagaaattggttgacttgggagaggccacctaagttggaaatgatgggtggtttatt

SEQ ID NO: 355129 - DNA, 583 bp, Homo sapiens
ctcagtattgaagcaaagggggaactgcacccacacaaggccgctggtgctgccacgtgtgtggggcagatgggatcccaggagcactttgcgagtgtccccctccctaaacacaatgttaaaagaaaacctcagacaaattaaatttaacagagtttaattgagcaaataacgattcactgatccggcagcctccgagcctgagtagactcagagtccagcgcggccacgtggtggaagatgtatagacagaacacggaagtgaggtacagaaacagccagagaggttgtagcccggcgtttgccttattggaacacagtttgaccagtcagcgccctttgattggccaaaactctgtgaytggccgaagagcaggaggttagtctgtttccacctccacataagctgccgttcactatgtgcagagaaccctttaggctgaacttaaaattcataaggaggcagctttagcctaaacttgatttgacgccaagcatcaaggcacacaattcatattttctggctggtctctgtcatattggatactaccttgcagaagtgtcttcagagctttagagtaac

SEQ ID NO: 355130 - DNA, 528 bp, Homo sapiens
ctgcagtatttttcctttcactctctcgttgctatatagtggcatccagtgtcaggcaagtaatcctttgcaaatcactggggtgccaagcaggagataatggcatagggagtcaccctgagtccccctcccctgaaagctgggcttctgacctaacccaggtctctcatcctcccaggaccaaaaatgcagaggaacctaattgcctgtttatcttggaaagtgaggagccatctcaattgagctaatagtccccataacattgttttcaaatgcatcaaacaaacgaagtccccgcacaaaaaggagctcagaccgtccattagattgagcctcaagcctggaaatgtgggttggctgcyacttaacttttcccatcattttgaaccattgagagctccaccggcgccacttcttctctctctattaatgtgaaatatctccacacggaaagagatctctgtagaatatctgtcatgtgtcttggtggagagagagtgtgggcagaagggagtttttgttcagacc

SEQ ID NO: 355131 - DNA, 555 bp, Homo sapiens
cttgaaacatgccactgaaatgctcctatcctgtaacaatcagtccaaagatgcattgagcgagtgagtttaatatttcctggtagaaagacgtgagaaaggcaaaattagacaaatgttttctgtcctttagtttaacaaaatgggcaaagggcacctgttctactttcaacacggagctcagcagtggtgcctcactgcattagcctaactgcatcaggctgttagggggcccctcaggagagctyggctgtctccaaactccccgagaaaggccccgtctccccccagccagctggacagatgagtgacgaagccagatcatgggacccacgtcctcctacatcagtggccttcagctgggaatgactctgccgcctgtgacatttgacaatgcccggacacagtgtcggtcctaacacccggggagggaagcgtgccagctagtggggagaggccaggggtgctgttaagtgcccaacaaagcacagggcagcccccaacaaaaaagtttcctgaccccagatgtcagtagggctgaagttgataaatggt

SEQ ID NO: 355132 - DNA, 547 bp, Homo sapiens
ttcattgttgctgtgggacagacccacccattcccagtggaacaraggtggtgtttctttgcctttagaagacgtttcttcttcatcctcactggccatgtttacaacaggagcactgtttcccgtggccgacgtgcattgtcggggagttcatgagaaagtcatcagcctcccatcctctcatgctgtcgggcggaatcaagtcataaatagagtcacttgtcaagcaggacatcaatctgtccaggtagcctccacttcctgtctcgggccatatgtgtctgttatttatgtcaagaaaatggcatttgcacaaccactctggctgtttacagaagtttggttcctctggttgagctgtgcgtgctgtgtgctcttagctcactgataagccatgaggttgtgcagtttaaaatgtgcttccacatccctgatagaataaacagggcagagcccacagcaccatctgcccagcccagccaaagcgaggagtgaggggaggggcaggggctccaacagtgttctctgggtccctgggaggttggtg

SEQ ID NO: 355133 - DNA, 476 bp, Homo sapiens
ttccctctccctgtactgttttactgcttccaatcctttctccatgacagtcagggtgattgtgctcagtggcacatgtgatcctgctgcagctctctctgggtctccttttgttctttgcacagaatcccaaccctaaggggtcacccaaccctcytcatgcattgcctctggctcaccctgcaacctaatgtcctgtcccatatccccccagcccagtgtctgagcatgctcacttcatctggttccttggggttcagcctcccccacacctctgggtttgtctggacatctggacatcttgtcccacattccccatcccgggcctccccagcccagcatatgagcgtgctcatttcatcctattccctagagttcagcctcctccacagcttttggtttgtctggacgtctggacagcttgtcccgcatcccccactccccagcccagcatctgaacatgctgatttcatctt

SEQ ID NO: 355134 - DNA, 476 bp, Homo sapiens
ttccctctccctgtactgttttactgcttccaatcctttctccatgacagtcagggtgattgtgctcagtggcacatgtgatcctgctgcagctctctctgggtctccttttgttctttgcacagaatcccaaccctaaggggtcacccaaccctcttcatgcattgcctctggctsaccctgcaacctaatgtcctgtcccatatccccccagcccagtgtctgagcatgctcacttcatctggttccttggggttcagcctcccccacacctctgggtttgtctggacatctggacatcttgtcccacattccccatcccgggcctccccagcccagcatatgagcgtgctcatttcatcctattccctagagttcagcctcctccacagcttttggtttgtctggacgtctggacagcttgtcccgcatcccccactccccagcccagcatctgaacatgctgatttcatctt

SEQ ID NO: 355135 - DNA, 495 bp, Homo sapiens
agatcccaattcaggccataagaggccctgagaagtgcattagaaaacgtgcatatcaatctacattcttggtttagatgtgaagtgtggcatctgcccccctcyaggtggagaggaagaggtcaactgtgcaccaggccttctgtagtgcatagacaccaggctgcagcctacgcatccgtatttattttcaaaggaaaataaacccagttaagagataaacatgtgtaccctaaactcaactccattgcacagtggatatgcattattatcttgaaaatggagaggaagagcctacttttaagataattcatcaaagggagcagaaggacattttagaaagtgtcccttttccatatttttctatttcccttcagagtggcaaaaagttgctattgattttggggattttttttcttttatgacaaaattaactcaaataatttacgagaagatgtgccatttctgtctttagatacaaattgttgcatgttc

SEQ ID NO: 355136 - DNA, 495 bp, Homo sapiens
agatcccaattcaggccataagaggccctgagaagtgcattagaaaacgtgcatatcaatctacattcttggtttagatgtgaagtgtggcatctgcccccctctaggtggagaggaagaggtcaactgtgcaccaggccttctgtagtgcatagacaccaggctgcagcctacgcatccgtatttattttcaaaggaaaataaacccagttaagagataaacatgtgtaccctaaactcaactccattgcacartggatatgcattattatcttgaaaatggagaggaagagcctacttttaagataattcatcaaagggagcagaaggacattttagaaagtgtcccttttccatatttttctatttcccttcagagtggcaaaaagttgctattgattttggggattttttttcttttatgacaaaattaactcaaataatttacgagaagatgtgccatttctgtctttagatacaaattgttgcatgttc

SEQ ID NO: 355137 - DNA, 558 bp, Homo sapiens
agtggatatgcattattatcttgaaaatggagaggaagagcctacttttaagataattcatcaaagggagcagaaggacattttagaaagtgtcccttttccatatttttctatttcccttcagagtggcaaaaagttgctattgattttggggattttttttcttttatgacaaaattaactcaaataatttacgagaagatgtgccatttctgtctttagatacaaattgttgcatgttccagagtcttacaagttaagctgctggaatctgtggaatatgtaaggacggtgcatttagagcccatcwggaggggcttgctcagtgttgtgcctggtcacagcgtatcgatccaggaacagtaaccgggatcaggggtgcacgaccatacggcccatctccacagaaagagcacacggagaagacaacttggtggctttggattcaccaccaagatctgtgtgtgtttcacatagaatcttgatgattgtggaatgaactactttggccaacatccccatatttggcaaaatgatttgctgaaactacatgtgagg

SEQ ID NO: 355138 - DNA, 558 bp, Homo sapiens
agtggatatgcattattatcttgaaaatggagaggaagagcctacttttaagataattcatcaaagggagcagaaggacattttagaaagtgtcccttttccatatttttctatttcccttcagagtggcaaaaagttgctattgattttggggattttttttcttttatgacaaaattaactcaaataatttacgagaagatgtgccatttctgtctttagatacaaattgttgcatgttccagagtcttacaagttaagctgctggaatctgtggaatatgtaaggacggtgcatttagagcccatctggaggggcttgctcagtgttgtgcctggtcacagcgtrtcgatccaggaacagtaaccgggatcaggggtgcacgaccatacggcccatctccacagaaagagcacacggagaagacaacttggtggctttggattcaccaccaagatctgtgtgtgtttcacatagaatcttgatgattgtggaatgaactactttggccaacatccccatatttggcaaaatgatttgctgaaactacatgtgagg

SEQ ID NO: 355139 - DNA, 558 bp, Homo sapiens
agtggatatgcattattatcttgaaaatggagaggaagagcctacttttaagataattcatcaaagggagcagaaggacattttagaaagtgtcccttttccatatttttctatttcccttcagagtggcaaaaagttgctattgattttggggattttttttcttttatgacaaaattaactcaaataatttacgagaagatgtgccatttctgtctttagatacaaattgttgcatgttccagagtcttacaagttaagctgctggaatctgtggaatatgtaaggacggtgcatttagagcccatctggaggggcttgctcagtgttgtgcctggtcacagcgtatcgatccaggaacagtaaccgggatcaggggtgcrcgaccatacggcccatctccacagaaagagcacacggagaagacaacttggtggctttggattcaccaccaagatctgtgtgtgtttcacatagaatcttgatgattgtggaatgaactactttggccaacatccccatatttggcaaaatgatttgctgaaactacatgtgagg

SEQ ID NO: 355140 - DNA, 558 bp, Homo sapiens
agtggatatgcattattatcttgaaaatggagaggaagagcctacttttaagataattcatcaaagggagcagaaggacattttagaaagtgtcccttttccatatttttctatttcccttcagagtggcaaaaagttgctattgattttggggattttttttcttttatgacaaaattaactcaaataatttacgagaagatgtgccatttctgtctttagatacaaattgttgcatgttccagagtcttacaagttaagctgctggaatctgtggaatatgtaaggacggtgcatttagagcccatctggaggggcttgctcagtgttgtgcctggtcacagcgtatcgatccaggaacagtaaccgggatcaggggtgcacgaccayacggcccatctccacagaaagagcacacggagaagacaacttggtggctttggattcaccaccaagatctgtgtgtgtttcacatagaatcttgatgattgtggaatgaactactttggccaacatccccatatttggcaaaatgatttgctgaaactacatgtgagg

SEQ ID NO: 355141 - DNA, 584 bp, Homo sapiens
ggtgaccttccctagttctctctagaggcaatcactgtcaccagtttcctatgtatgtgctaaccggtgcatatgcaaacataaacacacacatattcacaaacaaacacccttccttctcccacttttcacacagatggaaacctctactctgcacctkgcctttttctagggctgatatttggtagatatacaccagtacaggtggatatatgatcagcaacccttgggattgtttggtacctatgtcaattccagttgttagatattttcaatattaaccctacttttttcccttgctagttggatcatattggtgcgtgttatttgcagaacctttttaacttactgatatcaagattgggcttctacttattcatcagaggatgtatttcacaatctggaagacatcagattgtgaaattcaatttgcaatttgcaatttgaatttgcaaattcaaattcatttgcaatttcttttccaaagccatttgaagcaatttgttattatttctacctgctatgtatccatataatgcttagtccagattactcacaaacattgctcacaaacacagatttaa

SEQ ID NO: 355142 - DNA, 608 bp, Homo sapiens
tcctaaaaccacttatttttcttattctattttacaattttttatagcaaatttaacttacatttgtttaggataattcactcagcctgcrtgacctgaaaataccaaattagaaaacagtttttcaggaatttacatttgactaacgaacttgtagataattgaaaaatgttttcatagatatcttattagtggcttatttggttcttaggctaatagttgatgtacacttcataatacaatataagttctttcattttttctgttcctccaacctcaaagagagacctaaatttcagctactatttctttttcttttcttttcttttttttttttttttgagacggagtctcgctctgtcgcccaggctgcagtgcagtggcgcgatctcggcccactgcaagctccgcctcccaggttcacgccattctcctgcctcagcctctccgagtagctggaactacaggcgcccgccaccacgcctggctaattttttgtatttttagcagagacagggtttcaccgtggtttagatctcctgacctcttgatccgcctgcctcggcctcccaaagtgctgggattataagcgtgagccactgcgcccg

SEQ ID NO: 355143 - DNA, 435 bp, Homo sapiens
aaatgcatttatattacggaaagttataagggacttgaataccttccagaggtttttgctacatggggttttattagtggacaaaaccttataaaagatgtcagcaatctttaagaagcagaggtatgagaacagtgtctgcttccccacttcgcatcctttagtctcttyctgattttctgccatgcagaagagtggtcactgaagatttttggttttgtatagctagcagtaaaatatatttgagtaagcactgcaaaaatgtgaatatttattaatgaacccatatatatacatgtatgtatatatgtgtgtatggtgtgtatgtgtctgttacaacattttaattgacagagcattaggctgggaaggctccagagttttaggtttttatgttagcaaaccaaagcccaatataaacaataagataaactt

SEQ ID NO: 355144 - DNA, 561 bp, Homo sapiens
gcataaatctggtcttcagacctgtttttgttgcatctctgtgtgtgcaaacacacatacattcacataaattcacacacactcacatacgttcatataaatccattaaaagtagtttggaaaagcataaaatgatggagaaacttgtccagattaaaatataccaaaaagatataaaaatcaagtgtaatacataactcttggttggattctggtttgcacaaaaaaaaagtkgataagataattttggtacaactggagaaatttcaatatgggcaattaaatgttatgaaattattatttttcataggggatgccaatagtattatggttaaactagagaatgttcgtattcttaggaggtgcatgctgagatctgtgagaatgaattgtcatttgcacaacttgtattcaagtggcttaggaaataatttatatacacacatatgtggcaacacattaacaatttggtgtaaatctagatgaaagggatatagatgtgtgctgtgttattgtttaagcttttctgtagattttaatttttaaaaatgataaaatata

SEQ ID NO: 355145 - DNA, 592 bp, Homo sapiens
tcattctctgcagtgttaagagagtgactataaaagaagaaaccaggggagaaatcagccattgtccagacttaaataaaatgacagtggaaactagtaactcacctgaactgtgtccatttccagaattagttgaaactctaaactcctttaagtctgaccaaggcgggtgagttgggggtacatcctttgatattcacttttgacatttatgtctgccttaacttagggatatgatttgacttactgtatgaaagtcaaataatgattaatagctacctttattgtgggattaacatattccaggcaaggtgcagagaatttatatagattgtctagtttaatcctcataatattgctaaggtgatgattatgcccattttatakataagggcaatcaggtttagagaggtaaagtgagttgcctaaaaggcagaagaggtcctgaaacttcagtctgtataatagtccagatccacttcgttaaatacacccagtgattctaaaagctggcttcacaagagaataacctgagggtaattttacaaaatgctgacagccaggcccgtgtggttcaattaaatcacagtac

SEQ ID NO: 355146 - DNA, 592 bp, Homo sapiens
tcattctctgcagtgttaagagagtgactataaaagaagaaaccaggggagaaatcagccattgtccagacttaaataaaatgacagtggaaactagtaactcacctgaactgtgtccatttccagaattagttgaaactctaaactcctttaagtctgaccaaggcgggtgagttgggggtacatcctttgatattcacttttgacatttatgtctgccttaacttagggatatgatttgacttactgtatgaaagtcaaataatgattaatagctacctttattgtgggattaacatattccaggcaaggtgcagagaatttatatagattgtctagtttaatcctcataatattgctaaggtgatgattatgcccattttatagataagggcaatcaggtttagagaggtaaagtgagytgcctaaaaggcagaagaggtcctgaaacttcagtctgtataatagtccagatccacttcgttaaatacacccagtgattctaaaagctggcttcacaagagaataacctgagggtaattttacaaaatgctgacagccaggcccgtgtggttcaattaaatcacagtac

SEQ ID NO: 355147 - DNA, 500 bp, Homo sapiens
gcaacctttttctaatttctttcttgttttttttttcctctaaaagtctaaattcattgagaaatttttgtagagggaaggaatatagaagaatgccaccaaggaaagagattcctccagaatagaaaggggatagaagttagtatatacctcaagtaacaggaaaccatagctagatatttagcagctattttgggagatagaaggacctatggggtgccttgaggaagctgcatatgaagtatcaggaatccagtcttgtcagtgatttccatttgcaagcctggcatggagggcttggaaatatttgacttctagtgaacatgtgagcctgaacaataaggttattgaggtaactacgatgaactaaaggcatatgtaaattatatctccatttcccagatggaagtgttaggatycttataccaatttagacagcagggaaaaaatttcctgagccccatccacaagtaaatgaaaggtgaattttctagcaacat

SEQ ID NO: 355148 - DNA, 397 bp, Homo sapiens
gaaaaagcggatgggtggatggacccaaagtaaaatcctattgatgattaagatttgatacttatttgttttctctaggattgccagccctagagttccccaatgaaaaatagagctgttggcttctctgagctccagtggaagaagaaaacactagtaccttcagatcctacccctgaagataatcttagctgccaagtaaatagcaacatgcttcatgaaaatcctaccaacctctgaagtctcttctctcttaggtctataatttttttttwaatttttcttccttaaactcctgtgatgtttccattttttgttccctaatgagaagtcaacagtgaaatacgccagaactgctttatcccacggaaaatgccaatctcttctaaaaaaaaac

SEQ ID NO: 355149 - DNA, 576 bp, Homo sapiens
atcatttaagagtgatgtcaaaatgaagttctcagtcatttgaagacctatactgtatacatcgtagtgtataatattcctattcttccaaattgttgatgttctttgacatgaccctgaatgcgtggggattatacatcctcataaattctgccctgtttaactgagatatgtccatatgacttactttggccaattaagtgtaaatgacagtgatgttcatttcctccaagcagaagttttaagaaccagaaatagggttgaaggattgtattaaatgggcaattacyctgtattaagatcctggttgtgtttgtgtaataatagtagaaatattgaataatcttagagattgctagacagcaatcacaggaacagaaaaccaaacactgcatgttctcacacatgagtgggagttgaacaatgagaacatatggacacagggaggggaacaacacacaccaggcctgttgggggatggggagcgaggggagggaacatagaggatgggtcaataggtgcagcaaaccaccatggcacacatgtacctatgtgacaaacctgcacgttctgcac

SEQ ID NO: 355150 - DNA, 571 bp, Homo sapiens
cacaagcctggttaaattgtttttattattttttttagagaaggggtcttgctgtgctgcccaggctggtcttgaactccctgactcaagtgatcctcctgccttggcctcccatagggttggagttgcaagcatgrgctacagtgcctggcataaaaatgcttttaaaaagatgaagacttgaagaatattttttaaatattaaagtttaaacagtattatgtaacttgttaccatgtaactcaaataacatggctgaaatgtttgcagtaaaccacatatcatatttttcagggtccaattctctcaggagatgaatctctgggtaatttgcttttaacttcaaatgctcactaattatttatttaactgaggaaatatccaaggggagaaatactggattcacaacttaaagacttctggagtttgaagagtgccggaggtcgtttatcagttgagctaatagcaatcccaaaaccttgccattcagcccctgcttgaatgccttgagcaacaggcccctcaccatctcttgaaccattttatttttctttgagtaatccaagcctta

SEQ ID NO: 355151 - DNA, 571 bp, Homo sapiens
cacaagcctggttaaattgtttttattattttttttagagaaggggtcttgctgtgctgcccaggctggtcttgaactccctgactcaagtgatcctcctgccttggcctcccatagggttggagttgcaagcatgggctacagtgcctggcataaaaatgcttttaaaaagatgaagacttgaagaatattttttaaatattaaagtttaaacagtattatgtaacttgttaccatgtaactcaaataacatggctgaaatgtttgcagtaaaccacatatcatatttttcagggtccaattctctcaggwgatgaatctctgggtaatttgcttttaacttcaaatgctcactaattatttatttaactgaggaaatatccaaggggagaaatactggattcacaacttaaagacttctggagtttgaagagtgccggaggtcgtttatcagttgagctaatagcaatcccaaaaccttgccattcagcccctgcttgaatgccttgagcaacaggcccctcaccatctcttgaaccattttatttttctttgagtaatccaagcctta

SEQ ID NO: 355152 - DNA, 571 bp, Homo sapiens
cacaagcctggttaaattgtttttattattttttttagagaaggggtcttgctgtgctgcccaggctggtcttgaactccctgactcaagtgatcctcctgccttggcctcccatagggttggagttgcaagcatgggctacagtgcctggcataaaaatgcttttaaaaagatgaagacttgaagaatattttttaaatattaaagtttaaacagtattatgtaacttgttaccatgtaactcaaataacatggctgaaatgtttgcagtaaaccacatatcatatttttcagggtccaattctctcaggagatgaatctctgggtartttgcttttaacttcaaatgctcactaattatttatttaactgaggaaatatccaaggggagaaatactggattcacaacttaaagacttctggagtttgaagagtgccggaggtcgtttatcagttgagctaatagcaatcccaaaaccttgccattcagcccctgcttgaatgccttgagcaacaggcccctcaccatctcttgaaccattttatttttctttgagtaatccaagcctta

SEQ ID NO: 355153 - DNA, 585 bp, Homo sapiens
ctctggggtatatctccatgatcagcaaaaagaaaaccaaacggaatctcatctaagcgaaacaaaactgttatagaaaaagagccttggagataaatcattcccccagactttctgctggagggtgctcttttagcatctattttgtgaaattgaggagaacatttgaaaagattagtcttttcttagtgggtaactgctgcagtgactgagtcctgagggactgccaattagaataaaccagaagtcaactgcctggagacacaatcaactccaacccaatttctgggaagctggtttaaggccagaggatctgaatgctaacttacgttcaccttccagtcttgtctggcttaatgatcrgggctttttctccttcactccctttcactgtgccccagagttgctccccataaatgttgcaccttcacgtcaccctcacagattgttgtctaagtgcagtgggaagccactggagaatcttaagccacagagttgtgagatgcgatggaggcatagagaaggctgctcaggttagcagcatggagaaggactcctctgtgtgtgtgtgtgttgggtgtgtga

SEQ ID NO: 355154 - DNA, 629 bp, Homo sapiens
tctgacctttgaaatcgtttgagaatacacctatccctttttcaaagagtggccttgggagacagttcctgcacctcactcccaggcccaaggctcctgcccctgtgctagctgccattgttccatgagctgtcacttctgggcccaacagtggctgatgtccctccaaattatgcttcacacatcaccagcaagtatagaaagagartaagtgttactttgggcaaacctgggttcactttagggtttcttgacagtaagatgacaacaatgtttataacagtgttgatgataacaatgatgatgaaagttaattattaagttccatgctcagtgttgaatattttatattcgttatctaatttaatcatcccaaaatctctatcacatgactttttataatacctattttacatgtggggaaactgaggctcagagaggtggaaacagaacccaaatctgactttcagtctcgtgtttctaattgtaatggacattcatacctatttgagctgtagaatcaaacaaaatgccaagtcttttcacaggcaacttctgcaaaactatgaatcactgatcttatctggaattttctttttaacataaatgaagaactttacattcacttc

SEQ ID NO: 355155 - DNA, 474 bp, Homo sapiens
gttggccaggctggtcatgaacccctgacctcaggagatccaccagccttgccctcccaaagagctgggattacaggcatgaaccatcacrcccagccaacagggcattctaataccatgtgttaggcatgatgaagagatgaagccacagctggcgagagtccagcttacatcccagccttgtggagtcagggaaaacagcctgcttcctacactgatggccatgctaagtcttaaattagaagttgccagaaaaatataacctaaggcatacccacttagaactcatggaagacagctcatatttgcagttgtctgtttgtgtgtctgtgtgtctagactagatagttgcaatatacttatatcatttataataatattttggctaaattcagattacctttaagtatggaacatagaaattgatttctgtgcataaaatatgcatacctttcccctcccccataacttttt

SEQ ID NO: 355156 - DNA, 572 bp, Homo sapiens
ggataccactgagcttatagcaacggctttggagccaggctgcctgcatttgaaccctggctgctgtactactttctagctccatgaccttgagcaagtttctttacctctctgagactcagtctcccagactatgaaactgcgttgagactccatatcatggcagagagaacacaggtagactgccagcacagagcaggtggcaaaggagtatgagttatttttagcatgtgctgcaaaataaataaggaaatctctttccaacagttaaatgtaaaaccaattccatagttttatagacagaatacttgtattgttcatcatccacrttttgagatctgctattgtcagcaaaggaaattgaacacacacacacggtgtgtggctctgtgctaagccactgtttacacaactagattcaactactgccctttaggaagttagaatcaaaaagccatctgcacataccaacataaagcaacatatagacccaagtacttgatatattgatatgtgaaagtggaactaattcatattcaacagataatcactgagcagctataaagttgcag

SEQ ID NO: 355157 - DNA, 603 bp, Homo sapiens
ctgggtagtgtcaaccaagaacaggtgaaagaccaaactgcagttcaagaagacaaggtggtgtttataggggtcttaatgttaggaattataattcaggaaacaatttggcttctgaagagacagaggggagtagaggattttaagagaaaaccaaaaggaagctcagagtgattacacaagttgttttggagaattatcattggtagaggtggctgacttagaacatgcgtccatagtttactggtggtcgctgttcaggggttgcaatactggagaaattcagctgttttccagaatgtggtggtcactgcagtttgacccacttcaaaggtcaagacaagttcctggttttttttgttgttgctgttgccmgttagcaagacacataggcagtctttctcacaatgactttctgactccaatttagagctctgaaccacagagacaccatttcatatatcacacttcacagcaggaagatgtaaaagaagccaaaaagggctgcccagtaacctacagtagcctcttgtaataatccaaaaatgactgagaaagtatgataaaaacaaagaaagtgtcataaaaacaaagtgacttatt

SEQ ID NO: 355158 - DNA, 603 bp, Homo sapiens
ctgggtagtgtcaaccaagaacaggtgaaagaccaaactgcagttcaagaagacaaggtggtgtttataggggtcttaatgttaggaattataattcaggaaacaatttggcttctgaagagacagaggggagtagaggattttaagagaaaaccaaaaggaagctcagagtgattacacaagttgttttggagaattatcattggtagaggtggctgacttagaacatgcgtccatagtttactggtggtcgctgttcaggggttgcaatactggagaaattcagctgttttccagaatgtggtggtcactgcagtttgacccacttcaaaggtcaagacaagttcctggttttttttgttgttgctgttgcccgttagcaagacacayaggcagtctttctcacaatgactttctgactccaatttagagctctgaaccacagagacaccatttcatatatcacacttcacagcaggaagatgtaaaagaagccaaaaagggctgcccagtaacctacagtagcctcttgtaataatccaaaaatgactgagaaagtatgataaaaacaaagaaagtgtcataaaaacaaagtgacttatt

SEQ ID NO: 355159 - DNA, 543 bp, Homo sapiens
tagcccaaagtgaatgaagttaaggaatcagaccaatattgtgatgaaatgtagctaccctgcagcgaggcaagactcctgattaaaaccaccaggtacacaaagttctctttgcaaaacagacgtgagtcagacagcagtctctsaaactgggtcatgacttgcgaacaatgatgcagcaggtatttttcagatctctttgaagtttcctttctgggtttgctaaatatcactttgggttattttaactccatttcttctttgggccatgcttcccttctattttaatgggtcttctttttatcttccccccgcctctccacccacccacaaaaggtttgtagtctttgcaatggtgagcagaagaaacagatgacctgtgtgaatgtcagtccattcgcatttgcatcacaggtgaaggagccggcactcactgagggatttctcactgtgctttgccgttttgatgcatttctgatatgtcatcgtttagagaagaagacctgtacctgaagaactagttgctttttcagggacatagtt

SEQ ID NO: 355160 - DNA, 609 bp, Homo sapiens
ttatgagtgtatttgtgtgatatgagcatttgtatgtacacataaattatatgtagatatactatttgtatacatacatatacacacataatttgtctatgtggcatacagatgataaataatgtgtgtatatgtatctatgtagtatgtgtacacatgtgtataaacacatgtatttatatatacatgtaatccatctgtttattggctctgcatgcatttatccaaagataagatatacaaaccttgcataagcacatgtttgttaatgctrcaaagggcacacagtaacaaagtgttgattttctgtcttctctatttatcagtgttgatagggtgttgaaaactaaaagtataaattcacagacttagacacaagacttgttttccttatagaagtatggataagtcatagtagctataaaatttttgaaaagcccattctggttgtgtgtttatgtatttaataggcatccacatacccacgttcaacctttcgaactcatgttctgttcaaagtacactatgcctttcagagaccttggccagttctgttaaccagtggagagcgtccaggttattggcatgttgaacaaagaattggacaaa

SEQ ID NO: 355161 - DNA, 573 bp, Homo sapiens
ggcagaagcactgtagatgacatggaaagggggacttgttatcaggattagacctgacaccacggtgagagctggtgaaaacgcctgtggaaggctttgccgctgtgtctggtgatgggcctgcagttgacacgggccagcaggcagcagtcagaaagaacagcaggatgtgaagcaggggaagccagagccagctgccactcatggggacaaatggcacccctcttttgcctctcgctggctgcaaatctgccacatgagtgatacacaaagctgccgctctttgccayggaactctgcatgattattcctggccaggacctagggaagtggaaagaggggatgtggtgggagctgtcagagctgtggcctaaaaggtggagcagcagcaggggatacgtgcacacactgcagcagccctgatgccctctgcccgcagccctcagagctcagcactgtgcttcacttggacctgccaggcatcccgcagatgtctccatggacagtctcaacctgcaaccaagcagggagggaaatcctgggaagcatagttgcagttcagctggggtgaca

SEQ ID NO: 355162 - DNA, 424 bp, Homo sapiens
aaatgttatgagaaatagtgtagattagttaacataacaattttgtaatatatttttcaacataatgttcaggttgttaattccttagtgaacccatcttttatctgttacctttagtagagaaatagtgtaaatgtaatgagaaatagtgtaaattagttagcatacgagtttgtaatatttttcaatataatattcaggttgttaattccttagtgaacccatctcttctctgtacctttagtagacatttcctttcgtttcaggcctcaccgtttttctaagttttctgaccgtattaggtaattcaataatctayagctttgaggttttaaacctgccctggtagccatggtgtctatgagcatgaactctagaaaccaactccgaggacttcaattccttttttattaatatcagctga

SEQ ID NO: 355163 - DNA, 469 bp, Homo sapiens
tcagtaactaatcaaggctactgaacaaagtggaaacagctgggttggtttcccattaccacatacttcctcctcatggaatcaaaaagcaccaggagaaatctatgtcttggagctcttcctgaatgaagaaggaatagtgatcaggtcattatggtcagcagataaatactgatggcctacattcattgaaggtgaagtctgtgccaggcatccgcttcagcagtttgcatccattacatcactaaggcctcagcaacccagtgaaaggagtaatagtatcatctatgttttatagaaggaggaaactgaggccaaagccaatgggtgacttacccagggccatagagaaagtgtgaggaggtctgaattcarcaaggccatctgcgtgcagaaaccatagcataactaccgtgttaggctgccccttgtgagttccatgagcaacctgtactgacagaaatgaata

SEQ ID NO: 355164 - DNA, 519 bp, Homo sapiens
taatagtatcatctatgttttatagaaggaggaaactgaggccaaagccaatgggtgacttacccagggccatagagaaagtgtgaggaggtctgaattcaacaaggccatctgcgtgcagaaaccatagcataactaccgtgttaggctgccccttgtgagttccatgagcaacctgtactgacagaaatgaataattaggaattaactttttcctaaggtcaagagcattgtctttttctcatcagagactgaatttatatctcaaacaccaagctagaattcagtttagctgtattttcgagaagctgccaaatgccaggtactggactaagctgttgagctggaagagaaaggaagtttctgaggcaacccgtggcttgattatgttcacagtcttaaggagaaaagacatacwtggaacattacattacatataggaggcaccatgtgctgaggagtgactgattaagacagcaagttaacccagggctcaaagtctggctatgcctgtgggtc

SEQ ID NO: 355165 - DNA, 593 bp, Homo sapiens
tagtgctaccatgagttgagctagaaactcaaaaggaggagcagggtctatggggtggataggtcaggatgtggaatttttttttttwaatttagggaaactttgtatagctggtttgtatagcaagcaaaaatttatggtaaatgcaaatctgaagagaaatgtagctatgatacagttttgcaagacatcaggaaataaatgttttgtctgtatgttttcattaattccacagacatttattgcctgcctattttgtaccaggtttcaggcattttctgttccatgttatcaggtactggggagatttggggagctaagtcataaagctagagatacgtttggagaaaactgaataggctagtttggcaagtgtggcaggagaatctggggagatagggcggtaccatagagaaaggaccagagtttcttttctttaagtttagttccctgcccctaaaaagcaacaggaaaccactgagagctttgagcaggagagtgtcatgtgcaagtgtgtgtatgagggagactcatctgagaataattgtgtaaggaattggaagtggcagacattgacacagtaaactgggaaa

SEQ ID NO: 355166 - DNA, 593 bp, Homo sapiens
tagtgctaccatgagttgagctagaaactcaaaaggaggagcagggtctatggggtggataggtcaggatgtggaattttttttttttaatttagggaaactttgtatagctggtttgtatagcaagcaaaaatttatggtaaatgcaaatctgaagagaaatgtrgctatgatacagttttgcaagacatcaggaaataaatgttttgtctgtatgttttcattaattccacagacatttattgcctgcctattttgtaccaggtttcaggcattttctgttccatgttatcaggtactggggagatttggggagctaagtcataaagctagagatacgtttggagaaaactgaataggctagtttggcaagtgtggcaggagaatctggggagatagggcggtaccatagagaaaggaccagagtttcttttctttaagtttagttccctgcccctaaaaagcaacaggaaaccactgagagctttgagcaggagagtgtcatgtgcaagtgtgtgtatgagggagactcatctgagaataattgtgtaaggaattggaagtggcagacattgacacagtaaactgggaaa

SEQ ID NO: 355167 - DNA, 571 bp, Homo sapiens
agttgagctagaaactcaaaaggaggagcagggtctatggggtggataggtcaggatgtggaattttttttttttaatttagggaaactttgtatagctggtttgtatagcaagcaaaaatttatggtaaatgcaaatctgaagagaaatgtagctatgatacagttttgcaagacatcaggaaataaatgttttgtctgtatgttttcattaattccacagacatttattgcctgcctattttgtaccaggtttcaggcattttctgttccatgttatcaggtactggggagatttggggagctaagtcataaagctagagatacgtttggagaaaactgaataggctagtttggcaagtgtggcaggagaatctggggagatagggcggtaccakagagaaaggaccagagtttcttttctttaagtttagttccctgcccctaaaaagcaacaggaaaccactgagagctttgagcaggagagtgtcatgtgcaagtgtgtgtatgagggagactcatctgagaataattgtgtaaggaattggaagtggcagacattgacacagtaa

SEQ ID NO: 355168 - DNA, 579 bp, Homo sapiens
tggcgcacaacttttttcttctagtggaaaatatacacagagggagctaacctacgctgcttcatgtcaacctagaaacaaatgtgaatttcccaagtgcaataaacatgaggttgcccaataataccatttatctgggcgataagtgtcagttatgcaaaatgcagttgctgttgcaaggagacgggaacagctcatctccctgcaatgcttattaagtasaatgtctcctgctgcagagctgcacacggtcccatgatatggaaggaattaagtgaaaagaaatttcagtgaccgaaaagcccaattttccttcaagcttatggcacttaataaaataaatgcaaagttatttttaatgaaggcatctgagtttccttgactgaagagagggactgctcttcagcgagacacttctccctataaccaaggggacggttttgcatctggctcactgaaggcagcgtgactcatacacttagccagttacacacctgatgtgcgtattccccatgtgtccacttgagactcagggtgtgttgaggttgagaaccagatcactctctgatttgacaggta

SEQ ID NO: 355169 - DNA, 579 bp, Homo sapiens
tggcgcacaacttttttcttctagtggaaaatatacacagagggagctaacctacgctgcttcatgtcaacctagaaacaaatgtgaatttcccaagtgcaataaacatgaggttgcccaataataccatttatctgggcgataagtgtcagttatgcaaaatgcagttgctgttgcaaggagacgggaacagctcatctccctgcaatgcttattaagtagaatgtctccygctgcagagctgcacacggtcccatgatatggaaggaattaagtgaaaagaaatttcagtgaccgaaaagcccaattttccttcaagcttatggcacttaataaaataaatgcaaagttatttttaatgaaggcatctgagtttccttgactgaagagagggactgctcttcagcgagacacttctccctataaccaaggggacggttttgcatctggctcactgaaggcagcgtgactcatacacttagccagttacacacctgatgtgcgtattccccatgtgtccacttgagactcagggtgtgttgaggttgagaaccagatcactctctgatttgacaggta

SEQ ID NO: 355170 - DNA, 545 bp, Homo sapiens
ctccctttctttcctatttaccaatactagttggttatactatagtattctaacttaggttagaaagaccaaggtttgcagtggtggaagatcccctatatccaycttggggtgggtgagacacgaggatgttttgccctcggggcatcccaccatccagagctagagaaacacatgacccttggtttgttcagcaggatactgagaggctgctttagtgtctgagatggaggccaaataaaaatgctaagtgactctgtcctttggagagttaactgccttttcagctggtggattttataattgggtatttgtcagtctcgattgcaaagcacccgggaggacattgggtagcttgccagatcctaagcacagtgtcagtgtgcaacaaataacaaataaagtattctctcagcgagttctggaggaaggaactcccagaatataaagaggctcaagcccatgccccttgtcttggggcaagaccaagagatctggcctagaccaatgagaggctgggacaaacggccagcccaatatcactg

SEQ ID NO: 355171 - DNA, 364 bp, Homo sapiens
tgaatcttcccaagacacacaaaacaagtcaaattttgtcagtctattcaacgccctcttactgatatgtcccatggtttcccatggtgtgagtcctttcttattacktgcaataagcccaacttggttcaaacacaggtgtgatcctgatgccctcggttggatggcagtgacattgctagcagcttgtttctgaagtacactcttcctgaatgccacgccacatggcctatcaggaaatgaacccataaaacaagaacaaggagtacgctcttccttcttagataacaggctttttctggtagataattctgctcccactgtgttacccactacaatctgagggcaggaaccagtgtttggt

SEQ ID NO: 355172 - DNA, 364 bp, Homo sapiens
tgaatcttcccaagacacacaaaacaagtcaaattttgtcagtctattcaacgccctcttactgatatgtcccatggtttcccatggtgtgagtcctttcttattactwgcaataagcccaacttggttcaaacacaggtgtgatcctgatgccctcggttggatggcagtgacattgctagcagcttgtttctgaagtacactcttcctgaatgccacgccacatggcctatcaggaaatgaacccataaaacaagaacaaggagtacgctcttccttcttagataacaggctttttctggtagataattctgctcccactgtgttacccactacaatctgagggcaggaaccagtgtttggt

SEQ ID NO: 355173 - DNA, 364 bp, Homo sapiens
tgaatcttcccaagacacacaaaacaagtcaaattttgtcagtctattcaacgccctcttactgatatgtcccatggtttcccatggtgtgagtcctttcttattacttgcaataagcccaacttggttcaaacacaggtgtgatcctgatgccctcggttggatggcagtgacattgctagcagcttgtttctgaagtacactcttcctgaatgccacrccacatggcctatcaggaaatgaacccataaaacaagaacaaggagtacgctcttccttcttagataacaggctttttctggtagataattctgctcccactgtgttacccactacaatctgagggcaggaaccagtgtttggt

SEQ ID NO: 355174 - DNA, 364 bp, Homo sapiens
tgaatcttcccaagacacacaaaacaagtcaaattttgtcagtctattcaacgccctcttactgatatgtcccatggtttcccatggtgtgagtcctttcttattacttgcaataagcccaacttggttcaaacacaggtgtgatcctgatgccctcggttggatggcagtgacattgctagcagcttgtttctgaagtacactcttcctgaatgccacgccacatggcctatcaggaaatgaacccataaaacaagaacaaggagtacgctcttccttcttagataacaggctttttctggtagataattctgctcccactgtgttrcccactacaatctgagggcaggaaccagtgtttggt

SEQ ID NO: 355175 - DNA, 433 bp, Homo sapiens
ttacagtgggtccagtggatccccagacgcatcctgtggtcattcccccagtgccacaatgcataattggcatagacacattttgcagcttgcagaacccccatattggcttcctgactgatgggtgagggctattatggtgggaaaggccaaatggaagccactggagctgctgctaactagaaaaatagtaaataaaaaacaatatcacaaccctggagggattgcaaagatttgtgccaccatcaaggacttgaaaaacgcaggcgtggtgattcccmccgcaatatccccattcacctctcccatttgggctgtgcagaagacagatggatcttggaaaatgacagcggattattgtaagcttaaccaagtggtgactccaattgcagctgatgtatgagacgtgattttattgcttgagcaaattaac

SEQ ID NO: 355176 - DNA, 584 bp, Homo sapiens
ctataggtcaattaagttaattgtgtttctttttgtgtgtgtgtgtgtgtgttttataaatttttattgtttatataaataacatattgtatagttctaaaatttgcttttatcttttcattcaatattagtggctgagatatagacatattaattgatacatatcgatatattccattaattttaactacttcccattatttaatatactgtgatttatcaattctcttatgtatttttattacaaacaatgatacaatgaacattcttgacatgtctctttgaacacatggacaataaccatgataagatctgtatatgcagatatgtgtgtacctagaagtggaattgctgagtctttttttttttaattttattattattatactttaagttttagggtrcatgtgcacaacatgcagttttgttacatatgtatacatgtgccatgttggtgtgctgcacccattaactcgtcatttagcattaggtatatctcctaatgctatccctcccccctccccccaccccacaacagtccccggggtgtgatgttccccttcctgtgtccatgtgttctcatt

SEQ ID NO: 355177 - DNA, 584 bp, Homo sapiens
ctataggtcaattaagttaattgtgtttctttttgtgtgtgtgtgtgtgtgttttataaatttttattgtttatataaataacatattgtatagttctaaaatttgcttttatcttttcattcaatattagtggctgagatatagacatattaattgatacatatcgatatattccattaattttaactacttcccattatttaatatactgtgatttatcaattctcttatgtatttttattacaaacaatgatacaatgaacattcttgacatgtctctttgaacacatggacaataaccatgataagatctgtatatgcagatatgtgtgtacctagaagtggaattgctgagtctttttttttttaattttattattattatactttaagttttagggtgcatgtgcacaacatgcagttttgttacatatgtatacatgtgccatgttggtgtgctgcacccattaactcgtcatttagcattaggtatatctyctaatgctatccctcccccctccccccaccccacaacagtccccggggtgtgatgttccccttcctgtgtccatgtgttctcatt

SEQ ID NO: 355178 - DNA, 579 bp, Homo sapiens
cttggaagttgttcttgctattctaatcatccgatctccaaggttattagagacatgcattgaagagtccttttcagaatcctatagctgattataaatggtgttttgaaaagaaccaaaacaagacaattgtgtgtgggcaaccaaagtcttagtgttgcaggaattaagggactggagagacccatgggtggaacagtaggattttattgggtgcaccttgacagagcagattaacatccaaaggctgagccccraacaaagacagggcttgacttttatacatgccaccaaagggggttggtcagctagtggcctgaaacctgcagagtgggcaagcaagcttacaaaagcagaacaaaggcagtttatcaaacagtaacagatgttgcaacttaggcatgtcttgtgacctctgccctactgcacagaaggaaaacaggaactcacaaaatccttacaaacttgcagaaatagttaacagttatgagagcagaacaaagaataatggtatggggagaaaactccatggtgggaaactgataagaaaaacttgtttttctcatccctgctcctgga

SEQ ID NO: 355179 - DNA, 579 bp, Homo sapiens
cttggaagttgttcttgctattctaatcatccgatctccaaggttattagagacatgcattgaagagtccttttcagaatcctatagctgattataaatggtgttttgaaaagaaccaaaacaagacaattgtgtgtgggcaaccaaagtcttagtgttgcaggaattaagggactggagagacccatgggtggaacagtaggattttattgggtgcaccttgacagagcagattaacatccaaaggctgagccccgaacaaagacagggcttgayttttatacatgccaccaaagggggttggtcagctagtggcctgaaacctgcagagtgggcaagcaagcttacaaaagcagaacaaaggcagtttatcaaacagtaacagatgttgcaacttaggcatgtcttgtgacctctgccctactgcacagaaggaaaacaggaactcacaaaatccttacaaacttgcagaaatagttaacagttatgagagcagaacaaagaataatggtatggggagaaaactccatggtgggaaactgataagaaaaacttgtttttctcatccctgctcctgga

SEQ ID NO: 355180 - DNA, 606 bp, Homo sapiens
gaatgctgggcagccaccagaagctccatgaggcaaggaaggaattcttctccacagcctctggagggaggccctgctggtgcattgatttcagacttttggtacccagaaatgtgagacaataagtttctgttattttaagccactrcatttgtggtaatttcttacagcagccctaggaaacttaaatatgtcaaggtgtggtttctttatatttattctccttggattttgcagaaaatctggaaaatgtagggtgatgtatataaaaattgtttttatttttaaattatcctttcaaaaggtgtttctgctccttctcactcctctccttctggaaattcagttatcacacattacaccagtttgctatgttgactatatctcttcatctctgttctgcatccctcttcttcctgtactctgtttgttttcatctttctattttctacttgtatagtttctcatttatggcttcttttttttccctaaggtcttacttgcagttaaacctatactttaaattctatatcgcattaaaatattttagttccattacctcctattgatttaaaaatagatttcattcctctggtttagttatcc

SEQ ID NO: 355181 - DNA, 461 bp, Homo sapiens
gccttttttttttttttttccctaaaattttgtctctgttcttctggctttttaactgttctctgatatctgcaaataactgctgttttattttatttaccttttataagtaaacatggtttagacgtttatccccaccaaatctcatgttgaaaggtaatctccaatgatggaggtagggcctggtgggaggagtgtgtgtaatggcggcagatccttcatgaacggcatggtrctgtgttcttggtaatgagtgagctctcactctatgagttcacaggagagctggttgtttagaagatcctgtcatctcctgccttgctctttgctccctccctcctgttccctctctcaccatgtgacatgcctcctccccctttaccttctgacatggttagaagcttgctgaggccctcactagaagcagatgctggctctctgcttctcatacagcttacaaa

SEQ ID NO: 355182 - DNA, 580 bp, Homo sapiens
aagtcttcataatgtttttcaggatatggaatcattctatatgttcttacaattcacattcatttttctattaaagctgcattcccacttcatttaattattgactaattttctatcttattcactagtacataggatgagaaaatgaactttatcatgtttgtctctgaagtccactacttttatacatttcaattttctgatagtaattgataaatcagtggtrggtacatcaaattaaaacatcttcagtttgatcttaaacattgcacagcattttatattttatggaaatactgtaattcattcactcaggatattcttgttagttaatattagcttgttttcacctctcatggttataaagcattaaatatacacagtgtgcacatctgtctacatgttacattattttcatgagatgaacatcaaagagagaaatgacttgatcaagtaacattagcatcctacaagctattgtattattgtgcaatatgttatgcaaaaacatggaaatttatactttcaccaccagtctttgaaatgccttctttaacaacagctagaattgaacgtgcaa

SEQ ID NO: 355183 - DNA, 576 bp, Homo sapiens
cactactaaacattgcctgagcaaaggctctctaagggggccccacaccggcagcagttctgtgcctgggccctgttgttctacagggaatcctttaaaatatagttggaggcagtcatgcctccacagctctcttgcaatctgcacgcctacagagttaacaacatgtggatgaaagcaaacctcaatgcttgcatactctggagccatggccccatccacacctccacctgctttagccataactggkgcaacccaggagtattgcaccataatgtgggaagcagagacttgagactgccctggacagcaagccccgaggttgcatggacaccctgggccctcccttggtagtgttctgccctcaaggctctagcactctggacctgtgatggacacggcaaccttgaagatctccaaattcctgcaaggttgtggttccgttgtattgactagcacctggctttctttattatttattgatataacaatttatatatttatggtgtgtatgtgagtgtttgtgacatgaatagaatatgtgatgaacaagtcagggtaatttggggtattcgt

SEQ ID NO: 355184 - DNA, 576 bp, Homo sapiens
cactactaaacattgcctgagcaaaggctctctaagggggccccacaccggcagcagttctgtgcctgggccctgttgttctacagggaatcctttaaaatatagttggaggcagtcatgcctccacagctctcttgcaatctgcacgcctacagagttaacaacatgtggatgaaagcaaacctcaatgcttgcatactctggagccatggccccatccacacctccacctgctttagccataactggggcaacccaggagtattgcaccakaatgtgggaagcagagacttgagactgccctggacagcaagccccgaggttgcatggacaccctgggccctcccttggtagtgttctgccctcaaggctctagcactctggacctgtgatggacacggcaaccttgaagatctccaaattcctgcaaggttgtggttccgttgtattgactagcacctggctttctttattatttattgatataacaatttatatatttatggtgtgtatgtgagtgtttgtgacatgaatagaatatgtgatgaacaagtcagggtaatttggggtattcgt

SEQ ID NO: 355185 - DNA, 551 bp, Homo sapiens
tccaccatggtggggcttatacgccattttctggtcatatgaggcatgtctgagcatgttgtcctactgcgcaagcgcagagaagcccctgccaaaacgtggttgtaattgttctctttcccaccccgaattccttaaaatgacagaaactgagtcccttcagagagctagcaccaggatccctttcctgagcactttcttcttgtgctctccagccagaagcctattaaaccttgtgtgagcaaaagctctgtttggccttgagttaattttcgcttacacaaaagccaaagaactcagagtttaggggtagtaacaaaagcatctagaaaagacagtatcrggtacattaacaaaagcatctaacaaaggcagtaattgagaccaaatgcctaaattttgaaaatgtttttatcttttttaaaccaatggcctttaaaactatttttatttaccaaagattactaacgtaatgtgaactaaaaggcattaaaggttttctttcttgtgacaaagtattttatttaaatgcttattttttaacccaacta

SEQ ID NO: 355186 - DNA, 551 bp, Homo sapiens
tccaccatggtggggcttatacgccattttctggtcatatgaggcatgtctgagcatgttgtcctactgcgcaagcgcagagaagcccctgccaaaacgtggttgtaattgttctctttcccaccccgaattccttaaaatgacagaaactgagtcccttcagagagctagcaccaggatccctttcctgagcactttcttcttgtgctctccagccagaagcctattaaaccttgtgtgagcaaaagctctgtttggccttgagttaattttcgcttacacaaaagccaaagaactcagagtttaggggtagtaacaaaagcatctagaaaagacagtatcaggtacattaacaaaagcatctaacaaaggcagtaattgagaccaaatgcctaaattttgaaaatgtttttatcttttttaaaccaatggcytttaaaactatttttatttaccaaagattactaacgtaatgtgaactaaaaggcattaaaggttttctttcttgtgacaaagtattttatttaaatgcttattttttaacccaacta

SEQ ID NO: 355187 - DNA, 569 bp, Homo sapiens
ccaaaccatattattctatcccagacacctctcaaatatcatgtcactctcacatttcaaaacactattatgcctcctcaggagtcccccaaagtcttaactcattcaagcattaacacaaaagtccaagttcaaagtctcatttgagacaaggtaagtcccttccacctataagactgtaaaaccaacaagttagttacctgaagatacactgggggtacaggcactgggtaaatattccaattccaaatgggagaaattggcctaaacaaagggactacttgctgggcatggtggctcacgcctgtattccctgcactgtgggaggccgaggtgggcatatcacgaggtcaagagatcaagagaatcctggccaacatggtgaaaccctgtctctaccaaaaatacaaaaattagctgggcatgrtggcacatgtctgtagtcccacctacttgggtggctgagccaggagaattgcttgaacccaggaggcagaggttgcagtgagcccagattgcaccatttggactccagcctggtgacacagcgagactctgtctaaagagaa

SEQ ID NO: 355188 - DNA, 398 bp, Homo sapiens
aagcaacagcccaagctataccttggccctcagaatagtggatctctgggctcaacccatgaaagcatttttttcttctaggcccccaagtctgtgatggcaacgtctgccacaaacatctttgacatgccctggagacaatgtccccattgtctgggctactaacatttggctaattgttacttttgcaaatttctgcagcaggcttgaatttcttcccggaaaytgagtttttcttttctaccatatggtcagctgcaaattttccaaacatttatgctctgctccccttttacacataagttccagtttaagattaactttgtgaacacatgtaactgtactatttcagataaaaccaggtcatctcttgaatgctttgctgcttagaatttttt

SEQ ID NO: 355189 - DNA, 619 bp, Homo sapiens
aagttttcttaattttcattctagatgccacgacgtttatgagagatgcttctgttctataggttggttttgtgattatgtgactgcatgttatcatttaatatgtatttttctcacttttttgttctttattgtttttattcagcaattgaagttggcttgtcataggatatgttttctaattacacatgttcttcattgtatttatcccttaaataggattcttagcacttatgtcatttcctcctgccttaatttgggaggttcacatttgatatggtttggctgtatccccacaaaaatctcatcttgaattcccawgtgctgtgggagtgacacagtgggaggaaattgaatcatgggggcaggtttttttcatgctgttctcatgacagtgaatgagtctcacgagatctgacggttttaaaaatggaagtttccctgcacaattctcactctctttgcctgctaccatccatgtgagatgtgccttgcttctccttgccttccaccatgattatgaggtttccccagccatgtggaactgtaagtccattcaacctctttcttttgcaaattgtccagtctcaggtaggtctttatcagcaatgtgaaaatg

SEQ ID NO: 355190 - DNA, 602 bp, Homo sapiens
attaaaattataacttttcttaccaaaaatcattatgagagcaaaaagcaagccataaaagagtcttttttcccttaaaatatgaaaaagttttgcaaatcaatagtaaaagaatatcaaaatagaaaaaatgtgcaagataatttttcaggcacggcgtgaaacagtatctccaaatgaccaacaaacatttgaaaaggagcatcattttattagcaattacgttactgcaaattgaaagcaaattaacagaaactcatgattggattaatgcaaattaagagaaaaatgagatagtactaccgattcccagaatgaatactatttaaaggcctgacaataacaagtattggattgtgaggcaaatggattctcgaatgctgcttgtggggttataaatcaatagcgcaactttggaaagtaatttagtattttctagtaaaatgaattacacatgaatgcaaaattaataattccatttataggtatttgagagtgcttatgtttactgmaatatcacaacaatgttcaaggcagcattataaatagatggcaaataactggaaacagaccaaatgttcactgataatgaaatgatgaaa

SEQ ID NO: 355191 - DNA, 472 bp, Homo sapiens
acatattctccgtgaaagcagaacatgtccacaaatctctcagctgtttttgagtttcatttgcctgcttctttcaagttactacaatagcttgattatgggcaagatcttggatttgtacgaatctgatttgacaatgtgattgyttctgttagctctctctctatttgctcttctaattgaaaataagattttgttcttactttcaaatttaaatattaccaacagattttcaaaattgtgaggtcacatctcattcatgttgtcttgctttttatgaagctttttgatttggaaacacaaattcatttgctttttaaaatttgcttccacatcagggattctctttttttttaaatttattttaattcttggaattttttatttctttcaaaacccctataatacagattttggattggctgtatctttattattccttaccattcctacttcatttcattattaaatt

SEQ ID NO: 355192 - DNA, 472 bp, Homo sapiens
acatattctccgtgaaagcagaacatgtccacaaatctctcagctgtttttgagtttcatttgcctgcttctttcaagttactacaatagcttgattatgggcaagatcttggatttgtacgaatctgatttgacaatgtgattgtttctgttagctctctctctatttgctcttctaattgaaaataagattttgttcttactttcaaatttaaatattacyaacagattttcaaaattgtgaggtcacatctcattcatgttgtcttgctttttatgaagctttttgatttggaaacacaaattcatttgctttttaaaatttgcttccacatcagggattctctttttttttaaatttattttaattcttggaattttttatttctttcaaaacccctataatacagattttggattggctgtatctttattattccttaccattcctacttcatttcattattaaatt

SEQ ID NO: 355193 - DNA, 387 bp, Homo sapiens
aaaatgacacttccaaattatgtagataaaacattttttaaagaaatatttggccttagcaatatcccaggattttatgaatctgtttaatagtaaagaatcatgatatgatatacagtaacaggctgtggatgaacagtcagaccgtagactctttcaaaaattacaatttataggtgaaagggaaatgaactrtgagagtaccccagaagatccatgtgttttcaaaggcagcagagcgtaagctgaacgctgcagaaaataaaggaggcatatggaaggagagtgttctcacctatccacctgtaaatgaagatggtgctgaataaatatgcgttgtcattagcacacataaaaatgaaatagggattttgagcatgtttatgg

SEQ ID NO: 355194 - DNA, 414 bp, Homo sapiens
acaaatttaccatattttctttcatgtgaaaaacatttaaattattgaaacaaaagagaaaattttagtattacgaagataaaaaatataggtttcaaatgtaaactcattagttttcytgaaagtgataactatatacatttttctgaaaattgataactattgtttctgaatttaaatatagattcataagaactagttgacttcaacccaatgcacatggtatccaaaaagttgaaaaaaatcatcttaaagattttttcatctagtatgaaatatgcttttgattaattgaaggcttagattatttatttagtatctttgtcatataaactgaaacatatttctatagacaaagaagtatagaaatgacagtatgtcaaatgttagatacttgccaaattatgataggta

SEQ ID NO: 355195 - DNA, 580 bp, Homo sapiens
tataagacattttaatttgacatttattaatttgagtcattagtcattaataaattgtatattatttatcccctaatcttaattgtcattttaaacaaattcttgaattaggtttataaatcctgagttattgagccttcacagatactatctcgtaattattttacctgggttgattaagatgaatgagctaagagaaasaaattgaattttagagacgtatattgctaataactactactacctgagcacacaatatattataatgagagtcatttttccttctatttgtgtgtttctagcttcattctgagccttcaccattaaatataggaattagacactgcaacctcctgtaataagaaaagaagaataattttctagatcctaatcatcttgagatgagatattttcaaatggaaatttttaagtttacttggagaatcttcacaaaatagtgaactttaatgtgttaaaaaacaactaggattatggccgggtgcagtggctcacacctgtaatcccagcactttggaaggctgaggtgggcggatcacttcagggcagaaatttgagacca

SEQ ID NO: 355196 - DNA, 582 bp, Homo sapiens
atatgtattgtttaagccactaaatttgtagtgaattgtcacatcgtcaatgggaaactaatgcgatgagacacaaaatcataattcaagctctactgctcattgtgtacttgctattatctgattcacaaacacaaataactacctacgtacwatatatatatatatatttatacatgcataaatatctttgaaagttaaaaatatatatgcacaacagttttaaattttataatggaaatgataatcagaagactgggtctaagcagggtctgaagagtaaaaaaaaaaaaatgcataagcaggtgttaccaattcctctactagatctcccttttgtttttcttcattccctgagttcacatctatggtctctgttaaaattaatggaacaggaagcaacaggaacctgttttgtaaatatatttgcacattctgctgatattagaagtgaaagacttcttctctacagccctacacagaaatagctctaaaagacaatggagaagggaactcatccacatggacagatccttgcatggtaccatttgttgttctattccatgaaaggcaagaaagcca

SEQ ID NO: 355197 - DNA, 572 bp, Homo sapiens
gggagtttgttttcttagcaatggctttacttacttctctggttttacacacagtattgtctyggccgactggaattattttacaagaaggagagtgtgatggcaatggattcacactcacagaagtaactagtctattatgttcaaaaacccagaaaaaaatagccctgggagagtggcacaacccactgaatgctgagttagagtgcctgcaatgttgggatgtcattctacccaatgtggcaactgccataaatcagcaactgatataaattatctgtttcataatcagaatgcatagggctgggaaccaagagttgaaggtgatatagtcagttatgtaattacccctaaatatgtagcttgtaaaatattttaacttcacaattttagaggtatttggttttgtgatctttgagcccaaaatcaaatgctttcactaaagaatgtagtcagaattttatttaattacaggtctgtgactgtcctctgatcaaggtgggtttctcttgttgttgaacaaatgaagagaaagagaatatgttctagccaactagattgttcccaatcac

SEQ ID NO: 355198 - DNA, 559 bp, Homo sapiens
tctgagaaatgcattattaggtgatttcatcattgtgcaaatcatggcagctgcggcctgtctggtgcagctcctgtgaagatgccgactgcagtggggaaggtgcagccagggttgtgtrctctgtgggactgctgggagctgaggacaagcgggagtcctgccctccactgagttggcaggatggaagcccctcgcttctggaggcagccatagctgcttagccatggctccagatacaggcatctctgtgctcccaggagcccgggaagccccatgcccctccattcttgaaagtgcctgctcccattcctgctgcctgctccaggacagagcaaagttgtggctgagcctgggcactgttgcaacatggccttgtgtgcacactcagggctacgctgacatgccagcccccggctgcctcaaccccatctggacttctggtgctgacaagcacattagggagaccaagggggcatgagagtgactcggggaggtcctgcaggcagaccttggcacaaacagtctaggtgccatggcagacaggttcctgtatgga

SEQ ID NO: 355199 - DNA, 559 bp, Homo sapiens
tctgagaaatgcattattaggtgatttcatcattgtgcaaatcatggcagctgcggcctgtctggtgcagctcctgtgaagatgccgactgcagtggggaaggtgcagccagggttgtgtgctctgtgggactgctgggagctgaggacaagcgggagtcctgccctccactgagttggcaggatggaagcccctcgcttctggaggcagccatagctgcttagccatggctccagatacaggcatctctgtgctcccaggagcccgggaagccccatgcccctccattcttgaaagtgcctgctcccattcctgctgcctgctccaggacagagcaaagttgtggctgagcctgggcactgttgcaacatggccttgtgtgcacactcagggctacgctgacatgccagccccyggctgcctcaaccccatctggacttctggtgctgacaagcacattagggagaccaagggggcatgagagtgactcggggaggtcctgcaggcagaccttggcacaaacagtctaggtgccatggcagacaggttcctgtatgga

SEQ ID NO: 355200 - DNA, 637 bp, Homo sapiens
tttgcaaataagttatataacttctttgctataaaattacaatatttcatttgggaaaaccagaagtgcaaggagaaaactgggcatggtatatatttatttaaatttatctgagttaaaaggctacagtaaagtgaaataggctgagaaatacatcatcatgccagaaggaagagatcctatagaagattaacttttcaaaaattattgattaaataaagaatttagtcatctaaatgaagtggtgtttcaactttgcccacacttmaacttagttcatataattcaaaaatggaaaacaaccaaaattcccactaacataccaatggataaataaattttgataagctacacaaataaatattaaataaaaatactttatatgtatatgcatatgtatatgtatatgtgttcacatgacaccatgaatgaaattcaaaaatgttattttgagtgatgggggccacaaataaaatagtacatgtttgatgattctatttaattattttcacaaagggtcataacaaattgatacttgtggaagtcagaagagtggttatactgggccaggagctatagactaataatgtgtgccaggaaacctaatgggatgctggaaaatttttttggtaaggat

SEQ ID NO: 355201 - DNA, 609 bp, Homo sapiens
ttgtttttttccagaatctttattgatttatctattatacttcagtctatgattcatttcaaattttctatgtacagtgctgggcattttttccatgtgggtatataattgcttcagcaacatttattgggaaaaattttttaacttttatttccacattgtattggggttttggtcataaaacaaaagatcattttttgtggggttatttctgaatactactattctgtttcattgatcgaccttgatagccttattctaatattatactgccttaatyacagtagctttaaagtaaatcttgaaatctggaattctaatttttctgaagttctcctattccacattgcaaacaacttgttaattttaacaaagacatttatagtataattatatagtaattttatagttttctcaagatttaattgaatctagacatcaatttgggtaaattgatttcttcacaatgttaattcttccaatccatctccagttaattacatcctcttcaattttttccaaggttttatagttttcagtgtacagatcatttaatttatttaaaagattttgttttatgattattataaaatgtactatgacatttta

SEQ ID NO: 355202 - DNA, 588 bp, Homo sapiens
acatcacaataagttaaaatactacaaaggaactgcaagtcaatcaatttatcaaaaccaaactgagcgaacactatgcatagataaggccaaagttactaatttgcttataggtagcactttgcagctttttccaagtacatatttgaaaatgtagtgagaatctacagagaaaaaaaatagtttaatctacaacccaatgatcagatagtaaaacatttgtcattacatatcaggtggcaatggctaactaaagataaacttggcatcatgcaccaaaaatgaccacagtaacattttgaaaaattatgatcatatgcacatttgaaaagattaattttctatttcacctaatcaactgaattggataaaggcaaaataacaagtattttattaatgcaatgcagaaattaggtttttggtatattaataatttgcttgtgtattggtatatataaaaatcactgaygggatctaggagtatttcaagctcacactggactactgaactttagaatactgtcctaaggaaataggtctgggcagaacttatttgagatagattttaaaactatttaaaagcaatac

SEQ ID NO: 355203 - DNA, 483 bp, Homo sapiens
tatgaacaaaaacaaatccattggattgcttttaaaaaatatatacacagtctctcccctacaacttggtatgctaagtacggaagatgcttgccagcattgttgagaaatgcagttccaaattagtaggctaataacatttatgtcaatatcaactctaaatggtgttgtacagtcagtttaaataaattatgattttaccctrcatatgtctgcaatagtaaatcattctttctactcttttgaactaagtacagtaaaattctttcacaaaataatctgagatcaagataaccaaaaaaggaaatattttcagtgaaaaaaagttaatttttcccaaggagtgtgtaaaaaataaatgtcttttaggatattgatgagaagaggaacatgccaatatccttgctttattaacagatttaaaatttacagtgagtcctcaattgacctcaatggaccaatggcttggtacagaaggaatca

SEQ ID NO: 355204 - DNA, 488 bp, Homo sapiens
gatcttctacaccaattctggtgatattctctcctcctactcccatttaaaggtgccagtctttactgagcatgtcctttgtaccaggccctgtataagtgggtttgaggacacaagggagaaaaacaccgaggagtgtgacaaacacctgctgccctgggcagtctttctaaaccagcatgtctttcccccagttagaatccttcagtggtacaccccaggtatttaggctaaagtccacaatgcttagtacaaagttaaacgctttcagccaggtctcaactagttttyctaggtttgttatctagaaatgtgttccagccatttggagctacctgtaattcttagaatgagtcattctgtgccgtatctcaatgcttttgcacatcctgtgcttgcctccaactactattcatttaaaatcaaatggaagccccagttcccacagaaggcctcccgtgacatcaacaaggacaggccacttatgt

SEQ ID NO: 355205 - DNA, 611 bp, Homo sapiens
ttccatagcttcctttcattcatccattaagcaaatatttctcaagcaccgttttagaggttgggactacaatactgaacataacaggcaagagaccctgccctcatagtgcttatacactgttccatattttttccaaatcccagcttctgttgtttcttcattacaccccctacacctcagggttgagcaagtctttcatagaaataaagggttgtgggactgaaggggtacatgggggaatccttgttaagtttggctgtgttttgtttttttcagttttgcccaccttagccaaaaaaacaaaaacacccaaagcyagcatggcctcaaatgtattatttatggtttgtgggaagaggaaggagaactcatctgggatggcacaatctgtttgtagttccccagaaagaaagcatggggtattgctacttaaaacaagccagcaaaagcaattctgaggtgagcaccccccaactccctgaaagaaatgcacacacacacaaaaacaagtatgagtaccaggtcctcagtacacatttctgcaagtataatctgattatgcttaaagagcagcaattttttaagtcaaaagtttgattatgattagc

SEQ ID NO: 355206 - DNA, 611 bp, Homo sapiens
ttccatagcttcctttcattcatccattaagcaaatatttctcaagcaccgttttagaggttgggactacaatactgaacataacaggcaagagaccctgccctcatagtgcttatacactgttccatattttttccaaatcccagcttctgttgtttcttcattacaccccctacacctcagggttgagcaagtctttcatagaaataaagggttgtgggactgaaggggtacatgggggaatccttgttaagtttggctgtgttttgtttttttcagttttgcccaccttagccaaaaaaacaaaaacacccaaagctarcatggcctcaaatgtattatttatggtttgtgggaagaggaaggagaactcatctgggatggcacaatctgtttgtagttccccagaaagaaagcatggggtattgctacttaaaacaagccagcaaaagcaattctgaggtgagcaccccccaactccctgaaagaaatgcacacacacacaaaaacaagtatgagtaccaggtcctcagtacacatttctgcaagtataatctgattatgcttaaagagcagcaattttttaagtcaaaagtttgattatgattagc

SEQ ID NO: 355207 - DNA, 611 bp, Homo sapiens
ttccatagcttcctttcattcatccattaagcaaatatttctcaagcaccgttttagaggttgggactacaatactgaacataacaggcaagagaccctgccctcatagtgcttatacactgttccatattttttccaaatcccagcttctgttgtttcttcattacaccccctacacctcagggttgagcaagtctttcatagaaataaagggttgtgggactgaaggggtacatgggggaatccttgttaagtttggctgtgttttgtttttttcagttttgcccaccttagccaaaaaaacaaaaacacccaaagctagcatggcctcaaatgtattatttatggtttgtgggaagaggaaggagaactcatctgggatggcacaatctgtttgtagttccccagaaagaaagcatggggtattgctacttaaaacaagccagcaaaagcaattctgaggtgagcaccccccaactccctgaaagaaatgcacacacacacaaaaacaagtatgagtaccaggtcctcagtayacatttctgcaagtataatctgattatgcttaaagagcagcaattttttaagtcaaaagtttgattatgattagc

SEQ ID NO: 355208 - DNA, 591 bp, Homo sapiens
tgttgtcaaatgtagactgcatgtgctgttgcctcctgcagaaactaaagaacatcagaaaattcttcactcggccccagaagtccatgtgatcagtcagcaaggaacggaatactggaacataagacaaggggattggtagcccaaattccaaagagccgaatgaagtggaaagaatggccacaaatggcttcccaagcttctcagcaatcaggaaaggacagtagtcaaaagtttcaactatcaccatgtcgaagttctcattctttaaggaatccatgatatcctttctatttaaaaaatgactgcactgcaacgccaagtattctagaacatttaataagttttcaaattttcctctgtaagaaaaaaatgataataaatattcatgggaagtgttaaatttacagtacataaaagtatcttgagatacaaagaaaatatcccaggaaagcaacaacctttctagcagtcacccacaaattcaaccagtttcccacaaataccctctgcmataattatcctggcttaaatgtttctactccctagagtgtacccttctcccttccccttttctctccttatccaaat

SEQ ID NO: 355209 - DNA, 547 bp, Homo sapiens
tagagtgactaacacatagtgaatatttaaaaatgtttgctgaaaaaaatgactagatttggaacaagattctgtgtggtactgtcgctgctatatggttattgcatggaagctttgaatccatttattaacttgtttgctaaacaaacaattgttgatctcctgctgtgggcctaggtatggagttctagggataagaataaaacagacaaaaataaaacaaaagctgaacrtctacaactttgagttagtatgaccctttgaatttgtgaagattattgatattgatatgatatttcttgtaatatgatacagttcttccaatattgcagcaacatgatgattaaatacaaaaaaccccaaccccaaacaatagctttttggactcacaacccaagtatgtgcatttctttcatttccttgtctccttgcttgactcccattaccctattttttttttaagatggagtctcactctgtcacccagagtggagggcagtggtgcaatcttggctcactacaatctccgccttccagcttcaagcta

SEQ ID NO: 355210 - DNA, 547 bp, Homo sapiens
tagagtgactaacacatagtgaatatttaaaaatgtttgctgaaaaaaatgactagatttggaacaagattctgtgtggtactgtcgctgctatatggttattgcatggaagctttgaatccatttattaacttgtttgctaaacaaacaattgttgatctcctgctgtgggcctaggtatggagttctagggataagaataaaacagacaaaaataaaacaaaagctgaacatctacaaytttgagttagtatgaccctttgaatttgtgaagattattgatattgatatgatatttcttgtaatatgatacagttcttccaatattgcagcaacatgatgattaaatacaaaaaaccccaaccccaaacaatagctttttggactcacaacccaagtatgtgcatttctttcatttccttgtctccttgcttgactcccattaccctattttttttttaagatggagtctcactctgtcacccagagtggagggcagtggtgcaatcttggctcactacaatctccgccttccagcttcaagcta

SEQ ID NO: 355211 - DNA, 470 bp, Homo sapiens
gttagaactggaagaacctgagtgatctgtctcccagcccaatttcttcccgtaccagtgtggagatggagagtgaaagtgacccatcctgggctgcccagccagcggagttaacacaagaacctggggtttcatcctgccagttgaggttgcattgtatatgtttgttttccattctttttttttttttttttttttttttttttgagacagggtctagctctgtcaggctggacggaatatagtggcatgatcttggcttgctgcaacctctgcctcttgggcttaagtgtcctcccatctcagccttcygagtagctgggactacaggtgcacaccaccatgtatttttttgtattttttgtagagatggggtttcgccgtgttgcccatgctggcctcaaatgcctcagcctcccaaagtgttgggattacaggtgtgagccactgcacctggcctgctttccatt

SEQ ID NO: 355212 - DNA, 546 bp, Homo sapiens
  misc_feature (1)...(546): n = A,T,C or G
ttatttctattcattttgtagacaattgaatgtttaacaataatttgatttttataaaaaatagtcatctcatgccattgattctaattttctcaggcaaaccatttcatttttactattttgwgtgccaacactcccttctacagcttcaaatactctagatactgttatcacctgttgtcatcataatgaaataaaagtacaagtgagggttgtgttggtatttcagacaagatctggtgtgttgatggtggtatggccataaactgcgttgggatttcagagtggctatcagacaaacttgttctgactttgtttaaatctctgtgactccaccagttacctagacagaaatatgcctatctatcatgaacctccagaccttaaggggtgattatgtgattgattggtgatcaggggctttccatgactcagtaaagagactggtgtgccatttggaagtctataaatgattcctgtggtgattaactgattagttcctcatggaggctgattcaccnnnnnnnnnnnnnnnnnnnnnnnnnn

SEQ ID NO: 355213 - DNA, 546 bp, Homo sapiens
  misc_feature (1)...(546): n = A,T,C or G
ttatttctattcattttgtagacaattgaatgtttaacaataatttgatttttataaaaaatagtcatctcatgccattgattctaattttctcaggcaaaccatttcatttttactattttgtgtgccaacactcccttctacagcttcaaatactctagatactgttatcacctgttgtcatcataatgaaataaaagtacaagtgagggttgtgttggtatttcagacaagatctggtgtgttgatggtggtatggccataaactgcgttgggatttcagagtggctatcagacaaacttgttctgactttgtttaaatctctstgactccaccagttacctagacagaaatatgcctatctatcatgaacctccagaccttaaggggtgattatgtgattgattggtgatcaggggctttccatgactcagtaaagagactggtgtgccatttggaagtctataaatgattcctgtggtgattaactgattagttcctcatggaggctgattcaccnnnnnnnnnnnnnnnnnnnnnnnnnn

SEQ ID NO: 355214 - DNA, 546 bp, Homo sapiens
  misc_feature (1)...(546): n = A,T,C or G
ttatttctattcattttgtagacaattgaatgtttaacaataatttgatttttataaaaaatagtcatctcatgccattgattctaattttctcaggcaaaccatttcatttttactattttgtgtgccaacactcccttctacagcttcaaatactctagatactgttatcacctgttgtcatcataatgaaataaaagtacaagtgagggttgtgttggtatttcagacaagatctggtgtgttgatggtggtatggccataaactgcgttgggatttcagagtggctatcagacaaacttgttctgactttgtttaaatctctgtgactccaccagttacctagacagaaatatgcctatctatcatgaacctccagaccttaagkggtgattatgtgattgattggtgatcaggggctttccatgactcagtaaagagactggtgtgccatttggaagtctataaatgattcctgtggtgattaactgattagttcctcatggaggctgattcaccnnnnnnnnnnnnnnnnnnnnnnnnnn

SEQ ID NO: 355215 - DNA, 546 bp, Homo sapiens
  misc_feature (1)...(546): n = A,T,C or G
ttatttctattcattttgtagacaattgaatgtttaacaataatttgatttttataaaaaatagtcatctcatgccattgattctaattttctcaggcaaaccatttcatttttactattttgtgtgccaacactcccttctacagcttcaaatactctagatactgttatcacctgttgtcatcataatgaaataaaagtacaagtgagggttgtgttggtatttcagacaagatctggtgtgttgatggtggtatggccataaactgcgttgggatttcagagtggctatcagacaaacttgttctgactttgtttaaatctctgtgactccaccagttacctagacagaaatatgcctatctatcatgaacctccagaccttaaggggtgattatgtgattgattggtgatcaggggctttccatgactcagtaaagagactggtgtgccatttggaagtctataaatgattcctgtggtgattaactgatwagttcctcatggaggctgattcaccnnnnnnnnnnnnnnnnnnnnnnnnnn

SEQ ID NO: 355216 - DNA, 571 bp, Homo sapiens
gagtttgatacattgtatttccattttcatttgttttaagaaatgttttgattttcacctgaatttatccattgtcccaatgatcattcaggagcatattttaaattttcatgtatttgtataatttccaaagttcttcttgctattgatttcttgttttatttcattgttatctgagaagatacttgatatgttttttaaaaattttatgagacatgttttctgtcttaacatatggtctatcctggagaatgttccacgtgctggttagaagaatgtgtattctgctgttgttggagaaaatgttctgttaatgtctgttagatccatttggtctaaaactcagtttaaatccagtgggtctttgttgattctctgtctagatgatctgtctaatgctkagagtagagtgttgaaatcccccattattattgtattggagtctatctctctttttagttctgataatatttgctttataaatcagggtgctacagtgttgggtgcatatatttagaactgttatatccttttgctggattgatccctttatcattatgtaatgaccttg

SEQ ID NO: 355217 - DNA, 518 bp, Homo sapiens
tttttttctaacatacatcatttgatttggtcccgtggggtccctgatgtgaaagatatgtcaacagtccattcgttctgggggcattgaaagtgtccatttctctgacaaattgtgcttgcttttscctctgagcagccgcttcctggaagaaagcaccttctgccagagccacattcactcaggcccagctgatgcatggctgtcctcaggctggcctctagaggcacacctcggcaccagggctgagccccagtggctaaacccacacgtgttccctcatgcacggcacaggctgaatctgtcacctggaaatgctccagcagcacttgaggttttctatactatgtgcgtgtgttagtttcctcttactgacataacaaatgaccacagacttgctggtttcaaacaatagaaatttattgttctgcggttcattagctcaaaagtccaaagtcaattttactcggctaaggtcaaggtattggcagggctagttcctccctttctgggttctg

SEQ ID NO: 355218 - DNA, 500 bp, Homo sapiens
gtaggctagacagtcacacaaagggtaagaacataggttattaaagatgagagctacaggcatcctttcagctctggaaaaagtattactcttaaaaatgagaatagaaattcttggcttccgctaagtgaaacaattcttatcatggatagcctctagaggtagcatagacctcaccttttctaacagtatttccctctggatagatagcagtgttrgtaagaactttgaaggtcagcttgtgtatatgaatctcaagataaattgctctgatgaatacttgggtatatatgtatgcatctcactctcacctatcttccatcgcctgccatcttccacttcatggcataacatgattgacataatgaaggcttgtcagtttattgccctccctgtgcagccaaatgcctaatacgaggccaccaaaagacggtggctatcatggaggctcaaaagtggctaattttatattgtcattcgcaaggaatgatgcaaggatg

SEQ ID NO: 355219 - DNA, 526 bp, Homo sapiens
agtagcattaaacacaatgctctatcattcctgctttcaaaaagaggrcttctaggactcacctcaatcaggtgctcaaaagagagggtttccatcttgttggtggttggagtcaggtgaagatgtttctggtcaggccatctcttagccatgcctatcaactcagaatgacatgagaactccctcccagctgctcctgcagatccaaatgccccctaagatagccctgattaggaacaagagaagcagaaggagcaaaggccatgagatcggagtcccaaaccttttccatttataagcatctctgtggactgcatcagctgtctggctgccccattctttggcacctcattatgtggaatcagaagacacagaaccccagtggataattgctttgagataacatctgttggcaatgactttggttcaggcagagcttagcttctacattattagtctttcttcttagtacatttttaggctacaaacaaatttcccttgacagtcaaacaaaattgaggaacag

SEQ ID NO: 355220 - DNA, 526 bp, Homo sapiens
agtagcattaaacacaatgctctatcattcctgctttcaaaaagaggacttctaggactcacctcaatcaggtgctcaaaagagagggtttccatcttgttggtggttggagtcaggtgaagatgtttctggtcaggccatctcttagccatgcctatcaactcagaatgacatgagaactccctcccagctgctcctgcagatccaaatgccccctaagatagccctgattaggaacaagagaagcagaaggagcaaaggccatgagatcggagtcccaaaccttttccatttataagcatctctgtggactgcatcagctgtctggctgccccattctttggcacctcattatgtggaatcagaagacacagaaccccagtggataattgctttgagataacatctgttggcaatgactttggttcaggmagagcttagcttctacattattagtctttcttcttagtacatttttaggctacaaacaaatttcccttgacagtcaaacaaaattgaggaacag

SEQ ID NO: 355221 - DNA, 662 bp, Homo sapiens
ctttgagccattcttgttgttacatattcaccagacataaaggtgcccggcccatgtcaaacagtgtagtttgaatctgccgagttgcatggctgtgtcttcccagggaaytgatgtcatcttctctgcttaccaaaactgcacatcctctttttttcctccccatgctatcttggaagcagattggattaacctgacaggatttattcttaatgaagtctttttggttattatctagtatctttttttcttcaaagagctgaaaatgtgatttttcgatgagtgaaacccagatctcttgataaaagagaagattctcctaaccaaatcttgccttttactagtcctggatggtcctctctttgatgttgatgttgtatgtctcacagtagagggagtgtggtcactatgggaaccatgaagcacgtgtccttaagagttttcagttgtctaatttctagtaccatgtcttttgcaaaataaccacaaaataattgcaccaatttcaataattgcaccatttaagatgggctcagcatgcttcatgagatgaacaacaaaacataacacacacacatacaggcaagataagtgtgtgtgtagtgtgtaatgaacattttagcaattaccttgcaaaatctgtctcttatggattgactgca

SEQ ID NO: 355222 - DNA, 662 bp, Homo sapiens
ctttgagccattcttgttgttacatattcaccagacataaaggtgcccggcccatgtcaaacagtgtagtttgaatctgccgagttgcatggctgtgtcttcccagggaactgatgtcatcttctctgcttaccaaaactgcacatcctctttttttcctccccatgctatcttggaagcagattggattaacctkacaggatttattcttaatgaagtctttttggttattatctagtatctttttttcttcaaagagctgaaaatgtgatttttcgatgagtgaaacccagatctcttgataaaagagaagattctcctaaccaaatcttgccttttactagtcctggatggtcctctctttgatgttgatgttgtatgtctcacagtagagggagtgtggtcactatgggaaccatgaagcacgtgtccttaagagttttcagttgtctaatttctagtaccatgtcttttgcaaaataaccacaaaataattgcaccaatttcaataattgcaccatttaagatgggctcagcatgcttcatgagatgaacaacaaaacataacacacacacatacaggcaagataagtgtgtgtgtagtgtgtaatgaacattttagcaattaccttgcaaaatctgtctcttatggattgactgca

SEQ ID NO: 355223 - DNA, 586 bp, Homo sapiens
gacctttacaaacactaagcaatatcccctacatgagtggctgatagttttatatacaggagttttgattaattggtgtcaagaactgtggaaggtctgagattttacccccttgcaagctaacaaattagcctgtcagtrtttcatggatgctggcacaagactggagactccggagtgagaaacaaaaggctttactatccacagcattagcaggggccagaatatcagctatttcttgtgccttggtgatgcaaacaggaccaagtgacacctgcataggcagtgggttgtgttataggagacaacctctgaccttatgaaaccagaatcttttatactgggcaaagcatacctgtcctattatctggagagcaacactgtctcttccaaggctactctccaaacaaagatctttgagaagatactctggaacaaggacaatcagtgtctctgcttataagatacacagaaatgccagccatgcataaagaattgtaaaacaggaagcacatggaatgttaataaaagtgtggataaagatgaaatctgagggagatggcgaactttataaaattccccagac

SEQ ID NO: 355224 - DNA, 586 bp, Homo sapiens
gacctttacaaacactaagcaatatcccctacatgagtggctgatagttttatatacaggagttttgattaattggtgtcaagaactgtggaaggtctgagattttacccccttgcaagctaacaaattagcctgtcagtatttcatggatgctggcacaagactggagactccggrgtgagaaacaaaaggctttactatccacagcattagcaggggccagaatatcagctatttcttgtgccttggtgatgcaaacaggaccaagtgacacctgcataggcagtgggttgtgttataggagacaacctctgaccttatgaaaccagaatcttttatactgggcaaagcatacctgtcctattatctggagagcaacactgtctcttccaaggctactctccaaacaaagatctttgagaagatactctggaacaaggacaatcagtgtctctgcttataagatacacagaaatgccagccatgcataaagaattgtaaaacaggaagcacatggaatgttaataaaagtgtggataaagatgaaatctgagggagatggcgaactttataaaattccccagac

SEQ ID NO: 355225 - DNA, 577 bp, Homo sapiens
tggaaattcagattcattagcttcaccacagatctacttctgtttaaccagttcttgagtctctgcagggtcagtaattacagatcaaattaattcattcagttctctcaagtgctagcgttagtcttagattctaagagcactgacctgagagacacattttctcattagaatctattcttctaattggcaaaaatatgttatacttatatagaatctttaaagtagatgagtgacacagtatgatttaaagaaacttaaagagtgaataacaaagtggctttaataaagaactccccagatcttgtactagcacttagctctttctccccaatcatctttggcttccattctgacatatactacttatgcaacatgcaactcccatcattcttgaccatatagttctgcttttgtctcaaaggatggggcctaactgcgtggttgattttcacccaagcaccatcaatcaaaaaggaccctgccatgcttttctgacatataatgtacacagagaagtscattactgaacagaaaatacctgcgaagtttgctttcttaactcctcagaagtgat

SEQ ID NO: 355226 - DNA, 615 bp, Homo sapiens
acttcttcatcagaatctccttttgtctttgtatattctagagtataagaaaggccattacagcccctggttcggacaccaacttttacacctacatgctcaggcttatctttaagaagttgttttatcttgtttactgctgaaggtgtcagggtgagggctgcccgggtgggctgcagcttcctcttgctcacagcccgggcagttgcccggactaaggaaggcgacattttcgccgtcccggcgccccggtgcctsgggccggaggttggctgcctcagcctctctccacggacacggcgggcgcattggtttcccaacttttaaattgtgcctctcattagcaaaatagtttgacaatgtctctctctaaaatgtgtgcatattccttttttcttcaaatcatatacatatagtattgttattctgtatattaaatactaagaaagtctaatttctaatttttgagataaaagtatgaacagaaattctattattttaaaattttctggagtatgtaacttcactttggaaactgtagtcctatatttctgatttgtaataattttcctgctctaatatttctttgggatacaactttttttctgtcatttg

SEQ ID NO: 355227 - DNA, 550 bp, Homo sapiens
cctattgtgctaccaaatactagatcktattcattctgactatttttgtacccattaatgaactccactttatcctcctattcctcctactctccccagcctccgataaccatcattctattctacctgcatgagttcaatttgcttaattttcagcccccacatatgagaatatgcaaaatttgtctatttctgccttagttcgtttaacatttttctgccgcattctacagtcaaaagtgaatcacagggccagcccagagtcactgggaggtgatgacaggaagacatggatatgggaggcctgattcactgggggctgtgtttggagaggagctgcatgaattagagtgtcactgttctgtattatcttattttgtttccagcggtcccccaaggttccctttaagtagcaagttcagatcataacaagatgaagctttcctcaggacttccagtgtgccaggcactgctctaaggattttctctctcacaagtattttatacatcacagtaaccaataaatatgagtttctacatatttatcccc

SEQ ID NO: 355228 - DNA, 584 bp, Homo sapiens
cacaacatattgtgatttaactgtccacatatcaatctcccctgccagttctctaaggaaccatgacttattcatgtgccacgtttagctcagtgcctttcacatcaaagctcaataagaattatttgaatgagtgcctgatcattggaaaaataatgatcaagtgtccacattgtctactagctaaaagaacaatgctccatgtcaaatggccttgaatattgcattgtcatcccctcaaatcctttgacttagtcccagtgaggcagatttttaaaaatatgtcaaatccagataaaataagacatggaagtagggtcagatattgcaaaacagaagagctcttgaaatccaygaacctacgtttgagtcccagatctgttgcttactagcaatgggtccttagataaaagcctaatttttaatttatagaatagtagttacaattattgcttcccaggatcatggtgaatattacatgtcaggttctcaacacagcttggctcattaagacactgtgattgatattcgtccctctttttttgtttctttggctgtcctgcatctaaccctccttcctacgt

SEQ ID NO: 355229 - DNA, 582 bp, Homo sapiens
aatgactcctcatcaaactaaaagctaacatccttctaataacctcaaaggcccatttccctattatctcatggacctcaaacctcatcttgttactgtcctccaagctcacacagctctatcatctgtggtctttttcaccatgctgattctttccttaaacatcagtttctcagggaggccttccttgactacctcatatgaagctgcaatcacctctctgcactactttctctgctttgattccagagcagtgactaccatgggatatataatacccacgtaaattaatatatatatatatatatatattttttaatatctgtctctccaataaagaaaggttaagctctgtgagagcatgagtttgtgtctgtcggtttcactgttatttccatagcacccagaaagtgcctggcagtttgcaggagtttgatgaacatttkttgactattaaatgaaagttcttcctggttcctttaaccaaccagtgataatgtcttcctcccttgagatgccgtcgcaggttgtctgtatgcctttctgaactgatagcacagcaaggagactggacctgattaa

SEQ ID NO: 355230 - DNA, 569 bp, Homo sapiens
tttgctttgttcagagagatacattgttctcccttgattaacaaacaattcagcttcaaatattgtttcagattttgagagatagcctcttcctctgacatagaattaagtgaattaatacagataatgccttaaaacagtgtctggtacatattgggaactaataaaagttagctaacagtagtaaataacaacaatatttattcaatacataaatgacaccaggcacggtggttcacacctgcaatctcagcactttgggaggctgaggcaggcagatcacttgtggccaggagtttgagaccagcctggcaaacatgatgaagccctgtctctaccaaaaaatayaaaaattagccaggcatagtggcacacacctgtagtcccagctacttgggaggctaaggcacaagaatcagttgaacctgggaggagaaggttgcagtgagccaagatcataccactgcacttcagcctgggcaaaagagtgagaccgtgtctcaaaaataatagtaataatagtacataaatgcataaaggaaacttgcatgtgatggtaaactgtgaca

SEQ ID NO: 355231 - DNA, 623 bp, Homo sapiens
cttgtgttaggacctaggcaatagagcttatcaactaatcaactataattttaatcattgtatcttggagttttcaaaaggaataatttggggtaagggaaaaattcaaattcttagttactgctgacatgaaggcagatacttctgaggatgattaatgtatttaatcaaccattcagtttttaaatagatattagtgggttttttttccccttttyagtgaatacttgctaggcactgacaacacagtggtgaatataatgacattctttctcctcatgtagcttccattctagtgggagagaatattacatgaaaaatcataattacaaatagtaattatacacactattatgcaaatagtaactatataagcactttaaaggagaggaacagagtctgagaaacaacactggggaggtgccagtttatcttggtaagtctggggactcttcaaagaagagggtgacaataagctgtggcatgaaggatgaaaatcattcacatgcctcacattttgtatggctcagaacacagttatccaaaatatggcaccttggaggtcactctctgatctcctctcacctttcttccctgaaacatggtcataaataattatttga

SEQ ID NO: 355232 - DNA, 577 bp, Homo sapiens
ttggatcttcatctctgaaggttcttgtttcacaaaaaattttggttaaataagtttgttatgcttttcttttgtcaatgtctttygttatggggaagtcagccatgaaccttgcaaattggggtaaggaaaagagatgactttttctttcttacatgttcttccctgtctggttagcatcactctttctggtcttcccaccatctccctggccattctgactcagccttcatggggaatccttcctcctctatctaatctctcaatgctaaagtttttcagggctaagttctaggccttattttcttctaattccaaagatcctcccaaggcatctataacccattcctatgacctcagatatcatctatgtgttaacaattctgtaatagactttaccagtccagacttcttttcttagatttgggtccatatgccaacttcctatgtgacttcctcacttgaatatacctcttaagaacctcaaatttactatgagcagcactaaaaggtgtttcactctcaactctttcctccagtgatcttcatcttcctaaatggaatcattcgttcagtt

SEQ ID NO: 355233 - DNA, 577 bp, Homo sapiens
ttggatcttcatctctgaaggttcttgtttcacaaaaaattttggttaaataagtttgttatgcttttcttttgtcaatgtctttcgttatggggaagtcagccatgaaccttgcaaattggggtaaggaaaagagatgactttttctttcttacatgttcttccctgtctggttagcatcactctttctggtcttcccaccatctccctggccattctgactcagccttcatggggaatccttcctcctctatctaatctctmaatgctaaagtttttcagggctaagttctaggccttattttcttctaattccaaagatcctcccaaggcatctataacccattcctatgacctcagatatcatctatgtgttaacaattctgtaatagactttaccagtccagacttcttttcttagatttgggtccatatgccaacttcctatgtgacttcctcacttgaatatacctcttaagaacctcaaatttactatgagcagcactaaaaggtgtttcactctcaactctttcctccagtgatcttcatcttcctaaatggaatcattcgttcagtt

SEQ ID NO: 355234 - DNA, 509 bp, Homo sapiens
tctcaactctttcctccagtgatcttcatcttcctaaatggaatcattcgttcagttgctgtatcagtaatcaggatgattacatgacacctgcttctstctcatctcccataattgataattgataataattgataattgagccctgtctaattgatagctaaaatgtatagtgaatttcacattttcccatctctcttgccatcaactctggcatagatactgcaagcctttttcttagtcttccatctattcttgttcccctccaattcattgtcctaaatgaaaattttttccaataactcttttagttcttctgttgttctaaagatcaagtctaaaatcatcacaatggtctctaagacccttcatgatctacccactgcttaatcctttagtctcatattatgtcaatcttcacattattctctatgcctcagccaaaatacgcttttttcagtttctaaaataattttttttaaaaagggcgttcctttcttaaagaattt

SEQ ID NO: 355235 - DNA, 545 bp, Homo sapiens
taagctcttgcattagactttaagtccaaatgatatcatcatggattttagaagaaaacatatattgcctttgatttttatttttaaggtgatagtaataaagaccaggcagtatgaacactgaatgcagtgaactttgcttgcacttgctggaataccctaaaccagcctattggttttcctatgtagtttctgtaattgtagagcagttggaacagggctccggcaagttaccagcttacctatgcctcagtaaatcactgagccttagtttcctgatttgtaaaacaggggacactcacagccttgtaggagggctaaatgagtatataaacaaaaattgccaggcacatagtaaaagtgctatttattaccagcttggattttacatctatatcactaagctagcattacaatagaaattaaaatctgaatatctgggttaagaaaaraaaacagatgatgaaaatgagggtaggaaaatcaaacaggtttgaataagccaagttaacttttatcttaatgtttaaatacaagatacttca

SEQ ID NO: 355236 - DNA, 569 bp, Homo sapiens
ggcatgtaactttatcccattatagctttaatttgcattttcttaataactaatgaaattgagtgccttatacatttattggccatcctaggtatcctgggttctgaagtatctaagtttttagttcatttttcactgttctcccaagcatagtctttcaattcctgttttacactttcacctgttgtggggttttgttttgtttgttttttgtttgtttttttggggtttttttttctttgtttgctgtgtcacccaggctagagtgcagtggcrtgatcttggctcactgcaaccacatcccaggctcaagcaatcctcccacctcagcctcccaagtagccaggatcacaggcgtgtaccaccatggccagctaattttttgtatttttagtagaggtggggtttccccatgttgtccaggctggtcttgaactcctgagttcacaggttctgcctgcctcagcatcccaaagtgctgggattgcaggcatgagccactgcacctggccacacttttgcctttttcttttcccctatgtaaacaaaagtccatcctaccctgctat

SEQ ID NO: 355237 - DNA, 493 bp, Homo sapiens
tgatgactatgtgcctaggtgatgatctttttgcaatgaattttctggattttctttgaacatcttatatttggatgtctagatctctagcaagatcagggatttttttctcaattattccctcaaataagttttccaagcttttagatttctcttctttctcaggaacaccaattattcttatgtttggtcatttaacgtaatcccagatttcttgtccatttttttattcttttttctttgccaaattgggttaattcaaaagcctcrttttcgaactctgaagttctttcttctactcatttgattctattcttgaaactttccagtgtgtcttgcatttctctaagtgtgtctttcattttcagaagcgtgattgtcttttctttgatatctatttcactggagactttttcatctatatcctgtatagttttttacatttatttaagttgatttcacctttttctggtgcctccttgagtagcttaag

SEQ ID NO: 355238 - DNA, 509 bp, Homo sapiens
ggtgctgaattctctctttccccttccatcctaccatgtgactgtgccagtcatggatatacctctcagctccaaattcacccctttgcmtgctctgtgataagggagggggcgcctcatagatatttttcctttgacagccaacacaataaacttttcagtagaggacactggagggacacaggaaaaggaaggggatttctcctcctggttctggtgtgctcctcttgtggtcctagttgagttcctgcagagtggctgacgttttgtgactatggccccacagctaacagcaagagtcacctgttcacgctggagtttagtgcactcccaagggcagctaatgagttccacaggcacctggctcatttcctgggcattttctgatgactcaaaagtatcccaccacacacacaggcagcttccaggaaattttctagaaaatctacctgttggctttccaggaagttaatgacttccacattttgccctcctcagcagcttcctgg

SEQ ID NO: 355239 - DNA, 607 bp, Homo sapiens
cgttctctctccctctcgctttctcccctctcacctcttttctggcttgccagacttgcttctccagttcctcaggtatcattttacctctaagggacaaagatttgagactttcagttatgtttagtaattaacagayaatgatactgctttataaaccatataaacttttccctccacccaccaggcttccagatcctgttcccattaccttccatctgtttccacaaagcaaacattctcagtgccaatcccaagaaaagaggctgccttcttcatagagtaatgacactgaattcaaagggacagtggggaagggggagacatgaaaacatagcacaaaaaaagcattgcttattatcaaaggtagatgaaagtatggctgagcacaatctttgggacattattgcataaaaaagtaatttaattgagctccttagcatagtggttgagaacattcactttggggtcagagaaaccaggattgaacgtcaagtattccagttacagctatggaatcttgaacaaataatatacactctccaagcctcaatttcctactctttaaagggatcatgccaataatgcctactccatctgctcgtgc

SEQ ID NO: 355240 - DNA, 607 bp, Homo sapiens
cgttctctctccctctcgctttctcccctctcacctcttttctggcttgccagacttgcttctccagttcctcaggtatcattttacctctaagggacaaagatttgagactttcagttatgtttagtaattaacagataatgatactgctttataaaccatataaacttttccctccacccaccaggcttccagatcctgttcccattaccttccatctgtttccacaaagcaaacattctcagtgccaatcccaagaaaagaggctgccttcttcatagagtaatgacactgaattcaaagggacagtggggaagggggagacatgaaaacatagcacaaaaaaagcattgcttattatcaaaggtagatgaaagtatggctgagcacaatctttgggacattattgcataaaaaagtaatttaattgagctccttagcatagtggttgagaacattcactttggggtcagagaaaccaggattkaacgtcaagtattccagttacagctatggaatcttgaacaaataatatacactctccaagcctcaatttcctactctttaaagggatcatgccaataatgcctactccatctgctcgtgc

SEQ ID NO: 355241 - DNA, 607 bp, Homo sapiens
cgttctctctccctctcgctttctcccctctcacctcttttctggcttgccagacttgcttctccagttcctcaggtatcattttacctctaagggacaaagatttgagactttcagttatgtttagtaattaacagataatgatactgctttataaaccatataaacttttccctccacccaccaggcttccagatcctgttcccattaccttccatctgtttccacaaagcaaacattctcagtgccaatcccaagaaaagaggctgccttcttcatagagtaatgacactgaattcaaagggacagtggggaagggggagacatgaaaacatagcacaaaaaaagcattgcttattatcaaaggtagatgaaagtatggctgagcacaatctttgggacattattgcataaaaaagtaatttaattgagctccttagcatagtggttgagaacattcactttggggtcagagaaaccaggattgaacrtcaagtattccagttacagctatggaatcttgaacaaataatatacactctccaagcctcaatttcctactctttaaagggatcatgccaataatgcctactccatctgctcgtgc

SEQ ID NO: 355242 - DNA, 544 bp, Homo sapiens
aatcacagttccatggccttacacatcagctattgcatgattttgagaaggcttatttcatagttaaaatccaggtctgatgaacaacccagcaccacgaagccagattgtgtcttctgccctggtaaaggccattattcccattaggattgctacatagttgagaaatcacaattgtattatattcattcatgtgcctatgtaggtttcagggaaagttgcatacattttgacaaggaaacacaggttcaagaagataaaaatggtggtgagaaaacacagatctgtatcaataaagaaaamcttatcctgggccacgaaaaggacaaagaacactagctggctttagtggcaggacaatgagccaaatgagcaattggcctcaaatgggagtgaatgaatgggtggaacagatggcactatagtgatcttccagcaacccagactgacacactttagctaataagccagcagccccatattgtactcaaagagacatgccatgctaaatcctcaggcctggggcatccaccatcagcagcta

SEQ ID NO: 355243 - DNA, 586 bp, Homo sapiens
gagacatagccaaaccatatcacctacctacctccaaaatgttttattggtcaaatgaataagagagaattgaaggcaaaaatgttttgaatcagaacctttaaggtgatttcatgccttaaaagtcttaaaatgtgcttcaaagagataagtgtaacatatgcagtttttgtttagtattttcaacctctaattccccattctgctaccattccctttcatttttgtaagactgatattccaagaaatatactggggaaaagcttgctcaatccattcaaagtggccagttctgactgtagagaagccattggcaagtgaggttttkgagctgctttctacagatgctaccattggacctctgcattagtctgttttcatgctgctggtaaagacatacctgagactgcgtgatttattaaaaaaaaaaaaaaaagaagaagtttaatggaattacagttccatgtggctggggaaccctcacaatcatggtagaaggcaaggaggagcaagtcgcatcttaaatggatggcagcaggcaaaaagagagactgtgcagagaaactctcctttttaaaactatcag

SEQ ID NO: 355244 - DNA, 520 bp, Homo sapiens
tttagaaatataaattaattctaaaaaataagaataaaacatatagtagcccttattttgtttggttccctttctgtttactttagattactcttaaaaataataatttgtattttggtggaaaatattttaaaaggttaatattataaaaaatatacagcaatatttataagaacttttatctttattacatagtcctaagtcaggctgctatttcttatgtgaagagaaatgtcagattagccgtttattttagtgaccttgggaaccaatggatacagctttatgattattctagtcatggcaattgggttttagtgtgaagacaattaaattcacaggacaaacatgtcatgatatgatgctggtactcatagtttttctcatggaaaagcatagtatagcttgataactaatgtgtgaccattctgcttctttatrtatatttctgtaaccttgaaattttatcgcaaaataaatgtacactcaacaggaaaatcttagtagttcttcaaattat

SEQ ID NO: 355245 - DNA, 546 bp, Homo sapiens
cggctaaagcaatccattgagtgggagataagcaaaatgcrtggctgtctgtgagcattctagctctacggtatcttgtttggatagttcttgccaagttactccccctaaattgaactggtttcccatatactaaatcagaaattaagtaacctagtttctaaatactaataatattaataaaataataaagtcattctttaaaaatgttattatgacaacttgatattagtgacttgggaaccatggaaagaaacttggttcaaatagacacaatattgggtttcttactacatttagaagtaagtatatttagtggagtacaaaggaactattgatggtattcactactgatcttgtcaaagtcaaagtttttaaaacttaaaaaagatgactcatacgaatatagaataaacatgtcaaaagtttatttaactcattaacaaggcttatgagtcaagagtttaaccaggtaagaagaatcagtaaaatacatggatacacatatttactcacttatttattaacttcaaagaattgatttac

SEQ ID NO: 355246 - DNA, 546 bp, Homo sapiens
cggctaaagcaatccattgagtgggagataagcaaaatgcgtggctgtctgtgagcattctagctctayggtatcttgtttggatagttcttgccaagttactccccctaaattgaactggtttcccatatactaaatcagaaattaagtaacctagtttctaaatactaataatattaataaaataataaagtcattctttaaaaatgttattatgacaacttgatattagtgacttgggaaccatggaaagaaacttggttcaaatagacacaatattgggtttcttactacatttagaagtaagtatatttagtggagtacaaaggaactattgatggtattcactactgatcttgtcaaagtcaaagtttttaaaacttaaaaaagatgactcatacgaatatagaataaacatgtcaaaagtttatttaactcattaacaaggcttatgagtcaagagtttaaccaggtaagaagaatcagtaaaatacatggatacacatatttactcacttatttattaacttcaaagaattgatttac

SEQ ID NO: 355247 - DNA, 625 bp, Homo sapiens
ctctgcactgaatgagaaaaggagctgtggtgagtgcccacatgctagttcaaaccactgttctattctctgtagttcccataatacttgcttatgctaaaccctgtcagctttcccaggcaggtgagatagaagccagactcttgagcagcactgaaaacatttggcatactacatgtgcaattaaactcctttgcttctcagggagaagctgagttggggatttgcttctgatggtatggtgctgtgccagaagtggaaattttggcaagatgaagtttttgytatttctactggtcccagtattgatgatttcacacttaactgaggtgcaggagtctcctaactaatttctggatttctcacaaaggggaccaatccatgtgttgttaaactggtatgttcatgggtgtaatatttcttctgctatcttgctgtcatcatgctaggaccattattttctacttgtgcaatattttttaatgaagaaataagacatagacccaaatttgaaaataatcttgttgaaaataattaatcaaactttaaaatcatcaattggtttagtaagaacaaagaaaacagtgtgcttatcttgaatgttttatgccattgaagtctatat

SEQ ID NO: 355248 - DNA, 532 bp, Homo sapiens
tctctcaggccttgtctgtataaatcaattatgatgaaacagttgataggttttccaatattgaaaattgaatttgaccaattgattttttcagacattcctgtctgattcagtaggagtgtgaatcccttagggtcagttcaggttcattcatggaaaaaacccagagattattcttagtccccaggcaaccttcagtgtgcagacaaactgaaggttgtttggttgttagattgaaagtggtcaatttggttgatcttcatccaatactgaatcaartgagaagcagactatgatgagaatgttgtctggcatagtgattctcaaagcatggtccccagactagcagcaacagcattccctagtaaaacattagacatgcaaatcctcaaacctgagtacagacataatgagtcaaaaactcctgaggtagggttcagccatctgttttttaacaaaccttttaggtgattctgatgcatattaagtaagagaaccactgatacagaaaaaatgccttatgaaagcatta

SEQ ID NO: 355249 - DNA, 602 bp, Homo sapiens
tcaacctttaggcttttgtagactccatgccttgaaaatggtcatggatcccctatcatttcttccccaaactatttcttctcctctctgctggccgtgaatctgcatytcttgttactctgattaataactgactaacatcttgggtttctaaattacctgaattgataggaggctctatttgctatcaccttgcgtaccaccaggcaaataacacacagcactaaaaataacacccttcaaagtcattgaataagtcagggaaaatatttatttcctcttctttctcttacctatcctcttgcttcctctttttttcccattctccttctttctcttcttcctccactcatctctcttgtagtctttacctccttctcctcctcctgtaactcctcttatttgttttattctctatccctatttatttattgatttaaaagacactccctgtccctttgcctcttcaatgggccctctatttattcctattaacaaactcattatttcatatctgttccaggctcccccagctctttggaacatacagccccagctgcacctcccccactgcagctggcatcatggcagcagccactcca

SEQ ID NO: 355250 - DNA, 562 bp, Homo sapiens
ccatgtgataggctccatcatgttatgacacagcaagaatgccatcaccagatgctggagccatgatcctggacttcccagaacgatgagataaataagcctctattctttataaattgcccagtccgtggtatttaatgataacaacagaaaataactaagacaccttgcttcagtcccctcctgagtttgcttttctcacccactcacagctccggcacattcagttccacccgctaactcccattcctctttgaatatgactggttgccttacttgaaagagcatatgtgtgtacacagcccctaaggtccaaaaaagctctcctaggccatgctacccagattccactataatctagtcacttaatacaatttttcttatcacttgaggaaggaacactttccctaatgcccaygaaggaacaaggattctgatagcttaagacttaaataacctagtgataaaggaaggcagtggaaaagcaaaaaaaaaataaaaaaataaaaaaaaaaggcaaagagacagaaggaatgaaacatgaaacatgagtaacgtgagg

SEQ ID NO: 355251 - DNA, 602 bp, Homo sapiens
ttaaaaatcttcttttgatcttatgaattatttcctcttgtctccatttcacttgaaaatcatcagtgcatccctggggaaagcaggattatgacctctgcttcttgaaactcagctggtgctccttactaccatgatccaagaagaagtctgccaaagagttgggaagccatatttcctgtttgggtttatgttctgaaggctgtggccacccgttaaaaaaaaaaaaaaatckgtcactaattgttccggttactattgctacatcacaaaattaactcgaaattgagtgtctcaaattaatatttttattattctcacaaagtctatgttctgaaaaaaatttagacagaaaactgcagaaacgacttgtccctaatccacggtatcaaaaggtatatgggaaaatttggaggttgtggatgacttaaaggttagaaactgaagtcatctgaaggtttcttcacacacatgtatggcacatgggctgggagacttgggctactgccaagagcatttacaagagtcttcaccacgtgatttgggtttctcttagcatggtggcttcggagtagttggaatgtttacatggtagctcaggt

SEQ ID NO: 355252 - DNA, 513 bp, Homo sapiens
aagtagttcacagcattcacttctatcaagttctgctgattaaaaaagcaaggtgtggttcaaaaattatctgatcctccaataatttttggcttcctctgtaagtcggcctatatgagaatacactagagattctggaaaggaagccatgtcatctttggcgaaaagacttccagaattggcccccgttgatttaaactgagccttccartgcggcgtgaaggatggaactggtgcatgtaatggcatgaaacctcatatattaaaatctaaatatcattcatagcagttgtaagctttatcagaaatcctagatacaggcatcttttcaagatctcaggcattgaaaggacctattgtaatattgcacactgtagaacaaacattgttgtcatcagcaggcttggatcttctgggagtctgcactctgtcaaggttcttggctgagatttaggtagagaaacatttactttaaaatgattaattattcccaactctattttgccaaggacc

SEQ ID NO: 355253 - DNA, 513 bp, Homo sapiens
aagtagttcacagcattcacttctatcaagttctgctgattaaaaaagcaaggtgtggttcaaaaattatctgatcctccaataatttttggcttcctctgtaagtcggcctatatgagaatacactagagattctggaaaggaagccatgtcatctttggcgaaaagacttccagaattggcccccgttgatttaaactgagccttccagtgcggcgtgaaggatggaactggtgcatgtaatggcatgaaasctcatatattaaaatctaaatatcattcatagcagttgtaagctttatcagaaatcctagatacaggcatcttttcaagatctcaggcattgaaaggacctattgtaatattgcacactgtagaacaaacattgttgtcatcagcaggcttggatcttctgggagtctgcactctgtcaaggttcttggctgagatttaggtagagaaacatttactttaaaatgattaattattcccaactctattttgccaaggacc

SEQ ID NO: 355254 - DNA, 530 bp, Homo sapiens
aaattgtttctcctgagggcagaccttgttaaaaagaacaagggtgctctgctatatttctaaatggttccttttcatctctctcccagaagcatgaggaaatttttctctgataattactgtgaggacctggtagaactcctgcaggtaaaacagacagaagtgtgagtatgtcccttataactaggtaaccctgaggtttttaattctcaaagttgtccacatcaagcctccagcaatttatcaattacagttcagatttccctacccaaactctggtttccgtgggggttactagtggtgaatttctgctctagtagttgtgattctctgtattcacctattggtctctctatttttgaaggtggcagtttgttctatgacctcgcttcttttacagatctaagaagagttgtttatttttgttgctgttgttgttgctgttttycagttttttttagctttttgctcattgggacagagtggcaacttccaagtttcttatatgccagataagaattctgaagctc

SEQ ID NO: 355255 - DNA, 585 bp, Homo sapiens
ctattcagattgtatatttcttcttgagtcagtaatagtttctatgtttcttggaacatgtccattttacctaggttatctaatttgtttgcatatagttgttgacagtattcctttatagtcctttttatttcagtaggaccagtagtaatatacccstcatcatttctaattttaggaattttacatttctctctctttttttgttagtcagaatagctaaaggtttgtcagttttgttgatttattcctaaactaacttttggttttattgattttctctactgttttctattctctattttgtttatttcaattctaatctctgttcctccttttttctgcttcttttaggtttagtttgctttgctttttctagtttcttagatggaaagtaaggctattgagttgagatctttctttttggattaaagactcaaaggaaacaatagataaagaactaaaggaaactaggaaaacaacttgtcaacaagtacagaatagaaataaaggacagaaattataacaaaggagccaaattgaaattctggaattgaaaagtgcaataactgaaataaatttact

SEQ ID NO: 355256 - DNA, 499 bp, Homo sapiens
catggaatgaaggagagaactaaagggagggggagtgaaattgaccttataagggaattgattggaaaaacagaagggctaagggagagaattaatcatgcctctggtttttaacttgggtggttgagaaccagtaatggcattatcatcagagaagcaatgaatagaaggaggaagagagggcagaggaggaagaagaggagtagaaacagaaagaaaagaataacaataatatttttattatagttaacatttattgagtacttacaaggtgccaagaacacttctaagcactttatttgaatttcccccaaatatcttggcatgtactcataggaggactagactgttttacatgaacatatttatgactgaacatgtgttcttcgcatttcacttatacatatatggaatttttacagaaatgtatggycatatttctcacatatacatagtgacatttaaacactttaggagcctgagtcgattgctttggcca

SEQ ID NO: 355257 - DNA, 545 bp, Homo sapiens
agagtttgtgattacatatagtacttggaggtgattgcctgctaaactctttgtaatttccacagaggtgtcttagaactaagaattgttccccttccccaatttcatactccccctatacatacaccaagagttttataaataartttatttcaatatgaaggttaaatttccaaatggtttcaaatggttcttcagtgcctgggattaatgtatgtggttaaagaggatggtcaagtttattctccttaaatagtaaattaaaactgttttagaaatattttactattttgattccaaatatcccaagaaatatagaatgaaatacataaaatatgttactctgctttcacatttattacctagcaatggtaaaatggcagtatataaatgtatgacaaattgataaagaaatctggtaactaaatcagcttcctgcatttcaaatatctgtgcaaaagagccagatggtgaactgaaaatctgcatgagtgctgacttttaatgaaaacacttacatgctcttcatggccacaattagtata

SEQ ID NO: 355258 - DNA, 592 bp, Homo sapiens
ctgccccatgattcaattacctcccactgggtcctgcccaccacactggaattattagagctakaattcaagatgagatttgggtggggacacagccaaaccatattatcagtactctttaaaactgtcattaaaaacaagtgaagtctgataaattgtcaaagccaagggaagcctaaggagacatgacagcaaaatgtaatggggtgtcctaaataggattctatgacagaaaaaaggacattaaaggaaaactaacaaaatctgagcaacatgtgtaccttaattgataattgataataatgccaatattggttaattaactgtgacaaaggtagcatactaatatatgtaagggtttaactatagacgaaactgcgtgtaaacgatataggaactttaggtacttcctttataatttttcagtaaatcaaaaactattctaaagtaaaaacttcattaaaaattgtcatctacagctaataacatcaatgatatacactgatatggtgtaacaataagtattatctttttaaaaccccatgattccagtataatcatgagaaacatcagaaaacctagattcagggat

SEQ ID NO: 355259 - DNA, 592 bp, Homo sapiens
ctgccccatgattcaattacctcccactgggtcctgcccaccacactggaattattagagctataattcaagatgagatttggstggggacacagccaaaccatattatcagtactctttaaaactgtcattaaaaacaagtgaagtctgataaattgtcaaagccaagggaagcctaaggagacatgacagcaaaatgtaatggggtgtcctaaataggattctatgacagaaaaaaggacattaaaggaaaactaacaaaatctgagcaacatgtgtaccttaattgataattgataataatgccaatattggttaattaactgtgacaaaggtagcatactaatatatgtaagggtttaactatagacgaaactgcgtgtaaacgatataggaactttaggtacttcctttataatttttcagtaaatcaaaaactattctaaagtaaaaacttcattaaaaattgtcatctacagctaataacatcaatgatatacactgatatggtgtaacaataagtattatctttttaaaaccccatgattccagtataatcatgagaaacatcagaaaacctagattcagggat

SEQ ID NO: 355260 - DNA, 562 bp, Homo sapiens
gatattctataggatacctaaccagtatccctcaagactatcaagctcacaataaaacaaggaaagaattaaaaaattcacagaccagtggacactggggacatactgatagatgcaggaggcagagaagggaacttgcacaagatcttgcctaaacrtgcccatggtgaaaaattccatcccttaacacatgcacagtaagggaaacaaatcaatgtggagtggctcagactaagggctcacatgctcaactgggagaatggagtggagcaaccaggaattcacaccttttgtaggagaggagctgggcctcttcagctcgtgtgtggtggcctggtatttaatctgtgaggtgggagccagttggcagaatccccctttttttggcggaggactttcttttaataaattctgctttcctcacctttcaatgtgtctatgtgcctaatttttcctggtcgtgagacaagaagccggattttagctgagctaaggagcaaaacaatcctgcattaatataacaattacatataatatgatatcctgtactgtatcctggaac

SEQ ID NO: 355261 - DNA, 587 bp, Homo sapiens
tacaaaattaatgacaaaagttagtcctttaataaataccataactattattttytgatatgaattttaatgtctgtcatagcttaaaaagaaatctataaggtcaagtatatacatattgaagatatttatggttgggccattttttattcccatctacagatattcaaatatttaggttttaatttggttggaaaaactcaatcttctgatatattaataaaaaattaatttatccaaattaatacaaacatgttggatgtttatttatacaaagattttaaaattattaaaacaactggaagatttttaaagttttttaaaaattatatttctatgtttttaagtatgcaaatatgagacttttttttaataggtgactcacttgaatgttatttggcaacaaaatctacacaattccaggcatgctttttgaaatatactgtccatagcatatgtgttttatcttgtttttaatttctttcacataaacacgttaaatggaaataataagttcttaaccttttgtgctgcacactatcaaaagcttttagtcttcacagtgagcttactactttggggatctc

SEQ ID NO: 355262 - DNA, 555 bp, Homo sapiens
tttatttttagcagttttaattacatacggtaattaaaatttttactgttagtaaccttaatttctattgaaaacctaaaaagtaagcaattaaacggtcacataccaacttatttattttataacataaaaatatatgcttgattattgtgtaatttttaaatgtgggtcaggacctatatacttacagacccaaatatattttgtcttttataaaatttaagaagccaaaagcaaataaacatgttcagcaatgaatgtttcaatattttatcaaatttggaaatgatctagatattcaatgactatcatttgatttaacttagcagatttctaagggtgtagttaycaaagagatttgggaaacctatttaagcaaacatgttacaaaatagttactgttaaaaagtgcatttataaactttcatcccacttatatatatttagttttctttttctcattaaaatgcaataagacattaaatgaagtaagttattaccctgctaatgatttttataacatgtgtaagaatattaaaattaaatacacgagta

SEQ ID NO: 355263 - DNA, 616 bp, Homo sapiens
tgattttttatagtattttcagacatcttaagataaataactgcagttcagtggttagcaagaacaggtgggctttaaatttctatcaaagaaacatttctgtttttttgaaatatttaacttgtaagacaaagacagttgcttttaattcccctaaaaactgtgtggcaacctgaatgatatctagatgataacccatacatccaacagtatcatctttaatttgctcttttataacagggagcagatttccagctaagatgcaaatcaaaagatttctctgttctgtactgaaagctgtttgcttttgatatgttttaataaattattttcttttattcagagtatgtggttccattatgcttaagggagaaggctaaacaaacaaaatagcatgttcctattgcattctaaatagaaaccaacgttttatatcaaaaatatacctacaagtgacttgaaatcaaaataaataagcrtacatgagacaaaagcaaataaactttatgactttaaccaagtctctaaagaggaagcaaaataaaattcagccctttcaaaatccagacaactgccaaagacagggataaagaaaggaaagcttaaacaaccatca

SEQ ID NO: 355264 - DNA, 537 bp, Homo sapiens
caaaacaatggggctacagcccccagacaagtctgaaatccagtggggcagtcaaatcttaaagctctaaaatattctcctttgtctcactccatgtctcagaaccaggtcatgctaatgcaagaggcaggttcccatggtcttgggcagctccaccgctgtgcctttcaattgtacagcctccttcctcctttctggctgcygtcacaggctggcattagtgtgtgtggcctttcaaggtgcacaatgcaagttgttggtagatctaccattctggggtctagaggacagtggccctcttctcacagctccactatgcagtgccccagtggggactttgtgtggggggtccaaccccacatttcccttctgcactaccctagcagaggttctctatgagggcaccacccctgcagcacagctctgcccgaacatccaggcatttctatacatcctctgaaatctaggtggaggttctcaaatctcaattcttgacttctgtgaacccgcaagctcgacaccacatggaagctgcca

SEQ ID NO: 355265 - DNA, 605 bp, Homo sapiens
ctaccatggatatttaatttaaccatttccttgtcaaatggatttttctcctgaagctatcaaaaagacatcactgaaaacatatgttataaataaattactaaatggtagtgtttcttttatcaattgttgaataacaaatcaaaccaaaatgtagtgggtacaaacaacaaaaatgtattattgctcatgattcttcygagttgactggaacaagctggatggtccttttataattgaagtcacatttgggactgcaataaactaggaactcagctgtggccagagtatccaagcagaccctcatcctctatcatctcagactctcacatggccttctcaccattgaatagcagagcccaagcttctttacagcataacatttgatgccaagcaacaagccccaatattcaagtgctttatcaagcctttgcttgtgtcacactcgctaatgtcctgtttgccaaagcaagtcacatggcaaagcccaaagccagcatgaacaagaactactcaaagccttggaaaccacaaggaatggcctttgggggccaccagggtaaggctactatagacaatttatgtttgtatacttctgttgcctg

SEQ ID NO: 355266 - DNA, 598 bp, Homo sapiens
aatttagagtaggaaagggttctaaaagtcagttacctgacttctctttcatctctttaattcccgtaacctcatgccaaatacttcatcttccaagatgggttttgatatatgagagaggtttgctacctcaaaggcagccatttttttttgttgttgttgttgtttgtttgtttctgtttattttttttgagatagagtcttactctgtctcccaggctggagtgcaatgacackatctgggctcactgcaacctccgcctcccagctataagcaattctcctgcctcagcctcctgagtaggtgggattacaggcgcccaccactaaacccagctaatttttgtgtttttagtagagatggggtttcaccatgttgaccaggctagtcttgaactcctgacctcaggtgatctgcccgcctcagcctcccaaagtgctgggattacaggcatgagccaccgtgaccagccaaaagcagccatcttttaatagctttgccctttagaaagttctttcttatgatgagacaagaatatctctctacataattgctacatattaattggaatttctattctggggtcacataaaacaa

SEQ ID NO: 355267 - DNA, 588 bp, Homo sapiens
acaaatgttataaatgaattacttaactggtagtgtttcttttatctattgttggataacaaatcaaaccaaaatgtagtgggttgaaacagaggaggtactcaacaaatacttggttagagagagagataacaattattgaatgcttacaatatgttaaacattgtattaacttccttagacattgtacattatctcatttgaaggcatttatcaaatttttgcctctctctgtagaattgcccctattcctcttcaagactaaatatccacagatcatccaagagtttcacaatgagacctggttgttatggagtgaattgtatacttacaaaattcatatgttgaaatcctaacccttgtatctcagaatgtgaccatatctggagatagtgtctttataaagatagtcctgttcaaataaggtatttggggtgggccctaatccttataaaaacagaaaatgtggacagaggagacaaatggcaaaaaggtgatgtgaagaaacacagggagaagatggycatctacaagccaaggaaagaggactagaaaagatccctccctcatcgcctcagaaggaaccaa

SEQ ID NO: 355268 - DNA, 228 bp, Homo sapiens
atttacaatcctttagctagacacagagtgctgattggtgcatttacaatcctttagctagacagaaaagttctccaagtccccatggacccagaagcccagctggcttcacctgtcaccatgatggrccataatttgctgacacctggtctggaggaaaggacttggacttttaggttagacttgcaagaattcaaatctactacttagtatcatggtaatcatggg

SEQ ID NO: 355269 - DNA, 589 bp, Homo sapiens
gcgcattagtacttagacaatccaaaaagacctgtttttatatcatttgacttttcttctttcctcctgtaattacttcatttcagtgaaatcacgctgtattatgatttaacaactggaacagtcacttaagcattgatattttgcaagctcctttctaatgttcycacccacaatctggcctaaaaagggagaacaatgagcgatcacttaggggcccagataaaccacacaggagtgctcactggtcacttttgctgtttgaatcctgccctggttatcagctgccagtattctgccaggaaactctaaggtagaataatcatgggactaagcaggaaagagattgcaatttttaaagcatagagaaattggcatggggtgaagatgttgtaactacaggttgcaaccatacttcctcttttaaaattgactgtttccttccacaatgttgtaagtacgtttctttccccagccacctccagataaaaagacaaaatgcctcccaaagctacgagatgaactacagaattctaattgttcccatgcttcctgaagatttgaaattccagcctgtgcttcattccca

SEQ ID NO: 355270 - DNA, 541 bp, Homo sapiens
ttccaggcagtaaacctatatgactgccaaagctgtcattttttttttttaccttctgaaaatgaaatgttaattccccccttaagaccctccacagatttagtttgtaggctaataacagttcacttaagaacaagagaaatgtcatccctactttgacgtgtgatcacaaaatagaacgatcttcaaattcccttcaaaaggggaaatgtttatgaattcactttcagtgggggatataaagggatttgtcaaaacctgctgtgatttcagcgatgcagaaaaacagtgctgcattcattgagccagcccaaatgtgagctcatgagtggtactgyccttctgtatccctgcccttagggcttggggtattctcaacctcgtgggcttcttagggtgtccagggcattcttttattaatttatgtgtttgtcccttgtgaccttgatttgaaaaataaaaaatacaatgggagacttttcacccacatcatccataacagctctggctaggtcttgacaccagaaatgccaaagatatt

SEQ ID NO: 355271 - DNA, 583 bp, Homo sapiens
tactgtactatgattccacctattataaaatatccatattcacccaaacatctgctctctggtggtttgtgctacctttatgacaatgaagtcactcactttacaaatgatgaaatatatcagttctcttaataatgctrtaagagatacagttccagaaagtttgacaatttgttagatgtctcctcatttcggatgaagcttacttttatccactttagacccttcaaggacaatttctgtgaagctaattctttcagtgaagaaaatatgaagagccagcatctaaattcttatgggcctggctgtcacttaacatctgctggagaagagtagtggggtagaaatagtacaagcctgcaaatcaagaaacttgaggtatttgttttcattctgcctttgactggttgcatgacctttgacaattcccccaagtcgtacgatgtcatttctaagataagtaaagaatgggtgcactatttaaacacacacacacacacacacaatataaatatgttaaattataaatactcaataatttgaagaattctactaaaattggcttctgtactagggctcttac

SEQ ID NO: 355272 - DNA, 555 bp, Homo sapiens
cgtaagcgcttttcatcattctcctcatgttcacaggaaaactcatacttactcataacctttgcttttgctgtttctcccatctcatgtgacctctrcctatgaaatttctaagcttcaggtaagccccagctctgaactcaactctctcctaatattccccaactaggccatggaatcttaaagatagctagatcatctatgggcacacttatcccagttgagtaatttcgttgcccacctccaaggtaatgaataatactatccccactctacgttcagtgacaaaatgatctctacatttttaggtagctgtacttcctattgaattatccttacctgtaggatttttcatagagccaaaattaacttctctgaaacaacactttctttggctttgctctgccttttggaaaagaagaacaattctaacatctttcttatgtatctaccaatcacatgattgaacccagtcatttttctattatcatcattctgcttagatctcttctccagcctaaatatcttaacagcctcaactctcctgcaggtggg

SEQ ID NO: 355273 - DNA, 529 bp, Homo sapiens
agatactccagaaatacttgttgattaggtgggtgaaaactcttagggcagaatacgatgctccacagctcatgtgctattaactgtgcaaggttaacatggtaacctggtcaggagttcctgcctcaatarggttcactagaatcagccaggtaagctatgaaatctgtttgaatcacagtatgtgtattcccaatttggctacatgttgtaacttaagaacagatacttggtggaagaaagaagcagaggatcacattagtgtttcttaaggacaataggtatgagcagtaacggtattagtggagggtgtattatgcagggcacaggagaaagaacgcagcttctcttccatctctagcaaagaaaaggaagaacctcttttcccatgtcactactgagggcttctttgtagaattctaagagtggaaggaagaactccactacctcctcacttacagatcatgtcaaaagagaattagagatttttattctatgaacactgcatcgtttgacataaaaggagaac

SEQ ID NO: 355274 - DNA, 638 bp, Homo sapiens
tagtactgtgccaccttctcccacaaaggatttttggacatcagcaataattgattcccactccaggttgtcccattcccatagacactgtgacctgggttgctggactcctcttactgatgttatcgcctggctagtcttcccatcctgccttctccactggatcccttatcttgacctatacagtagctccactgaggttcccactgtgctacggctggactcaagcaggttatagtcctcagagtcctgggtagttctcttttaacctcacttagaaaagttattaatgacatggacttataggggatttggggaatataagtgccattcagttcctctctaattttataggctacacctgagtggtagagtgtctggatccataggcagctggatatacatgaggccttgcttttgttggaattcttgcagcatggagaaaagattagtgctgagctttctctgcttggaactagcaataggtccagggcatgaataagaaatcaacaagaactgacaggagctggtacttagtgctctgaggatctcagggagaagagctgacatcaacccarttgaatgcaactggtaacccccaagtccttgagtgctatgagctaaatgagtggcttaag

SEQ ID NO: 355275 - DNA, 606 bp, Homo sapiens
gcaaatacatagcacatctgccatccttcccctctccttcatccatcacagattttggtaatcagcctcagcactctttccaattcagcctggacactgtctcagatacttccgtaacactgtgctccaggtagccttgccccgtcaactggaattgttatgcatgttgaaacctatttgctatcctgggctataccatttgcctccaaaaagtaggcctatccttactgtgttagtattgttttggatataacttgtttagtattttcataacttctagcttaatctagaaggctttatgcatcctggtattgttctgtcaggactatgcctctctttcatgtaggtaatggttaagagcacgggctctggagtcagacrgtctagcttcaaatccagatttgggaaatctaccaattgtatgaccttggccaattaaccttgtgaacctcagtattctcatttgtaaaatgggtgtaataagagtacctactaaatatagttgccttaaggattgaatgtggaaatgtttatacagagtttagcacggtatcaggtatacattaagaatttaatgcagcaaatatcaactaaacacacacacac

SEQ ID NO: 355276 - DNA, 619 bp, Homo sapiens
ttatatgcttagatatcaatcaaacaaaatagatacrcataaaggattagtttcagggccatccacagataccaaaatccaaagatgctcatattccttatataaaatgatgtagtacagttggctctctgtatctgcaggtttcaatccaaggttggttgaatccctacctgtgaaaccttatggcatatcgacaacacccaaaacatggaagcaaccaagatatccttcagtggatgaatagataaataaaccaaggtatacacaaacaattaaatatttgcactaaagagaaatgagctatcaagtcataagaaaacagggaggaaacttaaatgcatattactaaatgaaagaagctaatctgaaaaggctacataccatatgattccaagtatatgacattctataaaaggcaaaactgtggagacagtaaaaagttcagtggttgccaggggttagcagggaaggaagggtgtattagtctattttcacactgctatgaagaaatacctgagactgggtaatttgtaaagaaaaagaggtttaatagactcacaattccacatggctggggaggcctcacaatcgtgttggaaggtgaaggaggagcaaaggc

SEQ ID NO: 355277 - DNA, 372 bp, Homo sapiens
ttcctgagaatcagcctcttgaagaaataaatagatgagggctgtgttcttttaattattgaaaggtaaaacccaataaaacttgaatgtttctcttgttcacaccctacacctcccacctccatcrtttttgttttcatgaaactgagacccatgtggtccagtgtcttagcctaaattatgcacaaaatgcctgagctgggctttgaaattaaatctcttaattccttaccaagtgttcacttttgacatgtttgttgcatgctcacctaaaatacttattgagaaaatgctaaaagtttctgaaaaattttttttaagaaaaagatcctacccactcaatatttccatgcctgctataaaccagccaat

SEQ ID NO: 355278 - DNA, 562 bp, Homo sapiens
agacaagtcaaagttgggttgaggcaaaacaaggaaaagaaatggagtggaccctgccctggacccactcacagagtttttgcaatcagtcttgttgccagtagctctggtttcctttggggctgtcataaaggcaccattaagaatttaaaattcactgacagacatgtctcagcattggttccccctaggctgtgaactctaccagggtagagagtttatgtgctttgtcccttgtcatgccctagactttgattccttggttggcatcaggcaggagtgtcctagaggtaatggttaaggttattaataaagtygttgctattttccatattcagttttctataatgaactaatatttttttctgtcatggtagcttcattccactctaccttcttgggtgtttgcatttatctgtcagatcttgcagctgcctttgtggttttcattcattctcatctcagttcttagccagcacctgattcccctttcctgttcttcaccttacttggaccatccctatgtccttccccacggcacttcaagtgtctgagccccagt

SEQ ID NO: 355279 - DNA, 587 bp, Homo sapiens
aaataccagctgaaatgccaattactaatatatattctcctgaagatgagctgtgagctctgtaggcaggggttgtgtgttaagacagctatttattcagataaaggtgttcaatccctgtgagccaggaggttcacctctcagagattaaaaatgaggcgcagacggagcatggtcttgtccagtcttatagagttggcgaccttgttctgtctgattccactgcacaggcagattccacttcagcgtactctctcaatatagctcatatttagttttttgactaggacaccataagattgtttaaagaggcacagtagctaaaagtctaggctatgtagtcatccatatcttggtgactcctccattacagggtgtgacttgggggtgcctgacttatccaacttaaccccaacacctcttggatatgggataatatgaaatctcacattagagttgtgaaaatcaaaaawgataacacaaagactcatggcaaataccgtaactcctttgcatattggttccgaatttttgtttcctggtatccccttaataattctgatgaacccatctgtgcaaacagaaaa

SEQ ID NO: 355280 - DNA, 616 bp, Homo sapiens
tattatggattcactctgccttcccaggatgggatccaacaggacacagtactgcttcatgggtcaatgctttccagcattgatcatgggaggacaccagtggagtttaagttggggctcaggatagagctcaaagtagaaaaggaggamaaactgtggctttgggaggtacacctctccaaaaccaatgataaaaaatgagagagcaagcaaacaccatcaacaaaatacatgcacagataagctaagagcactttgcactgtcttctaatctctgtcatttcatgattggctactggcaattggtgttgttcaagcaatgaatgaggacagaatgtccttccaaccatggtgcctatagccattcctttttgtgcaaaatcaagcaaagtgcagcaattcttgattgctattattttctttcttactccaagaattttagctttgttcagtttggaaaatgggtgatcttaattgaaaggatgcctctgattatctctatcagtttatctgtctatctatgatggttaattttctgtgttaacttgactgggccatggctgcccagatatttggttaaacatcattctgggtgagtccatgagtgtgtttctga

SEQ ID NO: 355281 - DNA, 511 bp, Homo sapiens
ggattataggagtgagccactgtgcccagcctcagctgttgatatcttggtgcagccttctcaaccctgcttattggcaggttattctgttttggtgatgatggtatgtgcctgagtgtttatgctccagatgtatcactcaggtgaaagcagatgccatctgtacagcagctccaaggagtaaactgactcctaygagaataagtggctgctgcagtgtggcaggcctggggtcactgcttcactggacacactcacctaaatttaggtcccaactgcttggccgtcctgagtcagatgattcctgctgagcccaccatacaacttcaaatgtaggcttcttcctataagatgtattagttttctgttgctgctataacaaattgccacaaacctgatgacttaaaacaacacaaatttattgtcttaacattttgaaggttagaggtcccaaacaggatgaactgggctaaaagcaagttgtcggcaaggttgcattccttctggaggc

SEQ ID NO: 355282 - DNA, 594 bp, Homo sapiens
atggtagaaattgtgactccttgtatctaactgcaagaagatataacaaagaccactgcatttttaaagtcctgtattttaaaagtatttctagatcaggaatggagccagatctggcccctgcagacacattccatgtctgtcattaaaagccaaatgactacatctttactcagaataatgagcagcaaagccaattgccgttttaacatacaacagccaaaacccttcagagaggcacagtgagaatacaattctaatgcaatgttgtctttatcaaatacttctttatcagtaacttatggttaaaatttttttatttgcttgccttactgcccctaaggagaggtgttagctgtggcaattttattaaacttttgttcaagtcaacygtgatgacccagaacctgttggaatgatttttaaagaaatgaaaacaacccaaaagtctagtcagcaaatttgattatatacatgcattgaaaaattattaaatagttttcaaagtaaaaaagatgagaaatgccacttgcagcacatgtcagaaattaagacagtaagtgtcttaatttcttgtattttctaagcatatgc

SEQ ID NO: 355283 - DNA, 594 bp, Homo sapiens
atggtagaaattgtgactccttgtatctaactgcaagaagatataacaaagaccactgcatttttaaagtcctgtattttaaaagtatttctagatcaggaatggagccagatctggcccctgcagacacattccatgtctgtcattaaaagccaaatgactacatctttactcagaataatgagcagcaaagccaattgccgttttaacatacaacagccaaaacccttcagagaggcacagtgagaatacaattctaatgcaatgttgtctttatcaaatacttctttatcagtaacttatggttaaaatttttttatttgcttgccttactgcccctaaggagaggtgttagctgtggcaattttattaaacttttgttcaagtcaaccgtgatgacccagamcctgttggaatgatttttaaagaaatgaaaacaacccaaaagtctagtcagcaaatttgattatatacatgcattgaaaaattattaaatagttttcaaagtaaaaaagatgagaaatgccacttgcagcacatgtcagaaattaagacagtaagtgtcttaatttcttgtattttctaagcatatgc

SEQ ID NO: 355284 - DNA, 480 bp, Homo sapiens
ttttgaaacatgaaaattgccatttcaaacccttaaattgttttctgtctcacagacttaaatttgcatttatcattgtagcaatgtctctttttctagggagatcacttcacggggctcttagataccagaactttacgcctcacccaagttcctggagaaaatgaaaatcttgacctacttgcatgtaggtgatttaggcagatagcaggttctacaaagatgtatagctggtcattctgtaactttgggggaaaattatgttttcattatgtatatgtcaatttctgttagagttatgagcgttcttctttggacgtgtattggcagccacgtggaatattgtagcaggcgcatgcaggcacagrcctaactgattatattgaaatactgggagaaaaacttaaatactgggtttggcatggttcaacatagatatagccttttgagatgcaaaatgtgacattatttaacaccaaa

SEQ ID NO: 355285 - DNA, 538 bp, Homo sapiens
cttacctggccatctttggctgacagtcattgaacacagtagagaatgctgatggtaaaaagaccttcctctggactcccaaggtcctataaggtagacaccattagttttgtgcgaagaggtggcaaatctgatgcagccctagataacttcagacaaaaaaatatacacatrctctgtaatggagagaagcttttatcctgtagggacaactggactagaggacagtcagctctactgcttgaagccacgtgacttcagcaacatcttttcacttgtgtgcacccacctcctttacctataaaatggatgagtagcgattttattaacaattatcattttaagtgaagggtcctgttggctggcataggaaaaatgcaagccccttttaaaacaacatcatattaaagctgtctctcagcaagctggcacttgtcacacatcctaagacactaacctggacccaagatatgctccatgtctttgcctgtttcagcggccaccacctctgacaatatgaacatcaaagatagctggg

SEQ ID NO: 355286 - DNA, 538 bp, Homo sapiens
cttacctggccatctttggctgacagtcattgaacacagtagagaatgctgatggtaaaaagaccttcctctggactcccaaggtcctataaggtagacaccattagttttgtgcgaagaggtggcaaatctgatgcagccctagataacttcagacaaaaaaatatacacatactctgtaatggagagaagcttttatcctgtagggacaactggactagaggacagtcagctctactgcttgaagccacgtgacttcagcaacatcttttcacttgtgtgcacccacctcctttacctataaaatggatgagtagcgattttattaacaattatcattttaagtgaagggtcctgttggctggcataggaaaaatgcaagccccttttaaaacaacatcatattaaagctgtctctcagcaagctggcacttgtcacacatcctaagacactaacctggacccaagatatgctccatgtctttgcctgtttcagyggccaccacctctgacaatatgaacatcaaagatagctggg

SEQ ID NO: 355287 - DNA, 572 bp, Homo sapiens
ttattccagaccataactcacacttccccagccaggtggaagtaattgtttcctcattttgttttcagagactatggctagctctaggaactcacagaagttactcatcttccctatgtctctgtttccattatctgtaatatgggaatgatagtaacacctatcacatcaaacttctaagaagattttaaaaacgaatgcataggtatcacacaagcaaatgccaagtgtttgttcttcttcttatttgcatatttcatgaataaaaataaatcagtggataactgtttttgttcatgtatcatatttacatataggtagacacatgtataataaaattcacatgttcattgatcttcttgttaattagaawcataagatagagattgtgtgataattacccggatatacttagagcttagcataatatctcataccagtaggtttacccaataaaaagctattaaattgaattacatttcaacaataagtagccaagttttatcaatcataaatcacagacatctttcaaaattgttcatttctgtcagtgtattaccctagcccaagcc

SEQ ID NO: 355288 - DNA, 649 bp, Homo sapiens
tgacacaaatacagcataacctagtcttcaaaattaaacaccaaattaaaaaagactatttgtgattgattctagaatatattacagcatttttccatccatgcaatttatcatacttatctaaaaattttttaaaattccttgagagattgactttgagagaagartaagcaaaatattttttcactcaggaacatagcatattttccaagttttcaaaataagagtattattttaataatttctgcatttcatagatttaacgtttgtattgttacttttctagatagaggctttagtcattttgctttgcccattacaaatcttatttgagaacttgaaaacttacattaatttgattaaccgaaggtcttgatacatcatttttctgtgatgtcccactgacctttagaaaagttgtgttattttctttctgatgtcttatctgatctcaaaaagaatgtgaacaaaagacagtaagcctttgcactctgaatctcaaggtgacatttaagactgacatccagctagcaaaagtacatctcaaaatttattcttgtcccatagggataagcaaatcattaatgtaagaaggtatcaggccattaagtgctttaaacgtcaacaataaaactttaaaatcaatgca

SEQ ID NO: 355289 - DNA, 601 bp, Homo sapiens
cagtgtacactccctgcaatattgggagtaatattatcctctttccccttgaacattaggaacaacatcacaggggtggtatacaccccctgagatattgggagtaatatcagcctccctgcatttgaatgttaagaacaatatcaccggggtgagggggggggtggttgtacaccatctgagatattggcagtaataacatcctctccctccctggattttataaactatatcacctggtgggtgtacaccttctgygatattgggagtaatatcaaactgacccacttggatatacgaacaatattacaggggtgctgtacaccccctgtgattttagaagtaatattatcctctcccccactacaatatcacagaaaatgtgtacaccttctgcgatattgggagtaataccatcctcttcctcatggatattcggaacgatatcacaggagggatgtacagcctatgagatattggaagtaatatcattctctcccttcctggatattaggaacaatattacaggtgaagtgtacagtctctgcgatattgggagtaatgtcatcctgtcaccccctggatattagaaacaatatcg

SEQ ID NO: 355290 - DNA, 593 bp, Homo sapiens
tggcagtaactggaagaaatcagagtatgggaggcaaaagagatcaggctatttatttctccatccctatacttttcctgctttgctacaattctagctgattctgtatgtggtttctggctcctgtgagtgatacctcttgctctgcttcagctctcagttggacttgactgaatcattccttctcttcttgcccccttatgcctaggaacttaagggacttcatgctgttacaagtccttgggtgcctcttctaccctttttttattctccttcccctgttcacacccctrtggacacttcattccttccaaataaatccttttgaaaatgccgtctgtgtccaacagctaccttgactgatccaaacttctttcatcctctctggattcaaattgcaactctttttctcacagttgtatagtttttgtttcattgatttgtaaatgtattcaagtttcctccgtattgtgaagccctctctcaactctgttacagttttaagttgttgctctatgaaagtttttaaattctttcttcaaagtgttgtctacagatattaaaatatggtatctgttccacaaatatttaaa

SEQ ID NO: 355291 - DNA, 409 bp, Homo sapiens
cttttgaagtggggacaaatgaaatacatgyatatgagtttatgcttttaaatgtacagttagtcaataaacttagaaataaatatagtgtctgaagttatgtataagacaactatgcattctatatattgtctacttcagtcaaccataaataacattaagtcaaaaaatattaaactttaaaactatttaaaaaacacatagtgaattgtttaatgttcaatacattccaaaatacccctttagatgtagtcttctaaaataagcataatctgtaaaggcagaaaagtactagtgtttcctcttcaagtgattttgttctttttaaaaaatataaaacagaaagataaaaatcaaaactccaactccactgaacactgcagtataaatggatgatatgatttcactt

SEQ ID NO: 355292 - DNA, 409 bp, Homo sapiens
cttttgaagtggggacaaatgaaatacatgcatatgagtttatgcttttaaatgtacagttagtcaataaacttagaaataaatatagtgtctgaagttatgtataagacaactatgcattctatatattgtctacttcagtcaaccataaataacattaagtcaaaaaatattaaactttaaaactatttaaaaaacacatagtgaattgtttaatrttcaatacattccaaaatacccctttagatgtagtcttctaaaataagcataatctgtaaaggcagaaaagtactagtgtttcctcttcaagtgattttgttctttttaaaaaatataaaacagaaagataaaaatcaaaactccaactccactgaacactgcagtataaatggatgatatgatttcactt

SEQ ID NO: 355293 - DNA, 578 bp, Homo sapiens
catttttaagtacaatttgatacacatttttgggtgttatatataggtcttagagacccaattcattcttctcatttttttttctttcagttccttacattggacaatttcagttgacctatcttcaagttcactgatcttctttcttctgccagttcaaagttaactttgaatgccactaatgaatgtttcatttcagttattcagaatttccatttggttctttaaaaaataatattttatatacttattaatagtattaatttggtaagacatcatacttgtactttcctttaattctttagacatttatttttagttctttaaacatacttaaaatggctgatttgaagtatttttttagtaartccagtatccaagttttcttatggaaagtttcttttgacttatttttatccatgtgtgggttatattcggtgagttttgcattattctcttttgttgaaaactatattttaaggagtacaatgtggcagctctgacagccagctaaccaccaggatttgttgtgctttgtattactggtgctgttgctgtttgtttctttagtgactttc

SEQ ID NO: 355294 - DNA, 579 bp, Homo sapiens
gtgtcattttacattacattaagtaatttctttccttttacctgaagttgtttcccaaatacccaagtattctcctacaagctggccttttgcagagggtccgttattttcttgttgaggtggcaggctgttcttttgatgagtatatatcttgaggtcattttcaggacactttatttgatagactgtccactttcttctaaggaaaactaagaaaaatggggactagacctagcttaaaaaatactaggacattcttgtttcaaatgacagccaaatawtggaaaatgatacagtaaaaactgttagtgatagtttcatcttcattcagtatcactattgctatctccaatgtgtttgaatttcccatttgtctacctggaaaaataggcaagagtcacatcatgaggaagattataggcctgtagcttttccttctacatgctgtaggatcttggacacattctttaatttttctaaacctcagtagcctcatctgtaaaacggaaataatagaagttcaaacttcaaaaagttgttctgaagactacatgaaataatgcctttgggtcatttaac

SEQ ID NO: 355295 - DNA, 570 bp, Homo sapiens
aaatgttttattggggcaaaaatagagtcaataattttaataactataataagttacataattgctagagaaaaaagttttatgataagaaaagatagaataatcctcaaaggtttggggaaggtttctcacaagagataatatttaagtttaatttagaatgctaaataatgagttaaggcatgaattgactgaaggaaaagagtaaagccttctaagaaggatatacgctaattacgcagacatagcagcattaaacttggttgttgtcaattacattcttacagggatccacccagctagaagatcttcaccagatggctgaaatattgttaccagtggagggtcttgactaggacttgtccagattcttggcattttgaactaagaattggacaaaatgcacaaagcaacaaaagaatgaagcaacgaaagcacagatttaccgaaaccaaagtacaatccacagaatgggagcaggctcsagcaagcggctctaaagtgctggttacagaattttggggggtttaaatacccctctagccgcttcccattggttacttagttaca

SEQ ID NO: 355296 - DNA, 410 bp, Homo sapiens
cagacaagagaaagaaatataaaggacatctaaatttattgagggaacccacccaacgtaggttctttctattttccatgagtgttggctggctgagaaataaagagagacagtacaaagagaggagttttatagctgggccaccgggggtgacatcacatattggtaggaccatgatgcccacctgagcctcaaaccagcaagkttttattaagtgttttaaaaaggggagggggtgtaggaacagggagtaggtacgaagattgcatgcttcaaagggcaaaagcagaactactaataagggtctaacaaagatcacatgcttctaagggaacaggacaaagggcaaaagcagagctactgataagggtccaacaaagatcacaaggcaaagggcaaaagcagaacta

SEQ ID NO: 355297 - DNA, 562 bp, Homo sapiens
gaatagccaaagctgtcctggacaaaaagaaaagaactggaggaatcacattacctgacttcaaattatactacaaagctatagtaaccaaaacggaatggtactggcatgaaaataggaaaatagaccaatgaaacagaatagggaacccagaactaaatccatacatctacagtgaactcattttgatatgttgccaagtgcatacattgggaaaagaacagtctattcaataaatgttgctgggaaaactggatatccacatgcagaaggatgaaagttgacccctatcacttgccagataaaaaaataaaatcaaaatgagttaacagcttaaaactaactcatcaaactgtaaaactattaatactacatgaaaacattgaggaaactctccaggacattggactatgcaaatatttcttacattatattccacaagcataagcaacaaaagcaaaaatgaaaaaatggggtcacttaaaataaaagcttctttccctccctgcargttgaaaagcttctgcacagcaaaggagacaatcaacaaagtgaagagaca

SEQ ID NO: 355298 - DNA, 564 bp, Homo sapiens
tcaattgtttattatgcagccatttactgagggacagcatgtacaaggcaagctgtcaggccccaaagcaatgccagcaggcggggccggtgggaggtgtaggaacacctttactctgcgacctatrtttattcagaaatgacccattgccttggtgatgacatgggcagactacacagttcttttaaaatcatccagttattagtacttgccaatcagagagtggatcataatatgttattacacatttctatcaataaaagccccagtgtagtgaaaacaacgttggatgtccttgagatgttatctgagagcttcttccattaagaagtgatataaagcaatagtattctaaatgagtcaactctaagaagaaggcttagtatgcaatatattaaaacaggtggggttacaagggtgtaggaattagggagaaggacaaaaagcatacaatgatcataagactatgttttacaaaagtttttgaaatgtgggaaaatcatttgagaattgggaaacatatttcttattcaatctgccaccaattatagtgtaaagtgtgat

SEQ ID NO: 355299 - DNA, 564 bp, Homo sapiens
tcaattgtttattatgcagccatttactgagggacagcatgtacaaggcaagctgtcaggccccaaagcaatgccagcaggcggggccggtgggaggtgtaggaacacctttactctgcgacctatatttattcagaaatgacccattgccttggtgatgacatgggcagactacacagttcttttaaaatcatccagttattagtacttgccaatcagagagtggatcataatatgttattacacatttctatcaataaaagycccagtgtagtgaaaacaacgttggatgtccttgagatgttatctgagagcttcttccattaagaagtgatataaagcaatagtattctaaatgagtcaactctaagaagaaggcttagtatgcaatatattaaaacaggtggggttacaagggtgtaggaattagggagaaggacaaaaagcatacaatgatcataagactatgttttacaaaagtttttgaaatgtgggaaaatcatttgagaattgggaaacatatttcttattcaatctgccaccaattatagtgtaaagtgtgat

SEQ ID NO: 355300 - DNA, 567 bp, Homo sapiens
ctcattcaacacctacttcaaccttctctaattttattttctgtataataatgctagtgaaaataaaaatttctcagactctttttcaactgggttgctatatgtgacataagttctaccaagtaggtgtgagtcagaaatgagtgacttgaggtggcaccacacactagaagaatgtatcttccggcacatagaamagtaggaggcatttgtttgcttggggctactttaacagcattttttgcatccgttctctactgactgaatcctgtggcatagcagggcattttccctggctcattttccctggttctggttgcacaatattcagggctaggtccttgactcttctgtattgtatattggaatgattctttttattcaaccacctaaagtggattatgttgtctaaaaaaaaaaccaaatacatgatactacttctggagttgtgcagtaagaagctcaacaagccctctaccgaaaaagcattgaaaaaagaaggaaaaagaaaaggcaaaaattgacaaaataggaatgaaagagggatcatcgctactgaccctgcag

SEQ ID NO: 355301 - DNA, 567 bp, Homo sapiens
ctcattcaacacctacttcaaccttctctaattttattttctgtataataatgctagtgaaaataaaaatttctcagactctttttcaactgggttgctatatgtgacataagttctaccaagtaggtgtgagtcagaaatgagtgacttgaggtggcaccacacactagaagaatgtatcttccggcacatagaaaagtaggaggcatttgtttgcttggggctactttaacagcattttttgcatccgttctctactgactgaatcctgtggcatagcagggcattttccctggctcattttccctggttctggttgcacaatattcagggctaggtccttgactcttctgtattgtatattggaatgattctttttattcaaccacctaaagtggattatgttgtctaaaaaaaaaaccaaatacatgatactacttctggagttgtgcagtaagmagctcaacaagccctctaccgaaaaagcattgaaaaaagaaggaaaaagaaaaggcaaaaattgacaaaataggaatgaaagagggatcatcgctactgaccctgcag

SEQ ID NO: 355302 - DNA, 616 bp, Homo sapiens
tttcatttggcttaatgatgcctgctatgttctagttaatgaacttagacatcttgctacatgtttattggctgtgtttatatttttctatgaattgtctgtttccattatttgcccacttttctattcagctgtttcatacctgcactgctttgttgaaaatctttttatattatgttttccagctttttgttgcttgtcatttatggcatctttcatgacaggaagttcataatttctatgtagtcaagtttatcattatacccatatccggtctgggtttggtgcattacctcaaaactattcttcttactccaatattattatttctgcatgtattcttstaaatattgtaatgtttgaatctttaatccatctaggatttttatatatgaagattaataattaaaattgttttcttctatgaataaagtcaatatccaaatagcatttattttattattctttcatctctctctgatttaaaatgccactttttatataaaaacttaaaatatactgagatatatattttggactgttcacctaagtctaaaaaattaatataatgtgttgacagaacaggaaaataattatgtgatgttgttttggaata

SEQ ID NO: 355303 - DNA, 531 bp, Homo sapiens
aattaaaattgttttcttctatgaataaagtcaatatccaaatagcatttattttattattctttcatctctctctgatttaaaatgccactttttatataaaaacttaaaatatactgagatatatattttggactgttcacctaagtctaaaaaattaatataatgtgttgacagaacaggaaaataattatgtgatgttgttttggaataaatagtaatttttgaagatactgccttgtagtttataatgtcattgcatttctcagatcatgtttagatgtgccttttaaactttttctttataatgttacagaatgattattaatagagtttatattagaaagagatagaatgaaatttagttttcataagaaaccattcaacagtcaacatatatttgatcttaaagcatccraataacttggatcatcttgtcggtaaggcaaactgttgctttattctatattcacacttactgtattgtcagaaaactcatgatgtaagtgaggttaaagatgatgaaggacc

SEQ ID NO: 355304 - DNA, 590 bp, Homo sapiens
agcatagtaacaactagctaggaataagaaaacagacaataattcttctacaaccatttacttcattttcttaaattagtaaaactcaaacatgtcaaactagtaagagacatagttttaattggcggtccctttgccaaacatgtaggcaaggtattcatcattaggcctctctctgctcatgaaacaccatgaaaagcccaggagttttcacagggcatgtgatttatgagccaatgcagtactgctcaaagagaaaacaagccacaagtagcatttgctgtgtagttacctgatgtgcatacgatcacctgcagcaggttttttcattcaatacctgaaaaattgcccttttttgartatttactaacctgtctttccttctactgcacactgagctcctgaaggcactggggcttgctcccatttgtaccctggagcacacagtaggtgcttactaagtgactgtggagcagaacttctaatatttttgaaacacagatttggaaacatcttcccagaaaacagactacaacaaatcatttccctggtatgaaggaatgaaggtcagtattgctaaactgatacta

SEQ ID NO: 355305 - DNA, 594 bp, Homo sapiens
taataattctccaatgacatctacaatcaactctcctcaatgattcccatatatctattattcaagcttttattttttgttattccaaaccaagacccaatccaggtgcatgcactgcattttagctgctatgtgccttgggtttcaaatagtctataaagcctcacaccagccccrgccccactttccccctcattttcaagacattgacaatgggaagacagcagggcaattctgtgggatgttccactttctggatttactgattgtttctttcctcatggtaccacttaacttattcttctatctcctgtatttcctgtattctggaagttaggtataaatagaataaccctatacttgatccacactggaatactttgagagtgaatggagtcttaccaataattgtacccaaataacaggtaaaaagcaggactctcctagcaaatgggtgcaagtgacccttggtttagtggcttagtcacattcaggcgatggagttcagatgacgtgttgagcaaggacactccacagtgtttctgtgtggctcatggtgtctcccaccagacatactactgagatgctaagttt

SEQ ID NO: 355306 - DNA, 585 bp, Homo sapiens
taggtataaatagaataaccctatacttgatccacactggaatactttgagagtgaatggagtcttaccaataattgtacccaaataacaggtaaaaagcaggactctcctagcaaatgggtgcaagtgacccttggtttagtggcttagtcacattcaggygatggagttcagatgacgtgttgagcaaggacactccacagtgtttctgtgtggctcatggtgtctcccaccagacatactactgagatgctaagtttgattaactggctactggcgatccttcaatctctctattgtgtaggtatagttttgtcacttgcaatcaacaagagttttagaatccactggtaatccttgtaaaatccattatttacttggaggctaaaaaatgattatttttctaaagctatcatttattctacatatacgagtgtggattttttcataataaaaagctttcccttattatccaaggtaaacttcagttcctcctaaaagacagaatcaattcttctctttaattcacaatattcagaactaggacttgaaataatcgtcatttcaaatagtggagcaaagagg

SEQ ID NO: 355307 - DNA, 604 bp, Homo sapiens
ttcaggaccacactaacaggtgcactaagagcaagtgagtcaaagaacactgagttagaacctcaacagaagcagtcgtccttttttttttttttgagacggagtcttcctctgtcacccaggcggagtgcagtggcaccatctcagctcgctgcaacctcctcctcccaggttcaagcaattctcctgcctcagcctcccaagtagctgggactacaggcatgcagcaccacacccagctaattttttgtatttttagtacagatgggattttaccmtgttggccaggctggtctcgaactcctggcctcaagtgatctgcccgcctttgcttcccaaagtgttgggattataggcgtgagccaccacacccggcccagttgtacatattttaactttgatttacaattcttgaattggagtaaccctgaataatctctacagtgccttttagtcacatacatatttaaactcaaaaaattccatgccaattgcctataacaggaaattaaaactgactgtgtttgggagcagtttgtggcctctcaggaggagctgccaaccacaccgtgaggaccttgctccaggtggtctaagttgtcct

SEQ ID NO: 355308 - DNA, 604 bp, Homo sapiens
ttcaggaccacactaacaggtgcactaagagcaagtgagtcaaagaacactgagttagaacctcaacagaagcagtcgtccttttttttttttttgagacggagtcttcctctgtcacccaggcggagtgcagtggcaccatctcagctcgctgcaacctcctcctcccaggttcaagcaattctcctgcctcagcctcccaagtagctgggactacaggcatgcagcaccacacccagctaattttttgtatttttagtacagatgggattttaccatgttggccaggctggtctcgaactcctggcctcaagtgatctgcccgcctttgcttcccaaagtgttgggattataggcrtgagccaccacacccggcccagttgtacatattttaactttgatttacaattcttgaattggagtaaccctgaataatctctacagtgccttttagtcacatacatatttaaactcaaaaaattccatgccaattgcctataacaggaaattaaaactgactgtgtttgggagcagtttgtggcctctcaggaggagctgccaaccacaccgtgaggaccttgctccaggtggtctaagttgtcct

SEQ ID NO: 355309 - DNA, 597 bp, Homo sapiens
tggcaaaaccttgtctctaccaagaatacaaaaatggcccagaatggtgacagctgcctgtaatcccagctactcgggaggctgagggaggagactcgcttgaacccagatggtgggaggcagtgagctaagaccacgccacggcactccagccttgacgacaaattgagactccgtctcaaaaaaaaaaaaaataaaataaaaataaaaataaactctcccccaccaaagaagggtgaggggattttcagtttctggaaaccttatgtgcattcaggcaggaaggctggctgaggggtctagggggcaacaacaggagtggcagaggcgggcttgctgggatcctcgcacaccscactgaggtgctgtgagcctgagaggaacacgaggaggtgtgtgatcccagcaatcccagcttcggtgttgaacagtcagcactgatctaccctaagccgcccatacagaactcaagctaaagagacacaggcctaaatgacaggccacaccccaccactttgctcaataagctcaaataagctcggatcctaggtctcagggactcagcttggtggtccttgaggggaggtcctcgagggg

SEQ ID NO: 355310 - DNA, 519 bp, Homo sapiens
gagtttcttgtgggcagcatattgttggaccttgttttcatttttaatccattcaaccactctgctgtttgattggagaaaataattcatttatattaaagcaattattgatatgtaagaacttactattgtgactttgttaattgtttctgattgttttgtagttattttgcttcttttatcctctctcacgtcttcctttttgatttgttgattatttttaattgtgtgctttgagtttcttctctttatcttttgtgtatatacataaagtatcatatagttataatggtctattttaagccagtaactatgtaacttttgatgcttacaaaaaaccatacactttacctctaccctccccaacattttatgctattgatgtcacattttatatcattttgtattttgtgcccattarccaattattgtactagttattattaatactttttattctacattttgtattagtgttaaaaattatttatacaccacaattatggcattaaagcattc

SEQ ID NO: 355311 - DNA, 541 bp, Homo sapiens
gtgataagcatgtataatacttaccatcatgcctagcacaaaataggtgctcaataaatgaccctttattattaattatgacaaatggtccttctgtttctacctaactaatctttaccttyttcatggaagatgacttcacattcctttccatcacactttaatcaagctttttttttttttttttttttttttttttgagacggagctttgctcttgttgcctaggttggagtacgatggtgcgatctcggctcactgcaacctccacctcctaggttcaagcgattctcctgcttcaacctccctagtagctgggattacaggtgcccaccaccacgcccagctgactttcgtatttttagtagaggcagggtttcaccatgttggccaggctggtctcaaactcctgatcttaagtgatccgccagcctcagcctcccaaagtgctgggattacaggcgtgagccacagtgcccggcttgttcatgcttttataggtatattctcctcctcttctccacctataagacctggcttca

SEQ ID NO: 355312 - DNA, 541 bp, Homo sapiens
gtgataagcatgtataatacttaccatcatgcctagcacaaaataggtgctcaataaatgaccctttattattaattatgacaaatggtccttctgtttctacctaactaatctttacctttttcatggaagatgacytcacattcctttccatcacactttaatcaagctttttttttttttttttttttttttttttgagacggagctttgctcttgttgcctaggttggagtacgatggtgcgatctcggctcactgcaacctccacctcctaggttcaagcgattctcctgcttcaacctccctagtagctgggattacaggtgcccaccaccacgcccagctgactttcgtatttttagtagaggcagggtttcaccatgttggccaggctggtctcaaactcctgatcttaagtgatccgccagcctcagcctcccaaagtgctgggattacaggcgtgagccacagtgcccggcttgttcatgcttttataggtatattctcctcctcttctccacctataagacctggcttca

SEQ ID NO: 355313 - DNA, 541 bp, Homo sapiens
gtgataagcatgtataatacttaccatcatgcctagcacaaaataggtgctcaataaatgaccctttattattaattatgacaaatggtccttctgtttctacctaactaatctttacctttttcatggaagatgacttcacattcctytccatcacactttaatcaagctttttttttttttttttttttttttttttgagacggagctttgctcttgttgcctaggttggagtacgatggtgcgatctcggctcactgcaacctccacctcctaggttcaagcgattctcctgcttcaacctccctagtagctgggattacaggtgcccaccaccacgcccagctgactttcgtatttttagtagaggcagggtttcaccatgttggccaggctggtctcaaactcctgatcttaagtgatccgccagcctcagcctcccaaagtgctgggattacaggcgtgagccacagtgcccggcttgttcatgcttttataggtatattctcctcctcttctccacctataagacctggcttca

SEQ ID NO: 355314 - DNA, 541 bp, Homo sapiens
gtgataagcatgtataatacttaccatcatgcctagcacaaaataggtgctcaataaatgaccctttattattaattatgacaaatggtccttctgtttctacctaactaatctttacctttttcatggaagatgacttcacattcctttccatcacactttawtcaagctttttttttttttttttttttttttttttgagacggagctttgctcttgttgcctaggttggagtacgatggtgcgatctcggctcactgcaacctccacctcctaggttcaagcgattctcctgcttcaacctccctagtagctgggattacaggtgcccaccaccacgcccagctgactttcgtatttttagtagaggcagggtttcaccatgttggccaggctggtctcaaactcctgatcttaagtgatccgccagcctcagcctcccaaagtgctgggattacaggcgtgagccacagtgcccggcttgttcatgcttttataggtatattctcctcctcttctccacctataagacctggcttca

SEQ ID NO: 355315 - DNA, 499 bp, Homo sapiens
ccaggggaagtgattgtttcttaatccttaatttgttgaatcacatagtattaaatgttgtggttgaacatgctcatttcatatatgttttaatgaacatggaaaggggagggtactgttcaatctgataaatgtttactgaagttctagaaggccaccgagtctggtggtggaagtggtaaaacatagtggcacatacggcctctagctgacaaacacatttcagaaaggctggggacagctgtgaaaggagaatgacatggtaaaatgwtcaaggataagataattcataaatgcgagttggctgtccaggtttagtggaccaccagtgaaaagatatggaagaatttcaatttgactttacttgcattataatctattaagttttcaaatagacaacgttattttaaaaagatttagtcgtgtatcatagtgtccccaaattgtatatggttagcgaatatttgttgaatgaaaagaaaagtaaatgacatgtggt

SEQ ID NO: 355316 - DNA, 499 bp, Homo sapiens
ccaggggaagtgattgtttcttaatccttaatttgttgaatcacatagtattaaatgttgtggttgaacatgctcatttcatatatgttttaatgaacatggaaaggggagggtactgttcaatctgataaatgtttactgaagttctagaaggccaccgagtctggtggtggaagtggtaaaacatagtggcacatacggcctctagctgacaaacacatttcagaaaggctggggacagctgtgaaaggagaatgacatggtaaaatgatcaaggataagataattcataaatgcgagttggctgtccaggtttagtggaccaccagtgaaaagatatggaagaatttcaayttgactttacttgcattataatctattaagttttcaaatagacaacgttattttaaaaagatttagtcgtgtatcatagtgtccccaaattgtatatggttagcgaatatttgttgaatgaaaagaaaagtaaatgacatgtggt

SEQ ID NO: 355317 - DNA, 608 bp, Homo sapiens
ccacccacctcagcctactcccaacaaaaagctgtcccaaagagactgtgtcaatgattctgagtgagagggataaaaactgaatatccccgctattgtaattgcacatggtatagtagttatagataaagaaagttgcaatgcagtcacgtattctcctcttctcctccacctatgaacattctaacctgctctagctcagagtcacatggtcttcaggtgctcctgaaaaagcatcagcytttagcctctatttgagtccctgtattagtcagggttccctagagggacagaactaatggaatatatgtgtattccaatatatgtgcgtatatatacacacacatatatacacatatatgtatatatatatatatatatatatatatacatacacacatatatatgagtttattaagtgttaactcacatgattacaaggtccctcaataggccatctgcaggctgaggagcaaggagagccagtctaagttccaaaactgaagaacttggagtttgatatttgagggcaagaagcatccagcacaggagaaagatggaggctgggaggctaggccagtctcttttttcacatttttctgattgct

SEQ ID NO: 355318 - DNA, 608 bp, Homo sapiens
ccacccacctcagcctactcccaacaaaaagctgtcccaaagagactgtgtcaatgattctgagtgagagggataaaaactgaatatccccgctattgtaattgcacatggtatagtagttatagataaagaaagttgcaatgcagtcacgtattctcctcttctcctccacctatgaacattctaacctgctctagctcagagtcacatggtcttcaggtgctcctgaaaaagcatcagcctttagcctctatttgagtccctgtattagtcagggttccctagagggacagaactaatggaatatatgtgtattccaatatatgtgcgtatatatacacacacatatatacacatatatgtrtatatatatatatatatatatatatacatacacacatatatatgagtttattaagtgttaactcacatgattacaaggtccctcaataggccatctgcaggctgaggagcaaggagagccagtctaagttccaaaactgaagaacttggagtttgatatttgagggcaagaagcatccagcacaggagaaagatggaggctgggaggctaggccagtctcttttttcacatttttctgattgct

SEQ ID NO: 355319 - DNA, 547 bp, Homo sapiens
ctgataggtcatgtgagagtatatggaataactggccaatggatttaacagtgtcaaggacatccatgacactgagaaaagcaattttggaggagtgatggttcaaagcacaattggctgtgttcaaaagatactagaaggagagaaaatgaagacagtgattttggataactcttttgagaaacataggtatacagagaggcagagaaatggcattatagatgaagatatgggatcaagagaggcttctctttgttttctttttttcaaatgggagacaaataacaatatacttatagactgaagacataattcagtagagaagaaaacatgataatgtataataatgtagaagagagaggtaaaaattgtaggagawtgaattcatacaagtatagagtagaaaagcaattgccaggggttttaggcgaaagaaggaaggatgattggggagatgttggttaaaggataaacttccgttaggagaaatgagttcaaaagatctattgtacaacatggtgactatagttaataacaatgaattgta

SEQ ID NO: 355320 - DNA, 567 bp, Homo sapiens
tacatattttaaaacaagatgttcactatatatatatacataattttgtcaattaaaaaattaagaaatttaaatttaaagaaaagaaatgtccttgaggaaggagataaaatgaaatcttctgaacaatgagagggtgaccttagctgggagctcaaacattctattcattgtaacagaaagggaggcagtttacaggcacagatgttagtaggttggcaactgtggaggagggakcttaaagatgttcctttttgcttccttcaattttctcagtgaactgtccagcaggaacacaaactgacagtaaaggtgattgtacagaacttggtatatgggccgcctccagatccatgttttttctgtctctctggcctaagcagccctagcaaggaggttcattgtttccaaggtcattgcaattgctgccaatgctgcagctcacagtttgacatgatgacccaatatgataagtccatacctcacacctaccccaagagcctctcattactgatcctatgctttccccttggtattcaggaagaagacaccgtgggatcagcttga

SEQ ID NO: 355321 - DNA, 504 bp, Homo sapiens
tatgcttgtcacaaagctgtagccatgcctggtacatttgcttcccttgcctttcctctcatttttgcttcccaagattttaatactcaataaaacattagcactgtaatgtaagctgttccctccagttctgttttctgtagaatctkggttaagatagtggtgaaaatattgagtgtttgaagaggaagttaaagtttgaaaaatgtcgtctttagagagcagcaggcacatgacccagggaaatgttgtgtgatggcctagcagcattgtgggtccatctgagggaaatggtaatgaattgagtgagaacagtagatagagttttctgttttctacaactgcacctagctgtggagttgcagtaggtgaatagttgattctaatcaggactttaggctggagaagacaaggtagttgagagtatatgtaaaggaaggagtataatgatccatgattaaatttgagctaagtaagtggcagatcggtgagacaaaatctgga

SEQ ID NO: 355322 - DNA, 551 bp, Homo sapiens
ttttcttgggttgttctgtgtcttaaatgatatgatgactattaaaatgttctaactcagcatttgccatagtaggtgcacaacaattgttagctcttttcacttttgttttgtcagattgatgaaaaaagagggggtaagcataggagctcaatacagcctcactaagtagctttgatcagaaagcrggccaggcctgatagaggtgggctggatatgaatgggttaaaggagttaagaggctgcccagctggactggttctcaatcaagggcctgcataaaaagccagcaggaacagaagtgggggctggccatgctgagagtgccttgggaggaggccagcagctgagaagttgctcatctcttggttcagcctgttgttaaaccatggagtagggggttgtggggtagtaaactggatggcctgttaaagccctgagagaaagagagtgagagagagagcagtgttttatattgagcctgacaaataaaagaccaacctgaaccatctggttctgtaacatatgggaaacacagatttctattgtag

SEQ ID NO: 355323 - DNA, 536 bp, Homo sapiens
tagttcattttagagtcattctttcaacaatsctttactgagtaaccattctatatgtgaagaaatttcaaacagccctagcttaaatataccttctactttcccctatctttgataaaagttttgaaactccaccttcatgtacaatgaataaaagtttaatatttttgttttgaactgtttgttggtaagtattgttatatattttgaaatggattagtaattggagtaattttttctgtttatttcaagtcaacatttatggtaagctagacttcttggataaaatcttcaaaaattaattttaactctatattaaaggattcatgctaattctaatagtcctaaatgacttgaggatttatggacttgatagtttcttgataccttacaggaattatagacaacttaggaattatcctaaaagtactaaataaaatgatggcactcccttcctacagatccactttagaacatatttaagagtgtgagttctggagccagtcttcctgaggtcaaattctggctctaccact

SEQ ID NO: 355324 - DNA, 484 bp, Homo sapiens
gaaaaggtttagatattgtggaatgattgcggattttggcacaatgcatctcattgcaggcctctcagttgtttagaaatattaactcattaattcttaaaaatattataaatattcagtgagtcaaatattaactcactgaatcaaagtgctttgggtgttgctgggtatgagggagcattgctccaatggaggggagaagaaacgtaagttagctgaatagttaggagactgctattcctgagcagaatgggtcagaaaaaacagcaggactgcatcctgttcctatgttataatgtctttgattcacagtgaaacaaagattaaacacaagaaccagascctgtttgtaattgcccccaagtaagggccctagaaaggtctgctggtatgtaagcaattagtttaaaaaatgtatcaaatcatttgatgatcaatcaaggattatattttaaaaagctatttttcttgttgcttttgaggt

SEQ ID NO: 355325 - DNA, 598 bp, Homo sapiens
gccagcagaacataaattgacaggaatgggaagaaaaattttgctaatgcatcactatggttaatagtgagtgatgccactcccatttccactccttgattcttggacccatgcatcctagctatcagagaaatagcacaatatattgaactcagagaatatacagcttttcatagaacctgccctaatcctgtaagttattgacatatatttggaagtataaaagagtcttcaaaaggccattctacttttctataaagccagctgtttcaagatggtggagaatatggtaaaagcagtaaatctcataaatgtgggtccatcaccacatttctttggctgtgaagtgagtatctttgtcacaagcaatgctgtgtgaaatatcatgacratagatatggtattctggtagtctgtaagtccatagatggcaaaaacattgcatacaggggaggaaaatccatattcaaagtaaatgtctattagggatgaaaggctttaagattaaaaaataaaaataaaaagaaacagagtaaatgtctattctagaaagaacagaacacagtcccttccatgatgaaagcagtataatgtaatc

SEQ ID NO: 355326 - DNA, 620 bp, Homo sapiens
tgactcatggctaagtgagctggaagtggtggggacatgctaattttacagctaggggagaaattatttagaatggtatatgagtcaatctgggagtaataggatgaaattaagaatgcttttcatcaaaagaaatgttttagatggtgagataagtctcactaagtctattttttggttgaaatcatattttggttgaaaatatcatctcatgtaataaggtctgtctgcttgttagctgctgaaacacagcttgcaagtgatgattatgaagcaatcaacaaacaccttgcaaagttgtgtgtgtgtgtgtgtgttggtccttactttgcagcaagcaataataactacgaaaggttaaagtttacataatccttgtaaggaaatatagttcctaaawttatagtcaatacttttcggtaaaagaatgagaagaacttgacaaaagcacataatcctctgtccagcacagaatcatttggaacctacttttgtatcttcccaaaagcacccatgtgacagatagctgctacagagaaaagtagaaattgtgatgatgcaataaaatgttgagcactttgctgtaaaatcatataaaatctctaaatacatgcattcag

SEQ ID NO: 355327 - DNA, 619 bp, Homo sapiens
tttttctcttccttaatttttagcattttgcactatattttattttgaataaattaaagaactcatttaaagtacctttcatagtgtctcatatagtgaggtatcatacataatggtattattataaattttgttactaataatgacatacatatacttgctcaattactaggaaaatgaatgcttaagcttatctttcttttattatcagtgggttgaattatgtcttatatttattgaccattcatatttcttctgtgaattttcttgtcttttaattatyatcagtatatttcttttttctctagattttgtgttaaaaaaacactataatatgtagtaacaatattatccctttattatttttgttttgaatattttcattaacttatcaattaccttttaattacttctgagttattttacaaaaaacatctaaatcattaataaaatacattgataattttaaacattattatatatgctattatttttatacttagaacagctttttccaaattttaatctatgaaacactaggcttctaaaacattttgttaaataaataaaattatatggtctaacaagtttgaagaaaatgaagatatataaatttaag

SEQ ID NO: 355328 - DNA, 613 bp, Homo sapiens
gggttgaattatgtcttatatttattgaccattcatatttcttctgtgaattttcttgtcttttaattattatcagtatatttcttttttctctagattttgtgttaaaaaaacactataatatgtagtaacaatattatccctttattatttttgttttgaatattttcattaacttatcaattaccttttaattacttctgagttattttacaaaaaacatctaaatcattaataaaatacattgataattttaaacattattatatatgctattatttttatacttagaacagctttttccaaattttaatctatgaaacactaggcttctaaaacatyttgttaaataaataaaattatatggtctaacaagtttgaagaaaatgaagatatataaatttaagtggttttctttcacattttttatgtttgtaggaagctaatatgcattgtagtgccaaagggcatttacaaaacatatttgaccatggcaccctccattcataaagcatttcgtagggttagtgtgtctctgaatacattttagttgacctatatagaagctatttatctgttccaagaccacataaaaaagttaaaccaggccagg

SEQ ID NO: 355329 - DNA, 618 bp, Homo sapiens
tagtctgggcaaaaatttgactaataccctattagcacaggcaaccaaagcaaagagggacaaatgggatcacatctagttaaaaagcttatgcagaggaaaagaaacaatcaacaaagtgaagagacaacccacagaataagagaaaatatttgcaaactacccatctgactaaggactaatgaccagaatatataaggagctcaaacaactctataggaagaaacatctaayaatccactttattatggggagatgatttgaacagacatttctcaaaagaagacatacagatggcaaactggcatatgaaaaggtgcttaacatcactgatcatcagagaaatgcaaatcaaaactactatgagatatcatttcatccaagttaaaatggcttttatccaaaagacagctgtattattccattttcatgctgctgataaagacctacccaagactgggaagaaaaagaggtttaattggacttacagtttcacatggttggggaggcctcagaatcatggcgggaggcaaaaggcacttcttacatggcaacagcaagaaagaatgaaagagaagccaaagtggaaacccctgataaacccatcagatcttgtga

SEQ ID NO: 355330 - DNA, 618 bp, Homo sapiens
tagtctgggcaaaaatttgactaataccctattagcacaggcaaccaaagcaaagagggacaaatgggatcacatctagttaaaaagcttatgcagaggaaaagaaacaatcaacaaagtgaagagacaacccacagaataagagaaaatatttgcaaactacccatctgactaaggactaatgaccagaatatataaggagctcaaacaactctataggaagaaacatctaacaatccactttattatggggagatgatttgaacagacatttctcaaaagaagacatacagatggcaaactggcatatgaaaaggtgcttaacatcacygatcatcagagaaatgcaaatcaaaactactatgagatatcatttcatccaagttaaaatggcttttatccaaaagacagctgtattattccattttcatgctgctgataaagacctacccaagactgggaagaaaaagaggtttaattggacttacagtttcacatggttggggaggcctcagaatcatggcgggaggcaaaaggcacttcttacatggcaacagcaagaaagaatgaaagagaagccaaagtggaaacccctgataaacccatcagatcttgtga

SEQ ID NO: 355331 - DNA, 587 bp, Homo sapiens
actattcagcgataacaaagaatgagatcctgtcttttgccacaacatagatggaattggtggttgttatgttaagtgaaataagctagacacaaaaagacaaacgttgcatgttctcatttattgtggggtctaaaaatcaaaccaattgaactcatggagatagacagtagaaggaaggttatcacaggccgggggtggcagctagggagagtggaggggagatggggatggttaatgggtacaaaaaaattagaaagaagaagaactagtatttgatagcacaacagagtgactatagtcaataataatttaattgtacatttaaaaataaccgaaatagtatcattggattctttgtaacataaagaataaatgtttgagaggagggataccccagttttcattatgtgattattatgtattgcatgcttacatcaatatctcacgtamcccataaatacatacatttactatgtacccacaacatttaaaaataaacaacttaagaataaatagataaataaattcaagtaaaagataaatattggaattatcagagagggaatttaaaataactatattta

SEQ ID NO: 355332 - DNA, 615 bp, Homo sapiens
tgagtattgccaaggaagaaggctttaatttggtgctgcagctgaggagatgacaggtcagtctcaaatccatctccctgaccaactaaaattagtggtttatatagcagggaagaaatgtaaccacatgtaggaaaacaggaattagggaggagtaaggaagaagagttggtcaaaaggaagcaagtggttagttaggcaatcatgatggatgaggaggtctgatgtctcactggtcaaatgcagtgatctggtgagtttcagatccttgatactatctgggaggattgattgctggtttcctgagaacgaaactcagataagaaaaatgtaactttctcaagttttaagactgggtggatcaatttctatgtttattcaaagaaaccataaacatcagctctatgggacagtggggtcagtttcacctcctcctcattatctccaactgccatttacagagcacctaagaggaaccgggaactatactatttttcttttcttcccccccagatttattgaaagtataattaaaaataaaaattgcatctattcaaggtatagaaatratatgatagatataataagctgtcaaactattatcacaaccaagct

SEQ ID NO: 355333 - DNA, 592 bp, Homo sapiens
gattttttagcttaatgattcatgaacttataaaaatctggcttctataggtgtgaatwtggtgacatcatgaaacactcttatgctaaaatctataccttgctttcaatttaaaaacatgatgagttatatagtagagtttctatttcttcacagtgaaggtaaaagacaaatggcatgaacctccctgcccaaccccccgcaccccccaaaaaaaagagaaaagaaagaagagacaggagtcaaattttggaacatagccataagcaaatagaatagtattaactcattacaggcagatagggtagctcaattgggaagggcaaaatcagtattatataaattatggaatggtccaaaatcctgagaattataaacatcaagaatgttgaaatagtagaggagatgatgttaaaaaacaagagagttgtttaaaagtctttttaagaagcaacatctcatttccttttatataggtaagcatcttttccccagcaagtagaaaagtagattggttttgtttttgagggagtacaaaatatagagttatatatgaaaattaatgattttttttactcttaacctatgaaaa

SEQ ID NO: 355334 - DNA, 656 bp, Homo sapiens
ttttaccattgcaaaatagacattatgttaagggaaagacgtatactgtcaaaagaatataccttttagaagatatggttttatttgtagtcctaccatctaccagttktacggcctaaggtgagtaattttaagtactaggtttcaatttcctcatatgcaacatgaaagccttaaagcagaccccaaggtcccatccaattccaagatttaatgatctaggaatatccagggcttgaataggatggggagttgaagaactattagaaagaagaagaatataaatattatagtttggataaaatagatgttgacaaagagacttggcagagattatagagtgtattagtccattctgacattgccatacagacatacccaagactgacttgtttataaagtaaagaagtttaattgactcacagttgtgcagggctggtggggcctcaggaaacttacaattatggcagaaggggaagcaaacacgtccttctttacatggtggcaggaaggagaagaatgagagaagggagaaaaagccccttataaagccatcagaactcatgaaaacttactcacaatcatgagaacagcatgggggaaatgcccctatgatctaatcacctcccacaaggtctcacccccaacatgtgggg

SEQ ID NO: 355335 - DNA, 656 bp, Homo sapiens
ttttaccattgcaaaatagacattatgttaagggaaagacgtatactgtcaaaagaatataccttttagaagatatggttttatttgtagtcctaccatctaccagttttacggcctaaggtgagtaattttaagtactaggtttcaatttcctcatatgcaacatgaaagccttaaagcagaccccaaggtcccatccaattccaagatttaatgatctaggaatatccagggcttgaataggatggggagttgaagaactattagaaagaagaagaatataaatattatagtttggataaaatagatgttgacaaagagacttggcagagattatagagtgtattagtccattctgacattgccatacrgacatacccaagactgacttgtttataaagtaaagaagtttaattgactcacagttgtgcagggctggtggggcctcaggaaacttacaattatggcagaaggggaagcaaacacgtccttctttacatggtggcaggaaggagaagaatgagagaagggagaaaaagccccttataaagccatcagaactcatgaaaacttactcacaatcatgagaacagcatgggggaaatgcccctatgatctaatcacctcccacaaggtctcacccccaacatgtgggg

SEQ ID NO: 355336 - DNA, 656 bp, Homo sapiens
ttttaccattgcaaaatagacattatgttaagggaaagacgtatactgtcaaaagaatataccttttagaagatatggttttatttgtagtcctaccatctaccagttttacggcctaaggtgagtaattttaagtactaggtttcaatttcctcatatgcaacatgaaagccttaaagcagaccccaaggtcccatccaattccaagatttaatgatctaggaatatccagggcttgaataggatggggagttgaagaactattagaaagaagaagaatataaatattatagtttggataaaatagatgttgacaaagagacttggcagagattatagagtgtattagtccattctgacattgccatacagacatacccaagactgacttgtttataaagtaaagaagtttaattgactcacagttgtgcagggctggtggggcctcaggaaacttacaattatggcagaaggggaagcaaacacgtccttctttacatggtggcaggaaggagaagaatgagagaagggagaaaaagccccttataaagccatcagaactcatgaaaacttactcacaatcatgagaacagcatgggggaaaygcccctatgatctaatcacctcccacaaggtctcacccccaacatgtgggg

SEQ ID NO: 355337 - DNA, 551 bp, Homo sapiens
aatagccaatgaaaacttcccatttaattcaattatccatgtattaacctttaatggcatatatacaaaaatcagttatttcatgttaaattataatattctgttgaaggatagtagaaagcacttacaattttcaaatattgaagagaattttactgtttgagctggatgttttgacggcatagtgaatttaaacttctgcatattaagtatagctccatagtacacatgacatgaccatttttgaataagtgccacttttcaaattttctttggcacttatacaaatattgatactgtataataaagagaggaacaaataccaaatataattttaaagacaatytgttaaaagaatgggaagataaagaatgattcctttatgtggcagtcaataaatcaaatgatatttgaagagttcagctcctggccaaaatcctatgtgtgattttcaggacagaccctaggcaataacaaagttacctggtaggcctcacagaaaaaaactactctcctcacagcagacatgctgtacagccggtgcattgcag

SEQ ID NO: 355338 - DNA, 422 bp, Homo sapiens
agagaagttaaaattatcttctttaattactagattataaccccattaactcctctgcatgaaaagtgggaattaggggatagaaaaagaaaccatagctgacaattaaaactccaaagcaaamtaaagggagggtagggaaaaacatcatacatagcttcagatatttcaggtaatttatttagtagtgcatatttattgtagattataatgaacaaactataaccatagtaagcatattattttggttttgaattttgttttttcagattggctaaacaagcagcattgaaagctacaaacttaaaagaaaacccttatttaaatatgcccagagctgtaaattagttatgtcctaaataagttattagaacaatattgtcactgatgcattatttataggtagttgttgaaaagtttgt

SEQ ID NO: 355339 - DNA, 618 bp, Homo sapiens
attataaccccattaactcctctgcatgaaaagtgggaattaggggatagaaaaagaaaccatagctgacaattaaaactccaaagcaaactaaagggagggtagggaaaaacatcatacatagcttcagatatttcaggtaatttatttagtagtgcatatttattgtagattataatgaacaaactataaccatagtaagcatattattttggttttgaattttgttttttcagattggctaaacaagcagcattgaaagctacaaacttaaaagaaaacccttatttaaatatgcccagagctgtaaattagttatgtcctaaataagttattagaacaatattgtcactgatgcattatttataggtagttgttgaaaagtttgttaccagcagaagtactgaagtgacatttccaaagacattaacatgaaaatgagtagaatttgaagagaaaaaaatcattcagtgtgcaacctcttactaaaatagtcttcaataatgtatacagcaactacatatttttacttctaatatacacatgcmatattcataggtctgcactaaagctttctccaaattaagtttgcatgtataaatgaaaaaataaacaccc

SEQ ID NO: 355340 - DNA, 548 bp, Homo sapiens
tttctgaggttaaaatggaagcaaataaggttgatagcatttatattttctttatcacttaaaacctgtcatagtaatttaacaataggtttttagattttcacggtaaaatgtttaattatactgccctataagtttatttaagggcattattttagttacttaacccagcttatcctataaaatacgatccaaagttatttayctgcacatattccattatgtgtctcataaaagcaaaaattttaaactatttttaaagttaaaaataaaacatcagaacagtaagttatataccctaaatatatacaatttttgtctattaatcctcaataaggctgaaaacaattcttacattaagtcattgtctttttgccctggaatattcaaagccatcagccaacaaaacaaaacgtttttatctcgctttgtcttacaaaaatgtttaagtaccaacataaattagaatatatcttctctcttctgcttaatctttcacatgacttggcttcaaacttatggtcagactcacatgcttgtttgaagct

SEQ ID NO: 355341 - DNA, 586 bp, Homo sapiens
ttttttatgtgaaatatcatgctccctcagaatgttacaatattgactcagattgctgttacaaatcatctatcttaactaaaaattagtgctgtcaaaaatgagtaatagattgagaaagaataaattttgtgtaattcaaccaattcatactggttgtaaagacttaatacacatgaaattaattatttgagaatacttatcatcagatcacagtttataaagccaatattctcatgtattggactaacaaccacgtgtacaacttatatggttagcctgttctcagtttatggattcagaaatgttttcttcaggtacaaatgagaaatttgtcatgactacatttctggtctattgggttccataaggcatcatataaatttaaaacttttgacttatctctatgtcttcttttgctctcctttcttactatgcaaataccatgttgagcacctggaatattgggaaacattagaagcaggaaagcwgtgcaaaactttacatttatgaaagtcaaattgaatgcaaaatatgagctctttattctcactgtcattctcttgactatgatttaaaaacatag

SEQ ID NO: 355342 - DNA, 586 bp, Homo sapiens
ttttttatgtgaaatatcatgctccctcagaatgttacaatattgactcagattgctgttacaaatcatctatcttaactaaaaattagtgctgtcaaaaatgagtaatagattgagaaagaataaattttgtgtaattcaaccaattcatactggttgtaaagacttaatacacatgaaattaattatttgagaatacttatcatcagatcacagtttataaagccaatattctcatgtattggactaacaaccacgtgtacaacttatatggttagcctgttctcagtttatggattcagaaatgttttcttcaggtacaaatgagaaatttgtcatgactacatttctggtctattgggttccataaggcatcatataaatttaaaacttttgacttatctctatgtcttcttttgctctcctttcttactatgcaaataccatgttgagcacctggaatattgggaaacattagaagcaggaaagctgtgcraaactttacatttatgaaagtcaaattgaatgcaaaatatgagctctttattctcactgtcattctcttgactatgatttaaaaacatag

SEQ ID NO: 355343 - DNA, 589 bp, Homo sapiens
tgtcagcatgaacatgtacagatgatacagagaatgagttactccaaaatagtagcataatctgaaagtataagctgattttaaaagggctgggtaatttcatggatggttgatccataacaggctgtccaaaacaagaaatctcttatgtgtatactcagcctttgaggctaacattgttgaaaatattagtgccaaagatagactcagaggttactgaaatttgtgaaacagtggtcttatctgagaatatttaaacttacaaatatagactttacactttgaagcagcaaagtgtaaagtctgtgcatgtgtgactatcatctgcatagtactttgaatactgtgatatattaattttaaataatagtatagrcataaaaagacaaatatttgccatgttttaaaaacctacattttcaagtataaatagtagtactgatgataaattgcacaagagggaagtattaagcaaaaatatatggtaacagataactggttcttctttattttggcatctctctctctctccctcaacgcctctttctctcttaatgtttaatcagtttattaggtagaaaaaagaaag

SEQ ID NO: 355344 - DNA, 589 bp, Homo sapiens
tgtcagcatgaacatgtacagatgatacagagaatgagttactccaaaatagtagcataatctgaaagtataagctgattttaaaagggctgggtaatttcatggatggttgatccataacaggctgtccaaaacaagaaatctcttatgtgtatactcagcctttgaggctaacattgttgaaaatattagtgccaaagatagactcagaggttactgaaatttgtgaaacagtggtcttatctgagaatatttaaacttacaaatatagactttacactttgaagcagcaaagtgtaaagtctgtgcatgtgtgactatcatctgcatagtactttgaatactgtgatatattaattttaaataatagtataggcataaaaagacaaatatttgccatgttttaaaaacctacattttcaagtataaatagtagtactgatgataaattgcacaagagkgaagtattaagcaaaaatatatggtaacagataactggttcttctttattttggcatctctctctctctccctcaacgcctctttctctcttaatgtttaatcagtttattaggtagaaaaaagaaag

SEQ ID NO: 355345 - DNA, 287 bp, Homo sapiens
tgtttcccataaaacagactggaaataactaactagctgtggactgtctcagagtctgagacaatttgaatagttttccagttgcagrttcttaaaagtgtaaattcatggttaaaacacaataacactactttagtgagtcatggaaaataatattttcatttaaaagtataatgtactactttttgaagatgaacatgagctgactgtgctaagtaaataaaagaagaattttgtaaaaatatgattagaaacagtaaccatctttttaactattaaaatatcag

SEQ ID NO: 355346 - DNA, 545 bp, Homo sapiens
ggcatatgaagaagaataaaactggactccttccttctaccatgtacaaaaatgaattcagaatgaattaatgatttaaatgtaatacctcagactataaaaatcctggaaaacaaccttcttgacattggaattggcaaatactttttggctaagtcccaaaagcaactgcaacaaaaaacaaaatagacagcaggacataattaaactaaagagcttctaaacagcaaaagaaaccatcaacagaacaaaccacctacaaaatgggagaaagtatttgtaaactatgcatctaacgaatgcctaatatatggaatctacagaaaacttaaacaaatcaacaagcaaaaatcaaataaccacattaaaaaatggcaaataacatgaacagacaattctcacaagaagacatataagtggccaacaaayatatgaaaatatgctcatcatcactaatcatcagagaaaggcaaatgaaaactaaaattacataccacttcacatcagtaagaatcgccattactaaaaggtcaaaaaacaacaga

SEQ ID NO: 355347 - DNA, 573 bp, Homo sapiens
gcatttaatgatgttcttttttttagttctaaatagctagaggtcagggataatgtyttactttgtcttttgttagaatatctgatgcagagttgacactaacaatgtcagttgatttcatttgaattcatcatacaattggattgaaattctgattattattctcatgtagtccagataaagaaatggaaggagtatttcttctatttcttttcaaatatataaaaagtgctgatttgggactaaaaagcttctattttattaagtagaaaaaatttaaatcatgcttcaacatcttctacagtagtgattataaacttcttaagaagtcactgataccttggaggatgtggcacaaacctaaaggccttctcccttataaatataaagttggattccagagccttcccaaaccttaacttctagtatccaaggactatgaaaagaatcctgatctaaaaaaatatataaagtgatccagatatgttatttctatctataaatgaggaaaccatgtttcagtgatataatcctaataatcccaaagcttactaatagtaattattattgtta

SEQ ID NO: 355348 - DNA, 660 bp, Homo sapiens
tagtaatataacattttatggaaatcaatgatacttacaataaagtttagacagtatgcaaatttagatattaaagactaaattctacacatactatatttttctaattattttcatatgaaaaaatagaaatatttacatgtttatcarggttaccctaaacatgcgtgattatgaccaaactgtggctgtgcaaagatcaaacacataattatgcattacaaaaaattgggtggaacatacagtgtgatgttatattatatatatattacattcaaaattattcaaatgtatacataacgtgataatctacaataaaacataaaagacaaaaatttggaatatctgtgaaaagttatcaagaatatcagtatcattcttgaaattagctttagtgtgtatattgatgtttgttctatgtctttatattttacatatgcatcaagtatattctttgttatgcatgaaatatattattaaagtgtaataaaaagctgcaaaagctcaattttaaattgagacaaaaatacatctcatgtaaaacttcttccatatgcacagcaatatatttggaaattaattgtatttggctcatacttagtgtttttgtatttatcaaattaaataaagaataacacttaggtataatttcagtattgt

SEQ ID NO: 355349 - DNA, 660 bp, Homo sapiens
tagtaatataacattttatggaaatcaatgatacttacaataaagtttagacagtatgcaaatttagatattaaagactaaattctacacatactatatttttctaattattttcatatgaaaaaatagaaatatttacatgtttatcaaggttaccctaaacatgcgtgattatgaccaaactgtggctgtgcaaagatcaaacacataattatgcattacaaaaaattgggtgraacatacagtgtgatgttatattatatatatattacattcaaaattattcaaatgtatacataacgtgataatctacaataaaacataaaagacaaaaatttggaatatctgtgaaaagttatcaagaatatcagtatcattcttgaaattagctttagtgtgtatattgatgtttgttctatgtctttatattttacatatgcatcaagtatattctttgttatgcatgaaatatattattaaagtgtaataaaaagctgcaaaagctcaattttaaattgagacaaaaatacatctcatgtaaaacttcttccatatgcacagcaatatatttggaaattaattgtatttggctcatacttagtgtttttgtatttatcaaattaaataaagaataacacttaggtataatttcagtattgt

SEQ ID NO: 355350 - DNA, 586 bp, Homo sapiens
tttatcattaaggagaatatgtctctatgaccataatttttcctgcatgtaagattatagcagaaaaggcagtttcctatataggccagtggacagggtaattgcagtcaaatattacaaggtcacgatatggcacttctaacacaggamtcattatttacaatcataatgagtccatctgcaatagtcatggtattatattttccaagttccattacaggcatgtgtattaaattccataggtacatcataatttagaaatctagtttgtaatatggcaatgtagaagaaaggcagtttgtaagtcaaattgtatgaattattatgaaaatttatttaatctgtgactacagtattacaaaatgatacatgtcttggtaccatgcattttggcttttattcataagtgttagctatactagtagaaacaaagaaatcaggagttagtgtcaaatcatccatggattctttactattttgggatcacaaaactgtgtctctcataaaagctatctataatctttgaattaaaattcaggcatgcataagaaaagatagttttccccaggctggcataagcaatggt

SEQ ID NO: 355351 - DNA, 498 bp, Homo sapiens
gggtgaatccattttcttccccttttcaacttctagaagctaccatattctttagctcattaacctctttatccatcttcaaagcccaactacagcaggttgagttctactcacattkcatcaccctaatttcctcttctgctcctttcctccacatttcagaatctttgtgattacattcaatttttttcagataattcaatatcatctccaaattttaaggttaattgactagcaactttaattccatctgctacattaatacctctttatcatgaaaagtagcatattcacatgttccagggattcgaatatggatatctctggaggaccattatactgactactataaataacactccaataaaatattttttgtatgtatgtatgtatgtatgttcaatattacatgaacagatatagaagagatgaaagatataaggcaggttaaaatataatatatttgcttagtctataactaataattttaaccaattc

SEQ ID NO: 355352 - DNA, 498 bp, Homo sapiens
gggtgaatccattttcttccccttttcaacttctagaagctaccatattctttagctcattaacctctttatccatcttcaaagcccaactacagcaggttgagttctactcacattgcatcaccctaatttcctcttctgctcctttcctccacatttcagaatctttgtgattacattcaatttttttcagataattcaatatcatctccaaattttaaggttaattgactagcaactttaattccatctgctacattaatacctctttatcatgaaaagtagcatattcacatgttccagggattcgaatatggatatctctggaggaccattatactgactactataaataacactccaataaaatattttttgtatgtatrtatgtatgtatgttcaatattacatgaacagatatagaagagatgaaagatataaggcaggttaaaatataatatatttgcttagtctataactaataattttaaccaattc

SEQ ID NO: 355353 - DNA, 521 bp, Homo sapiens
aatgacagatatatgataagttttgaaacataatttctctctcyccagtgctcagttttgttaaaaaaaaaaatcatcattggactgagtgggttgcaaaatggactttagtcttataattggccagattatttgcataaagtacaccatgaataattttttctccgtaggccttttatattggctttgatggaagactgttgcacaaggaatctcaaataagaccttttaaagccaagcccaaccatgggtttctatcctcaaacacctgtgagttgggtgactctccccttctctcctcttaaggtcccaagataaacttggatcccttaagcctgttagaaagtgacattttttactaaccacaggtcaggaaccctgtacaggaactgcatacatgagggtgtgaggccagtttcccccgtggggcttttactggctctgcaagttcagattaactccttaaaaaaaagcatatccttcctgtcaaagccttggtaaaacaaccactttcttcagtt

SEQ ID NO: 355354 - DNA, 291 bp, Homo sapiens
atgatcacaaagtaagccttatacaaaatgtgaggagtaagatgtatccacatcactgctaatgtcctatcaggctaataamcctggataatgggtacaaagtgcattttgagaagataaagttaggaagaaatctagattgtcttaataaatctagatcacagtaaaatattatggaggtaatatttctatagaaagatgaagtattagaattacagtggtaattagtcattaacatgagctcaatggactgtcattgagaactaattgagcaactctattagcaaggct

SEQ ID NO: 355355 - DNA, 474 bp, Homo sapiens
tctcaacgaaatacccagaataatgatcaccaattatctgggcactctgtggccaagttaattcaacacattaaatcaacacaaagaatcaactatgaggtggaaaagtagaaatgtttagtagcttggggttgaagagaaaggttaggacaagtaatrtgaattagagaatgggcagcctatatgtgacacacaaaaccatgtgacaggatgtgtatttctaattaaagactcatgcctagctcattctacgactaggtaaaaaaatgaaaagaaacaagcaagtctgactgaaaataattacttgttgaggtaggagtgccataaaagagttttactttttgagtcaagttaagagtgattcaagaaggagggaattaatcaaatgtgttgaatactgcttgtaggtttattgggctgagacctaagaaatgactactagttttgtcattatagcaataattttactgaacg

SEQ ID NO: 355356 - DNA, 589 bp, Homo sapiens
acaggcatgagccactgcgcccgacctatttatttatttttgagacagagcctcactctgtctccaggctggagtgcagtggcacgatctcggctcactgcagtctccacctcccaggtttaagagattcttctgcctcagcctcccaagtagcaggggctacagrtgtgcaccaccatgcccagctaatttttgtatctttagtagagaaggggtttcaccatgttggccaggatggtcttaatctcttgatctcgtgagatttttaaaatattattagaaaacagcataagtttagctttatcctatctgtggcctatagggcaaagaaagattctttcacgttagtattggttttcttttctggaaaattgatgtcagggtagaataccctaatccattacaggtcagcatataggttgtgaatgcacagtttttctacaaatgtttttacccaaaatatttagatatttgagcagccctggggtatatttattcaggtagaatcattattcctaaaatctcattcaaaagtgtatttacagaccctgagaaacatgtagaaaagtgtcaatgtcagcagtgggat

SEQ ID NO: 355357 - DNA, 589 bp, Homo sapiens
acaggcatgagccactgcgcccgacctatttatttatttttgagacagagcctcactctgtctccaggctggagtgcagtggcacgatctcggctcactgcagtctccacctcccaggtttaagagattcttctgcctcagcctcccaagtagcaggggctacaggtgtgcaccaccatgcccagctaatttttgtatctttagtagagaaggggtttcaccatgttggccaggatggtcttaatctcttgayctcgtgagatttttaaaatattattagaaaacagcataagtttagctttatcctatctgtggcctatagggcaaagaaagattctttcacgttagtattggttttcttttctggaaaattgatgtcagggtagaataccctaatccattacaggtcagcatataggttgtgaatgcacagtttttctacaaatgtttttacccaaaatatttagatatttgagcagccctggggtatatttattcaggtagaatcattattcctaaaatctcattcaaaagtgtatttacagaccctgagaaacatgtagaaaagtgtcaatgtcagcagtgggat

SEQ ID NO: 355358 - DNA, 589 bp, Homo sapiens
acaggcatgagccactgcgcccgacctatttatttatttttgagacagagcctcactctgtctccaggctggagtgcagtggcacgatctcggctcactgcagtctccacctcccaggtttaagagattcttctgcctcagcctcccaagtagcaggggctacaggtgtgcaccaccatgcccagctaatttttgtatctttagtagagaaggggtttcaccatgttggccaggatggtcttaatctcttgatctcgtgagatttttaaaatattattagaaaacagcataagtttagctttatcctatctgtggcctatagggcaaagaaagattctttcacgttagtattggttttcttttctggaaaattgatgtcagggtagaataccctaatccattacaggtcagcatataggttgtgaatgcacagtttttctacaaatgtttttacccaaaatatttagatatttgagcakccctggggtatatttattcaggtagaatcattattcctaaaatctcattcaaaagtgtatttacagaccctgagaaacatgtagaaaagtgtcaatgtcagcagtgggat

SEQ ID NO: 355359 - DNA, 625 bp, Homo sapiens
tactgcttaacatacattaggtgcttaataaatatgtgttaaataggtcaatttttttccagataattgaatattgaataagttagtcaattaaatacttttttaggtttttaattagagacaacttaatgaaatatgtaatttttattatgtataatagaatgtgaaaataaaaaataaagatctacactatacttatttactatatttacttactcaaaagatcctacagataaaaaaacatgcatctttaaagctcacattaggagggcttgacatgtttaaacaactattgctggctacttcttatttaaatggtttttccctgttggaagatttttaaagattttatacaaattggaagcttttctttctctgtttcataaaacagactcaagtataaaaacacaaagactagagagtattctaaacagtgagatttggaattcatatagccctggagatgcaacatagakagaagtaattttctgcaaaaattggcaaccatagcaactgtacagaacatattaaagaggaatacaaatccttgtaaatcaatgttgtttaaattaagcagtatctagaaggaatagtgctagctggagctacaaaaatataattagta

SEQ ID NO: 355360 - DNA, 625 bp, Homo sapiens
tactgcttaacatacattaggtgcttaataaatatgtgttaaataggtcaatttttttccagataattgaatattgaataagttagtcaattaaatacttttttaggtttttaattagagacaacttaatgaaatatgtaatttttattatgtataatagaatgtgaaaataaaaaataaagatctacactatacttatttactatatttacttactcaaaagatcctacagataaaaaaacatgcatctttaaagctcacattaggagggcttgacatgtttaaacaactattgctggctacttcttatttaaatggtttttccctgttggaagatttttaaagattttatacaaattggaagcttttctttctctgtttcataaaacagactcaagtataaaaacacaaagactagagagtattctaaacagtgagatttggaattcatatagccctggagatgcaacatagagagaagtaattttctgcaaaaattggcaaccatagcaactgtacagracatattaaagaggaatacaaatccttgtaaatcaatgttgtttaaattaagcagtatctagaaggaatagtgctagctggagctacaaaaatataattagta

SEQ ID NO: 355361 - DNA, 514 bp, Homo sapiens
ctttttcatttcctgcaactaccatatggactgattgcatttgaacagagtgaaatctcccttccaaaattcagtgctccacttgtgactaattatgtaggtaataggattataaatcaatgataagtggcagacatagaagactcagatgaaagtaaccaagctacagtgtccccctcaggtgtcccaaattatagtacagatgaagagtcatagtctcctaacctgtacaaatcataagccatctgttagttaggcagcagctgaggcaggatgctgcaagragtgttgaggaaagagtgaatgcaggagcaaggagggaccacacctggggagatctatcagtagaacccagcccacctccagagttcctaattctgaaaccttccagagtccaaagcttcaaaccctcccttgggtttgaatcctaaaccttcttcaaattgcatgttgtgctcaagagaagatcctagagacctggctggctttcttccagaggcccccctgctagagg

SEQ ID NO: 355362 - DNA, 635 bp, Homo sapiens
ggtagcactcaattgtcaaaagtgaggtgggcatagttacaataatagcacaggcaaagcagcaatcagaatagtctgactcgtgtagacctctggcattggcaaattattttttatgtttttagaagtgaaataaataggaagcctactacattcttacttaatttgtaaatgcagcaaatttccagataaagtggacaaaatactaatttgaattacaaaaatagagagtcatggctcttcaatcgatttccagacttgaggcggtttatagacccagaactccttgaataatgtgagggccaggtttccttgaggaaggaccccactatatgaccaaaaacttatactgttaatttttctcccatccgtctttaaggagacctccartctttcatcagggtaactgtgcattggggaacggagaatgatcagaattttcagggcctactggacaatggctctgagctgacattggttccagggaacacaaaatgtcacagcggccctccagttagagtaggggcttatggaggtcgggtaattaatggagttttagctcaggtccaaattacaggggccctaatatgtccctggactcatccagtggtcattcccctagtgtcagaatgcat

SEQ ID NO: 355363 - DNA, 574 bp, Homo sapiens
tgagattctttcttgtttgtactagtttacatatattttatttcattgcaaaaaatactttttttttctggaaactactttttctgtttagcaawgtgataatcagcctgttttctgcaatggctcccctcatacatttgttggaggtacatgtgttcagtggctgaaagccatttaagtgccggaggaatcattctgttcatacatgtgctgatgtgcatggatttttcatgacagattcctaagtgtagaacttcagtttcaaatggcatatttacattttatttaaaagggttatttcaaattatactccctcaaaatagatttctcaggtttttatagggtgcaaatcttctgtatgacatcaatttgttggcattaattctattttactgagcatcagtaactttttaatcttttatgtcttatgggccatttttactttgaattgcttcttcatattttaatcactttttaattagattgtttgtcagttttggttagtgatttgtagttctcactgaacaatggataccaatcttttgttatgtgtgtcataggataggttttatgt

SEQ ID NO: 355364 - DNA, 574 bp, Homo sapiens
tgagattctttcttgtttgtactagtttacatatattttatttcattgcaaaaaatactttttttttctggaaactactttttctgtttagcaatgtgatartcagcctgttttctgcaatggctcccctcatacatttgttggaggtacatgtgttcagtggctgaaagccatttaagtgccggaggaatcattctgttcatacatgtgctgatgtgcatggatttttcatgacagattcctaagtgtagaacttcagtttcaaatggcatatttacattttatttaaaagggttatttcaaattatactccctcaaaatagatttctcaggtttttatagggtgcaaatcttctgtatgacatcaatttgttggcattaattctattttactgagcatcagtaactttttaatcttttatgtcttatgggccatttttactttgaattgcttcttcatattttaatcactttttaattagattgtttgtcagttttggttagtgatttgtagttctcactgaacaatggataccaatcttttgttatgtgtgtcataggataggttttatgt

SEQ ID NO: 355365 - DNA, 574 bp, Homo sapiens
tgagattctttcttgtttgtactagtttacatatattttatttcattgcaaaaaatactttttttttctggaaactactttttctgtttagcaatgtgataatcagcctgttttctgcaatggctcccctcatacatttgttggaggtacatgtgttcagtggctgaaagccatttaagtgcyggaggaatcattctgttcatacatgtgctgatgtgcatggatttttcatgacagattcctaagtgtagaacttcagtttcaaatggcatatttacattttatttaaaagggttatttcaaattatactccctcaaaatagatttctcaggtttttatagggtgcaaatcttctgtatgacatcaatttgttggcattaattctattttactgagcatcagtaactttttaatcttttatgtcttatgggccatttttactttgaattgcttcttcatattttaatcactttttaattagattgtttgtcagttttggttagtgatttgtagttctcactgaacaatggataccaatcttttgttatgtgtgtcataggataggttttatgt

SEQ ID NO: 355366 - DNA, 574 bp, Homo sapiens
tgagattctttcttgtttgtactagtttacatatattttatttcattgcaaaaaatactttttttttctggaaactactttttctgtttagcaatgtgataatcagcctgttttctgcaatggctcccctcatacatttgttggaggtacatgtgttcagtggctgaaagccatttaagtgccggaggaatcattctgttcatacatgtgctgatgtgcatggatttttcatgacagattcctaartgtagaacttcagtttcaaatggcatatttacattttatttaaaagggttatttcaaattatactccctcaaaatagatttctcaggtttttatagggtgcaaatcttctgtatgacatcaatttgttggcattaattctattttactgagcatcagtaactttttaatcttttatgtcttatgggccatttttactttgaattgcttcttcatattttaatcactttttaattagattgtttgtcagttttggttagtgatttgtagttctcactgaacaatggataccaatcttttgttatgtgtgtcataggataggttttatgt

SEQ ID NO: 355367 - DNA, 618 bp, Homo sapiens
tacattaacgtgagagtccttgtactactattccacgtaatacctggggcttctaggtgttgtatgtgattgcagttacctgtagccacatttaatgtaactcgttttcagtgtttcatctcactggcttgatamcagagccttgtttttctaccaggtgttgaaggaatctaacctctgtttagagattcatcactgatatggactgcttgtttctccttttgtgataatattataaaaataatacaaaattaatgtaagaaattttataaaagtatgaaaacctttttaaaagataatttttctaaaatttctatctagaggtataatttttagaaaatatgtattttttattatggattttgtcaaatttatataggtcaatgtatacatgtgacacttatttagaaaattttaatcttattgtatatacatttcctcctgcaaaaacttgccatcttgctatatttatcattttctaattcactttgtttgtattatggctgaaagtgtaactgaacatttcattgataaaattattttaatgctactatatgcacataagttttaatcattctttcgtataagatgttggattacttctaatgttaattttgt

SEQ ID NO: 355368 - DNA, 557 bp, Homo sapiens
tttgaggtacacatttatattgctgaggaagtgttttaagctggaatactggtgaagatccctattacttatggtagaattktagaatttcaagcagctcaacttgctgtcacaattgatatgtctaattttaatcaagtccacagggtatctgtcatctatgactttccaagagaatataaccttgatgtgctgaataatctggttctcttaaatgaggaatgatatctcaagtgacttacacatattaagtagttagtagtattagtaataatcacaaaataaccataatgcaaaattaataacatttctgagtcactgactatatgccagagacattttaagtgttttgtctgttttaatattttttccacacaacaaaatatgaagttggtactatttttgtaaatgtaggcataattatttctatcaacattctagtctacttttccatcatctgctacctgaatccatgcaaaatttcctgaatggttggctctttacagtgtggcccttctgtaatttaatccattgaatatcttggaggcttttcttaa

SEQ ID NO: 355369 - DNA, 608 bp, Homo sapiens
gtggtcttttgtggctgccttctattatttagtttaatgtttttaaaggaccatccatagaatagtgtaaataaggacttcgtttctattgccaaatagtatcagatgctatttataaatacaatttatttattcatttatcagttgatggatattgattttcttccacttttggccattatgaataacattgattaacattgatgtacatgatttctgtggacatgtttttatttttcttgggtatatgcctakaaaggcaattactgaattatgtgtaaatgtaagtgtaaccttttgaggaattgctagactttttcagagtgagtgaataattttctattctcaccaacaatgtatgaaggtttcaatgtctccacaatcttgccaacccttgtctttcacataaccaaaaaggttattttttattttaatttataaacacactccaacagacacaaaaaaggaaggtttctttccatatattggagggaaaagtgaataaattaaacactaacttacctaatacttcactgtaaaactgatcccacttctttttgttaaaaatctcaaatgcaaagtcaaaatgaagaaaatgcaacagactt

SEQ ID NO: 355370 - DNA, 587 bp, Homo sapiens
aaaagatgtgggataaacctcaaatttaacagcagattgttggaatcaatgaggatggaagctgaaggtgacaagcacagttacctcatggtgttctgagcaagttcatcaagtatcaacattaaattgatacaaagactgtatttcatcggccacaccagcacattctcgcaggattcagggctaaaatacaactgtcagcataagaaacaaaaaagcccatttcttagacaacttgttaaaatgctatctttctttataactttctctaacttggtacatatcaatatcaatcaatgtcacaatgatttaagtattgacaatagaggttttggaaagcaagtgaataaagaaaaggatraatgattttgtgtttgtatgtgtgaataatcaatttcattcttattgtaaatgtggctgtctccagaacaagagataatttaattgtatatgaagagtttctagtataagaaagcagcattgtgtcaacagtgaggcagtggtgtgatctattcttatttatcttaacattctcaaatagaccgtcttcatttcctctatgtattttcacaattatgatattagca

SEQ ID NO: 355371 - DNA, 405 bp, Homo sapiens
atgagcctttctgattgatatttgggtgaccttagccacttttaattctctttcctccackaactatcttaaatttttctttttcagagaacctgtaaggttactttaggtaaagtttaaaagcatagaatattggcagtttagtctggtctctcttcaattggaatgacaagagccaaaagaaatgtgcaaccatgaggatctcataacctttcaatatcgtactgagaccagaaacccaaaatgatggtagagagtggtgctaagccctatgttttggtcacactctcacctaacagacaacctgaccaaaaggggaattttttttaacaaaattatgggaaaccattattttgaactaagctcttgtcctaggccccaacagaccaaaccaaactaaaatgg

SEQ ID NO: 355372 - DNA, 541 bp, Homo sapiens
agagaaatgcaagaccaaggtactagcatctacagagggcctttttgctgcatcctcacatggtggaaagtggaagggcaaaagtaaccaacactgcagcctcacatggtagaaaagcagaatagcaagcccgctgaatgctgcatgaagacttttttctttttttttttttggtaacgtagtttttctcttcttgcccaggctggagtgcaatgctgcsatcttggttcactgcaacctccacctcccaggttcaggtgattcccctgcctcagtcttctgagtagctaggattacaggtgcccacgaccatgcccagctatttttttttgtatttttagtagagatggggtttcaccatattggccaggctggtctcgaactcctgacctcaggtgatccacccacccccaaaatgctgggattacaggtgtgagccaccgcgcactgccatgaagctcttttatatggaccgccattaaaattcacaaggaatgcagtatcacttctctgaggcccctagtcttaatctgtcccattg

SEQ ID NO: 355373 - DNA, 547 bp, Homo sapiens
agggctgagagcttgctccaggctaccagcctcccagctgagaaagcaagcagggtgttcacacctccccacctgttgagtctacacaccaattcacatactctctggagttctgaccaggagattttgcattctattggaattgttgcaaagttcagctggaggtttccttctccctgtggtcttttcccagttcctctggcagccctccccaaggacccctgtgagacaagacagaaatggcttccctggaaacccagagaatccacagggcttttcccgctgcttcctgtacccctgtatttcactctgctctctaattgactcagytccaggtcaggtcaacttctgtggtctgaaactttaggtttcctggtaagggtgtgtgttcaaaggcagatgatctcctttcccactttcacagtttgggcactcacagtctttgggctgtctcctgggtcctgctggatccatcccttttctaccttcttgtcatacatttgttgaatatagttattgattccacatccatttttagacttaactt

SEQ ID NO: 355374 - DNA, 352 bp, Homo sapiens
ccacatccatttttagacttaacttgagttgtttaagagcaagtcatagcctgtcacttttggctttgtraaacttcccttccttgtgtagttgtttgtgacagagtacacttgtttctcatcccactgacccagaaatgcaacataccacagagctgattaccatgagataacctaatggtcaacaccagaatcaaataataattttccctcttcatgtgtgttttcttaagatagccactccacaactccggcagacaagactaggaaataatgctcatagaccttaagaaaagcacccccacagccccccacacagggattctctctatcacttccaggcagctggttg

SEQ ID NO: 355375 - DNA, 587 bp, Homo sapiens
acatttgttgaatatagttattgattccacatccatttttagacttaacttgagttgtttaagagcaagtcatagcctgtcacttttggctttgtgaaacttcccttccktgtgtagttgtttgtgacagagtacacttgtttctcatcccactgacccagaaatgcaacataccacagagctgattaccatgagataacctaatggtcaacaccagaatcaaataataattttccctcttcatgtgtgttttcttaagatagccactccacaactccggcagacaagactaggaaataatgctcatagaccttaagaaaagcacccccacagccccccacacagggattctctctatcacttccaggcagctggttgagctctctgccacttctgaattttctgtccgttttatgtcattatccttaatatctctaggaactgtaatacatttcttctatttcatgcattttggttttattttacatttcattgtattttacctgacacacacatctgaatttcacttcctcacctccatcagagcttggtttattgcaattctcaagggacagacttcaatacaa

SEQ ID NO: 355376 - DNA, 587 bp, Homo sapiens
acatttgttgaatatagttattgattccacatccatttttagacttaacttgagttgtttaagagcaagtcatagcctgtcacttttggctttgtgaaacttcccttccttgtgtagttgtttgtkacagagtacacttgtttctcatcccactgacccagaaatgcaacataccacagagctgattaccatgagataacctaatggtcaacaccagaatcaaataataattttccctcttcatgtgtgttttcttaagatagccactccacaactccggcagacaagactaggaaataatgctcatagaccttaagaaaagcacccccacagccccccacacagggattctctctatcacttccaggcagctggttgagctctctgccacttctgaattttctgtccgttttatgtcattatccttaatatctctaggaactgtaatacatttcttctatttcatgcattttggttttattttacatttcattgtattttacctgacacacacatctgaatttcacttcctcacctccatcagagcttggtttattgcaattctcaagggacagacttcaatacaa

SEQ ID NO: 355377 - DNA, 498 bp, Homo sapiens
atgtttatttctcctactgcattaggtgagttctgttgttttttagcggtgttgtgtttcctttcatctgtacattgctatttccatgtttaaagagatatccacatgttctagcttttataggtgtattcttgtgttgttcaacctttactatttattattggaatctaattccttgccaccagttgctttttgtttgggcaaggacttaatatttgccaccagaatttaatactgcaccaaaactcaatatttgctctaatgttgttttccagtcttgggagacttattgtgagcatctgaacttaaatgctgcactggaacttaaacccagacttgcagtgatttctagatctgggagaaaattaaacaatcatgggaacttgatttcaaaccttatrcttgtttcccagtcatggaaaatctccacatgattacctgggaattgtaaaaagtcttatcaaagattcagaccttcctttagatcttgccccctgc

SEQ ID NO: 355378 - DNA, 464 bp, Homo sapiens
gtggtatccctgtagctaggtacacaaagcagatgccaagatctgtgtgccactcactgtgattactactctcacttttgtctccaatttacccycggtggttcagccctctgaacactcttcatacctcctgtggggtgggacaaatgtgggctttcccccaaaatttacagacccatgaagaaattaaatgtccacttgaaatttcctcctcccatttcaataactgcaggtgaaaggaagttatctcacagtggtgtcattttggtgtgtggaaggggagtggtacagtccaaaaaaattattcatcttaccaatcataagttttctcaggtccgtgagtcttgaggttttctccttctttcttgagatctggtgaattcagagtggcatttgtgtatttggatagctactagttatacttttgtgggagaattgatgttgggtttttacaattttattgt

SEQ ID NO: 355379 - DNA, 560 bp, Homo sapiens
acacaaagcagatgccaagatctgtgtgccactcactgtgattactactctcacttttgtctccaatttacccccggtggttcagccctctgaacactcttcatacctcctgtggggtgggacaaatgtgggctttcccccaaaatttacagacccatgaagaaattaaatgtccacttgaaatttcctcctcccatttcaataactgcaggtgaaaggaagttatctcacagtggtgtcattttggtgtgtggaaggggagtggtacagtccaaaaaaattattcatcttaccaatcataagttttctcaggtccgtgagtcttgaggttttctccttctttcttgagatctggtgaattcagagtggcatttgtgtatttggatagctactagttatacttttgtrggagaattgatgttgggtttttacaattttattgttttgttgacatcacaaagtgtcaacaaattgacacttgatattgttgaaatagttttatgagtttgcaaaccattatgtttttagaatttgatgtctaccaaatattaaatgagttg

SEQ ID NO: 355380 - DNA, 603 bp, Homo sapiens
tgctctgaaaactcaaaatgctattatattgtggtttaacttgtgaaatgcatacattttcttcctcaggttttatggagattcaaaggaaagmaaccaactacattaggtgccaatactcagctctatgtttggatatgccagagtgatcttcatggtaagattatgacaaagtaaaataaggaatttcatgagggaaaaattgaattactgtttaacagctaataagtttaacaaaaatttaaaatgtatagtttgttactttaattttaattaaataaataattggtcattaattttttgattcttacttcctatttttaaagtaagtttcaagcaatgcagaattttttttttcaaatgaatacatatggctcattttattcaataatcatacttacagaatatatgcaaatccgcctttccaatgataaatagtagtatttaagactgataaacttttgaaagggcagttaaaggttatagtctactgttttctaacttcagaaatacttttgtttgaaaggtgggagataaagtttcaaggagattaagtcccaatattcctattttaaatctctcagcttgtgcaggcagggcagg

SEQ ID NO: 355381 - DNA, 579 bp, Homo sapiens
cacaaggatatttaacttccatatgctgacaaattagccaagactgcttatttgttgttatttatataatctcctagatgctttgagtttgcagtaaacaaaataataaatggtatacttgaatagtgtacacccttttgactgtgaacaatcctactatttctttcagtgattacaaaggacccttatatatccctgtctcaaatatcatctgaaatagaatggattgtatgaattataatgctctgaaaactcaaaatgctattatattgtggtttaacttgtgaaatgcatacattttcttcctcaggttttatggagattcaaaggaaagaaaccaactacattaggtgccaatactcagctctatgtttggatatgccagagtgatcttcakggtaagattatgacaaagtaaaataaggaatttcatgagggaaaaattgaattactgtttaacagctaataagtttaacaaaaatttaaaatgtatagtttgttactttaattttaattaaataaataattggtcattaattttttgattcttacttcctatttttaaagtaagtttcaagc

SEQ ID NO: 355382 - DNA, 603 bp, Homo sapiens
tgctctgaaaactcaaaatgctattatattgtggtttaacttgtgaaatgcatacattttcttcctcaggttttatggagattcaaaggaaagaaaccaactacattaggtgccaatactcagctctatgtttggatatgccagagtgatcttcatggtaagattatgacaaagtaaaataaggaatttcatgagggaaaaattgaattactgtttaacagctaataagtttaacaaaaatttaaaatgtatagtttgttactttaattttaattaaataaataattggtcattaattttttgattcttacttcctatttttaaagtaagtttcaagcaatgcagaattttttttttcaaatgaatacatatggctcattttattcaatamtcatacttacagaatatatgcaaatccgcctttccaatgataaatagtagtatttaagactgataaacttttgaaagggcagttaaaggttatagtctactgttttctaacttcagaaatacttttgtttgaaaggtgggagataaagtttcaaggagattaagtcccaatattcctattttaaatctctcagcttgtgcaggcagggcagg

SEQ ID NO: 355383 - DNA, 603 bp, Homo sapiens
tgctctgaaaactcaaaatgctattatattgtggtttaacttgtgaaatgcatacattttcttcctcaggttttatggagattcaaaggaaagaaaccaactacattaggtgccaatactcagctctatgtttggatatgccagagtgatcttcatggtaagattatgacaaagtaaaataaggaatttcatgagggaaaaattgaattactgtttaacagctaataagtttaacaaaaatttaaaatgtatagtttgttactttaattttaattaaataaataattggtcattaattttttgattcttacttcctatttttaaagtaagtttcaagcaatgcagaattttttttttcaaatgaatacatatggctcattttattcaataatcatacttacagaatatatgcaaatccgcctttccaatgataaatagtagtatttaagactgataaacttttgaaagggcagttaaaggttatagtctactgttttctaacttcagaaatacttttgtttgaaaggtgggagataaagtttcaaggagattargtcccaatattcctattttaaatctctcagcttgtgcaggcagggcagg

SEQ ID NO: 355384 - DNA, 579 bp, Homo sapiens
atgcacacttcagtgggagaggtccaccaggcttttctccagaaaagatccggtcactctcttgagcagctcacttcacgcttcagaaaactcctgctaaagacttgttttcctggatttgtttgagaattattcttacttgtgatcccttctacttacgagttttaaaattcaatttctttctgtaaacgagtaattcccatgttacttgatgtactttcccaccaaaaaagaaatatggagaagccaaagtttccttgttctcctgtcaaaactgtatactcacttttttgttattccttgtgttttacattcaccatttawctttactttctgtaaaataatgatcaaaccctttgaacataaaaagtgtactttctgatataaatcatggatgtaaagcttactttaaaaacaatttttcaaaggaaaaagataaaaggaaaaaccattcagcctttcactgtgccaaatatgtattgtccagagcattcttcaaaagtgtgactttaaccttatgacattagtttcaaaatgaaggtcactatactaattatatcaaccacataaaacaagtat

SEQ ID NO: 355385 - DNA, 311 bp, Homo sapiens
ttggttttattttgttggcttcgaagtttcagtagaaatgaktctatagttttcattcagaatgtttgacttacactgaaagaaagatgggaagtaggtggtgtaaagcagataccaattagaaactcatgtacatgttaataccatcacacatatgtgagttttatgcatattacagagagagaggaatagtaaggagactttgaaaatagagttggttaaagtaaagtcttgattatgcaacacctaagaaggtattgatcattcattcagagaatatttataaagggattagcacaaaacacaagtaa

SEQ ID NO: 355386 - DNA, 311 bp, Homo sapiens
ttggttttattttgttggcttcgaagtttcagtagaaatgagtctatagttttcattcagaatgtttgacttacactgaaagaaagatgggaagtaggtggtgtaaagcagataccaattagaaactcatgtacatgttaataccatcacacatatgtgagttttatgcatattacagakagagaggaatagtaaggagactttgaaaatagagttggttaaagtaaagtcttgattatgcaacacctaagaaggtattgatcattcattcagagaatatttataaagggattagcacaaaacacaagtaa

SEQ ID NO: 355387 - DNA, 311 bp, Homo sapiens
ttggttttattttgttggcttcgaagtttcagtagaaatgagtctatagttttcattcagaatgtttgacttacactgaaagaaagatgggaagtaggtggtgtaaagcagataccaattagaaactcatgtacatgttaataccatcacacatatgtgagttttatgcatattacagagagagaggaakagtaaggagactttgaaaatagagttggttaaagtaaagtcttgattatgcaacacctaagaaggtattgatcattcattcagagaatatttataaagggattagcacaaaacacaagtaa

SEQ ID NO: 355388 - DNA, 546 bp, Homo sapiens
attgagccacttaggatcacctcagtattctakgccatatgattaatttgaggcctgttcataggaaacctattttatatttaaaatatctatgaataaatattttacaatgcataataaatgtttcagtagtcataaaatttaaattcacacaattttatgattttactgtgtttgtaatgtcaatatgtaatgaatttgctggttccttaatggcttctgttgactaattcaacagcttatattttggtgactttgagacatgactgcaaatactttgacattctaatcaaaccatggtccctttcccttgaactttagcaaggcctgtggctgtctcagcgaagaaagcatagtggaattgacagcataattttgaagactgcattagaaaaggcagtacattatctctgtctgtctcgttttctctgtctgtctgtctgtctttgtttttacttatgtatctttcttcctctctctctctgtccttctccttctgtctctttttctccctctgtacactttggagccctgtgttacagcaaa

SEQ ID NO: 355389 - DNA, 634 bp, Homo sapiens
gggcacaatctcatctcactacaacctctgcctccctggttcaaagaattctcatgccttagcctcccgagtagctgggattacaggcacccgccatgacatctggctaacttttgtatttttagtagagacagtgtttcatcatgttggccaggctggtctcgaacttctgatctcaggagttccgcccaccatggcctcccaaagtgctgggattacaggcgtgagccaccatgcctggctcttccatcattttatactaggctatacatgttgttctatgtcattttttcttgtagatgtgtatgtgtctgcagtagaataaatgggaaagaattgagccacttaggatcacctcagtattctatgccatatgaytaatttgaggcctgttcataggaaacctattttatatttaaaatatctatgaataaatattttacaatgcataataaatgtttcagtagtcataaaatttaaattcacacaattttatgattttactgtgtttgtaatgtcaatatgtaatgaatttgctggttccttaatggcttctgttgactaattcaacagcttatattttggtgactttgagacatgactgcaaatactttgacattctaatcaaaccatg

SEQ ID NO: 355390 - DNA, 575 bp, Homo sapiens
tgctacaatttttgagttccactcatggaataagatattctctttaccataacaggttctgtggagatttgatgggaataaaccagatgctttaggtctcaatacttggctgtacgagtggatatcccagaatgaccttctaggtaacactttggtgaacaaatactggatatattagtaactgcacattcgaatgttaatagttcatcttgaaacatgcttattgaatatttgttataggaaaacaaaaaagaacttctttatatttattttccagtcctagggggaaaagaatatgctataattgttggcattttatgatatacactcacattctctatggtcagaatcagagagaatctttacttcaggtgttattatatctcacagaatttttcagtatcttcctgggctctctctctgtctcctatttctacaactttacacctgttttctcctctcctgcagggttatttcaaatgccactaaatataakagctcttctatcatcagtgactctgtattttccggaggactacattcctaatcttaatcttaaagtaatgacacatttc

SEQ ID NO: 355391 - DNA, 597 bp, Homo sapiens
tttcagtcttttgacatcaatcactaagtatgtcaatgaatgaccttcagatgattacatccccagccaccacaggaaagtaacgacttgagaaatactgtgtatgaaccacctgctgagcctacccaacactcatgctatgagagttctaataaaatgcttattgtttttcaaagtccccacttttgagggtagttggttatgaagtgatagataactaaaatgatatttctaaaaatttaattatacattcataataatatacaattaatatagaggcaagaaaatgaaaactacaaatgtaacattttgaaaataactgtaactcagaaagggaggtcagcatagcatggtggttaagagctcttgcactctgsatccagttagcctggattcaagtccctgcaaaaccactacagaattttgtggggtttggcaagttgcctccactctatgcctcaaattctccatcagtgaaacggagatggagtaatgccattatctacctcaggtggctgatgaaaggactgatacattaacctggtaaagcactacagttgctgtatgtaacaaactaaatttgcattaattataata

SEQ ID NO: 355392 - DNA, 567 bp, Homo sapiens
caatatttgactctccagtgaatgaatgtacaaagactatagaatataattactaattccaaagtagtggtggcttacagtaattaagaatgaacgcaaaggtgatgaaagttttaagggaagtaaaacttaggtaagggaacatacctcaataaataatgaataaacttaataaatcttaataaatcttaaataaacttaagaaagacctgtgacaatatgctatgttgtggaaaatggatatgactatatttttatagtctgagaaatttaacggtgtttatctttttggatcaccccttcaatatgctttaattagttaaaaatcaatgtggactctcacaataaaacattatgaataaatgttaaaaatattagatttttaaaccagaaattccattgtcagtaacatattctaagatttagttacaatatgtacatcaagaatattcactgaaccattctgatggttaattttaggtgtcgacttgattggattgaaaaatgcctagatagctggtaaagtartgtttctgggtgtgtctgtgatggtgttaccagaggaga

SEQ ID NO: 355393 - DNA, 547 bp, Homo sapiens
aattctaccacaagtgacaaggatcttcatcagtattctaacttataagaaaataatcccttaccgatataaatgtgtgattctattagtatttgcagccagacccagtgttcacttgattttactaaagcatttaaatcattctgcgttgagatcccagaggtttacatcttagcataaacataccctattagagcaggtgttttctgccttaagacaagcaacccagtaaagcttcctgggatagcttgtgtctcaacatcataagtgcctgagaragaagcacagaaaaaatgaacaacgcatgtataataaagaccaaataatttctaccactcgtatctgaatcgtgccctcagtttacaataataaaagaattctgtcatcatataacattatattctttatggaggaatataagaatgtaatatattttaaattgatatcacccttctaagaaataggtagaaagtaagcatttttattacattatgtaatctcttaagagataatttttgcctacctccttattaacagcaacatgaaa

SEQ ID NO: 355394 - DNA, 557 bp, Homo sapiens
tctctggggtcgatggtcagtaacacrtcagaagaaagggccaatgtaattgcatcagcccttgccaagatcccacaaaaggtaagataaaatgttttaatggtgtaaaaaactactgaaagaggctgttaaagtttgtaaagaacccaattgtagaaacttcctgcctatatattcagctgttgggaaagcactaattatctcagatattaattcaaaatcaaaaatatgtatggaagatgataaactcatacagaaggtgtttttcattggtaattaatttggcattaatattgtgatcaggaataaatacaattaagagttgcaggtaaagttttggtattatcatgatactggggtcaggtaagagctatcaccaaattctgcccctgtgatttgatccttttgtttaagaactcctgagggcgatgtacatcctacaggtgttagaaaacgttacattttaatgagtaacttcactagcacaataacaatagcaggtatttcaaaaaggctgacatgcatcatgcagtttagtgttgccatgttacccagcc

SEQ ID NO: 355395 - DNA, 557 bp, Homo sapiens
tctctggggtcgatggtcagtaacacatcagaagaaagggccaatgtaattgcatcagcccttgccaagatcccacaaaaggtaagataaaatgttttaatggtgtaaaaaactactgaaagaggctgttaaagtttgtaaagaacccaattgtagaaacttcctgcctatatattcagctgttgggaaagcactaattatctcagatattaattcaaaatcaaaaatatgtatggaagatgataaactcatacagaaggtgtttttcattggtaattaatttggcattaatattgtgatcaggaataaatacaattaagagttgcaggtaaagttttggtattatcatgataytggggtcaggtaagagctatcaccaaattctgcccctgtgatttgatccttttgtttaagaactcctgagggcgatgtacatcctacaggtgttagaaaacgttacattttaatgagtaacttcactagcacaataacaatagcaggtatttcaaaaaggctgacatgcatcatgcagtttagtgttgccatgttacccagcc

SEQ ID NO: 355396 - DNA, 557 bp, Homo sapiens
tctctggggtcgatggtcagtaacacatcagaagaaagggccaatgtaattgcatcagcccttgccaagatcccacaaaaggtaagataaaatgttttaatggtgtaaaaaactactgaaagaggctgttaaagtttgtaaagaacccaattgtagaaacttcctgcctatatattcagctgttgggaaagcactaattatctcagatattaattcaaaatcaaaaatatgtatggaagatgataaactcatacagaaggtgtttttcattggtaattaatttggcattaatattgtgatcaggaataaatacaattaagagttgcaggtaaagttttggtattatcatgatactggggtcaggtaagagctatcaccaaattctgcccctgtgatttgatccttttgtttaagaactcctgagggcgatgtacatcctacagrtgttagaaaacgttacattttaatgagtaacttcactagcacaataacaatagcaggtatttcaaaaaggctgacatgcatcatgcagtttagtgttgccatgttacccagcc

SEQ ID NO: 355397 - DNA, 599 bp, Homo sapiens
ttgaccaaaattcagcaaaatgcaattttgaatttattcaagagttgtatttttatttatggtaccaacaggttccttatttctacattgacaaaatatccaaaattagcaatactgagaatactctgaatttgtgtcaaaaattgtcacttgaaatttttcttggaagtagttcttgataatttgtaatttccaagaagttatacatgctacctttgcagcattaattgacttcttccaagtagcttattttatagacttgcatttttgtcaatcaaaggacatcaaactctgttaaaatgacttatagataagtagatataagtgaactacttcccatattactcaaaaaaatgaataaattaatattaaatttggtagatgaaaactcataaaatacattaaaaaagcatataggtcattagtaaattgttgttgctttttcacactagaattatgastacctaaaatttttaatgcatataattattaaaattttttatctttttaaaattaagttttattttttaacttttaatttcaagggtaaatgtggaggtttgttacacaggtaaacttatgtcttggggtttgttgta

SEQ ID NO: 355398 - DNA, 583 bp, Homo sapiens
agaatctaatgaaaaatatcacttgacaaaatgagtgcagtacatgaacaaagttctgactggatcataaacccaaaagtgattaatcagtttattaattagggactaacaatgaaatcaatgatatgtcttcatatactttgaattggcaaaaattcatatttatcataggtaaagcaccaaataactggcaactccagtgctggtttgttgggagtatgaatagagtggtgatargtgaagggcacacataggcccagcacaagaagaatccctctaaccaagtccaagctagcaactacagaaatcaaaaatccaacctactagtatagcaattcttattatacatttgaacattaggcaagtgaccaccagtggaactgtgaactcagtgggcaactctaagctcacctttgtcaaaacctctatatgcccccactttcaaaaacgttattttcaaaagaaagtcctgcctcctactcactcgaactttaccaagattcagtgcccaagggtacaatttttagaataataacaaatgagaaatttgaaattttatgcctcaccagtgttcaatttattg

SEQ ID NO: 355399 - DNA, 583 bp, Homo sapiens
agaatctaatgaaaaatatcacttgacaaaatgagtgcagtacatgaacaaagttctgactggatcataaacccaaaagtgattaatcagtttattaattagggactaacaatgaaatcaatgatatgtcttcatatactttgaattggcaaaaattcatatttatcataggtaaagcaccaaataactggcaactccagtgctggtttgttgggagtatgaatagagtggtgataagtgaagggcacacataggcccagcacaagaagaatccctctaaccaagtccaagctagcaactacagaaatcaaaaatccaacctactagtatagcaattcttattatacatttgaacattaggcaagtgaccaccagtggaactgtgaactcagtgggcaactctaagctcacctttgtcaaaacctctatatgcccccactttcaaaaacgttattttcaaaagaaagtcctgcctcctactcacycgaactttaccaagattcagtgcccaagggtacaatttttagaataataacaaatgagaaatttgaaattttatgcctcaccagtgttcaatttattg

SEQ ID NO: 355400 - DNA, 544 bp, Homo sapiens
taggagtctggagactggcttcccagcccgtcacagccaccactaacaccagcacacactgctcaggaaccagagggtcctgccactgctattgccattgcccatgccacaccagctgcccaggagcctaaaaacctacctgcccagcccactgctgccamtagtgccatctgagaaagccacgtggaggccccaagaaatgacctatctgaacccactaacaccagtgtcagcatatgccaccctggggtccaaggagaggcacgaggaaagtcagcttacccctgccaccagtgaggcgtgaagacttatctacgtggcatccctgtcaccagaaaaacttcattacagcctctactaataactgcattctaagccactgaggaaattacagattccactgatgctgtttgcagatgaaaaaccatacagaaactacactactgaatacacccagaatcaaagccaaagtaggcccctgctcaaccaacatcatagatacacctttaggaaaaaatactctcttacaaaagtaaagttaaaa

SEQ ID NO: 355401 - DNA, 257 bp, Homo sapiens
aaagtgcatatagttaatactgtactgtacacttaaaaatacaataggatagatttcatgttatgtgttctttacctcctttaaaaatttttctatatttgaatcttgctgagttaaaaaaatagtttagtacatatttgatgattttaaatgtcctatggatattttwaaaagtatatatatatatatatataaaataattagtaaatcttattacttaataagtcctatgaaatctattatttgaaccatttatg

SEQ ID NO: 355402 - DNA, 574 bp, Homo sapiens
tttccaggtgcctatgtctccaaaaatgctgtacactattgactgttctcatctttttctggtactgttgtttgttgactttcatagcccctgaatatgtagaaagtggcaagcatatggaagtagggagagaagcattattttggtcagctagattttgtacatgctaccatgtataccatggctaaggactaatattgcaagcgaatcaagtttgttcttatggttttctattgttttttgtattctgtattattcttggtcagacccaagaataatrccacagaatatgtgtaatctaggaataagtttatgaatgtataaatctcagtgatggatttattgaaaatctccccagaatttaacatatatgcttttaggaactttgttttatacttctcttgccagtttttaactttttttctttgataggacaatttaattgcaatatgcaaagatgctgtcttctattgggttccctaaaaagtacatcctggaacctatacttcatttagacggtgccttcagatagcagggtgggtccaaagcaagaaaggagagagagccattacaa

SEQ ID NO: 355403 - DNA, 549 bp, Homo sapiens
aatccctgccagtgtctacttgtcccattaatcttcatgtcccagcatctcatagtacacattttttccaggtgcctatgtctccaaaaatgctgtacactattgactgttctcatctttttctggtactgttgtttgttgactttcatagcccctgaatatgtagaaagtggcaagcatatggaagtagggagagaagcattattttggtcagctagattttgtacatgctaccatgtataccatggctaaggactaatattgcaagcgaatcaagtttgttcttatggttttctattgttttttgtattctgtattattcttggtcagacccaagaataataccacagaatatgtgtaatctaggaataagtttatgaatgtataaatctcagtgatggatttattgaaaatctccccagaatttaacatatatgcttttargaactttgttttatacttctcttgccagtttttaactttttttctttgataggacaatttaattgcaatatgcaaagatgctgtcttctattgggttccctaaaa

SEQ ID NO: 355404 - DNA, 584 bp, Homo sapiens
actagaaaaacaataggaaggatcaatgatgttttgaaaaattaaaaaatggacaaatatttagctagactaagaaaaaacaaagaaaactcaaataaacataataaatgagaaagtagacatacaactgacaccacagaaatacaaaggatcataakatactactaagaacaattacacaccaacaaattgtataacttagaagaaatgagtaagtcatagaaacatacagactaccaagactgaatcatagattaaaaaaatagacaatctgaataggacaataatgactatggagattgaatcagcaatcaaaaaccttccaacaaagaattgttagggtcatgctgacctcataaataagtttggaagtcctcctcttcaattttttggaaaagtttgagaaggattggtgttaattttgtaaatatttggtagaatctgatgaacttcaggttgccagcattaccctgtgtattagtccgttctcaggctgctatgaagaagtacctaagactgggtaatttacaaggaaaagaggtttaattgacccacagttctgcatgaatggtgtattagtcagt

SEQ ID NO: 355405 - DNA, 587 bp, Homo sapiens
atattaaatatgctagagtatgcattttcaatgtctaatagaaccagctgtactgtggttctgtttatctttgtattctctacaatgtacatggcaaatgtccaacgtacatagcaaatgtcttctgagacatcaaaatgatcttagggaaaaaaacaccttccataaatagaatgccaaaaactgcccccaccccccaattagaggaaaagaaaaactactaatggaatggagcagtatttcacataatccttataagtgaacatatgaagtaattctctccattttacagatgagaaaataatggtttttaaatgtctcttatgtcaatgtctatgctttttccagagtaaaagtgtatttataattagagctattatatatatattacactataaaactccaaacttagggcaaagacaactatagcaatgtttctatctcttcctgtagctaatttctaagaatcatgactatatgaatcagaatcacattttagaattctacaaatctcctttttaaaggagctctttaaccgtaattcttcgaccaatttccctccacyatagttgaatataccagtaata

SEQ ID NO: 355406 - DNA, 585 bp, Homo sapiens
caaagtatataaccatcctttaaattccatattagaatacaataatcaaaagtaatctcaaaactattagaagcctgagggacttaataagacttaataaacgatttagtgtatatttactatttgtctcaaaaatcaacaacgtccctcaagtttaaaagatatagtactttcacctgggagcagtgactcatacctgaactttcagcactttcaaagacttaggtgggcagatcgcttaaggccaggacttaaaagaccagcctgggcaacatggtgaaaccccatttttgcaacaaatacaaaaattagccaggcatggtggcatgcgcctattgtcccagctacttgggaggctgaggtaaaggtatcacttgagcccaggaggtcagggtttcagtgaaccgtgattgtaccmctgcattccagcttggttgagaacctatttccaaaaaaaaaaaaaaaaaaaaaaaaaaaagatgtagtactttcaaaagataccttgagaaaagtttcccgagaaacttccaaagcacaaaaatgcaagtaacgaaaaaatgttggataaggttaaagtgtaggaaa

SEQ ID NO: 355407 - DNA, 471 bp, Homo sapiens
aaaactagttaagctcatgatgggaagtggggagtcaaacatccctcattatactctcctcctttggaattcaggcacaactgatcagcattaatattaaaacagagatcttaagactgaaaaagcagactctttgtagcagtacgataccaaattccaaccttactctagtatagcatcacacaacagatatagcaggccctggaagtatcaaagtattttaccccaaaatattttgagatgtccctgcaaagctgtttcttatggacaaatttgcattctgtagagaatctccttccctttccaggtgtttttgtgatcctaaagagattagctgagagtctagcaccttttaaatgtctaaatagaaaaaacatttgccatctattgcctctaagggcggccacctatgagatttcatytacataataagaaccttggtctccacaatcccttatcttaacccagaca

SEQ ID NO: 355408 - DNA, 636 bp, Homo sapiens
ttgataacagtaggtcaatgaagatgtcttataaataaataaaataaaataagaaaggtattgcactagaaaaagaaggtaaagagtaaatggcttaatagattgttaacactttaggaaagtaamctgttagtttcctctgtgcctttaaggcctgtaataatgcctaatatatgagcatctaatacttttttattgaaataagggaaatttcaatgtctctagaagttgttagaatattatttttaagaacctatcttatggtattactttttggatgagaccactgataagctccttttataactagatcttttggatatagtatgcaggatggacttacctcctgaattctgctgtataaagaataagattctaacaaaagtcccatatattagtattaaatgagaataatgctgacatgaaattgcctgttatttttgttgcaaaatatttttgttgtggcaaaacttcttaaacttaatattttggtcttttcctgcttctcacaaagttatatatggttcaaaattacttaatttttaaaaagagaaaactattggagttaagagattgagtataaggtggctgcagaagctccaagatgaacttctaaaggtgcagacctgtttgtta

SEQ ID NO: 355409 - DNA, 521 bp, Homo sapiens
tatcgcattttgtttatccattcactagttgatagatatttggaacatactacttcttggctattctgaataatgcttctatgaacatttgtgtgcaagcttttgtgtaagcaaatgttttcatttctcttggggagatacctaggagtgaggttggtgggtcatatggcaaatgtgtgtttaactttataagaagccaccaaacagttttgctaaatgacgagtattttttattttagccatttgaattggtgtgtagtggttttgatttgcatttccccaatgactaataatgttgastgccttttcatgtacttactagtcatttctatatcttcttttgtgatcactggcttatttatttgtctatttttattgtttcattgaggtataattgacataaaataaacttcacatatttaaagcatacaacttagtaaatttttacagatgtataatccataaagccatcactacaatcaagataatgactatatacatctgctatagtttgaatgttt

SEQ ID NO: 355410 - DNA, 661 bp, Homo sapiens
attggtcattatctcctcaactattttttctgcctcattgtttctctttgccttctgggatttcaatttcatctatgttaaacytttttttttttttttttttttagacaaggtcttgctcattgccaaggctggagtgcagtggcatgatcttggctcactgcagccttgacctcccaggctcaggccatccccccatctcagcctcctgaatagctgggactacaggtgtgtgcaaccacaccctgctaatttttaaaacttttctgtagagacaaggtctcataatgtggctggtctcaaactggtggactcaagtgatcttcctgccttggtctcccaaagtgctggggtgacaggcatgagccactgtgcccagacttcacatatattagactattaattattgctctatcttgtaaaatgtcttgtaaaatgtttttactctgtgtgtctgtgtgtgtgtgtgtgtttcagtttgggtaattctcattgacctcccttaacattcagttattttctgagtggtgtcaaatgtttcaatgagctctctaaaggcatttttaaaatctctgttatttctgtttaaaaagtatttctaacatttacagttgaccctttcttacaccctttctttcacctctgctgaaatttctcatgg

SEQ ID NO: 355411 - DNA, 661 bp, Homo sapiens
attggtcattatctcctcaactattttttctgcctcattgtttctctttgccttctgggatttcaatttcatctatgttaaacctttttttttttttttttttttagacaaggtcttgctcattgccaaggctggagtgcagtggcatgatcttggctcactgcagccttgacctcccaggctcaggccatccccccatctcagcctcctgaatagctgggactacaggtgtgtgcaaccacaccctgctaatttttaaaacttttctgtagagacaaggtctcataatgtggctggtctcaaactggtggactcaagtgatcttcctgccttggtctcccaaagtgctggggtgacaggcatgagccactgtgcccagacttcacatatattagactattaattattgctctatcttgtaaaatgtcttgtaaaatgtttttactctgtgtgtctgtgtgtgtgtgtgtgtttcagtttgggtaattctcaytgacctcccttaacattcagttattttctgagtggtgtcaaatgtttcaatgagctctctaaaggcatttttaaaatctctgttatttctgtttaaaaagtatttctaacatttacagttgaccctttcttacaccctttctttcacctctgctgaaatttctcatgg

SEQ ID NO: 355412 - DNA, 537 bp, Homo sapiens
ctgccatccattgcaaacatagcggcaagctttggaggaaatgagggcgtgctaatagggtagcgtacatcttcattaagacagatatttgtggggcctgaaaaaccaccttcatccatacgcatagcttttcaggcaggcaaggagtgcaggtcgtaagaggtggttgatagagcwttttcttccccaccagaaatctctattaaccagcagatctgcacacctaaggtaggaatagtaattcatactcataactatggccctccagcaacaaaaaatcctggtgagcctttgtgtgtatcagagccagattaaattatggtcaccaaggttttagtgccaaatgcattttgttcttttataattctctgagaacaggagatctgtgcaaggtacacatgaatgctccattaacagggatatctgagacagaagggccctctctgccagccttgctggagagcagaattaactgaaatctgctagtaaaagtgacaaactgtggcccagcaagcctagttctccttactgtggtga

SEQ ID NO: 355413 - DNA, 572 bp, Homo sapiens
tacatttccttctctctttctcagtgccacttgggaagtcaagaatgagagtgtgagctctaacagaatccaaggacagcttcctgcaaacatgattcgggaactgtcctcggtgctgaatttcaattggaagggggaaataracgtgtgtgtgtgtgtgtgtgtgtgtgtaaagttcagtgcagataaaatagaatttggaagctccagaggatccctactaacacacatttatgcttaaaatgctaagacgctttcaagagtggatttttttccccactagattgaactgcatggtagtgtggaaagagcttgagctttggagtcagacagctttagtttcagtcccagttttatgacttgccactttaccttgagagaatgatttaacctctcccagcctcagttttctcatctctaaaatcaaagctaaatttactacaaaatattgttaggcttgagtgagataatgtaagtgaacatgtttggcatatagccagtgcacaatagatgataattgtccttttcttccccttttctccactgaatttagacctgtattatgtaagtcc

SEQ ID NO: 355414 - DNA, 560 bp, Homo sapiens
aaccacctttgcaaaagagaaatctgacatcgttaactctatcttgcctccaacctcaagctgtttgtctttggtcattcctgggcataggccaagctaactttgggaggaatttagtttacagtttaaccttaaagcaaggatgataatagcccttcccaaaactaaactacctttgtaaaactaaggaaaggccacaaggttaggattatgggaggggagagaattctgctaaaatgtaggtatagttctacaatttcttactgcttgggagtcatgtggctagagatcacaagatttgtgacttctccaactgctcctatagataacatcactattatagaacctaagactggttttctgagagatttttttcagaccaaccccacccagactcatgactcatgactcaactggtcctgtagcccagccttccccaacctttttggcaccagggactggttttgtggaagacaatttttccacagactygggtgagggtcaggtggagggatggttttgggatgaaactgttccacctgagatcatcaggcatttga

SEQ ID NO: 355415 - DNA, 579 bp, Homo sapiens
taacctgggggttgaggactcctgctgtagccctacacagaggcacactcagcgcacaaggacttttccacacccccaattaatcagcagcacccattccctcagccctgcccaccaaattgtccataaaaactctaacctctagagggcttcaggaagactgatttaagtgataactgcctctttggcatggctggccttgagtcaattaaactctttcttactgcaatgccacgatctcagggaattgattttgtctgtgcagctggcaggaagaagccatcatagctcactactcctaggctcaaatggatcctcccgcctcagtctcccaagtgctcagattataggtgtaagccaccatgccctgcctcartgtgatttctaacaactgatctggtccattctcattaaacagaagaaatcaaagcacagaggttaaataacttgtcctagagaatataattaggaaattgtggagctgtgtgaattgtacaagagaaagagtggaagaaaaggctggaaaaacagactgaaccttaactgtcagtctaaataatttttgactcgattttgaaa

SEQ ID NO: 355416 - DNA, 646 bp, Homo sapiens
tctacgtagctaacccacaaatcatttttcacagaaatttgatgtatttctgaaggagacatgttataatgggaagtgcttaggtttgaaactactagatttgaatcctgagtctcactagttgtttatatttggagaagtcataatctctcaggattttgatttctttttctttaaattagagatgataatacatgctttgcagagttgtcacaaagattasagataacatacaaaacccttggtagaatgcgtggtctgtagtaaatagtggctgcagttattatttccagaagcatatttcagacaggagtgtggtctgagagtcctaaaaatttccttgatatttctgaaaaatgatttttggaattcttactttggaaagattaaaaaatataatattgaagataggctatttagttcactaacttttttttaattggtagcttttcaaattactttccccaatcaaagcttttagttgtattttctttgtgaaaaacaaatcaactcctatataaatgaaattaatatttgaaaaaacaaacctacctatgtagaaaagaaaaagttttgaacttccaagtttataatatttaagttgagaacatagttactaaaaaattacttgtgtccttataagcca

SEQ ID NO: 355417 - DNA, 405 bp, Homo sapiens
agagtagccagtcaaccgtcaactcctgataaacgaggtagtggaattgcccaattagcgctaggaatgccacgtggtatgagggtgggcacaatgggcgtccagaaaagccaatcaacagccgtaggtgccaactccggaggacgaagggaaccaataggaaggaagtcgaggtaaaaacagaagaagcagtgtgtgggaaaggcggaaccgaggaggagggaatacacctgggggaaacccaagtccaggagcctcttagagggcggggcagtaaacacaagatggaccaataaaaatgttaaacacagaaatgattggtaattgataaagccaatagaaaatggactagactggcgcggctttcgggttggycaaggtatagctgagtaaggaaaagcggta

SEQ ID NO: 355418 - DNA, 566 bp, Homo sapiens
acaccatgaaaaatgtatagaattagaactctgaatattagctggggataatgataaagaggaatactatatttaaaatgagtcattcaagtaatgctatacaggatgagcttcacagagacgttacttaacagagaaagaagagaaatggacccaggcataggaaacactgttctgtttcagaacctctgaacatgtattttaaaagaaaaatcttcaccagtagtatatttctgtatttgtattcaccattattgttggaacattctttttttcttcatttagctggttaacctgaccctgatgaatttctagtgagtctattttaagaggcctctgtcaaaacctctctcctcccatatccacagtaagtaaaagacaattttatatcaacaatacagggtgttaaatgtttcatttggttttgaaggactccataacatctccttttcagccttaatttgaaagggtagattattttcctgctttaacttgagscttccctgttaagaaaaaattaaaaaaaaaaaaaaaaaggaactctcaaggtctcttgattcatgtaa

SEQ ID NO: 355419 - DNA, 547 bp, Homo sapiens
ccattcaggacataggcacaggcaaggatttcatgatgaagatgctgaaagtgattacaaccaaagcaaaaattgacaaatgggatctaatttaactacagagcttctgcacagcaaaagaaactatccacagagtaaaaatataacctacacaaaagaaaacttttgcaaactatgtatccaacaaagatctgatatccaccatctagaaggaacttaaacgaacttataggaagaaccaaacagccccataaaaaaactgggcaaaggaatataaatcattctattacaaagatacatgcatgtgtatgttcattgcagcactatacataatastaaaaatatggaatcaacccaaatgcccatcagtgatagaatggataaagaaaatgtagtacacagacaatgtggaatactatgcagccataaaaggaaatgagaccatgtcctttgcaagaacatggatggagctgaaagccactatcctgagcaaactaatgcaggaacagaaaaccaaacactacatgttctcacttacaagtgggag

SEQ ID NO: 355420 - DNA, 578 bp, Homo sapiens
tgaatagtggaatacctatgtcaaaaatctatgctttttaaaaaaatacttgcttgaaaaactcaggcttataatttatctagcaaagctttttagaaggaatagatgttgaactagtaagtctataatttgagatgaaaaaggatataattatctaaaaaggaagcttaactgcattctggctttataagcaagtgttttgatagcccagcaaaaagcctgggatccacaaatttcagggcattagcagaccttttagccaaatacatctcacatagatgtattttacccaattttttattttgttttgttttgtttcttaattcaattctcaaagagcctcttgggttatctaatggttctaatatatacayttttaggacagaaactgggactcctttaattttaggggccagatacaaacacctggcaatgctataagttgtaggtggttatttctaagaagggaatgagtgtctctggacgggccacttggatgcaatgagtttttcctgcatagcaactatgtaaagttaaactgtttgcctgatcacgttatttattccttcaaataattt

SEQ ID NO: 355421 - DNA, 574 bp, Homo sapiens
ttctctctgtagtcgaggtaactttcaaaacatggcttaaattgtcttaaacaataagacaattatctcaaataggaagtccaaagacaggatgactgcagtcatattgcttaggttttctgcttttatcttggttttgaccttttccctgtgctggcttcatccacaggattgttgcaagatactggcaataatttcagtcatcacatccagaaataagagcatacaaaaacaaataagattttaccttgtagtgtcttctttttaggtgtgagaactactttcccaggagccctctagcacaggggtctccaaccccagggccatggaccagtatcagtccgtggcctgttgggaactgggtctcacagcaggaggtgagtgggtgagtgaaacttcatctctatttacagccactcsccttctctcacattacctcctgagctctgtgtcctatcagatcaacagtggcactagattctcacaggagcacaaaccctactgtgaactgcacatgcgagggatctaggttgtacactccttatgagaatctaatgcctgatgatctgtcact

SEQ ID NO: 355422 - DNA, 628 bp, Homo sapiens
cacaaaccctactgtgaactgcacatgcgagggatctaggttgtacactccttatgagaatctaatgcctgatgatctgtcactgtctcccatcgcccccagatgggaccatctagtttgaggaaaacaagctctgggttcccactgtttctacgttatggtgaattgtataattatttcattatatattacaaggtaataataatagaaataaaatgcacaataaatgtcatgcacttaaattatcctgacaccattccctcacccctggttcaaggaaaaattgtcttcccataaaacctgtccctggtgccaaaaatcttgcagaccactgctctagcagttctccctcaaatctcattagtaagaactctgtcatgattgcctctaaccaatcactggcaggggaaattggagrgacaaaggcacaaatagaacagttattgcagtcttgctactcaaagtgtggttcacagaatagcagtacctacagcacctgtcagctaggttagaaatgcaatcctagtgctcacttcagacctactgaatataaaaatatgcatttggtgaggtgatttctgtttacattgaagtttgtaaagatcttccctatggtatctgctgcatt

SEQ ID NO: 355423 - DNA, 738 bp, Homo sapiens
gtgatgttgcaaagtgtttcttccccaaagttttctagatataaaaatggcctcgggtctgaacacttgagagaggatcatgactttttattgaagaaccactctttaatttttgctcctacatttatgccttcttttgttatttcattgtctattaacatttcacagctcccagctggtcaagccttcttggttaccagtcattacattaattgtggcctcttagcttctagaagttaaatgctgccataaggtcattcttacatctgattattcattctccaactccatgaataacgagcacagctctgggaccacatcagccttgatatacagaggagaagtaccatcatacttcttagtaatgttagtgttcttcacaccagcacattactggtggccttggtgaatcatgtgttccttgagccttcttgtgaaacattattctgtgatgtatcttctgcataataaacccattccaacataytaactttactctgcctttttaatccctcctctaccatcatccagggaaactcaggcatgtctatttccctgagtgtgagtcactgtttattccaagcttctaggaactaacccagtggttaatttgctccatcccccaagattcttgctaggacattaaatactggttcccattagagtgccccaagccaataattcttattcatccagacttacaaccctgttctttgattaggcatactcaaaatttaa

SEQ ID NO: 355424 - DNA, 586 bp, Homo sapiens
gtgcacaaacagaagcatatgcaatatgtatgtctgccattgcttgctgccgcattyacatatggggttcatgatgccccatgagcaaaaaattctggtaggtccacaaggtaaggaagttcaagtaagacccaaaccagtgcaaagtaattttattatgtatacaactgagcaagcagaagcactgacagtgagtggccaagatgccactaatcagaatttgcttcaaactgagaaacaagggaaggcatcctaagaaacatgaatgaccaaggaatcatatcataatttttgtttctactctatgttaatccatgacttatgctgaaaatgataatgtagaaataggaaggtagggcagcctagttcctttttcttttagtccttccttactcatctataaactgaaggtagaaaatgttagtaggatgcatgtgtatcaagagtgaaataaaaacctttgagttgcttttgtgtaatttgcgtctttctggtaagatcaaaatacatacacatgtacaaattacaaaatatgaatgaatgtaagttatcctgcaaaaaagttaaatgctcttatatttgcatt

SEQ ID NO: 355425 - DNA, 635 bp, Homo sapiens
tgactttttattagccattctgactggtgtgagatggtatctcaatgtagttttgacttgcatttctctaatgatcaatgatattgagccctttttcatataattgttggaaacatgtatgtcttcttttgaaaattgtctctttgtgtcatttgcccactttttaatggagttatttgtctttttcttgtaaatttgtttaagttccttgtagatgctggatattagacctttgtcagatgcatagtttgcaaaaattttctcccatgtctctatttcaccccctaggccaggaactccttgatggtaaagatagggtcttattaatttacatatatstagactgtttagcacaatttttggtatgttacatactcattcaatattttgtggaaatacatttgtgaatacatctcgcagtgttggattctgagtaatataagaaaatttaacattctagttgtatgtgctgctgtatccctatacttcctagataatgaataagagaggcagtgattctaggtttttacttatactttgattaattacaattagcaacgacaggatagattgttgtgttggagccttaaaaattagtaatcactggaatctcaaaatgataaaaatgtcttgaa

SEQ ID NO: 355426 - DNA, 481 bp, Homo sapiens
ctaggaggggaaaatgggttcctgggctagacctaaggccttgctgatccgtgcatccttgggacactgctccctgcatcctggccactccagctccagctagctcaaatgggcccaggtgcggctcaagccactgcttcatagggtgctaacagtaaggcttggtggcttccacatggtgttaagcctgcaagtgcacagagtgaaaaaaatgaggcttgggaaccactgcctagattttagaggttgtcggaaaaagccagcagtgtccccgctgcaaaggtggaatcttcatagagaacctctactagggcagtgtggaggagaaatgtggggttgrcatccccacacaaagcccccactggaacaccgcttagtggcactatgagaagaggtctaccatcttctagttcctagaatggcagattcccccaacagcttgcaccttgcacctggaaaagctgcagacattcaaccccag

SEQ ID NO: 355427 - DNA, 604 bp, Homo sapiens
gattgttcaggtgtgtgaggctcttacttaaagaaagaggaattggcataataactttttcattaatggtcttcatgtagtagggtgaatgtagaaaagagtgttttatgttcaatggactcagattctaaggtaacatgaattaaggaggaaaaaatggcctgaggaatttatactcaagataaaatacagaaaggatgaggaaacttttctagattttggactgatatatttgtggatttgagaaaggattttcctctagtgtgcaacagcaggcattcagaagscacaaagcatagtaagaaccagaaacatttgccatcaaagagaatccagagtttcccattgttagttaggggtttcagacctggactgtctgcagcaggggcaggcattttagctgcctcagcctcttcactcttggttgatatgtattgtctctgatccctccctttagttttctttctttcctgagctgctgtttgcctgaggcttaataggaagggtttgggcaacttcagagcattgaattgattgatttgttgatctttaagacttactcccacccagcctggagcctcctgtgtttgcagagtctgattgt

SEQ ID NO: 355428 - DNA, 612 bp, Homo sapiens
aaatagctcaccctgagatattctttacctgttgtggcacagggagaaatttaaggaaagggagattctgaacagcacagatgctatataaaactactgaattttctgtctttaaccatataaagctatataaaaatgccaatttactcagtgccttattatcatgtagctagtgagagggcaaaatctgtgggaaagaaagtgggtgaactgggtattccttcttccagaagtgtttgacaagtactaacaatacagactgcattgtactaggcacttgagggatgcaaaatgagaatatagagcttcagtcttagagaacttaaaatattgttcaggaagagaaagcaagaatgaaaacatacacctagacaatagaaacaaattagaattctgccaggtaatacaagctgcattgacaaaggtgagtcatgaagattgctttgtgtagggatgtcttgactttaattttgatagaaatgattttagtgcattaataaagaggaaatttgacagtatgctyagcaggaaaatgcaacaagaggcaagacaaagaaattgtgagtgatgtgtgagatgccaagtgaccacttttagttaaatgaataattg

SEQ ID NO: 355429 - DNA, 545 bp, Homo sapiens
gggttcaaggttacctatgtttgagttatatacatttgaggttttctgcctattgcctttatgcttgaacatgttgtttaggtataatgatcttggctgatgagacaattcccactctctcctgccagtgatagttgctgtatacaaacttgagagccatctcaatttttatcctttgtcaacacttcatatttcccatgtagatgctttgaaattttcctatattgcttcctgcatatgtacaaaacaaggcatatttcagattatttatcatctttgcaatatgaaaatgtttaaaatgtcccaaatgttcactgrtaaggattggttaaataatttgtatacatgcatatgcaatggactactttgttgctggaaaaaagattgaagaagctatttatgtactgatgtgaaaagatttctaaaaaaaattgttaaatgaaaaaaatgcagaatggtgcattgttaaaagaataactttagacaaattaagtttagcagagtttatttgagaaaagaaatgatttatgaattgggcagcaccc

SEQ ID NO: 355430 - DNA, 588 bp, Homo sapiens
agaaatgaaaggagagtagaaaatgctattcagggacagaatctatagaatgtggagctaaatggagacagcagtgacaccagtcatgaaagaggaaggtagtatcttagtattagtttggaataaaatagaawaataaaattacatttttcagcatgttttgaagctttttaaggataaggaccatggttattaattagttcattctttcagtaaatattcaaatgaatttataagaatttacttgatgctgctaaccaaagtaagtgctagtaatgtaaaaattagagggcacaattcccaaatatcttcttgtgtaatagggaggtaagaatcaaggtaataacccctccttctccacctctcatatgacttagaatttaggtgctaaataaaggtttctaagtgtcaattattttttgctattttcttccttcatagcaatgcattaggactttgctgtatcagactcgagaaaataagctgataagattgcaactattccaaagtggtaacaggcaaggatgtagtgcatcataatcagagttgagaatagtgtctatttttttcttctcttctgacttgaca

SEQ ID NO: 355431 - DNA, 574 bp, Homo sapiens
tttccaaattaatccaccatataattattttaaataatctacagttagaaaacccagggctttgggaggccaaagcaggaggatcacttgaggccaggagtttgagaccaatggacaacaaagcaagattctatctctacaaaaaaatttaaaaaaacagctagacatggtgatgcctacctgtagccctagctacttatgaggctgaggtgggagtgttgcgtgagcttgggagatcgaggttacagtgagctataatcatgtcattgcactccagcctgggtgacagagtgagaccctgtcttaaaataacrataataatctataattataaaacatacatacacacatactttaggcttccaagttttgcccatagtttgggtctaaaattgaagccaagaattaatatttataatattatgatcatgtaaatattaattgcagaattatgtgaatgacttaaagtgatggacacatattcctttgtcattgacctgtttctactaatgtagaatatggttaatataaatttacggggttatctgacttcttaatgttattctagataatc

SEQ ID NO: 355432 - DNA, 526 bp, Homo sapiens
gaattggcaccctggaccatacctggtttgttcctaagtacttctgtttcccttattgtagagaatatgtcttttttttttttaatctcgttatctttttattttaagactgaacttctcctctcctcatcagagtttagaaccctcctaaacctgttattttctcttggtattccttgaactgcagcacctaaggggctagtgaaatgcatgtttcaccttacatttctatccatagactgtatcagttctagaacgaggctcaaatctaggttttgcttagctctctgagtacatttgcatacctatgctttacaaggagttagtattgcataggggttactttgtgaattcaggagttagactgtttggcttagcctgtcaaacactrtgacactttgagtaagttatttaatcacttaaaacctcaattaaccatttataaaatagggatcataagagcaactcaaagggtttttgtgagaattaaatgagttatagagcaattagtgatggtcttgctgca

SEQ ID NO: 355433 - DNA, 574 bp, Homo sapiens
aagctggtctctgcatacaaagtgaaataaagaactgagacaaatttatctgcacaataaaagctaaagtatcacttttatctataatatttagattatttctgtattgtaagatatttctatattgtactacataaataatttctcaaagtctgtcatatataatgagttcctaaattgtcttccagctccatatctccatgagtttatttgaaaaygttgatcctgttttggagaagtgaaacatgataggatctagttgtccatatatatatatagcataaaagttggtttataagctaagatgctgaaaaattagaattaaaacttgtggctaatacaaaatttagcttaaataaattgcttctaaggagctggttacaaaaggaagataatccacccatgtttactataaatgaaacagagactgcattgattgctagaagatgatatacaacctctttgcaggctgtgaggcaaatccacttgggagtatcttctgttctgataagagaccttaaaggtcctttgcctgggtcaatataaatcatggttctcattctgctggttcctt

SEQ ID NO: 355434 - DNA, 626 bp, Homo sapiens
taccatttgtgcagtgaatggaagagatgatttcagagctctcctattctcaaaggatctaggcttccatctgttgggaatggccaaagtcaatcttaatagtccagtttaggtgttgaattcattcagtcacttagagaactccctatcagggccagtctctcattgttttccagttttatatgacaatttagagccccatgtgtgcaaagcagtttgggtcacaataggaaaagtacaccaaacctgcccaagtaatatcatttttgttttcttagaaaagggaagaaaaagaggcatactgtggttaatgttttccttaggtgataaatcaagggcagagacagraaggggacacaagttttctagttctcacctacagcaatgccaagtagtcacacaaaagttttattgcttatgacagcagccaagtaaaagaagacaaagcaagaatcggcagcttatgtttttaccattaccaacacccttcccacaattgttttaagcaatatggtttgatgttaatcaactccttaaaagccacccatctttttctatagcagtgattgtctattattttctacaaacaagtccttgcacagtttgactaggctggaattaaggag

SEQ ID NO: 355435 - DNA, 480 bp, Homo sapiens
agcactgcagaaacagtggacctaggttgtaagtactttttagccttcacatcttcagtttggacagctcctttctctggctcaggaggagaaggcgatggaatcaagcctgccaagacaataaaagcttttcaagaccatgatctgttagataaacaattttccttctattcyccatcctataaatgctgctctgactctgacttattattgcgtgtatctaagaatataaaatcttctattaatcacaaagtactggaacctattcatttaattgaacaccccttctcacccccagtacaactatgtaaagtagcaacgtaatggaaagaacacagaactgagaaagataagcagtactatagcatttgttgcaatcagtcagtgaatattacatttgccttttaactcaacatgcactttagatttaaacttctacaaaacttagtagaagggctaatatttaaaattttattcaag

SEQ ID NO: 355436 - DNA, 463 bp, Homo sapiens
aaagttacatttgaatgctgaagacccaaatagccaaaggcagcagagaarcaagtgctctgaggctacctaaaagaggacctattatttctgtgccttctccagaaatatccagaggaccagagagaagcacatcaataaaaacatctatagccatgacagagtacagtcaagttaatggaaaccttatgccatgatctctttcacattttggtttgtttcgtttgtttagacaattgaggtaacagcaaacaagtccatcttaagagtcagatggacagctaaaaagaatctaagaggtccccaataaccatcacttttcctttctattactccaaatgtttttcttttgtcaacatctattaaaacaattctaccaggctactaacgttggctacatatctgatcacaggatcatccatttagctttggtacttttcaaaatgtaattagcccagaaaat

SEQ ID NO: 355437 - DNA, 463 bp, Homo sapiens
aaagttacatttgaatgctgaagacccaaatagccaaaggcagcagagaagcaagtgctctgaggctacctaaaagaggacctattatttctgtgccttctccagaaatatccagaggaccagagagaagcacatcaataaaaacatctatagscatgacagagtacagtcaagttaatggaaaccttatgccatgatctctttcacattttggtttgtttcgtttgtttagacaattgaggtaacagcaaacaagtccatcttaagagtcagatggacagctaaaaagaatctaagaggtccccaataaccatcacttttcctttctattactccaaatgtttttcttttgtcaacatctattaaaacaattctaccaggctactaacgttggctacatatctgatcacaggatcatccatttagctttggtacttttcaaaatgtaattagcccagaaaat

SEQ ID NO: 355438 - DNA, 463 bp, Homo sapiens
aaagttacatttgaatgctgaagacccaaatagccaaaggcagcagagaagcaagtgctctgaggctacctaaaagaggacctattatttctgtgccttctccagaaatatccagaggaccagagagaagcacatcaataaaaacatctatagccatgacagagtacagtcaagttaayggaaaccttatgccatgatctctttcacattttggtttgtttcgtttgtttagacaattgaggtaacagcaaacaagtccatcttaagagtcagatggacagctaaaaagaatctaagaggtccccaataaccatcacttttcctttctattactccaaatgtttttcttttgtcaacatctattaaaacaattctaccaggctactaacgttggctacatatctgatcacaggatcatccatttagctttggtacttttcaaaatgtaattagcccagaaaat

SEQ ID NO: 355439 - DNA, 399 bp, Homo sapiens
gtggaacggaaggatatttgtagggtgagaacttgatggattggggtatgtgagtttgggagtcacagtgtggggatcaaagttgttctgctaaatgtagtattctgaggacaatctgggaggcagcagatagccatcaactacagaatatcctttttctccttatacttttgtccactaattgkaaaatccaaatacgattcttgtctgggtaattatcactctgctgtttgcaaaatgatgagtgtgattgaaatttgcactggggaaaaaggatcaggaggggacccatgaaggtcaaaacaaataaaccccgaccaaccaaacaaaagatgtggagaacaggaatatatgatatggattttgaatttgattgctgtgggatatgccatgtagctc

SEQ ID NO: 355440 - DNA, 602 bp, Homo sapiens
ctatgatctgtgagatgtcaatctactactgaatatctttttcaactttggccttcctttcaactaacratttcaggttaggctgtctgttaatagttcactcatcccacaccatacacccccaacacatgcacacacacacatgcacacacacacaagacacatgcacacacacatgcatgagacacacacatacatgatgagagtaaaaccaaactctgacatcttgcccagcactttccttcccttagttaatatcacagacgtttcttctcatcaaatagtagttgcaagtgaaccagttactctagcactaaatttctgtgtcttattttctagccttatagagctaatctctagtcctcccaagctaagagcctaatgaattaacacatgccaaaaaataaataaataaataaagtgactgcccaaatagattttgacctcaaacagtagctgagacatcgcctcattccacttcatatctaatttaaagggaagaaaataagtaggaatggaggggtaggacacaattgggtattttctccagttggcatcttggcacagcattaccataactatagtaaatatgaagtccaatt

SEQ ID NO: 355441 - DNA, 580 bp, Homo sapiens
ctttgtttttttttttgaagtcaggtaaacactgatataatgtgtgacaaatacgccacagataatactaaccagtctcacaaatgaatatttatttytaatccaacattttcaaagggaaatatggatgtcagtggtagatgaaaacaataactccttaggatcataggaagtttataacaaaaatataagaattactcaataacaggaagtcaataatgcaatacataactgataagtcaaatgaaaacaaataccattttcttaataaatgtcagtgagatagatgtttgtcaaaatttaaaatctatttctgattttaaaaacttatcagtagactaaaactaggactaactctaacatgaaattatatatatatatgtcatcttaagtgagcatgatttttcatgataaaaatttgaactattctattggagccaagaaccaaaaaaaatcaaggagccgggggaggattgtagctcataacaccccctattagcatatttagttaaccttgatctggaagtactaatgtaatcgacccttaccatttttgtccagagctctagcatctgattat

SEQ ID NO: 355442 - DNA, 606 bp, Homo sapiens
tctataaatactctgaatattttctttagggaattcctatctcaactttaatacaagatagctacacttaactagaaattttaaaattcactctcctgtmattatatattttattatggatgctatacgcattctaatctgtaagttacaaacaaaatttaatgtctgagatttaatgtttactcttccaggaatgtcacagaataaatacatattcacataattttctacattattttcagctctagctatactactatacaatattcaatgatgtatagaatggtgatctggagacctttgatcaaatataaaagcaacgattacattataatctcaaagctaaagaagggaagtaaaacaacatatattcatcctacaggtgaaataagagccaatcatctccatccataaatgagaaaatttcattacccagagcatcccactcccctttttaaaactggggctgagtatcatatacttttcttctttctttcttttttctttctttatttacagctggagagagtggaaattgaactgtgatatatagagaaggatgctctggatatggtctctgtaatgggaagtttattatacatactt

SEQ ID NO: 355443 - DNA, 574 bp, Homo sapiens
gtactacaattctattcattcattttccccaaaacgaattattaggattaaacccaaaaggaaggttacacaggcaagggggaaagagagaatctactgatttctccatcaccataaattaacagcatataataatgaatataaaagggcyatctgtgcacctcagagaaagaatctactcaagtccatgagcccctaaagcaaaacgaaaagcacttaataaacaaatactgcatactcaaagcattgtgcttaggatgaaggccattgctgctttgtacgtctttgttattctgcaaaaatgtgtgcttgggatggatgataatgcttcttgctaaataaatgtaaggtagaatagtgaatattccattttgtccagagcagatcccctgcaaagaaaatgaaggctgttaaaaatgcctcctgcaacttttggaggtgggaacaactactaatgcatcaattagttgccttatcttccattccttttgtactaaatagtatgaacaattaactctcatcgaaccatacctgaaatatctctggacaatgaatggcacttataggagccaac

SEQ ID NO: 355444 - DNA, 582 bp, Homo sapiens
tgtccagttgtctcttttgggggcaggtctttgtacattgwtgactgtcagttagacccactatttcattaaggggttggcaaaggaggtaaattccagtacagctattattatcaattacatatacatgagaaaattttactcaatgacactttgaatgtgacattaaacagagtaagccaaaaagccaagatctctgctctttatatatcatcacaggaaaacagagaggccttctggggaacatgagacacagaaacctaggtgtaaaatggacaaaatgcataaattggtaagacttagtggatgaaacatatttattaagacagtctaatatgccccaaattgctaagaaatcacattaaaccagtgcatatcaaagtgataaagtaggtttccatctgtttttctactctcagggcaaattgtcaatttcctgatgcctttaaaaatatatttcaataactcataaggaggagcatcatatggaaatcataagtgctaaaaaaaggactattaaataatttggttgttaagcagggaggggagtgatttcatctaccacaagagaagtggtttttt

SEQ ID NO: 355445 - DNA, 633 bp, Homo sapiens
gagagactgtttactcttctctacatttatggattaattttttatgtacttacacaccaataaaattttattttaaaaagtaactattttccccgggcgcggtggctcacacctgtaatcccaacactttgggaggctgaggcaggacaattgcttgaackcaggagcttgagaccatactggacaatatagtgagaacctcatctctaaaaaataaaaaaattagttgggctgcacacctgtattcccagctactcaagaggctgaggtaggagaatcacctgagcctgagattgaggctgcagtaagctatgattgcaccactgtgcttcaacctgagtgacagaatgagaccctgtctcaaaaagaaaaaaagtaactattttcaaacaacattctctgataattcaataaaataagaaattaaaaattcctcctgaaactgactttacaaattaagaaacattcatataaatttatagaacttaagaagaagacaaaatactaaattttgacaatgagtaaaagatttaactagatacttcccgaaggaaaatatatagagaggaggtggagaaagatggtagaatagaaaggtccaccgattgccccccaagcaaggacaccaagtta

SEQ ID NO: 355446 - DNA, 633 bp, Homo sapiens
gagagactgtttactcttctctacatttatggattaattttttatgtacttacacaccaataaaattttattttaaaaagtaactattttccccgggcgcggtggctcacacctgtaatcccaacactttgggaggctgaggcaggacaattgcttgaactcaggagcttgagaccatactggacaatatagtgagaacctcatctctaaaaaataaaaaaattagttgggctgcacacctgtattcccagctactcaagaggctgaggtaggagaatcacctgagcctgagattgaggctgcagtaagctatgattgcaccactgtgcttcaacctgagtgacagaatgagaccctgtctcaaaaagaaaaaaagtaactattttcaaacaacattctctgataattcaataarataagaaattaaaaattcctcctgaaactgactttacaaattaagaaacattcatataaatttatagaacttaagaagaagacaaaatactaaattttgacaatgagtaaaagatttaactagatacttcccgaaggaaaatatatagagaggaggtggagaaagatggtagaatagaaaggtccaccgattgccccccaagcaaggacaccaagtta

SEQ ID NO: 355447 - DNA, 569 bp, Homo sapiens
atatctctctttctctcaaaatactgtaatattttcagaccacagttgactgtaggtaactgaaacctcggaaagcaaaactgtggrtaaggacaaactgtttacactctatttagactttgggcacttgggggttttaggcaccaggaggaacttctgtgtttgtttctttatggtgtaccttccctaagattttttgccaggaaaagagcaaaggtatttctctgagtaccatcttatttcatattttggagaggttaaaaggatggaataagaggatcttgaactctaagactatttccattgctcacttgctgtgcagtattagaagagcttcttactctctataagcctcagtttccccatctgtaaaaatcagaatgttgatacagcctaacacacatgtaaggagaggttgggtgaggagacaaatgtaaagtgttaatgtagtgcctagcacatcatacatctacagtaaaggtgagctattctattactgtttgtgaaattctaccaagaagactctctttgatactcattgcaatagtagtagctactgaaacacctcc

SEQ ID NO: 355448 - DNA, 569 bp, Homo sapiens
atatctctctttctctcaaaatactgtaatattttcagaccacagttgactgtaggtaactgaaacctcggaaagcaaaactgtgggtaaggacaaactgtttacactctatttagactttgggcacttgggggttttaggcaccaggaggaacttctgtgtttgtttctttatggtgtaccttccctaagattttttgccaggaaaagagcaaagktatttctctgagtaccatcttatttcatattttggagaggttaaaaggatggaataagaggatcttgaactctaagactatttccattgctcacttgctgtgcagtattagaagagcttcttactctctataagcctcagtttccccatctgtaaaaatcagaatgttgatacagcctaacacacatgtaaggagaggttgggtgaggagacaaatgtaaagtgttaatgtagtgcctagcacatcatacatctacagtaaaggtgagctattctattactgtttgtgaaattctaccaagaagactctctttgatactcattgcaatagtagtagctactgaaacacctcc

SEQ ID NO: 355449 - DNA, 601 bp, Homo sapiens
gcaggatttcctcattgagataagtcatgaatgccagagtctcattctttctcaattatttggtcaaaaaaaaatcatagctattaatagttagaagaaaatagttcagaaaatagaagaaaatagttcagtcctaatttcacctttcattctgaatagaggaggaattgctagtgctcatttccttgagtgcttgaattaatcatcccaagtgtctcctatcaataaaaactagaatagacttctacaggccgagagttagggtctaaagttaaggataagttatatgttcaagaatctctggtactagtataaaagaattatgaaactcaggaaaggagttaataggagccrtcatcaacagattgctaaaggaagagatgacagtgaacctctgttgtttttgtctgcttagaatccattcctttcttctggtgataagatcctgagtccctttgcagaaccatccctcttccactctcagttcatgaggttcaggttggactattatgaccacctggctctaggagtaggcacatgactcagatcgggccactagagaattctatacctcaagttaaagtaatagattcatagatga

SEQ ID NO: 355450 - DNA, 553 bp, Homo sapiens
aatacatttactggtagtaaaagtgaattggctgatacttgtgctttatcattaaaatatatttacaattttatttagtatgaaattagcatttgcagcctttaatcattatagttttcgatgagtttcattcaattcagggtacattttcttttcacttagagaaatatgatttttttatgttgctttttrtgattattttggatttgtgctatagctagaccctgaaatggccacatttaaaatgaataattcatgagtttttgtttcgtgtagttcttaaagtatgttattggacaggacattgtgagtgtgtgtatgttatttttctttttttcaatggcaaccgcagcacactacatactaactgcaaaacgcaaatattaaattttatatttttatacctaaaatgtaatccagaagccttagagaatgtcaagaacttgtctctctcttaaaaagcatagcttagtctgatataaatttattaaggtgtgtagctatgccaagtctcatcatgagtagatagttctataaaatgaccattgaaaac

SEQ ID NO: 355451 - DNA, 553 bp, Homo sapiens
aatacatttactggtagtaaaagtgaattggctgatacttgtgctttatcattaaaatatatttacaattttatttagtatgaaattagcatttgcagcctttaatcattatagttttcgatgagtttcattcaattcagggtacattttcttttcacttagagaaatatgatttttttatgttgctttttatgattattttggatttgtgctatagctagaccctgaaatggccacatttaaaatgaataattcatgagtttttgtttcgtgtagttcttaaagtatgttattggacaggacattgtgagtgtgtgtatgytatttttctttttttcaatggcaaccgcagcacactacatactaactgcaaaacgcaaatattaaattttatatttttatacctaaaatgtaatccagaagccttagagaatgtcaagaacttgtctctctcttaaaaagcatagcttagtctgatataaatttattaaggtgtgtagctatgccaagtctcatcatgagtagatagttctataaaatgaccattgaaaac

SEQ ID NO: 355452 - DNA, 593 bp, Homo sapiens
agattttatattatatatatatgtaatatacttaggctatgtacatatataatatagtaattatattataaataaaatattaatattttgtatataatataaaattaatatagatgtagatgtatatagagagatataaatagattatatagattttttctctcyttttctgttcttgtcaaagttcatttcaatttaatttttacttttaacaatacaatgttccaacagagcagtaaggtttttacttccaacagatacaatgttccaaaagttactgagcattcattgataaatttgaccctatcttttattgattgacatactcattgtatgtgtgagacactagtctattaagatgccactctccttgagcacttcaagtgcttccccttcaggtgccttttgcttgttctctcttaaaatgctccttttcaaatattcttactccatatatcctcatatctctttcccgcatgggtttaatgattatactcaagtatcttcattttagtaagggcttctcagatcattatttgtttttaaaattgcaccttcaaccgacctgcacttcctaccccattcttgcttaa

SEQ ID NO: 355453 - DNA, 593 bp, Homo sapiens
agattttatattatatatatatgtaatatacttaggctatgtacatatataatatagtaattatattataaataaaatattaatattttgtatataatataaaattaatatagatgtagatgtatatagagagatataaatagattatatagattttttctctctttttctgttcttgtyaaagttcatttcaatttaatttttacttttaacaatacaatgttccaacagagcagtaaggtttttacttccaacagatacaatgttccaaaagttactgagcattcattgataaatttgaccctatcttttattgattgacatactcattgtatgtgtgagacactagtctattaagatgccactctccttgagcacttcaagtgcttccccttcaggtgccttttgcttgttctctcttaaaatgctccttttcaaatattcttactccatatatcctcatatctctttcccgcatgggtttaatgattatactcaagtatcttcattttagtaagggcttctcagatcattatttgtttttaaaattgcaccttcaaccgacctgcacttcctaccccattcttgcttaa

SEQ ID NO: 355454 - DNA, 511 bp, Homo sapiens
ccattgttcctggcccggacttcaatctggcctcccacattattcctgataccacacctgacccccatgactgtatctctctgatccacctgacattcaccacatttccccatatttccttcttccctgttcctcaccctgatcacgcttgatttattgatggcagttccaccaggcctaatygccacacaccagcaaaggcaggctatgctatagtacaagccactagcccccctcttagaacctctcattttctttccatcgtggaaatctgtcctcaaggaaataacttctcagtgttccatctgctattctactactcctcagggattattcaggccccctcccttccttacacatcaagctcgaggatttgcccctacccaggactggcaaattagctttactcaacatgccccgagtcagataactaaaatacctcttagtctaggtagacactttcactggataggtacaggcctttcctacagggtctgagaaggccaccgca

SEQ ID NO: 355455 - DNA, 572 bp, Homo sapiens
gggtcagggagtcaaaaaaatgtgtaaaaacaggtaaggcaatggtttatgaatacctcctctagggaaagaataggattcattattcttttgcaaaaaatgcatcaaaattctaagatatcccattttcttaattcttcacgtaatactagtatttccttcactttgawttcctagtcaattcactatttttttttagtattttctggctttcaaacaaataggtaaatgttctcttcttgtttttctacttcttgttttgctttttaatcgtctaagtgaaaaaaaaggcagtatactttataaaatgtaatttatttacctcagaaagaaaaaataactcatatatcaataaagaggttcagagtaaaatcagcatagtagcatgttacaaatttcatttttaagtttctgaaatgtacattaccggtttataaaaaactgaatttaattctcaaacataagtataacataataaaattgttttaaatgtagattataataaaacactgtatgctaatattaaaatatatattcaagcatttcatatgtttaataagccaataatttca

SEQ ID NO: 355456 - DNA, 563 bp, Homo sapiens
ggttccggtgagaatgtgcacaaaaaagtccagctttgtgggcatccaacctgggcattgcatgaagtcctgtgttcagaagggccttgtgcttagtttatgcttagtttagtgtcactgctttgaaattcttaataatcttatctttgaacctgtgttttataagtaaagcctgatggyacaacacatttgagaagaggaggtgcacacattttggtatccaagccatgctttgtcacaccattggcatatagttgttccagtgccccaccaagatctcgaaattctggtggatctatgatgcatgggaattcagcaagattcaaaatgagtagaaattaagtatatcacatccatgaaagagtaagtgaagaaaatgtcagccccaagaggtcacactgcccattgaaacaaggattttcttcaagtgcagaaagaaagcaatggtattctaagaaccatggatgacaaataaatcctatcatactctatttttactcatattacctccctctattagccagacacgtatgtgggcattgatagtgagaaaagggaaatag

SEQ ID NO: 355457 - DNA, 619 bp, Homo sapiens
ggttagtacttattaaacccattttgcagattagaaacagaagatttaaaaatagaacttaaaaaaagtcaycaaaatcctttattttccacatgtttttaccaagaaaaaaatgtgtctcttagtgagactgagtagacacagagagaatgggccttctagagagagcaagtagtcaggtagttctcatcataaattaatatattcacattctatatttttattttttagatgttttgtgagcagttgtatgaacccaaaatggagtcaagagctggacttagacagattggagcataagatcacaactgctatgaagacatcaattatggccagacatcctttactaaacggcatccctctgaccctgcacaatttttcaaattgtaacagaacacaagtcttccaatgccagttttttgtttttgtatttttcagaatagaaaacaatgtactgaggaaaacagaaagtgaagaaagtataaggtatgagggttacagttactttcatgggaatggcaattcttggattgtatgttaaatatcaaagcactgaaacccaaaagaagtggaatgggtaggattattaggcaaaacataagacatccagttatattct

SEQ ID NO: 355458 - DNA, 593 bp, Homo sapiens
cttgcaatatatagaatttttaggaagcagagaccacatagtaaacaatatgtatttgtttaatggacaatttgctgagttctatatgctcttgcattacagataagaaatctgagatcaagaaaatttcatgaaatatgttcaaggtctcttgagtccccataagtgtgctacaacattcttttcaatatgcaatactgcttgagactagattagactcattggatagtgttttccaaaacctcttggtccagtattgttcaacgataagtttgcatcagttccaaaatggaaaagagcaatttttaatataaatctttctttaytcattagtgatggaatcccagttttatttgggcactagtctatccataaagattacatttcttaatttttcatacagatagatgtggtcatgtgactaaattctagccaatgatgtgatactggaagtaatatcctgttcctgggtatacagcaagatagaagaaaactgaataagtaatgaatatggttctccatgccaaatatggactgtctccagtcatttttttacatgcaatgaaagtgcatttccaccatgttaaatcgct

SEQ ID NO: 355459 - DNA, 556 bp, Homo sapiens
  misc_feature (1)...(556): n = A,T,C or G
agaataaataaataaataaatagcttgatattcacatttggatgaagcaattctctcacattgatagaaaaaaagcataaatgtggaggatcttaggtgttggaatattcaattctaatacatagartgctctatacttatggggggggggaagagaagaaggggaaaaagaagaagaagaggtaaaagaagaaaaagaagaaggaaggaagaggaggaggaggagaaagaggaggaaggggaggaggaggggaagaagaagaggaagagaaggaaggaggaagagcgcagaagaagaggaagaagaggtagaagaagaaaaagaagaaggaaggaagaggaggaggaggagaaagaggaggaaggggaggaggaggggaacaatattaggaagaggaggaaggaggaacagcgcanaaattatggaataaagaattgtatcagtaagaattagaagagaaatttacattaacttaccttataggagatggaaacaggacaataatatttagtatataaaatgttatttaagcctgataatttataaaataactaa

SEQ ID NO: 355460 - DNA, 520 bp, Homo sapiens
ttttgtgccgactatcccaataataatgctaaaaatcgcattaatatattgatacagtaataatttatttcaaataaacagaaaaaatggtgcataaaactgagaaagatcatattaatttattgtcaatatgataactctgccacatataaagacaccacagatgtttctagaaaattgacacagtgtttagtattgcaggcttaacactgcgatcattactgagctcacattcaatgacttgttgtaacatgtatagaaccattaagctgacttcaaataaaaggatgcatttcgagtataatgaatattctgccttgccccagtattattgttctggatgtttttctcacacaagatctttatagagtcttcagctyacatgatctctgtgacacttgtttctttgattactttctattactaaaatcctcccttcagtttagcctgtcatctacaactagctcctgaaatctttctacctctctgattatcttactatttaaccctacttggcttt

SEQ ID NO: 355461 - DNA, 538 bp, Homo sapiens
gtttggagcatttgataggccagtataggtgactgacagcacagttcctcaagatttcggagcaaagctctgccattctctgaagataaatagacaacttctctccttttgataaacagctcttggcctgctgagacttagtagagactgaacacttaaccacagtgagagttatctgatgcaccaagccataaaatcggacgagctaagcagcacttcatcaaatagaaatggtatatatgtgattgatcytaagaaggccctgaagaaacaagtaagttatatgcaaaagtggcccaactgtccatggtacccactcctgtttcacttccttctgtctctcaacctgcctttgtggtctcatggggggagttccctaccatcagtcaacaaaggaagaggagactggggcttggtttatagatgctcgcgcgtgatatgcaggcattactcaaaagtggaaagcggcagcataatagccttattctggggcatccctgaagaacagtggtgaagggaaatattcccagtgggcaga

SEQ ID NO: 355462 - DNA, 564 bp, Homo sapiens
gatgcaccaagccataaaatcggacgagctaagcagcacttcatcaaatagaaatggtatatatgtgattgatcctaagaaggccctgaagaaacaagtaagttatatgcaaaagtggcccaactgtccatggtacccactcctgyttcacttccttctgtctctcaacctgcctttgtggtctcatggggggagttccctaccatcagtcaacaaaggaagaggagactggggcttggtttatagatgctcgcgcgtgatatgcaggcattactcaaaagtggaaagcggcagcataatagccttattctggggcatccctgaagaacagtggtgaagggaaatattcccagtgggcagaacattgagcagtacacctagttgttcacttttctggaagaagaaatgtccagatgtgtaataatataccaatttattagctgtggccaatggcttggctggatggttaggagcttggaagaaacatgactgaaaaattcatgacaaggaaatttgaggaagagtatcaggatagacctctgtgggcagaaaatataaatatat

SEQ ID NO: 355463 - DNA, 581 bp, Homo sapiens
agttatatgcaaaagtggcccaactgtccatggtacccactcctgtttcacttccttctgtctctcaacctgccyttgtggtctcatggggggagttccctaccatcagtcaacaaaggaagaggagactggggcttggtttatagatgctcgcgcgtgatatgcaggcattactcaaaagtggaaagcggcagcataatagccttattctggggcatccctgaagaacagtggtgaagggaaatattcccagtgggcagaacattgagcagtacacctagttgttcacttttctggaagaagaaatgtccagatgtgtaataatataccaatttattagctgtggccaatggcttggctggatggttaggagcttggaagaaacatgactgaaaaattcatgacaaggaaatttgaggaagagtatcaggatagacctctgtgggcagaaaatataaatatatgtgtgccatgtgaatgttcagtaaagagtgacctcagcagagaagagttttacaaatcaggtggataggatgacctgtccagtggttaccagtcagcctctttcctgagacaccact

SEQ ID NO: 355464 - DNA, 538 bp, Homo sapiens
gtttggagcatttgataggccagtataggtgactgacagcacagttcctcaagatttcggagcaaagctctgccattctctgaagataaatagacaacttctctccttttgataaacagctcttggcctgctgagacttagtagagactgaacacttaaccacagtgagagttatctgatgcaccaagccataaaatcggacgagctaagcagcacttcatcaaatagaaatggtatatatgtgattgatcctaagaaggccctgaagaaacaagtaagttatatgcaaaagtggcccaactgtccatggtacccactcctgtttcacttccttctgtctctcaacctgcctttgtggtctcatggggggagttccctaccatcagtcaacaaaggaagaggagactggggcttggtttatagatgctcgcgcgtgatatgcaggcattactcaaaagtggaaagcggcagcataatagcyttattctggggcatccctgaagaacagtggtgaagggaaatattcccagtgggcaga

SEQ ID NO: 355465 - DNA, 597 bp, Homo sapiens
ctgaatatatgggcatcaatacatgtttacttcacctaactgattcaaaagatcattccaaggatcatrtctgtcttcttcaattttacaacacctaatatagaaactagtatataacacacattcagtaaaaatctggtaaatgaaaaagttatgtaatgagaattaaatggataaagaacctataatataagccacaaaatttacaaataatggtttcttctgaatttacatagaaggacattgtgtttcagaaatattaagctattttctcaatataacatatttaaatagcaaatctgaggctaaacctaagtgtacttatccaaagatagtgagttccaattttagaattttgaaatgtaaaaaatattaatcatgtctagttacataatgagatgtagttttaacatctttgagaatatgcaagacaaaaaataataatgttttcaataacgctttttaagataatgtgtgcacttaataatcatagcagaatttacaagttgttaatttgtcttatgtcaaagttatgctcattaatgtctgcatatgtatgtatgtattttggcatatattatatatgcagatagataa

SEQ ID NO: 355466 - DNA, 597 bp, Homo sapiens
ctgaatatatgggcatcaatacatgtttacttcacctaactgattcaaaagatcattccaaggatcatatctgtcttcttcaattttacaacacctaatatagaaactagtatataacacacattcartaaaaatctggtaaatgaaaaagttatgtaatgagaattaaatggataaagaacctataatataagccacaaaatttacaaataatggtttcttctgaatttacatagaaggacattgtgtttcagaaatattaagctattttctcaatataacatatttaaatagcaaatctgaggctaaacctaagtgtacttatccaaagatagtgagttccaattttagaattttgaaatgtaaaaaatattaatcatgtctagttacataatgagatgtagttttaacatctttgagaatatgcaagacaaaaaataataatgttttcaataacgctttttaagataatgtgtgcacttaataatcatagcagaatttacaagttgttaatttgtcttatgtcaaagttatgctcattaatgtctgcatatgtatgtatgtattttggcatatattatatatgcagatagataa

SEQ ID NO: 355467 - DNA, 622 bp, Homo sapiens
aggaatgaaaaagaagcacaaaatgctgaatatatgggcatcaatacatgtttacttcacctaactgattcaaaagatcattccaaggatcatatctgtcttcttcaattttacaacacctaatatagaaactagtatataacacacattcagtaaaaatctggtaaatgaaaaagttatktaatgagaattaaatggataaagaacctataatataagccacaaaatttacaaataatggtttcttctgaatttacatagaaggacattgtgtttcagaaatattaagctattttctcaatataacatatttaaatagcaaatctgaggctaaacctaagtgtacttatccaaagatagtgagttccaattttagaattttgaaatgtaaaaaatattaatcatgtctagttacataatgagatgtagttttaacatctttgagaatatgcaagacaaaaaataataatgttttcaataacgctttttaagataatgtgtgcacttaataatcatagcagaatttacaagttgttaatttgtcttatgtcaaagttatgctcattaatgtctgcatatgtatgtatgtattttggcatatattatatatgcagatagataa

SEQ ID NO: 355468 - DNA, 597 bp, Homo sapiens
ctgaatatatgggcatcaatacatgtttacttcacctaactgattcaaaagatcattccaaggatcatatctgtcttcttcaattttacaacacctaatatagaaactagtatataacacacattcagtaaaaatctggtaaatgaaaaagttatgtaatgagaattaaatggataaagaacctataatataagccacaaaatttacaaataatggtttcttctgaatttacatagaaggacattgtgtttcagaaatattaagctattttctcartataacatatttaaatagcaaatctgaggctaaacctaagtgtacttatccaaagatagtgagttccaattttagaattttgaaatgtaaaaaatattaatcatgtctagttacataatgagatgtagttttaacatctttgagaatatgcaagacaaaaaataataatgttttcaataacgctttttaagataatgtgtgcacttaataatcatagcagaatttacaagttgttaatttgtcttatgtcaaagttatgctcattaatgtctgcatatgtatgtatgtattttggcatatattatatatgcagatagataa

SEQ ID NO: 355469 - DNA, 611 bp, Homo sapiens
tagcataactggtaaaaggaacatatttcattacaaactacagtatatagttttacataaaacagccagtgattacattcaattaagacataagtttggagggcagagtcaataaccctgagatgtctattggaagttagaactttgcagattttgcagattttagcccaagtgaactactgtagaaaggcatttgtgttaagttacagttgctgtcttttaaattgctaaaaataattgaagaggtaactacacaatctgctcttccatcaagtgccagttgcagaacctttttagacataaacatggaaaacataaagaatatatctcaagggagtattataagtctataattccttcgaggatgcacgtaatgccataaattgcaggaggaaactcaagcagtttagttgcaggaacgctgagatgaaattacagcttttataatcccctaagaagatattcttttggtataatgggaactgtagttgtttaraaatagcctgctcttttgcccctagaaaagtacaatggtcatttgaagattgaaaaatactaggcatatgtctgaaaagtgagttgagctgatcataagaataatagaaaaatta

SEQ ID NO: 355470 - DNA, 662 bp, Homo sapiens
tttactatacaactatcttagaggcattttgggagctctgagctagatgtggggttttggatttcattattcaggcttttaaaaaataataaaataaaatgcagccaacagcaggattgacgtgaaacaaataatcaaacatccagttatttttgaggaatcagttaattaaatgctaatgctgactgagcttgtgtttttgtatgtgtttaattttttttaaagagtttatgcattacacatagagtttgtatgtgtgctcaggaacaatgcagtatacaaattacaagaataatttttattctatggcaattggcttcatcttctccaataattgttcagtgctacaaataaatkacagccattaggtgaatttggtcaattattttgataaaagttgcagtggcaattaatactttttggctataatattaatattatctgagtcagatagtaattttatgccatgagtggatatttggaatgcacatcattttgctattagcttattataaactgaaaagaaagttttcattacctaaggcaagaattacaagcaatttcaagaatctttaaaatgaaaggataatgggaattctttgagatacctctgacaaggtccatgttctcccagtgagggtcagagttcaattcctgaactc

SEQ ID NO: 355471 - DNA, 662 bp, Homo sapiens
tttactatacaactatcttagaggcattttgggagctctgagctagatgtggggttttggatttcattattcaggcttttaaaaaataataaaataaaatgcagccaacagcaggattgacgtgaaacaaataatcaaacatccagttatttttgaggaatcagttaattaaatgctaatgctgactgagcttgtgtttttgtatgtgtttaattttttttaaagagtttatgcattacacatagagtttgtatgtgtgctcaggaacaatgcagtatacaaattacaagaataatttttattctatggcaattggcttcatcttctccaataattgttcagtgctacaaataaattacagccattaggtgaatttggtcaattattttgataaaagttgcagtggcaattaatactttttggctataatattaatattatctgagtcagatagtaattttatgccatgagtggatatttggaatgcacatcattttgctattagcttattataaactgaaaagaaagttttcattacctaaggcaagaattacaagcaatttcaagaatctttaaaatgaaaggataatgggaattctttgagatacctctgacaargtccatgttctcccagtgagggtcagagttcaattcctgaactc

SEQ ID NO: 355472 - DNA, 508 bp, Homo sapiens
gtttgtatgtgtgctcaggaacaatgcagtatacaaattacaagaataatttttattctatggcaattggcttcatcttctccaataattgttcagtgctacaaataaattacagccattaggtgaatttggtcaattattttgataaaagttgcagtggcaattaatactttttggctataatattaatattatctgagtcagatagtaattttatgccatgagtggatatttggaatgcacatcattttgctattagcttattataaactgaaaagaaagttttcattacctaaggcaagaattacaagcaatttcaagaatctttaaaatgaaaggataatgggaattctttgagatacctctgacaaggtccatgttctcccagtgagggtcagagttcaattcctgaactcatccatcacattctgactggcaaggkctgaatagctgtaaagactgcacaggagaaagggcgcccttgctgacctcctaaatcactttcaca

SEQ ID NO: 355473 - DNA, 581 bp, Homo sapiens
cactatgagcttcatgtttgtgtcagctcccttcttactcaaatcctacagaatgacataaaatggttcctgtggaagctttgcacgcagagggtttgcatcagagctgaggaaccctgagtttagaaaaccttgagtttctgtaatggactggaagcaaatctgcctaatcttttcctagagggaaacattatctttatcacactaggcagcccacaaatctaccctttactctgagggacacaccatacmttctaagctgcttgttatacaaacatccataagagataatctggaacaaaaggaatcagtgcctctgcttgtgcagtaatatgatagactcatggagaactatctcctcaaacgctcctgcctgtgaactatcacagaacacattttctgttctgtatcatacattatcttaaattcatttttttatcaatatatcgagcctccccaagtcaaccataagctgccattaaaaataactcatttttacaccaatagatttacttaatttctaaggtaatgtcataacatgatttgtgctcaatacatatttaagaacaattactgatgat

SEQ ID NO: 355474 - DNA, 552 bp, Homo sapiens
ggcctgatttaaccattccctggctaccgcctatgttcactcaagaccttgggttcctatactcagcaagtggcaaggccaaccaggacagtttacttcccttcatggcaaggagttcccccaggtcctgggcaggtccagaggcaccaggggccaggtactacagtcaaaaacttaaaagtttgcctggtgttttaatgcastgcagcttggctggcactcaaacctcaagacacagtccttcccactcttctctcccattttcaaaggcagagaagcctcaccatgtgaccaccaccaccacaggctcagaggaagtactgccagactattgccaatgttcccttaagacccaagggctctttagtcagcttgtggtaaatgctgcctggcctgggattcaccctatagcacagtgggttcccctctggtccagggtaagtccagaagtgccatcgaagggccaagtcttggaaccagggactccaagagcccacttggtgctctacccctctgttgctgagctggtacctgaggtgcaagataaagtca

SEQ ID NO: 355475 - DNA, 621 bp, Homo sapiens
ttgctacctggctggtgtcccagtagatcatgtgtcctccagtcctctggttctgggcccagttcagctctaggactcacccagratttgcagtatttgtggcttagattctctttcaagtttattttgggacccagagcactttggccccaaagtgacaaggtttatgggaattcaaatttggacttctgggatcagtgattcctctctaactagggctggtttaaacgctcccttcatgggcgggagtcagctgagtttggtccagtttttttttttttctgctatcacagggcaggactgagttttatgcctcacaactgctgtggtctccctctccccagagcacagaacactctgcaccaccccaccactaccagaatatgggggaggggtggcattggtaattcaagactgtttttcctacctcttcagtgcctctttcagtgttataaagttaaaagcaggtactatgagtgctcacctgatttttggttcttatgaaagtgcttttttgtgtgtgttgacagttgttaaatagatgtctctgtgggggtgataatcagtggagccttctattccaccatcttgctccacccttctggctctgatttagatgat

SEQ ID NO: 355476 - DNA, 634 bp, Homo sapiens
tggtccagtttttttttttttctgctatcacagggcaggactgagttttatgcctcacaactgctgtggtctccctctccccagagcacagaacactctgcaccaccccaccactaccagaatatgggggaggggtggcattggtaattcaagactgtttttcctacctcttcagtgcctctttcagtgttataaagttaaaagcaggtactatgagtgctcacctgatttttggttcttatgaaagtgcttttttgtgtgtgttgacagttgttaaatagatgtctctgtgggggtgataatcagtggagccttctrttccaccatcttgctccacccttctggctctgatttagatgatatttaaatgagactttggactttaaacttcagagttgaagatgaaactagttaaggcttttggggttgttgagatggaatgaaggatatgaattataggaggtgaaggatggagtaaaacatggactgaatttgtttccccacagaaatgtatatcttgaaattttaagctcagtgggatggtataaagaggtgggctcttggggagattattgggtcataagcgtggggccctcgttaataggattagttctcctttcaaggagactccaga

SEQ ID NO: 355477 - DNA, 609 bp, Homo sapiens
ataatatgttgcaataaagtatatatttacttartgaaataatggaaacagctagaaagaaaataaaattataaccttgagtatttttaaaactttttattttatagggaagagaagttgatattgtagctttctgaagcagagtttgaaccattgtactatattttataatatcatacagatcaacatccttgcctgcatctctcaatatatgtatcagttgcttaaagagaaactaacagtagccttggacaatagcagtctaagagatgattaagaatgggaaaaatacataaatatctttgttgttgtggattaccaaatacaatgtcattcactgaaattaagccaaattactttttctgaaaggaaaatatacacattttatttcaggtcaattaaaaaggtattatacctaagaaagtagagcattgctacagccttttatgttaccttggaaaaaggttatttcaacactatcattaatttattagtacaaaactggctaatttccccaaggttcttaaaatttgagagtatatctttgagccttcagaaatgcaattattggaaaatgaagaaaaagcttaaattggaaataatgtaata

SEQ ID NO: 355478 - DNA, 609 bp, Homo sapiens
ataatatgttgcaataaagtatatatttacttagtgaaataatggaaacagctagaaagaaaataaaattataaccttgagtatttttaaaactttttattttatagggaagagaagttgatattgtagctttctgaagcagagtttgaaccattgtactatattttataatatcayacagatcaacatccttgcctgcatctctcaatatatgtatcagttgcttaaagagaaactaacagtagccttggacaatagcagtctaagagatgattaagaatgggaaaaatacataaatatctttgttgttgtggattaccaaatacaatgtcattcactgaaattaagccaaattactttttctgaaaggaaaatatacacattttatttcaggtcaattaaaaaggtattatacctaagaaagtagagcattgctacagccttttatgttaccttggaaaaaggttatttcaacactatcattaatttattagtacaaaactggctaatttccccaaggttcttaaaatttgagagtatatctttgagccttcagaaatgcaattattggaaaatgaagaaaaagcttaaattggaaataatgtaata

SEQ ID NO: 355479 - DNA, 569 bp, Homo sapiens
gctatgctcttttaccgttcattttagatattcaattttcttgaatttggcatctgcaaaaatgacctgaactataagaggttatacacaataaaattaccaaaatgtttggaaattaaggacttcaaaatcaagctaatgtcttctgctcagtgttcccacaaatgtttgagctacaacattaaagaatactaagcatcatacatattcttctgtaaatctagattaagatgactctcttaaagttatacttttctattgatgcattgtagttatattacatttgaaaataaacatctaaaattccacaaaaggaaaaacagattcatagctaaattacccattttaagtgaaaaatggttcagctaaacaataaacctgactmatatcaggctttattgcaatttagagccaattgacaaaatcattatcaatgaatggctgttttacagaatgccttttaccctccaaaaattgttatgcttttcccaaaacatttttcacatgctgaactcaatataccacttattttccctctcagtactgtaaatgatatgcacgaacatcct

SEQ ID NO: 355480 - DNA, 608 bp, Homo sapiens
caggtgtccgtggagggaatgaggactgctggggatctcctgcttaccaaacagagaagaattgtaggtattagagggtaggaagggtagggggcaggaaacaatagggaagagttggttaacagctacaaaattgcagctagataagagtaatagcttctagtgttctataatagcatccccaacgtttttggtaccagggactggttttgtggaagacaatttttctacggcagggtgggtaggggttggggagatggttttgggatgaaactgttaggcattagattcttataaggagcacacaacctcgatccccttgcacgtgcagtttacaatagggtttgttctcctgtgagaatctaatgtcactgcygatctcacagacaataatgctcgctcatctgtcactcatcacctgctgtatggcccgattcctcacaagccatgaagcagtactggtccacagcccgagggttggggacccctgttctgtagcactgtagggtgactgtacttaacactaattcattgtatatttttaaaatcactagaagagaggattttaaatgtttctaatacaaaaaaaaaatgaggtgatgaatatg

SEQ ID NO: 355481 - DNA, 506 bp, Homo sapiens
atactagtttaggatagtgagagaaggcagagaggattttgatatgagatcagagaagtagggatgggccacctcatttaagaccttagaggtctgaatagagagtttggatttttcctctaaatgtaaacgaaagtcattcaaaggttgaagtagccaagtaacatgatcatgtccttaaacagttgatcrggatgctgtgtagaagaccagctttaaagggggaaaaataaaaacaagaagattatttagaaggaaattacagacaaaatataataatgtggtttgaacttggttggaggcagtggcattgcagagaagtagaaaagttggagaaatatatttgaggttgaacttgagaaatgatacaaagggagaaatcaaggagttttgcttaaacaaactgggtggataacggttataggaaggaggagatggtgatgagatagctttaaaggatatttaaatgtcatgttggggtttggattattttgatatttctgtta

SEQ ID NO: 355482 - DNA, 505 bp, Homo sapiens
ttggggagggtgtcacattaaacaatttatatcttttgtcagtaagaaagatttagaaraattattagcaatcccaaactcgtgatctcatgaacctttctcctcagccagtagcactaaaggttaagaagttctggtgactaaactcacatttgggtagtccttgttacagttgtaaagattcaataattatgtgtagggatgttttaaaggagagtcacagagaagtaagagttttatagcctttatttatagaattcaatggtgcctgtggctttatttttcaacctcaaagacctgagagcttcagatacctatttcctttaccaagggccttgggtctgaagggaaaacctccatagcttagtgtagttccactttggattcagtggatcttaccatctatcacaatgttggaggcacatcaagggtgctcattaaatttcggttaaattgaaataaatgtcttgctcttttaagaattttgacatcagaaaaatatatt

SEQ ID NO: 355483 - DNA, 505 bp, Homo sapiens
ttggggagggtgtcacattaaacaatttatatcttttgtcagtaagaaagatttagaagaattattagcaatcccaaactcgtgatctcatgaacctttctcctcagccagtagcactaaaggttaagaagttctggtgactaaactcacatttgggtagtccttgttacagttgtaaagattcaataattatgtgtagggatgttttaaaggagagtcacagagaagtaagagttttatagcctttatttatagaattcaatggtgcctgtggctttatttttcaacctcaaagacctgagagcttcagatacctatttcctttaccaagggccttgggtctgaagggaaaacctccatagcttagtgtagttccactttggattcagtggatcttaccatctatcacaatgttggaggcacatcaagggtgctcattaaatttcrgttaaattgaaataaatgtcttgctcttttaagaattttgacatcagaaaaatatatt

SEQ ID NO: 355484 - DNA, 553 bp, Homo sapiens
gtagcaacacacttgggtccccttccacactgtggaagctttgttcttttgcgctttgcaataaatcttgctgctcctcactctttgggttcccactgcctttatgaactgtaatactcaccgtgaaaatctgtagcttcactcctgaggccagcgagaccatgaacccaccagaaggaagaaactccaaacacgtttgaacctcagagggaacaaactccagacacaccatctttaagaactttaacactcatcacgacgatccgcggcttcattcttgaagtcagtgagaccaagaacctacgaattccggacacagtagccactaatgatcyggtgaagttctgtggtatcagttgtaatgtctcatttttcacctctgatttcatttatttggatctccctttttccttacctagtctcactaaggatttctcaattttgtttaacttttcaaaaaaccaactttttgtttcattgatctttcgtattgttttcttcatttcaatttcatttatttctgctctaatctttattatttattttcttccac

SEQ ID NO: 355485 - DNA, 340 bp, Homo sapiens
gaattctccagttttcgtaattaagaaaaaatcaggtaaatggagaatgttaactgayttaagagccatcaattcagttatacaacctatgggagcattacagccagaattgccttctcctgctataattccaaaaaattggcctttaatagtcatagatttaaaagactgtttctttactatccccttagctgagcaagactgtgaatggtttgcatttacaattcctgcagtaaacaacctgcagcctgctaagtgttttcattgttttacagatgggtctattaatggtaaagcttcttattctggcttgaaaagtaaagtttttcagatgccctac

SEQ ID NO: 355486 - DNA, 340 bp, Homo sapiens
gaattctccagttttcgtaattaagaaaaaatcaggtaaatggagaatgttaactgatttaagagccatcaattcagttatacaacctatgggagcattacagccagaattgccttctcctgctataattccaaaaaattggcctttaatagtcatagatttaaaagactgtttctttactatccccttagctgagcaagactgtgaayggtttgcatttacaattcctgcagtaaacaacctgcagcctgctaagtgttttcattgttttacagatgggtctattaatggtaaagcttcttattctggcttgaaaagtaaagtttttcagatgccctac

SEQ ID NO: 355487 - DNA, 340 bp, Homo sapiens
gaattctccagttttcgtaattaagaaaaaatcaggtaaatggagaatgttaactgatttaagagccatcaattcagttatacaacctatgggagcattacagccagaattgccttctcctgctataattccaaaaaattggcctttaatagtcatagatttaaaagactgtttctttactatccccttagctgagcaagactgtgaatggtttgcatttacaattcctgcagtaaacaacctgcagmctgctaagtgttttcattgttttacagatgggtctattaatggtaaagcttcttattctggcttgaaaagtaaagtttttcagatgccctac

SEQ ID NO: 355488 - DNA, 340 bp, Homo sapiens
gaattctccagttttcgtaattaagaaaaaatcaggtaaatggagaatgttaactgatttaagagccatcaattcagttatacaacctatgggagcattacagccagaattgccttctcctgctataattccaaaaaattggcctttaatagtcatagatttaaaagactgtttctttactatccccttagctgagcaagactgtgaatggtttgcatttacaattcctgcagtaaacaacctgcagcctgctaagtgttttcattgttttacaratgggtctattaatggtaaagcttcttattctggcttgaaaagtaaagtttttcagatgccctac

SEQ ID NO: 355489 - DNA, 571 bp, Homo sapiens
taaattgtcaccttatcatactgtcttatcacattgccttatacaatatgatatgaactttgagtgaaaggcatttatagtgagggttgggagaagcaaatagagcatcctttcatttctctttatttctaatgctaatgtggacactgaaaacaatttatgtgatttatatatgtgtgtatacatatacatatatattcatacacatatatcaatgtctatatagagagaagaattatcttgattgtaaacactgtcttttcaagaaaaatgttacattagtatttttgacatattatcatcttctaatgtgttctaaaagagcagtktattgagggtgttattcttctaagaaacttgacaaatggtcacagtttactaaatgacttttcaaacttctttcactttgtgttataccgctttaatcatcttagggaattgatagtccagaaatgctgcgttgtctctgtacagtgtatttgtgtgtgtatgtccatttttgaaacacaaaaataggtacttttaaaggtctgaaaacatgaaaagcaaaggcagcctcatcaactgacac

SEQ ID NO: 355490 - DNA, 579 bp, Homo sapiens
  misc_feature (1)...(579): n = A,T,C or G
taggcggtggttttagtggccaatcactcatgcaaaatattttarcaaacattttccaccccagtgggttgatttttctgttttgttttattttggtttcttttttttgctatatccaagggaagctttccattgaaagtgactaattatttatctaatcgggacagaaactacatgtccgctcaggctttgatcccctttttagtgagtgttttatgattggcacatagctctagtgagttttacctgaatgacaattatcaaccatcagtggaccatatgcagtggtgggtagaattgccgtcagctgccgatgggccatctggagtaatgtttactaagtagtttaaagatggctcagaagtacaactgagagccagcagctattgaagtaggtcttgatctctccataccaaaacctgagtgtggccttagcaattaagtttctgaaaggaattataaaaggttatttttcttgacaatgtttgttataatcatatttagtgaggcataggtttncatagtggtgtgcttacactgtatttgtttggaagatatctagacatcttttatcangaa

SEQ ID NO: 355491 - DNA, 579 bp, Homo sapiens
  misc_feature (1)...(579): n = A,T,C or G
taggcggtggttttagtggccaatcactcatgcaaaatattttagcaaacattttccaccccagtgggttgatttttctgttttgttttattttggtttcttttttttgctatatccaagggaagctttccattgaaagtgactaattatttatctaatcgggacagaaactacatgtccgctcaggctttgatcccctttttagtgagtgttttatgattggcacatagctctagtgagttttacctgaatgacaattatcaaccatcagtggaccatatgcagtggtgggtagaattgcygtcagctgccgatgggccatctggagtaatgtttactaagtagtttaaagatggctcagaagtacaactgagagccagcagctattgaagtaggtcttgatctctccataccaaaacctgagtgtggccttagcaattaagtttctgaaaggaattataaaaggttatttttcttgacaatgtttgttataatcatatttagtgaggcataggtttncatagtggtgtgcttacactgtatttgtttggaagatatctagacatcttttatcangaa

SEQ ID NO: 355492 - DNA, 579 bp, Homo sapiens
  misc_feature (1)...(579): n = A,T,C or G
taggcggtggttttagtggccaatcactcatgcaaaatattttagcaaacattttccaccccagtgggttgatttttctgttttgttttattttggtttcttttttttgctatatccaagggaagctttccattgaaagtgactaattatttatctaatcgggacagaaactacatgtccgctcaggctttgatcccctttttagtgagtgttttatgattggcacatagctctagtgagttttacctgaatgacaattatcaaccatcagtggaccatatgcagtggtgggtagaattgccgtcagctgccgatgggccatctggagtaatgyttactaagtagtttaaagatggctcagaagtacaactgagagccagcagctattgaagtaggtcttgatctctccataccaaaacctgagtgtggccttagcaattaagtttctgaaaggaattataaaaggttatttttcttgacaatgtttgttataatcatatttagtgaggcataggtttncatagtggtgtgcttacactgtatttgtttggaagatatctagacatcttttatcangaa

SEQ ID NO: 355493 - DNA, 579 bp, Homo sapiens
  misc_feature (1)...(579): n = A,T,C or G
taggcggtggttttagtggccaatcactcatgcaaaatattttagcaaacattttccaccccagtgggttgatttttctgttttgttttattttggtttcttttttttgctatatccaagggaagctttccattgaaagtgactaattatttatctaatcgggacagaaactacatgtccgctcaggctttgatcccctttttagtgagtgttttatgattggcacatagctctagtgagttttacctgaatgacaattatcaaccatcagtggaccatatgcagtggtgggtagaattgccgtcagctgccgatgggccatctggagtaatgtttactaagtagtttaaagatggctcagaagtacaactgagagccagcagctattgaagtaggtcttgatctctccataccaaaacctgagtgtggccttagcaattaagtttctraaaggaattataaaaggttatttttcttgacaatgtttgttataatcatatttagtgaggcataggtttncatagtggtgtgcttacactgtatttgtttggaagatatctagacatcttttatcangaa

SEQ ID NO: 355494 - DNA, 539 bp, Homo sapiens
atgtttcttgttgatacattcatttacactgtactgtttatttttaatcttccctaatttttaaattgggttgaaatttttcaagtgctcatctgttatctgtgttgttacggttttgtaatataacgtttgcataaacttagaaatacatgtatcctrgaacttaaagtataacaataataaaaatatatatataatagtttcaaatataaattttgcatctactaagttaaatatcctaattaagcttttacataaatggttaaaaaatcggctattactatttttactattagtaataactgctctggcaatataataaatgtactttactagaattatcttgaatttgttataggaaactataaaaacagtttttgtttgaagcatcaggtattcctttaaatactcaataagttaaaacaacattttctaagattgcaaaaagtttatttttgttgtcattttagttagttttttaagttagtgctatgaatttttaaaaagagcttcttcaaaatacaatttgctataaaata

SEQ ID NO: 355495 - DNA, 539 bp, Homo sapiens
atgtttcttgttgatacattcatttacactgtactgtttatttttaatcttccctaatttttaaattgggttgaaatttttcaagtgctcatctgttatctgtgttgttacggttttgtaatataacgtttgcataaacttagaaatacatgtatcctggaacttaaagtataacaataataaaaatatatatataatagtttcaaatataaattttgcatctactaagttaaatatcctaattaagcttttacataaatggttaaaaaatcggctattactatttttactattagtaataactgctctggcaatataataaatgtaytttactagaattatcttgaatttgttataggaaactataaaaacagtttttgtttgaagcatcaggtattcctttaaatactcaataagttaaaacaacattttctaagattgcaaaaagtttatttttgttgtcattttagttagttttttaagttagtgctatgaatttttaaaaagagcttcttcaaaatacaatttgctataaaata

SEQ ID NO: 355496 - DNA, 558 bp, Homo sapiens
cctttttcaccttagccctgaaagcgctccaaaagtccagttccagatactacaaaaggagtgtttcargactgctctatgaaagggagtgttcaacttttgacttgaatgcaaacatcagaaagcagtttctcagaacgctgctgtgtgctttttatatgtattcccgcttccagcgaaatccccaaagctagccaaatacccacttgcagattccagaaaaagagtgtttcaaaactgctccttcaaaacggtggttcaattctcttagttgagtacacacatctcaaataagtttctgagaatgcttctgtctagttgttatgggaagatatttccttttccaacataggcctgaaagcgctccaaatgtccacttccagatactacaaaaggagtgattcaaacctgctctatgatagggaatgttcaactctgtgtcctgaatacaaacatcacaaagatgtttctcagaacgctgcagtctgcaatttgtatgaattcccgcttccaacgaaatcctccaaactagccaaatatccacttgcagattccaca

SEQ ID NO: 355497 - DNA, 558 bp, Homo sapiens
cctttttcaccttagccctgaaagcgctccaaaagtccagttccagatactacaaaaggagtgtttcaggactgctctatgaaagggagtgttcaacttttgacttgaatgcaaacatcagaaagcagtttctcagaacgctgctgtgtgctttttatatgtattcccgcttccagcgaaatccccaaagctagccaaatayccacttgcagattccagaaaaagagtgtttcaaaactgctccttcaaaacggtggttcaattctcttagttgagtacacacatctcaaataagtttctgagaatgcttctgtctagttgttatgggaagatatttccttttccaacataggcctgaaagcgctccaaatgtccacttccagatactacaaaaggagtgattcaaacctgctctatgatagggaatgttcaactctgtgtcctgaatacaaacatcacaaagatgtttctcagaacgctgcagtctgcaatttgtatgaattcccgcttccaacgaaatcctccaaactagccaaatatccacttgcagattccaca

SEQ ID NO: 355498 - DNA, 558 bp, Homo sapiens
cctttttcaccttagccctgaaagcgctccaaaagtccagttccagatactacaaaaggagtgtttcaggactgctctatgaaagggagtgttcaacttttgacttgaatgcaaacatcagaaagcagtttctcagaacgctgctgtgtgctttttatatgtattcccgcttccagcgaaatccccaaagctagccaaatacccacttgcagattccagaaaaagagtgtttcaaaactgctccttcaaaacggtggttcaattctcttagttgagtacacacatctcaaataagtttctgagaatgcttctgtctagttgttatgggaagatatttccttttccaacatargcctgaaagcgctccaaatgtccacttccagatactacaaaaggagtgattcaaacctgctctatgatagggaatgttcaactctgtgtcctgaatacaaacatcacaaagatgtttctcagaacgctgcagtctgcaatttgtatgaattcccgcttccaacgaaatcctccaaactagccaaatatccacttgcagattccaca

SEQ ID NO: 355499 - DNA, 558 bp, Homo sapiens
cctttttcaccttagccctgaaagcgctccaaaagtccagttccagatactacaaaaggagtgtttcaggactgctctatgaaagggagtgttcaacttttgacttgaatgcaaacatcagaaagcagtttctcagaacgctgctgtgtgctttttatatgtattcccgcttccagcgaaatccccaaagctagccaaatacccacttgcagattccagaaaaagagtgtttcaaaactgctccttcaaaacggtggttcaattctcttagttgagtacacacatctcaaataagtttctgagaatgcttctgtctagttgttatgggaagatatttccttttccaacataggcctgaaagcgctccaaatgtccacttccagatactacaaaaggagtgattcaaacctgctctatgatagggaatgttcaactctgtgtcctgaatacaaacatcacaaagatgtttctcagaacgctgcagtctgcaatttgtatgaattcccgcttccaacgaaatcctcmaaactagccaaatatccacttgcagattccaca

SEQ ID NO: 355500 - DNA, 574 bp, Homo sapiens
tagtgtgtgtaagtggacatttggagcacttaccggcctaaggtgaaaaaggaaatatcttcccataaaaactagacagaagcattctcagaaacttactcgtgatgtgtgtcctcaactaaaggagtagaacctttcttttcatagagaagttttgaaacgctctttttgtggaatctgcaagtggatatttggctagtttkgaggatttcgttggaagcgggaattcatacaaattgcagactgcagcgttctgagaaacatctttgtgatgtttgtattcaggacacagagttgaacattccctatcatagagcaggtttgaatcactccttttgtagtatctggaagtggacatttggagcgctttcaggcctatgttggaaaaggaaatatcttcccataacaactagacagaagcattctcagaaacttatttgagatgtgtgtactcaactaagagaattgaaccaccgttttgaaggagcagttttgaaacactctctttctggaatctgcaagtggatatttggctagctttggggatttcgctggaagcgggaatacatataaa

SEQ ID NO: 355501 - DNA, 574 bp, Homo sapiens
tagtgtgtgtaagtggacatttggagcacttaccggcctaaggtgaaaaaggaaatatcttcccataaaaactagacagaagcattctcagaaacttactcgtgatgtgtgtcctcaactaaaggagtagaacctttcttttcatagagaagttttgaaacgctctttttgtggaatctgcaagtggatatttggctagtttggaggatttcgttggaagcgggaattcatacaaattgcagactgcagcgttctgagaaacatctttgtgatgtttgtattcaggacacagagttgaacattccctatcatagagcaggttkgaatcactccttttgtagtatctggaagtggacatttggagcgctttcaggcctatgttggaaaaggaaatatcttcccataacaactagacagaagcattctcagaaacttatttgagatgtgtgtactcaactaagagaattgaaccaccgttttgaaggagcagttttgaaacactctctttctggaatctgcaagtggatatttggctagctttggggatttcgctggaagcgggaatacatataaa

SEQ ID NO: 355502 - DNA, 574 bp, Homo sapiens
tagtgtgtgtaagtggacatttggagcacttaccggcctaaggtgaaaaaggaaatatcttcccataaaaactagacagaagcattctcagaaacttactcgtgatgtgtgtcctcaactaaaggagtagaacctttcttttcatagagaagttttgaaacgctctttttgtggaatctgcaagtggatatttggctagtttggaggatttcgttggaagcgggaattcatacaaattgcagactgcagcgttctgagaaacatctttgtgatgtttgtattcaggacacagagttgaacattccctatcatagagcaggtttgaatcactccttttgtagtatctggaagtggacatttggagcgctttcaggcctatgttggaaaaggaaatatcttcccataacaactagacagaagcattctcagaaacttatttgagaygtgtgtactcaactaagagaattgaaccaccgttttgaaggagcagttttgaaacactctctttctggaatctgcaagtggatatttggctagctttggggatttcgctggaagcgggaatacatataaa

SEQ ID NO: 355503 - DNA, 574 bp, Homo sapiens
tagtgtgtgtaagtggacatttggagcacttaccggcctaaggtgaaaaaggaaatatcttcccataaaaactagacagaagcattctcagaaacttactcgtgatgtgtgtcctcaactaaaggagtagaacctttcttttcatagagaagttttgaaacgctctttttgtggaatctgcaagtggatatttggctagtttggaggatttcgttggaagcgggaattcatacaaattgcagactgcagcgttctgagaaacatctttgtgatgtttgtattcaggacacagagttgaacattccctatcatagagcaggtttgaatcactccttttgtagtatctggaagtggacatttggagcgctttcaggcctatgttggaaaaggaaatatcttcccataacaactagacagaagcattctcagaaacttatttgagatgtgtgtactcaactaagagaattgaaccaccgttttgaaggagcagttttgaaacwctctctttctggaatctgcaagtggatatttggctagctttggggatttcgctggaagcgggaatacatataaa

SEQ ID NO: 355504 - DNA, 487 bp, Homo sapiens
agtttggaggatttcgttggaagcgggaattcatacaaattgcagactgcagcgttctgagaaacatctttgtgatgtttgtattcaggacacagagttgaacattccctatcatagagcaggtttgaatcactccttttgtagtatctggaagtggacatttggagcgctttcaggcctatgttggaaaaggaaatatcttcccataacaactagacagaagcattctcagaaacttatttgagatgtgtgtactcaactaagagaattgaaccaccgttttgaaggagcagttttgaaacactctytttctggaatctgcaagtggatatttggctagctttggggatttcgctggaagcgggaatacatataaaaagcacacagcagcgttctgagaaactgctttctgatgtttgcattcaagtcaaaagttgaacactccctttcatagagcagtcctgaaacactccttttgtagtatctg

SEQ ID NO: 355505 - DNA, 389 bp, Homo sapiens
gaacattccctatcatagagcaggtttgaatcactccttttgtagtatctggaagtggacatttggagcgctttcaggcctatgttggaaaaggaaatatcttcccataacaactagacagaagcattctcagaaacttatttgagatgtgtgtactcaactaagagaattgaaccaccgttttgaaggagtagttttgaaacwctctttttctggaatctgcaagtggatatttggctagctttggggatttcgctggaagcgggaatacatataaaaagcacacagcagcgttctgagaaactgctttctgatgtttgcattcaagtcaaaagttgaacactccctttcatagagcagtcctgaaacactccttttgtagtatctgg

SEQ ID NO: 355506 - DNA, 549 bp, Homo sapiens
tttgggtattgtgaaaaatgctgcaatgaacattggagtgcagatatctttacatttctttggataaatatccagaagagggattgctggataatatgtagttctatttttaatttctttagaaatctccatattatttttcagaatgactgtaccaatctatattcccacaaacagtgcacaagagtttccttttcttcacattcttgccaatatttattatgttttgtctttcccagaacattttcggatatctggagttttttataattccatacaaactttaggattttgttttatttctatgaagaatgccatttggattttgatagagattgcattgaawctgtatgttgctttaacaatattattttttctgatccatgaacacaggatatcatgccatttgtttgtcttcttcaattcctttaatcaatgttttatagttttcattgtacagatgttttacctccttggttaaatttatttctagatattttatttttttattctgttgtaaatgggacttcttaaaaatttctttctccc

SEQ ID NO: 355507 - DNA, 572 bp, Homo sapiens
ttgtcctgggctttcctttgttggaattattttaattacttcttcaatatctatttgttattggtctgttcacactttctatttcttcctgactcagtcttggtagattgcatttttttttttaaggaatttatccatttttctctaggttatccaattgttggcatttaattgtacttaatagtttcttatgacccattttatttctgaggcatctgttgtaaatttctccactttcaccttttattttatttgaatcttcgctcttttctcttagactagctaagagcttatcaatttcatcttttcataaaaccacctcttagttttrttgatactttctatcattttttggctctctattttatttatttctgttctgatttttattattttcttccttctgctaattttggtttagcttgttcttctttttctagttccttgaggtgtgttgttgactatttagctgagatctatcttctttttaaatgtgggcacttatcactataaattctccagttggagctttttttggtgcattctgtaggttttggcactttgtgtttcca

SEQ ID NO: 355508 - DNA, 572 bp, Homo sapiens
ttgtcctgggctttcctttgttggaattattttaattacttcttcaatatctatttgttattggtctgttcacactttctatttcttcctgactcagtcttggtagattgcatttttttttttaaggaatttatccatttttctctaggttatccaattgttggcatttaattgtacttaatagtttcttatgacccattttatttctgaggcatctgttgtaaatttctccactttcaccttttattttatttgaatcttcgctcttttctcttagactagctaagagcttatcaatttcatcttttcataaaaccacctcttagttttgttgatactttctatcattttttggctctctattttatttatttctgttctgatttttattattttcttccttctgctaattttggtttagcttgttcttctttttctagttccttgaggtgtgttgttgactatktagctgagatctatcttctttttaaatgtgggcacttatcactataaattctccagttggagctttttttggtgcattctgtaggttttggcactttgtgtttcca

SEQ ID NO: 355509 - DNA, 573 bp, Homo sapiens
gttcattattgattatttcaattgtattatttcattaattaaaatcttaagttccaagatttctgtttagttctttctttgtgtgatatctatctctttgttgaatttctcattctgatcacgaagttcccttcattttattcaattgcctgtttgaattcttttgtatctttctgagtctgcttaatatcatattttgaatttcttttcaggcaatttataaatgtccacttctttggkggcagttactgaagaatttttgcattttttctgtggcatcatgttttcttgctttttcctgtttcttgtgttcttgcatagacatctgtgcatctggtggcacagtcacctcttccagattttacagagtggttttgtaagggaacacttttacctgcagatgggcctgaggatgatgattgggcatggtggggtggctctaattacatgcagaaacagcggtgtggtctctgtgcagcttcttttgttgtgatcagtattagtgatgactatgggtacctcagttaaaagcattaggaatcctcctgttcttgtcttcctgacagtggggca

SEQ ID NO: 355510 - DNA, 542 bp, Homo sapiens
cagggcatagtagaaaaaaggacagcagacagcttctacagacttaaatgtccctgtctgacagctctgaagagagcagtggttctctcagcatggcatttgagctccaaaaacagacagactgcctcctcaagcaggtccctgaaccccgtgtagcctgactgggaatcacctctccagtaggagtcaacagacacctcaaacaggcaggtgtccctctgggacaaaacttccagaygaaggatcaggcagcaatatttgctgttctgcagcctctgctggtgatacccaggcaaacagggtctggagtggacctccagcaaacttcaacagacctgcagctgaggggtctgactgttaaaaggaaaactaacaaacagaaaggaatagaatcgatatcaatcaaaagcacatccacaccaaaaccccatctgtaggtcaccaacatcaaagaccaaaggtagataaaaccacaaagatgaggagaaaccagagcagaaaagctgaaaattccaaaaaacagagcacttcttctcctccaa

SEQ ID NO: 355511 - DNA, 542 bp, Homo sapiens
cagggcatagtagaaaaaaggacagcagacagcttctacagacttaaatgtccctgtctgacagctctgaagagagcagtggttctctcagcatggcatttgagctccaaaaacagacagactgcctcctcaagcaggtccctgaaccccgtgtagcctgactgggaatcacctctccagtaggagtcaacagacacctcaaacaggcaggtgtccctctgggacaaaacttccagatgaaggatcaggcagcaatatttgctgttctgcagcctctgctggtgatacccaggcaaacagggtctggagtggacctccagcaaacttcaacagacctgcagctgaggggtctgactgttaraaggaaaactaacaaacagaaaggaatagaatcgatatcaatcaaaagcacatccacaccaaaaccccatctgtaggtcaccaacatcaaagaccaaaggtagataaaaccacaaagatgaggagaaaccagagcagaaaagctgaaaattccaaaaaacagagcacttcttctcctccaa

SEQ ID NO: 355512 - DNA, 507 bp, Homo sapiens
ctttgctcatataaacccacatctcacaggccatatttttgctttatccyctactcacctctgactgaatcatcgacaatatagccaggtatttgtggttcgttatcatactcttctgagtagtcatagtcggctcccgaggacggttcactactagaaggcatttcactcacaggggaaatctcactccctgaagacatctcacttcttgaggtaacctcaaatccatcagcactgtggtccccagaaaatggttcacgcttcccagagtaggtgtcattgaggtccaatccagcagcataatggcctgcaggggagggaataagggaagaaaagaaaaggtaaagtagggtgcctttcgagtcagctgtgttaggtagaaaagtttatcttttgacatcaaagcagttattgcacatgtgctattgtttgtgattgagtcatttctatgaaagaaactttacatttttgccagcaagcaaattcagctgtcccaattacagaagt

SEQ ID NO: 355513 - DNA, 664 bp, Homo sapiens
tttcactcacaggggaaatctcactccctgaagacatctcacttcttgaggtaacctcaaatccatcagcactgtggtccccagaaaatggttcacgcttcccagagtaggtgtcattgaggtccaatccagcagcataatggcctgcaggggagggaataagggaagaaaagaaaaggtaaagtagggtgcctttcgagtcagctgtgttaggtagaaaagtttatcttttgacatcaaagcagttattgcacatgtgytattgtttgtgattgagtcatttctatgaaagaaactttacatttttgccagcaagcaaattcagctgtcccaattacagaagtgcttttctgaagtttttcttttccacagataatccacattaatttccacatcaaaaaaatcccgccaaattggcaaattaatctaatacaattacttgatgggtaatgtctaaaaattcccatcacttcacattccaaatgcatttctttttttgctagaatgccatcctggcctatttcggtaggttttagatacaaatatcagattttcttcagatgtgttcatatttttaaaagatatttttaaaagatgtgttcatatttttaaaagatatttttaaaagataatcttttaaaataatataaacagtggttaatta

SEQ ID NO: 355514 - DNA, 558 bp, Homo sapiens
ctgttccacttgattccccgcttggctgcatcctccaccattggacactatcctgcaattaggcctattttgtacaagtcagggcaaatggtcagaaatcccatatgtacaggtcttcatggccctataccaaaacctaatagatattatagatgacccccttttacaagagccacctgtctcagggtgaacagcaaccacccccatatagccccttgccaagtgttcctgaggctaaaacccagcactggggaccttaccaagtccccctcacactcagaggtgaacaccatatttgactctccctctatcccttctactccttaaggaagtagcaagagctgaggggcaattcctagtgcaggctccttctccataactaatacacaacaatgtaaggaaaggccaggaaactacmctgagaatcctaggaaatttgcagatggtttcattctagcaaattgttgcaccccctttgaagaggaatgaatctttgaggccacccattgggaagtgggcaatttattcacccgaaaccctcagggaaatcacctgggc

SEQ ID NO: 355515 - DNA, 558 bp, Homo sapiens
ctgttccacttgattccccgcttggctgcatcctccaccattggacactatcctgcaattaggcctattttgtacaagtcagggcaaatggtcagaaatcccatatgtacaggtcttcatggccctataccaaaacctaatagatattatagatgacccccttttacaagagccacctgtctcagggtgaacagcaaccacccccatatagccccttgccaagtgttcctgaggctaaaacccagcactggggaccttaccaagtccccctcacactcagaggtgaacaccatatttgactctccctctatcccttctactccttaaggaagtagcaagagctgaggggcaattcctagtgcaggctccttctccataactaatacacaacaatgtaaggaaaggccaggaaactaccctgagaatcctaggaaatttgcagatggtttcattctagcaaattgttgcaycccctttgaagaggaatgaatctttgaggccacccattgggaagtgggcaatttattcacccgaaaccctcagggaaatcacctgggc

SEQ ID NO: 355516 - DNA, 562 bp, Homo sapiens
gtaataccactagagaaaaaattaatataagcccatataaaatgttatacagaaaccattcttaagtaatgatctaattactgaaattaattaattaacctgtccagaaacagccagtttagtcaartacctagttaacctaggacaatttcagcaggctttacaaaagtttgcaactcaaaggcttcccataccagcaactaaccaacaatccaaaatcaggccaggagataaagtacttgctaaaacatggaaggagggatcatctgttcaataactgcaacccaaatggaagggactgttttcagtggtactggccacacctcctgtggtcaaggtactaggattagatagttggatacatctatcaagaattaagtctgtgatacctgaagccctggtatcacttgggttccctggacctggaacctcaagttcccatcagccactacacctgtgatcctgtggacgacctgaagtacctgtttagaagacagacaaaatataatatctacaaactttccttggtgtttttgttatatagttactgtaggatggataa

SEQ ID NO: 355517 - DNA, 581 bp, Homo sapiens
tgacagctgagttgaaatttgaatgatgagaaggtgtctttgtacaaaagggccaaaggagagatcaaacttggtatgcttaagaaacagaaagaccagtttggctagctcttggtgaaggatggagaaagctgtatgagttaaggttggggagctgggcaaggaaacatcatgcaaagttaaaagacccagtttctctgccgaagtaactcataatctagttcagaaggcagacatataaataaatgtttacactacactacagcatgataaatgctatgatagcaccccacacagttgatcagtgagtgtagaggatcagccatacctcctggaacttgacaagggtctgtgatcttcccccacccttgaccatcactatacccctcagtgcccttctatagtatggctccaaagcaactaccaatgcccattaaatctgagtgtccctctgaactggcaagcaaagaattgggctcattgcctrtaaatcactttgagctcttgggaagaaaggcacttggtaaacaaggactgggattatctcactgctttataagatcaaagcactttacaaacat

SEQ ID NO: 355518 - DNA, 661 bp, Homo sapiens
tgtataatcaaagcaagtgtgaaagaggaactcaagccgaagtaagagttggtctctgaaaaatcttagcatttctcaaacgatgtactagaaaacaactgacagaaattctgattcctgattatgctttaaagtttcttaaagctctgctggaattgagcttrtctgtaacattttgttttattttattattttattttattttattttctcacaggatatcacattggagtcactgccaagtcatagccataaatgatgagtcggtcctctttccagtggatcataagacaatggaccctttttgttatgatggttttaaactttcaattgtcactttttatgctatttctgtatataaaggtgcacgaaggtaaaaagtattttttcaagttgtaaataatttatttaatatttaatggaagtgtatttattttacagctcattaaacttttttaaccaaacagattgagagtttgaatattagttttgatattgcaagactccagtgtacttttctcctaacagttggttgatcatttaaaaaggcttttctctctctttttactgtctttatgttgatttttaaaactcattttttattagatgacattcttcatgggagaattataatctagagtcacatagttctcccacaaac

SEQ ID NO: 355519 - DNA, 588 bp, Homo sapiens
agtctaaaaacatgtttatgcattccttcatttatttgttcatccaaacacatttagggcttatctaatatgaaacagaatatggagtattagaagaaagaagaaaatatgttgtgcaaaatgaatagaagacactatttgcccaggaagaatatataatcttattagttacacatcaagcatatatgtgtatatacagtatatttagagtatgcatatatatayacatgctatagtacatgtgtgtatgcttgtctatatacactgtatgaagcaagaggagaaaatactcatgaattctaggaactgtagaatgaaggagggatttatgtgggacacattggccttttattgttgtttaagagtagttttacctttccattaagagctacttcaattttcacatttcttgtgcaggatagaggtatcatgataataaacattatagtcttataaagataaatgcccacaggtgcactggtatattgtgggtattgttacaaatattctttgaaatgacttcttaatcatctttattccttttgtgctttatgaacacgctgttcttcacctgctttccttggtctt

SEQ ID NO: 355520 - DNA, 588 bp, Homo sapiens
agtctaaaaacatgtttatgcattccttcatttatttgttcatccaaacacatttagggcttatctaatatgaaacagaatatggagtattagaagaaagaagaaaatatgttgtgcaaaatgaatagaagacactatttgcccaggaagaatatataatcttattagttacacatcaagcatatatgtgtatatacagtatatttagagtatgcatatatatacacatgctatagtacatgtgtgtatgcttgtctatatacactgtatgaagcaagaggagaaaatactcatgaattctaggaactgtagaatgaaggagggatttatgtgggacacattggccttttattgttgtttaagagtagttttacctttccattaagagctacttcaattttcacatttcttgtgmaggatagaggtatcatgataataaacattatagtcttataaagataaatgcccacaggtgcactggtatattgtgggtattgttacaaatattctttgaaatgacttcttaatcatctttattccttttgtgctttatgaacacgctgttcttcacctgctttccttggtctt

SEQ ID NO: 355521 - DNA, 588 bp, Homo sapiens
agtctaaaaacatgtttatgcattccttcatttatttgttcatccaaacacatttagggcttatctaatatgaaacagaatatggagtattagaagaaagaagaaaatatgttgtgcaaaatgaatagaagacactatttgcccaggaagaatatataatcttattagttacacatcaagcatatatgtgtatatacagtatatttagagtatgcatatatatacacatgctatagtacatgtgtgtatgcttgtctatatacactgtatgaagcaagaggagaaaatactcatgaattctaggaactgtagaatgaaggagggatttatgtgggacacattggccttttattgttgtttaagagtagttttacctttccattaagagctacttcaattttcacatttcttgtgcaggatagaggtatcatgataataaacattatagtcttataaagataawtgcccacaggtgcactggtatattgtgggtattgttacaaatattctttgaaatgacttcttaatcatctttattccttttgtgctttatgaacacgctgttcttcacctgctttccttggtctt

SEQ ID NO: 355522 - DNA, 622 bp, Homo sapiens
  misc_feature (1)...(622): n = A,T,C or G
ctttattcttattgcattgcattaaaccaactttttactgattctttttcatggctttcttgncgaagaccgaatgtaaaaatattgagccatgtaaagacagctcttctaaattttagtataatcttaccctcagccttctgcaaatataataaaccaaagtctgctcttaacttccaattgctagatccctcatatacacacatatgtattcttaagacattgtgttctcaataccgtataagtttgtctatatataaatactataagtttgcatatgtatatatatacacacacatatgtattcttcatgtatatatacatatatatatatatatatatatatgtgaaggaaagtccataaatagcattctcaacttatgtgtgtgccttttactggaaattaaagttccgatgacagcatgtatcatacacaccctcatggccacatttgttaatatctattctgtattaattaattcaactttaatacattttgattkgattccccaaacagccaatcatttgcatctgatttgttttctctccaaaatttaaacacatgatttttgaaggatggagtgaagggcaaatgtattttaaaagtcttgatttggatagc

SEQ ID NO: 355523 - DNA, 500 bp, Homo sapiens
gtttgttgtctagtctcacctcaaataaagtgacaatattacatctcataatttactaagacaattcttaaagaataaatgatacatcaactgtataaaaaaggccaaaaaaaatcttattccactcaatttagcatatattgaatacctactctacaccagatgccctgatagagagtaaagttacacgaaagcagtgtagagtttaatgttccatttcataaaaacactcctgaatttccatgcatttaattttcatcctttattttcatgcattagaaactgaattcttaaactagttttaataaaccttacttgaaccttcatgcaccaatacatacacatttcaagtcattatgtggcagagcttcctatcaaccaagaattcagttggagactattgtgttctttgttagtacgacagtttttatttgtgccattacttaaatattttactgtagttgttttcaaacmtgacattgggaagtgcatctgaatta

SEQ ID NO: 355524 - DNA, 403 bp, Homo sapiens
aatggaaatagaaaagtagaaacacaaataacttcatataattaagtcatagatacacattaatagactgccaaagtgacaagtttttaatcctcgtcagacacatattgtgattactttcatttgggaaaggaaagaacagaagtaacaagtaccatcaaaattatttgaaaaaagtgacaaaattatggattttgagatgtttcactttctggacagtaactcttcccacgaggcatgtragctctatttgacattggcattttcaatctcctttaaagctaaagtagggaatacttgtacgaggttaacagaaaaatgaatcaaaattatccctattaaaaacctatcttcttttcagtggaagaaaatcattttttttttttcttggggatgatgcccc

SEQ ID NO: 355525 - DNA, 403 bp, Homo sapiens
aatggaaatagaaaagtagaaacacaaataacttcatataattaagtcatagatacacattaatagactgccaaagtgacaagtttttaatcctcgtcagacacatattgtgattactttcatttgggaaaggaaagaacagaagtaacaagtaccatcaaaattatttgaaaaaagtgacaaaattatggattttgagatgtttcactttctggacagtaactcttcccacgaggcatgtaagctctatttgacattggcattttcaatctcctttaaagctaaagtagggaatacttgtacgaggttaacagamaaatgaatcaaaattatccctattaaaaacctatcttcttttcagtggaagaaaatcattttttttttttcttggggatgatgcccc

SEQ ID NO: 355526 - DNA, 526 bp, Homo sapiens
ggaccgggagctgtacaactccagcaggtttggctgtggtccagtcatcatttaatttgagaatttgtagtgatggcttaatgagctctgttgatgaaatggtaatgggtttgctgcaataaaattggggtcaatatgacaatcttttgaacataaacatgccagcaaagaagagaaaaggaagaattaaaattgctttatttattttctaaacaaaactaaacaagagccatatttcaaatcccttttcgctkaaattaagaacatgtgaacaaaacctgctctaaaagcttactccaaacccatgtacattcatataagttaatttccttagaataagaatacaaaatacatatataatcctaatattaataagtcccaaattaagttacattagcattaatacttatcagggtagctacataatttatggggcccagtgcacagtgaaaatcggggggctactggttcaaagcacaggaaagaattttcattaaaggaaataaaataaaagatatgtttttgc

SEQ ID NO: 355527 - DNA, 526 bp, Homo sapiens
ggaccgggagctgtacaactccagcaggtttggctgtggtccagtcatcatttaatttgagaatttgtagtgatggcttaatgagctctgttgatgaaatggtaatgggtttgctgcaataaaattggggtcaatatgacaatcttttgaacataaacatgccagcaaagaagagaaaaggaagaattaaaattgctttatttattttctaaacaaaactaaacaagagccatatttcaaatcccttttcgcttaaattaagaacatgtgaacaaarcctgctctaaaagcttactccaaacccatgtacattcatataagttaatttccttagaataagaatacaaaatacatatataatcctaatattaataagtcccaaattaagttacattagcattaatacttatcagggtagctacataatttatggggcccagtgcacagtgaaaatcggggggctactggttcaaagcacaggaaagaattttcattaaaggaaataaaataaaagatatgtttttgc

SEQ ID NO: 355528 - DNA, 559 bp, Homo sapiens
aggggcttcaaccttcaagccagggagcaataccagttgggtccatggcctgccatgaattgggctacacagcaggaggtgaatggctggcaagtgaaagaaacttcacctgtatttacaggcactccccattgcttgcattaccacctgagctctgccacctgtcagatcgacagaggcrttagattcccataggagtgcaaacccttttgggaactgcacatatgagggatctaggttgtgttctccttatgagaatctaatgcctgatgatctgtcactgtctcccatcaccccgagatggacccatctagctgcaggaaaacaaactcagggttctcactcattctacattataattcattatataatatataatgaatataatatataatgaattatttcattacatattataatgcaataataatagaaataaagtatacaataaatgtaatgcacttgaatcatcctgaaaccatccccccaccccctggtctgtggaaaaaattgtcttccatgagactggtccctggtgccaaaaaggttgaggactact

SEQ ID NO: 355529 - DNA, 609 bp, Homo sapiens
ggaaacaacaacttcattatacccaaaagctcccgcatgatttggcctctgtctgcttgtctaaactagggtgtcatcacacgccttggttataccatcaaaagtattgtttgaaagtaaatcaggtggtcactcaactccaacctcacttctttgctccttctattctttcaccatacttaggctacacttgccatctctacgtttcaggaggaggctaaattattttatatttttggatccctgcctaagacatcccatctgcctgaagyacacttcttcccctgttcatctggttaacatttaggcacctttcaagcctgctgaaacttaacttctgcacaccccagtatagacctgtgagcctctttaattacactctccattgcacatgtaagaatttgtagtcctgtattttcttatgtttttatttctttaatatttgtcttcacaagtctctgaggcagagacaggactgacacgcaactgattctcactattatggcctttaaaggttgttgtatatctgttttgttgacaacagacacctagtacacaacacagtacctaaaacatagtagacactcagcacgtttgtttaacaaatga

SEQ ID NO: 355530 - DNA, 609 bp, Homo sapiens
ggaaacaacaacttcattatacccaaaagctcccgcatgatttggcctctgtctgcttgtctaaactagggtgtcatcacacgccttggttataccatcaaaagtattgtttgaaagtaaatcaggtggtcactcaactccaacctcacttctttgctccttctattctttcaccatacttaggctacacttgccatctctacgtttcaggaggaggctaaattattttatatttttggatccctgcctaagacatcccatctgcctgaagcacacttcttcccctkttcatctggttaacatttaggcacctttcaagcctgctgaaacttaacttctgcacaccccagtatagacctgtgagcctctttaattacactctccattgcacatgtaagaatttgtagtcctgtattttcttatgtttttatttctttaatatttgtcttcacaagtctctgaggcagagacaggactgacacgcaactgattctcactattatggcctttaaaggttgttgtatatctgttttgttgacaacagacacctagtacacaacacagtacctaaaacatagtagacactcagcacgtttgtttaacaaatga

SEQ ID NO: 355531 - DNA, 609 bp, Homo sapiens
ggaaacaacaacttcattatacccaaaagctcccgcatgatttggcctctgtctgcttgtctaaactagggtgtcatcacacgccttggttataccatcaaaagtattgtttgaaagtaaatcaggtggtcactcaactccaacctcacttctttgctccttctattctttcaccatacttaggctacacttgccatctctacgtttcaggaggaggctaaattattttatatttttggatccctgcctaagacatcccatctgcctgaagcacacttcttcccctgttcatctggttaacatttaggcacctttcaagcctgctgaaacttaacttctgcacaccccagtatagacctgtgagcctctttaattacactctccattgcacatgtaagaatttgtagtcctgtattttcwtatgtttttatttctttaatatttgtcttcacaagtctctgaggcagagacaggactgacacgcaactgattctcactattatggcctttaaaggttgttgtatatctgttttgttgacaacagacacctagtacacaacacagtacctaaaacatagtagacactcagcacgtttgtttaacaaatga

SEQ ID NO: 355532 - DNA, 591 bp, Homo sapiens
ttcttgaagatcatagagcaaaatagataaggctgctagtcataaagtttctgatttcctgtcttagcatattgtcctaatctaagaaagaatagtcataattgggggtctaagctaaaataaaaataaaggtacacagtattaraattctacaatgattttaaaataagtacaattgtctaacaataaatttgccattaaagttaaaatcacagtaatatataataaactcattcgcattggtgactcacacatcatttatgcatgtttttaaagtcccagtggactttcacgcacaaagaaattttgcctttcacttacttcaacagagtcaattgatttcctgttaatcaagattttaaaatgtcaactgaggtttactttgaaataagtgaggacaatttaggaggactcaggtcaatatccagaatgccagtggtgatcaaatgaactttgattcatagtgaataatgttacgaattccatagctgatcaggcattttcattgacttgggagccttatttatcagcatgaatgccataaggaggtcagagagagcaaatgcagtgatacatgcagagacatgttta

SEQ ID NO: 355533 - DNA, 591 bp, Homo sapiens
ttcttgaagatcatagagcaaaatagataaggctgctagtcataaagtttctgatttcctgtcttagcatattgtcctaatctaagaaagaatagtcataattgggggtctaagctaaaataaaaataaaggtacacagtattaaaattctacaatgattttaaaataagtacaattgtctaacaataaatttgccattaaagttaaaatcacagtaatatataataaactcattcgcattggtgactcacacatcatttatgcatgtttttaaagtcccagtggactttcacgcacaaagaaattttgcctttcacttacttcaacagagtcaattgatttcctgttaatcaagattttaaaatgtcaactgaggtttactttgaaataagtgaggacaatttaggaggactcaggtcaatatccagaatgccagtggtgatcaaatgaactttgattcatagtgaataatgttacgaattccatrgctgatcaggcattttcattgacttgggagccttatttatcagcatgaatgccataaggaggtcagagagagcaaatgcagtgatacatgcagagacatgttta

SEQ ID NO: 355534 - DNA, 641 bp, Homo sapiens
ttcatgcctaagacaatgactatctgtgtttctggtattactttctgtacattgattttatatatacaattttatattttctttttgcatttaatacaagactttcatataaatttaatagctatataatatatttcattatatatggaccatggtttagttcctcattcctctgtttctggacatttattttccaatttttgcatctttaatttttttgtgaaaaattgaaggctatgacaatgactataacacttaaaaacagaaacaattctatatttgtaactctgccttcacaaactgtgagtgcaacacaggtgttgcctgttttaaaaggtgttaaaaatrattacatcaataaccaaggaagaataatccaaaagctgctttatttatgaacgagttaagttctgaaagaatgttccaaaattctttcttcttatgttgaagtcagtttataggtattttattacattgaaaggagttaatccttcaaaccattaaaaatttgctatatttgtctctttcttggtcatatatatcctacaaagcattttttttttaaacaaaccactatcatctccactgacagttggctgggccataacatcctccttcgttatctttgtcaggattataga

SEQ ID NO: 355535 - DNA, 641 bp, Homo sapiens
ttcatgcctaagacaatgactatctgtgtttctggtattactttctgtacattgattttatatatacaattttatattttctttttgcatttaatacaagactttcatataaatttaatagctatataatatatttcattatatatggaccatggtttagttcctcattcctctgtttctggacatttattttccaatttttgcatctttaatttttttgtgaaaaattgaaggctatgacaatgactataacacttaaaaacagaaacaattctatatttgtaactctgccttcacaaactgtgagtgcaacacaggtgttgcctgttttaaaaggtgttaaaaatgattacatcaataaccaaggaagaataatccaaaagctgctttatttatgaacgagttaagttctgaaagaatgttccaaaattctttcttcttatgttgaagtcagtttataggtattttattacaytgaaaggagttaatccttcaaaccattaaaaatttgctatatttgtctctttcttggtcatatatatcctacaaagcattttttttttaaacaaaccactatcatctccactgacagttggctgggccataacatcctccttcgttatctttgtcaggattataga

SEQ ID NO: 355536 - DNA, 509 bp, Homo sapiens
caagggtctttttgtgcttctgaatatatggtgatatagttcggatatttgtcaccaccaaaatctcacagggaaatataatccctagtgttggaggtggggtctggtgggaggagattggatcatgaggatggatttctcatgaattgtttagagtcacccttttggtgctgtcctcgaaataatgagtttgtatgagatctggtcatttaaaagggtgtggcacctcccctgcactctctcttgctcctgctcttgccatatgagatacctgctcccgcttcaccttctgccatgattggaagcttcctgctycccagaagcagatgatggtgctatacttcgtatacagtctgcagaactctgaggcaattaagccccttttcttatacattgcccagtctcaggtatttctttatagcaatacaagaagagcctaatgcacattgtcaggcatggttaaaaaaaaaaaaagtacaattcaccctttttttctaactgtgctattt

SEQ ID NO: 355537 - DNA, 606 bp, Homo sapiens
aaagttctagatgttagggaagcacctagtagggcacctaaatcaaaataagttttcatctttctataaaaayggaaacctggtatagaaaatagtgtgtttgtcctggagtcaagctaactggatcagttgaaagtctggttcgttcttttatttactgtatgcttagaaaagtttcttaatccttctgagcatcaatttttaactttccaaattccaccttataaattagttgtttaagtaaaataacatgatatttataatcagaaggggaagtaccaacttcggttcaaaaataggtatgtacagtcttaataaatgtgacaatcttggcattcatatttgcttaaagagaaatctagaaatttgggacctagatatcctgaaataccaagaatagctgttcctctgactcttgaatgaaaactacggcagagtcaatgacttttcttttcttactgttctcacatagtagaaattctcatatacgtttctaataagaaaaataatcttagttcagcaagtaacatattcagccgtatttatcgtcaaactacacctaaaattaaaatatttcccctcccttaatataggtttattgctgcc

SEQ ID NO: 355538 - DNA, 606 bp, Homo sapiens
aaagttctagatgttagggaagcacctagtagggcacctaaatcaaaataagttttcatctttctataaaaacggaaacctggtatagaaaatagtrtgtttgtcctggagtcaagctaactggatcagttgaaagtctggttcgttcttttatttactgtatgcttagaaaagtttcttaatccttctgagcatcaatttttaactttccaaattccaccttataaattagttgtttaagtaaaataacatgatatttataatcagaaggggaagtaccaacttcggttcaaaaataggtatgtacagtcttaataaatgtgacaatcttggcattcatatttgcttaaagagaaatctagaaatttgggacctagatatcctgaaataccaagaatagctgttcctctgactcttgaatgaaaactacggcagagtcaatgacttttcttttcttactgttctcacatagtagaaattctcatatacgtttctaataagaaaaataatcttagttcagcaagtaacatattcagccgtatttatcgtcaaactacacctaaaattaaaatatttcccctcccttaatataggtttattgctgcc

SEQ ID NO: 355539 - DNA, 606 bp, Homo sapiens
aaagttctagatgttagggaagcacctagtagggcacctaaatcaaaataagttttcatctttctataaaaacggaaacctggtatagaaaatagtgtgtttgtcctggagtcaagctaactggatcagttgaaagtctggttcgttcttttatttactgtatgcttagaaaagtttcttaatccttctgagcatcaatttttaactttccaaattccaccttataaattagttgtttaagtaaaataacatgatatttataatcagaaggggaagtaccaacttcggttcaaaaataggtatgtacagtcttaataaatgtgacaatcttggcattcatatttgcttaaagagaaatctagaaatttgggacctagatatcctgaaataccaagaatagctgttcctctgactcttgaatgaaaactacggcagagtcaatgacttttcttttcttactgttctcacatagtagaaattctcatatasgtttctaataagaaaaataatcttagttcagcaagtaacatattcagccgtatttatcgtcaaactacacctaaaattaaaatatttcccctcccttaatataggtttattgctgcc

SEQ ID NO: 355540 - DNA, 573 bp, Homo sapiens
atgaatgacttcttagaatgtgaaatgttaccatattgtgaagtatcttacaataatttaaaatataacaaaggtttgatgcagttgaattgacaataaagtataatgaaatgaacactctatttgccatcgaaagcctagagtagcctttgacaatgtgtgggggttttcccaacctcaattttctcatttgcaaattgagactaatagtaacactgtcctatttaccccatcaaattctgatgagaatcaaatatctgaaaatgctttgctaacaatcgtgctataaaaacattagatacctaagatactgagatgcagtaagaaatagaaatttgttctttgctcctggttctgggtacatagytcctaaaacccttggaagctctgcagtgacaagagtgtcctttatgtactaataagattactagtagctggggttccctagatagcatctaggagggggctggttatcacaaaagaccaaggcaggattagaaggttaggactgtcagtcccactcctcaacttctaggaggtgaaaggggctaaaagttgagttgattaccaatg

SEQ ID NO: 355541 - DNA, 617 bp, Homo sapiens
ggtaattcaggcacatctaaaagtttttttttttccttgatagttcattataactaaaccactatggtctgtagtggcctgctgggaatctctattcttagcccagtggtgctcaaacttctcatttaaaattttccttataaactgcatctcattcctttaaaaatcctcatttgtttaaaaatattccatattttagacaatgtgtgggctgttggcccttgaatgctggtgctatcagcatgggctgattctagccagagaccctttctaggctgtggaaatcaatccaatatgctgggcactgaagctaccatcccaaactttctcttgtctcctgaaggcatttgaccttcaagacaaataggcctggtgcaaaagagtggtgcaataaccaaaggtccttctgccaagaaccccagcttggcccttaagcccacaggggtttcactgggaaagtctggtttgttcgattaaaggtccaaccctgcagcagttctgggccccctggcacaggcttcctgtctctggtcatgtccaccacaaactcttgtttttsaaattctgtttgttaccatatcttaaatttttttctaatcaaacttttcttcaaaata

SEQ ID NO: 355542 - DNA, 544 bp, Homo sapiens
tcttgattcacccactcttcctagatgatttcatgtacattagtgggttcacctagcatttctatgctacttccctctggatctctgtatctgcaccccagatttccctcctaaggtccagaaacctctacccagttctctactgtacatcttcacttgatgttccataggtaaatcgactcgaggtgttcaaaagtaaactcatcatcttccctatgaacatatagaaagtatctttaataarttaaataaaaggagacagaaaatgcatgagggttatattgtaagaagtggtaaataggtgtgtaatggtgaattatgaagacactgtattggccttcatggaatttacagtttaatgagaaatatggataaatgtatagacaatcacaataaggtatgaaaatgttatgagagaaagcagacaagctgctattaaatacatgagggcctctaacctagaaatgagaggaggtgattaggacacaggaagtgatatataaaataaacttgttaaagaaaaagtttatcatgattggattat

SEQ ID NO: 355543 - DNA, 465 bp, Homo sapiens
tgacaactgtggtggagtcacttctacctgagaatgttaattcactacatctactctttattaaggtgaagagaaagttctagtaatatcaaatgtgattgcctgtaatatgagaaatgaaaaaagaaacttttgcaaattgaaatctgaaggaaaataaaattttggattctgtaagattgtctcctctaaataacattgtactatayataattcatttaatttttagtccgactgtctgtgtgtgtgtgagacagagagagaaagagaaacagaattgaatgtgtgtaaagagaacatgaattttctggtactacttatttagcaaagggttgaaaagccactgtattcagaataagtatgatgaaatgaggttggaaatttaaaataatgaaaaagttttaaaacaaccatcataattaattcaataaaatatcaaaaacagatgaatggaagaaatgctca

SEQ ID NO: 355544 - DNA, 465 bp, Homo sapiens
tgacaactgtggtggagtcacttctacctgagaatgttaattcactacatctactctttattaaggtgaagagaaagttctagtaatatcaaatgtgattgcctgtaatatgagaaatgaaaaaagaaacttttgcaaattgaaatctgaaggaaaataaaattttggattctgtaagattgtctcctctaaataacattgtactatacataattcatttaatttttagtccgactgtctgtgtgtgtgtgagasagagagagaaagagaaacagaattgaatgtgtgtaaagagaacatgaattttctggtactacttatttagcaaagggttgaaaagccactgtattcagaataagtatgatgaaatgaggttggaaatttaaaataatgaaaaagttttaaaacaaccatcataattaattcaataaaatatcaaaaacagatgaatggaagaaatgctca

SEQ ID NO: 355545 - DNA, 545 bp, Homo sapiens
ccagccaccttcagcctcatcttgtcactgcgcttcagccacactggctttcttagaattctccaaaggtacyaaggtttctccatccttagttacctcacaacggcttatctttcccctcctccatcccctgtccagcttctactcattcttcaaacctcagtttagatgttgcttcctcaggtaagtcttctctgatcatgccctcccagacaggccctgtcaggtgtctctgttacatgccctttgcacattccattatttctctgaagtaggatcacaatcataattaagtatgtatttgcttaacatatgtcactccacagactaaatgattcatgaggacatgaacaatgcacacaacaggggctcaatatatcttatttttgttgagtgggatgagtaaatgacacattgaatattttgaaaccatttagttaaagcatagatctgtatctctcaaggcttaactttcatttggttcaggtcattcagtctatgtttcatcatcctaagtgtatcttagaactataaaatccaccgca

SEQ ID NO: 355546 - DNA, 511 bp, Homo sapiens
cccagccaccttcagcctcatcttgtcactgcgcttcagccacactggctttcttagaattctccaaaggtaccaaggtttctccatccttagttacctcacaamggcttatctttcccctcctccatcccctgtccagcttctactcattcttcaaacctcagtttagatgttgcttcctcaggtaagtcttctctgatcatgccctcccagacaggccctgtcaggtgtctctgttacatgccctttgcacattccattatttctctgaagtaggatcacaatcataattaagtatgtatttgcttaacatatgtcactccacagactaaatgattcatgaggacatgaacaatgcacacaacaggggctcaatatatcttatttttgttgagtgggatgagtaaatgacacattgaatattttgaaaccatttagttaaagcatagatctgtatctctcaaggcttaactttcatttggttcaggtcattcagtctatgtttcatcat

SEQ ID NO: 355547 - DNA, 545 bp, Homo sapiens
ccagccaccttcagcctcatcttgtcactgcgcttcagccacactggctttcttagaattctccaaaggtaccaaggtttctccatccttagttacctcacaacggcttatctttcccctcctccatcccctgtccagcttctactcattcttcaaacctcagtttagatgttgcttcctcaggtaagtcttctctgatcatgccctcccagacaggccctgtcaggtgtctctgttacatgccctttgcacattccattatttctctgaagtaggatcacaatcataattaagtatgtatttgcttaacatatgtcactccacagactaaatgattcatgaggacatgaacaatgcacacaacaggggctcaatatatcttatttttgytgagtgggatgagtaaatgacacattgaatattttgaaaccatttagttaaagcatagatctgtatctctcaaggcttaactttcatttggttcaggtcattcagtctatgtttcatcatcctaagtgtatcttagaactataaaatccaccgca

SEQ ID NO: 355548 - DNA, 605 bp, Homo sapiens
tttttattatagacatcctaatgagagtaaaatgatacctaactgtgcttttgatttttagttctctaamgattaatgatgttgggaatttcttgtgtactcattgacaatttgtatatcatctttggagaaatgtctgttgggatcctttatccatctttagattgggttatttttttcattattgtgtaagtttttacatattctggttacaagtcttacaagatatatagtttgtaaatattttctctcattctgtaggttgtctttcactttcttagtaattatttgccgcacaaacgtttttaatttttataaagttcagtttatctatcttttcttctgttacttctgcatttggtttcttgtgcttttgcctaacccaagtttgtgaagattcgctcttacatttctcctaagagttttatagttttagacactaacatttatgtctgtaatccattttgagttaatttttgttcatagtgtgaggaaagggtccaccttcattcttttacatgtggatattcacttgtctcagcacatttgtttagaagattattcttccctccattgaattgtcttggcactgttgtcaaaaatca

SEQ ID NO: 355549 - DNA, 605 bp, Homo sapiens
tttttattatagacatcctaatgagagtaaaatgatacctaactgtgcttttgatttttagttctctaacgattaatgatgttgggaatttcttgtgtactcattgacaatttgtatatcatctttggagaaatgtctgttgggatcctttatccatctttagattgggttatttttttcattattgtgtaagtttttacatattctggttacaagtcttacaagatatatagtttgtaaatattttctctcattctgtaggttgtctttcactttcttagtaattatttgccgcacaaacgtttttaatttttataaagttcagtttatctatcttttcttctgttacttctgcatttggtttcttgtgcttttgcctaacccaagtttgtgaagattcgctcttacatttctcctaagagttttatagttttagacactaacatttatgtctgtaatccattttgagttaatttttgttcatagtgtgaggaaagggtccaccttcattcttttacatgtggatattcacttgtctcagcacatttgtttagaagattattcttycctccattgaattgtcttggcactgttgtcaaaaatca

SEQ ID NO: 355550 - DNA, 649 bp, Homo sapiens
cataatgaatgtcaattcttctcaatataatctatagattcagtgcaatcccaataaaaatcccatagatattttttgtaaaaatttgccacytgaattctaaaatttatataaaatgcaaaggacttaaaatagcaaaacagttttgaaaacaaatagagaaatggcatcacctgatttcaaaacttactacaaagtttcagcaattaagatagtgtgctcaacattctttgtcattagagaactgcaaaacaaaacaacaatgagataacactatacatccaccagaatggttaacataaaacaacaacaacaaaaaaaaaacctaacaatatcacacaggactctcatatattattgttgagcatgtaaagtggtacaaactctttgggttcttataaaactcaacgtactccaaattctacttctaggtatttacccaaaagaagtaaaaacatgtatccacaaaaaggcttatacaagaatgttcatagcagctttatttataattgccccaactggaaacactccagtatccaccaataagggaattgttgtaaattcatgctatgaaatactactcagccatacaatagaatggactactaacacaaaaccttatggatgaatgtcagaaatgttatgctta

SEQ ID NO: 355551 - DNA, 649 bp, Homo sapiens
cataatgaatgtcaattcttctcaatataatctatagattcagtgcaatcccaataaaaatcccatagatattttttgtaaaaatttgccacctgaattctaaaatttatataaaatgcaaaggacttaaaatagcaaaacagttttgaaaacaaatagagaaatggcatcacctgatttcaaaacttactacaaagtttcagcaattaagatagtgtgctcaacattctttgtcattagagaactgcaaaacaaaacaacaatgagataacactatacatccaccagaatggttaacataaaacaacaacaacaamaaaaaaacctaacaatatcacacaggactctcatatattattgttgagcatgtaaagtggtacaaactctttgggttcttataaaactcaacgtactccaaattctacttctaggtatttacccaaaagaagtaaaaacatgtatccacaaaaaggcttatacaagaatgttcatagcagctttatttataattgccccaactggaaacactccagtatccaccaataagggaattgttgtaaattcatgctatgaaatactactcagccatacaatagaatggactactaacacaaaaccttatggatgaatgtcagaaatgttatgctta

SEQ ID NO: 355552 - DNA, 649 bp, Homo sapiens
cataatgaatgtcaattcttctcaatataatctatagattcagtgcaatcccaataaaaatcccatagatattttttgtaaaaatttgccacctgaattctaaaatttatataaaatgcaaaggacttaaaatagcaaaacagttttgaaaacaaatagagaaatggcatcacctgatttcaaaacttactacaaagtttcagcaattaagatagtgtgctcaacattctttgtcattagagaactgcaaaacaaaacaacaatgagataacactatacatccaccagaatggttaacataaaacaacaacaacaaaaaaaaaacctaacaatatcacacaggactctcatatattattgttgagcatgtaaagtggtacaaactctttgggttcttataaaactcaacgtactccaaattctacttctaggtatttacccaaaagaagtaaaaacatgtatccacaaaaaggcttatacaagaatgttcatagcagctttatttataattkccccaactggaaacactccagtatccaccaataagggaattgttgtaaattcatgctatgaaatactactcagccatacaatagaatggactactaacacaaaaccttatggatgaatgtcagaaatgttatgctta

SEQ ID NO: 355553 - DNA, 561 bp, Homo sapiens
tccagagtctgtgtcctttagtcatgtgatataggcatgagtatagacactgtgctatacaacttcatcccgaaggctctcctcctctgttattctacttccagaatccctgtattagtcagggttctctaaagggacagaactaacaggatagatgtacgtacgaaggggagtttattaaggagtattggctcacacgatcacaargtgaagtcccacaataggccctctgcaagctgagaggcaaggaagccagtctaagtctcagaacctcgaaagtagcgaagccgacagtgtagccttcagtctgtggctgaaggctggaaagcttctggcaaacaactggtgtagatccaagagtccaaaagctgaagaacttggagtccaatgttcgagggcagaaaacatccagcacaggagaaagatggaggccagaagactcagccagtgtagtccttccacattcatctgcctgcttttatcctatccatgttggcagctgaatagatgatgcccacccagattgagggtgggtctgcctctcccagtccactgagtcaa

SEQ ID NO: 355554 - DNA, 532 bp, Homo sapiens
gtggctttcctgacatctcagtagaacagctgttcttctttctgggatcttccgygtgattctggaaaagtgaaatctgggcactttggcagatccgtcccacttctcaggtctgatggcccagtcttgggctgtgaatgatgaggactccactaagtttctcttgtgtgtgtccagtcactagcttattttaaacattgcttggtcatcacatttacccagtgggagaggaggagaaggggagccatgaacacctgagctgagctgaagtgcttcctgctcccaggggaaagacctttcactcctgacacgactgctccactcctcagactgtcaatagtgccttaaaatacctgtagattcaatgggattcagataagaagtgacagttgtttcattgaagtaaataaattgtcttttcatctctttcgttgaaggtaagaattaaaggcaatttgaaaagggatttagattgaaaacaagaaatcaataaagaaaaatcaacaaaactagaagctggcttttggaaaac

SEQ ID NO: 355555 - DNA, 532 bp, Homo sapiens
gtggctttcctgacatctcagtagaacagctgttcttctttctgggatcttccgcgtgattctggaaaagtgaaatctgggcactttggcagatccgtcccacttctcaggtctgatggcccagtcttgggctgtgaatgatgaggactccactaagtttctcttgtgtgtgtccagtcactagcttatttyaaacattgcttggtcatcacatttacccagtgggagaggaggagaaggggagccatgaacacctgagctgagctgaagtgcttcctgctcccaggggaaagacctttcactcctgacacgactgctccactcctcagactgtcaatagtgccttaaaatacctgtagattcaatgggattcagataagaagtgacagttgtttcattgaagtaaataaattgtcttttcatctctttcgttgaaggtaagaattaaaggcaatttgaaaagggatttagattgaaaacaagaaatcaataaagaaaaatcaacaaaactagaagctggcttttggaaaac

SEQ ID NO: 355556 - DNA, 532 bp, Homo sapiens
gtggctttcctgacatctcagtagaacagctgttcttctttctgggatcttccgcgtgattctggaaaagtgaaatctgggcactttggcagatccgtcccacttctcaggtctgatggcccagtcttgggctgtgaatgatgaggactccactaagtttctcttgtgtgtgtccagtcactagcttattttaaacattgcttggtcatcacatttacccagtgggagaggaggagaaggggagccatgaacacctgagctgagctgaagtgcttcctgctcccaggggaaagacctttcactcctgacaygactgctccactcctcagactgtcaatagtgccttaaaatacctgtagattcaatgggattcagataagaagtgacagttgtttcattgaagtaaataaattgtcttttcatctctttcgttgaaggtaagaattaaaggcaatttgaaaagggatttagattgaaaacaagaaatcaataaagaaaaatcaacaaaactagaagctggcttttggaaaac

SEQ ID NO: 355557 - DNA, 532 bp, Homo sapiens
gtggctttcctgacatctcagtagaacagctgttcttctttctgggatcttccgcgtgattctggaaaagtgaaatctgggcactttggcagatccgtcccacttctcaggtctgatggcccagtcttgggctgtgaatgatgaggactccactaagtttctcttgtgtgtgtccagtcactagcttattttaaacattgcttggtcatcacatttacccagtgggagaggaggagaaggggagccatgaacacctgagctgagctgaagtgcttcctgctcccaggggaaagacctttcactcctgacacgactgctccactcctyagactgtcaatagtgccttaaaatacctgtagattcaatgggattcagataagaagtgacagttgtttcattgaagtaaataaattgtcttttcatctctttcgttgaaggtaagaattaaaggcaatttgaaaagggatttagattgaaaacaagaaatcaataaagaaaaatcaacaaaactagaagctggcttttggaaaac

SEQ ID NO: 355558 - DNA, 621 bp, Homo sapiens
cacacctcacctcttctcaaagtccctcaactcaaaaggaattgcttgaggtctctaaatgcatgtcttccctcaggccccatgttggtgtacacacaggtgcagtccatgatgtacaccaatggtggctggtcatgcaggcagtgctgatagacttgcaccagccctttgctggtcctttgaggtcacccagtgcaaaccctcacaatgtcaaagcagtatcacactcagagctgcggccaagaggagagagtcttcctccatcctgcatgaacaatcttgcttttgtttctggtttcaccaagctcctgtgaagactccttgactttgcctattgcttgctctctacagggctcatgaaatagttcagggagtagggttagtccaaacaggagagagagaagtcccctctccagatctcacctctctcacctgccagtaggaactcatgtacgatctaccttgataagacttctactgcaaaaaagaaaaaaaaaagattgattttgccttgtccatgwctgaattacagtctagtctccacgaggaccgctgtcgcaaccacaaagcttactatgtctttacatatgaatgtatggatttgatatgcttagatatcct

SEQ ID NO: 355559 - DNA, 571 bp, Homo sapiens
gactattatcaaaaagccccaaaataacaaatgctggcatagatgtggagaaagggaactttttaagaattttttatttatatttatatatttttaagagacagggtcttgctcagaagtacagtagtgcaatcatacatagctcactgtaaccttgaactcatggcctcaagtgatcctccctcagcctcccaaaagtgctgggattaaaggcacaagccactgtgcccagccccaaaggaaaatacacagttggtgggaatgtaaattagtgcagctactgcagaaaatagtattcagtttttctygaaaaactgaaaatagaactaccatacaatctgtcaattccactatggatatttattatccaaagaaaaggaaaccagtatatcacagggatacctgaacctccatgtttatcgcagcactattagatatagcatagatatggaatcaacttaagtgtccatccacaaatgaatggcttttttaaaaatgtggcatgtatacacaatggaatactattcagccataaaaaaagaataaaattctgtcatttgtagcagcatgg

SEQ ID NO: 355560 - DNA, 573 bp, Homo sapiens
tttcttttaaaaccagaaaaaatagtacaaaataactcacataattcctacaaaacataagatcaatccagacattttataagattccagyggcccataatgaaaccaacattgcctatacaaattgtgttcccttggtgcagatcagaaactgaggtatatttgcacagaaaaagactgtcctagaataaaccctgtggcctaatgtttcctgttatttgacaagatggtgagctaggagagacataatagaatgcagtattggtggaggcagagagtcctctactgtggccagggacatggagaaaagtgtgtgagaaggtgcagaaaagattattggtttggtagtaggaatttcaaggacattttttctgatagctgctattttatttgaagtaggaggtgaggtaatttgctgagagtgagcagagtgggagtaaggatgtatgtatgcagaaaatgcaaaaggtttcaatttttggtttagatttttttttttttttggtggagatcagaagagaaagatgacttaggaaaacataggatgggtaggtagttaatttagaggggcac

SEQ ID NO: 355561 - DNA, 573 bp, Homo sapiens
tttcttttaaaaccagaaaaaatagtacaaaataactcacataattcctacaaaacataagatcaatccagacattttataagattccagcggcccataatgaaaccaacattgcctatacaaattgtgttcccttggtgcagatcagaaactgaggtatatttgcacagaaaaagactgtcctagaataaaccctgtggcctaatgtttcctgttatttgacaagatggtgagctaggagagacataatagaatgcagtattggtggaggcagagagtcctctactgtggccagggacatggagaaaagtgtgtgmgaaggtgcagaaaagattattggtttggtagtaggaatttcaaggacattttttctgatagctgctattttatttgaagtaggaggtgaggtaatttgctgagagtgagcagagtgggagtaaggatgtatgtatgcagaaaatgcaaaaggtttcaatttttggtttagatttttttttttttttggtggagatcagaagagaaagatgacttaggaaaacataggatgggtaggtagttaatttagaggggcac

SEQ ID NO: 355562 - DNA, 578 bp, Homo sapiens
tgtttttacaacttgattactgtgaataatgctgtaatgaacatgggagtgcaaatatctcctcaagttcttttggataaatacccaaaagtaagactgatcatgtggtgttgctatttttaattttttgaaaaacctccatattgtttcccataggggctgcacaattttgcattcctaccaacagtgcayaaaggttccaatttctccacatcctcatcaacacttacaattttttcttggttttttttttttttgacaatagccatcctgacaggtggaaggttatatctcattgtagtttttctttatattcccttgatggttagtgatattgagcaccttttctgttcatttgattcttggttggtttgtttgttttgaaacagagtcttgctttgtcgcccaggttgactgcagtggtgcaaacatgcccactacaaccacgacctcttgggctcaagtgatcctcctgtcacagcctcccaagtaactgagactacaggtatgacgaccacaccaggctaattaaagacaaattgtagagctgggatcttactatgttgcccaagctggtc

SEQ ID NO: 355563 - DNA, 617 bp, Homo sapiens
aacaaaaaggatgtccacatagaaaccccatccacaggtcagcaacatcaaagaccaaaggtggataaatccacaaatatgaggaaaaaccagcacaaaaaggctgaaaattccaaaatccagaatgcctcttctcctccaaaggatcacagctcctcacaagcaagggaacaaaactggacacagaatgagtttgatgaattgacagaagtaggcttcagaaggtgggtaataacaaactcctccgagctaaaggagcatgttctaacccawtacaaggaagctaagaaccttgaaaaaaagtttagaggaattgctaactagaataatcaatttagagaagaaaataaatgtcctgatggagctgaaaaacatagcatgagaacttcgtgaagcatacacaagaatcaatagatgaactgatcaagcagaagaaaggataacagagattgaagatcaacttagtgaaataaaacatgaaaacaagattagagataaaagaatgaaaaaaaaatgaacaaagcctccaagaaatatggaactatgtgaaaagaccaaacctgtgtttgattggtgtacctgaaagtgacagggagaatggaaccaagttggggaac

SEQ ID NO: 355564 - DNA, 617 bp, Homo sapiens
aacaaaaaggatgtccacatagaaaccccatccacaggtcagcaacatcaaagaccaaaggtggataaatccacaaatatgaggaaaaaccagcacaaaaaggctgaaaattccaaaatccagaatgcctcttctcctccaaaggatcacagctcctcacaagcaagggaacaaaactggacacagaatgagtttgatgaattgacagaagtaggcttcagaaggtgggtaataacaaactcctccgagctaaaggagcatgttctaacccaatacaaggaagctaagaaccttgaaaaaaagtttagaggaattgctaactagaataatcaatttagagaagaaaataaatgtcctgatggagctgaaaaacatagcatgagaacttcgtgaagcatacacaagaatcaatagatgaactgatcaagcagaagaaaggataacagagattgaagatcaacttagtgaaataaarcatgaaaacaagattagagataaaagaatgaaaaaaaaatgaacaaagcctccaagaaatatggaactatgtgaaaagaccaaacctgtgtttgattggtgtacctgaaagtgacagggagaatggaaccaagttggggaac

SEQ ID NO: 355565 - DNA, 439 bp, Homo sapiens
taatattgtaagatactttttaatgtgctgtcgaatttggtttgtcagtattttgttgaggatttttgtatctatgctcactaaggatattggcttgtaattgtctttcttgtagcatctttgtctgaaattgatattaaggtaatgatggctttataaaatgagtttagaggtgttctctcttcagttttttggaagagtttgagaaggattggtattaattcttctataaatggttggtagaatttgccagtgaagctatcaggtcctgagcttttctttgtaggaaggtttttgactattgatccaatgtccttactcatwatcatctcttcagactttctacttttccatgattcagtctcagtagattgtgtgtttctagaaatttatctatttcttctaggttattttttttttggtgtagaactacttatac

SEQ ID NO: 355566 - DNA, 561 bp, Homo sapiens
cattgtggtgaggagtgaaggcttagaaatactgtacttaccttctttagaacagtctttaagtggttagaaccatgtctgacaaatgaataaaacaacagatgttagttatttatkaaatgtttaagtcacttaaatattccagaattaaaaagaaagagataaattaggcagtataccaactttacagcattcacacaaaattgtaggaatgagaggctatgctcactccttcctggacccttaaaaatagattcagatcatacacgcataggaaaccccaaatcccagtcttggccacagctatgtcttttgccctgacaaatgcattctcactgtcctttcctgtctgctgagctgtctgctgtccctgcctctttcctgacctccctagatgtggctttgcaatctacttcctgatgcagcctttcctctgactctctctggatatgctcctctgatttactggtttttctttcctgagagttgacgtatgggcctctgctgctccatccatcatagtgtcagctgagagctgcttgggtcccataggacagggaa

SEQ ID NO: 355567 - DNA, 642 bp, Homo sapiens
tgacagcattgcacggggcttccagaatgtcacgaagccagctgctggcactgttctcaggagaaaaakgacttttctctggaatggctctcttggtgtaaggcctggtggcacattaataaatcatacacttacggtttagattaagtcatatttgaatgagtcatttctctacacaaatctccactccctgtgtcagcaaggctgatgggcagaggaggctgaatgttggcaggtggtgttatgtgatcaagtgtttttactttaatgcctaaggaagactctgctagccaggtgcacaatagtctgcactgttggccttggctaatctaatcttagacaccctgtgtaattgggaaagaaggagaaactctgcaatgagtcatccagcaacttgatcccctggtttgtttttcattttgttttaagatgggctctaaggtcaggagaattaagaagttggatgtctggaaggggagacgttttgccccggaaagagctgcagagatgtttgctgggcctgacagccagctgtggtcagccagagagacacatgacaagtagaactcaggcatccctgccttgggagaccagggccagggcttctgtgacatgcactcgcttggagtcccattgatccca

SEQ ID NO: 355568 - DNA, 576 bp, Homo sapiens
cctatttctaagggaaaggagccaatctgaaaaggctacatgctgtatgaatccaactatgtaacattctggaaaggcaaaagtaggaagacaataaaaagatcaggggttgccagaggtcagtggggaaagaggaatggctaggtagagtaagaggacgtttagtgccatgaaactattctgtgtagtactattaatataatggtggatacatgtcatacatttatcaaagcctacgtaatgtgcaacacagagagaagcctaatgtaaactatggatgttgggtaataatgatgtgtcaatggagattcatcaattataacaaatgtagcattctggtggagaggttatgcacattggaagggcagggactatatggaaaatctctgtactttttgctcagttttgctctgaacctaaaactgctctaaaaaaataaagttygctgggcgtagtggttcatgcctgtaatcccagcactttgggaggctgaagtgggtgaatcacttgaggccgggagtttgagaccaacttggcccacatggcgaaaccccatctctactgaaaatacaaaac

SEQ ID NO: 355569 - DNA, 488 bp, Homo sapiens
catgagtttcttcaatgtgccagacatgaatccttgtaaggttttggagactggaaatttcttttcccacctcttaatactgctttctcaggatttctacagagtgggagcaactgtatatcctgatctaaactataagtagttttcctttatctgccagggatacattctaagactttcagtgtgtaaagcaaaaagtgtctgagacagatctcaattgatatagaggtttattttgccaaggttgagggtgcacccaggaacaagagacacaagttacaataagatctgtgtttggtacttcttccaaaaatggttttgagaacttcaatatttaaaggggaaataacaggcagcagaggaagaaggaaagaaaacaaaagggagggtaggtrgtgagaggagtgattacatttttgtaaggctttgatcagcacttactgaatccacatgttaaatatgaaagcagtgggatagagaaacagtca

SEQ ID NO: 355570 - DNA, 627 bp, Homo sapiens
gagggagcagaatggcatgagagttcatcgtgcaagtctgagggtgcacaatttaaaacctagaaattatttattcctcgaatttttccatttaaaatttttggactgtggctgactgcaagtaactgaaaccaaggaaaacaaagccatggataaggrgcactactgtactcacagcatttgtgacaccaattgtgtgtaggtttccttccccacaccaacaaattccctctctgggtatcctgcaatttaattcaattctgacaagaactacctggagttggtatcagactccacaggcttaagggttcagtcccacaaaactgccctcactttggaggctacttgcaaatagagggtccccaggttactcacacttctgtctgacttggctacaaatcaggggttcccatgactccccttcagtttcagtaatttgctagaatggctcacaaactcagaaaaattatttactttctctcactgatttactatacacaacacaactcaggaacagccaaatggaagagaggcatagatctaggtatggagtgggggttgcacagagcttcccttccctctcccgacactgccctcccagcacctccatgtgttcaacccagaaac

SEQ ID NO: 355571 - DNA, 534 bp, Homo sapiens
tgtgtaggtttccttccccacaccaacaaattccctctctgggtatcctgcaatttaattcaattctgacaagaactacctggagttggtatcagactccacaggcttaagggttcagtcccacaaaactgccctcactttggaggctacttgcaaatagagggtccccaggttactcacacttctgtctgacttggctacaaatcaggggttcccatgactccccttcagtttcagtaatttgctagaatggctcacaaactcagaaaaattatttactttctctcactgatttactatacacaacacaactcargaacagccaaatggaagagaggcatagatctaggtatggagtgggggttgcacagagcttcccttccctctcccgacactgccctcccagcacctccatgtgttcaacccagaaactctccaaaccctgtcgtttaggggtttttatggtggcttgatcggttaaatcaatggtcattagtaattgaactcaatctccagccccttcctggaggttgg

SEQ ID NO: 355572 - DNA, 534 bp, Homo sapiens
tgtgtaggtttccttccccacaccaacaaattccctctctgggtatcctgcaatttaattcaattctgacaagaactacctggagttggtatcagactccacaggcttaagggttcagtcccacaaaactgccctcactttggaggctacttgcaaatagagggtccccaggttactcacacttctgtctgacttggctacaaatcaggggttcccatgactccccttcagtttcagtaatttgctagaatggctcacaaactcagaaaaattatttactttctctcactgatttactatacacaacacaactcaggaacagccaaatggaagagaggcatagatctargtatggagtgggggttgcacagagcttcccttccctctcccgacactgccctcccagcacctccatgtgttcaacccagaaactctccaaaccctgtcgtttaggggtttttatggtggcttgatcggttaaatcaatggtcattagtaattgaactcaatctccagccccttcctggaggttgg

SEQ ID NO: 355573 - DNA, 596 bp, Homo sapiens
taaccccataatcccagcatgatgattggaaagaaagattttggccaatttgaatatatatgcagtattataaatgtagaggaaataaatggcgacttgtattatgaaactagattaatcagtcacgcatatgtagttaaaatcacatataaaatgttaatttaaaagtacttttttcactgtaatttcatgaaaatatgttaagaacccctcttttggtgtcttcaatatcactgcctttgtcatcaccagagccactttttgagttgtctaacagttttcctgagcacaccaccttcattatatcaccgtttgaatccaagtrtgatgaagacactgtaaactttatcccaagtcgcaaataaccatttgtatagcattacagcccttatttttgttcacagtggtcctgttaatgatattcattatttcaacaaccgaatccattttcccattctttgttgcattgacaccttttattgtgacatatacatacaaaagaatgtaccctacatatatgtcatatttaaagaattacaatagaatgtagatctgtgaacccagccacccagcataggaaacagaatattaccagt

SEQ ID NO: 355574 - DNA, 520 bp, Homo sapiens
ttgaatccttactacatgccaggtctcatttaatcctcccggcaaccctgagaggaggaatggttgccagaattccccatccaggtttgtgtgactccaaggctcacctggcttcccttgatgcaggtgggatatgcatctcccccagtaatgcctgatagctccacattggctttcttcccaagagacccggccttggcccggtcctctggccctgcccttgccctggctcctcagaaccctgcccctaagccctcagttttgagttggagtgtgaaaaggataaacacttcctgggtgtggctgagtccctcctccctgaaacattgagacctaaaaaagatggaagagactttctgaaccctatttagaccaagagaggaaaaaaaataaggggcagrcttaatgtttacagacaatataacataacccaaatgaccgtgtcttctctatcaaggagaaaactcttcaaactagacaagtggaacaagtctggctcacgggaagctgtgggcctgcc

SEQ ID NO: 355575 - DNA, 512 bp, Homo sapiens
gaattgtaagcctagctcactaaatccttccagtcatctactgtatctgatatatattgttatcatcgtatttgagacacactactgtttgcaattgttggttcctctcttttctagatcttggttattaggggataatgtccagcgtggagcatggtagatagggagactggtcaaggtgtggtctagcgatgctgaagacatagctctgtttatattccaaaattcatgagtattgtccaagtattttttccccagaagccccagaagttgtacataagaacaaagaaaacagtagggggtgggggtccacctagggttggagcttcccagggaagctgtgctggaaggtaaagtcaggagggagttgggggtggttgagatagtgatgtcctgggagaaagatgaggaagaaagggtctggagagctccctgaagcaaagagcagttcctgtgggaaacaaggggatargagagctggagggacccaggagtttatgtaagaaggtgag

SEQ ID NO: 355576 - DNA, 541 bp, Homo sapiens
atatggatacaaaaatcctcaacaaaatactagtaaattgaatatactaatatgaaaatgattatatactatggccaagtggattttatcccaagaatgcaaggrtggtttaacatctgaaaatcacttagtataatatactatattaataaagtaaaaaacgaaaactcacacaataatttcaatagacacaggaaaaaaaaaatgtgacaaaatccaacagccgttcatgataaaaacattcaacaaactaggaatagaagggaactttttcagcctgataaacagtatcttcaaaaaaacctacagacagcatcaaacttaatcgttaaagactggatgcagccgggcacggtgactcacgcctgtaatcccagcactttaggaggccgaggcaggcggatcacaagatcaggagatcgagaccatcctggctaacatggtgaaaccccgtctctactaaaaatacaaaaaattagctgggcatggtggcgggcgcctgtagctccagctactcgggagtctgaggcaggagaatggc

SEQ ID NO: 355577 - DNA, 541 bp, Homo sapiens
atatggatacaaaaatcctcaacaaaatactagtaaattgaatatactaatatgaaaatgattatatactatggccaagtggattttatcccaagaatgcaagggtggtttaacatctgaaaatcacttagtataatatactatattaataaagtaaaaaacgaaaactcacacaataatttcaatagacacaggaaaaaaaaaatgtgacaaaatccaacagccgttcatgataaaaacattcaacaaactaggaatagaagggaactttttcagcctgataaacagtatcttcaaaaaaacctacagacagcatcaaacttaatcgttaaagactggatgcagccgggcacggtgactcacgcctgtaatcccagcactttaggaggccgaggcaggcggatcacaagatcaggagatcgagaccatcctggctaacatggtgaaaccccgtctctaytaaaaatacaaaaaattagctgggcatggtggcgggcgcctgtagctccagctactcgggagtctgaggcaggagaatggc

SEQ ID NO: 355578 - DNA, 584 bp, Homo sapiens
aatttatgttttagtattttatgttaattggaaataacatagttattcaatgaatagctatcatttaatttaacctagcaaaactctaagggtacagttactaaagagatttagaaaacttttttttttttttgagacggcgtcttgctttgtcgcctaggctggaatgcagtgacgcgatctgggctcactgcaagctccacctccggggttcatgccattctcctgcctcagcctcctgagtagctaggaccacaggcgcccgccaccacgcccagctaattttttttttttttgtatttttagtagagacggggtttcactgtgttagccaggatggtctcgatctcctgacctcgtgatccgccctcctcggcctcccaaagtgctgcgattgcaggcatgaaccactgcgcccagccttaggaaacagtttttaagcagayatattataaaacataattgttgttaaaaagttcatttataaactttatccaagttatagctatttagatcacttttttttttaacaattatgcctagaatactcatgaaaattaaatgagacattagagacaaagtta

SEQ ID NO: 355579 - DNA, 621 bp, Homo sapiens
tgtaaggtctctccccagtatgggttctctaatgagcaatgagacttgagctctaactgaagtttttcccacatactaaatgcttgaaggcctttcccctgtgtgggctcttttatgcataaaaagaaattaactggggctgaagctttccccacactggaagcaacaatacagtttctgttctgtgtgggttatctgatgcactgcaagttgggagctatgactgcatctccaaccacactctgggcatttgtgaggcatctcctctgcatacatcctctgtccaggagcaagttggacctrtagatatagtctcccccacactcctgacactcaagttaagaatatacccagctctagagtgagatagcctagattcatacccttatctacccatattagctgtgtaaccttggacaaataaacttaaaaaaaatcttataatatggtttggctgtgtgtccccacccacatctcaccttgaattgtaataatccctacttgtcaagggcaggaccaggtggaggtaattggatcataggggcagtttcccctatgcttttctcataatgatgagtgagtctcacgagatctgatggttttttaagcacccggcatttc

SEQ ID NO: 355580 - DNA, 515 bp, Homo sapiens
actgtagtacatttaataaatgttacttgccattratatttctgtagatttttgatcaacttttgctctggaagatcagaggggactgacctaattaggtctgataaaaggcttaactttatcacttagcattgcttgagtattttactggcctggtgggtgtactgagaaaagcaggcttatgtttcaacagtggactctattgtgcgaaataaatatgagtctcctccctctttgctgttgccttatttgtactagcatgccagtttgaatacacagtgttcatgtcaatatttttgttgatcaatttatcagctcaatttatagaaactttcagagtcttccttattgatgtgtttcctggggcaaggcccattgttttgcttaacatttcctagaacctagatgggcctctgtactcagttgccccaagaattttgatcaaaacatggaccaggctttggtattaaatttccaaagcctggaggctgaaagcagtttggaaaagagttgat

SEQ ID NO: 355581 - DNA, 507 bp, Homo sapiens
gggcaaatcttcgacttccaatctgtctgaatgtgaggaaaagattcaaagataggactgcaagcctgagtaactagaagactagtgatgcctttggaaaggggggctgtcccaggagaaatgaggttttgcaaagacagttacagtttagctgtgcttagttgcacatgctggcaggacacctagggagaggtgcccacgaacggacaaacctgtgggactggggcacagaaggaaggtgcatgtctgaatcatagttgaagccacaaggtaggcygaaattaaaggagaatgaagaggcaaaaacaggccagctataagaaagatgaaaaatgtgaaaaatattgtataattaacaacaggattacaacaaaatgtaacagaatagtaacaactcacctgtttgtatgcatgtccctttactactctcaacaatcttattgagattacatgtcatacatgactaagctttgggaaataaaataacttgtcattcaacccgtaagt

SEQ ID NO: 355582 - DNA, 495 bp, Homo sapiens
caataccagttcatagaatatggaattgctgaaatacctatcatgctctgtaaagtccctgaggacttcttcaggtataaatcatgttggatgaaagcttaattatttgttctcaaattyaagtagaatataaatatgatatgttcaaattgtagaaaactataaccatttaaaagtacaaggtgaagtataagtaatgacctgaaaaacccattgttaagttaaaaaaaaaaaaagacaagttggctgggcatggtagctcacatctgtaattccaacactttgggaggccaaggcaatgcatcacttgagctcaggagttcaagttcagcctaggcaacatggtaaaaccccatctctaaaaaattagctgggcatggtggtatgtgcctgttggtcccagctacctgggggctgaagcaggaggatcacttgagcccagaaagtcaaggctgcagtgagctgtgtttgcaccactgcactctagcttaggca

SEQ ID NO: 355583 - DNA, 546 bp, Homo sapiens
aaacatagcctcatccaaattccatctgtcatggaccratttgtcttcttcaccctccaaaacccattgttgaagccctaactcccagtgcaattgtatttggagataggacctttaaggaaatgattaaggctaaagtaggatgtaaggatggggtccttttccaataagactgttgttcttatgagaacaggaagagacaccatgagcatgggtgcatggagaaaaggccttgtgaggacacagtgagtagatggtcatccacaatcagggagagatgtctcaggagaaactaaacctgctgacaacttgatcttacagcattcggaattatgagaaataaatttctgttgtttgcaccacccagtctgtggtcttctgttatggaaaccttagcaaactaatgcaccatccttcacaaggttccccagaaccatcacctccttcatgtggccttactgccctcacttatcatcatcgatatcttcctctgaatttctgcagtgaatataatttgatacctagtaaaactaacatgcttcaact

SEQ ID NO: 355584 - DNA, 546 bp, Homo sapiens
aaacatagcctcatccaaattccatctgtcatggaccgatttgtcttcttcaccctccaaaacccattgttgaagccctaactcccagtgcaattgtatttggagataggacctttaaggaaatgattaaggctaaagtaggatgtaaggatggggtccttttccaataagactgttgttcttatgagaacaggaagagacaccatgmgcatgggtgcatggagaaaaggccttgtgaggacacagtgagtagatggtcatccacaatcagggagagatgtctcaggagaaactaaacctgctgacaacttgatcttacagcattcggaattatgagaaataaatttctgttgtttgcaccacccagtctgtggtcttctgttatggaaaccttagcaaactaatgcaccatccttcacaaggttccccagaaccatcacctccttcatgtggccttactgccctcacttatcatcatcgatatcttcctctgaatttctgcagtgaatataatttgatacctagtaaaactaacatgcttcaact

SEQ ID NO: 355585 - DNA, 565 bp, Homo sapiens
gatttacagtgtttaatatatgttttttggtaactcggcctctayacaaattgtgaggtataacaagcaagcagtgctattacattttacacaacaggcaattgaggttgagtgagtgaatttatcctagttctacagttttctttatacaaggctatatatcaattagtgtttgctcaacagtaactgaacctgaaatgtgtggccaaatggtctgtgaaaaggtctcacaatgtgtttcctccaggactaaattactatcataactaaatggaaggcatgtttctatcatctcattcaacgttttgacaccaaaatgtggttctgcttaattttaataatttcatcaaaaacatttataaaacatattctacattgaatgtcaagcaatatgaccctgattaagataaataagacttgactttgtacattccttattcattttcaaaacacttttggtgttttactgtatgccaggtattaccatatattgggaggaaagactccaaaaaaaatacatagtccatgccctcaagcagcatcaaagcaactgaaacagagctgc

SEQ ID NO: 355586 - DNA, 584 bp, Homo sapiens
aagattcatgtatcattacatctcttcttggaaatttcaaatacaactcaagagtttttatagattaaatgcaatctttgatatacatgcatgcaatctgaggttaatatatttawtaaaggtgaaagtgttcttaaaattatcaaaaactaatattttgacactttattattttaaaatacagaaatgctaaaaaatgtatctatactctcttcttccaaaaggtcattacttttaatgttttgatgtgtttattttttaattcatttcatgcattaaaaataagattgagctcatactgatttagatacgatttataattattttaaaaacatattgtatcagacatttaccaatgttaacatgtagatattgttttaaaataaatcattcatttcttacatacttaaactgattccaatgtttttctgttaaatggccatgtagcttaatcactccatgcaccaaactggacctggaatagaattccttccctcaaataactcatctccagtagagaagataaacatgtaaacaggaccaactatatgatttgtggagctcagtacaaagtaaaaatgcat

SEQ ID NO: 355587 - DNA, 511 bp, Homo sapiens
catagcgagctccttcttgaaaaattaggaaattcaagacagccatagcatgcaataaaaccaagactggagccctgtgaagcataggttctgtgcaaatgcaaaagtcaccaacccaggaagccagtcctgaacgtaagcctaatgtaagtcagtacaagatggtaaatgccttaatagaaatgtgtattaaattataataggaacacagtggaagtggtacttccatcttgacagttctagcagctctgccaatttgcatgatcaagataaatctgacttcttttagcaaaaaaatgcagacartgaatttaaaaaattaacttaattgcaaaaaaatgaaatagagttatttgggcctactgcaccctctagccaggtaataggtagcaagtattgtttcagagactgaatccaacatttggaggagagaagagagtcattttcatatatgaagaatagtgaagtggacataggggatgaacaccaaatgtttgtaattttgttccct

SEQ ID NO: 355588 - DNA, 548 bp, Homo sapiens
atcttgagctttactgtttctgtgataaacacagagggttgctatttaaaagtgactttttctccctaccaatatccasaggagaatggctgaggatgatggcatgggggactacggctataagttattcccacaatgaacctcaggtttctcatctgtgaaattggcttaataacctgtcaggagtgttgagaaatgcagtgagttaaagtataaagtaatttctacatagcaaacatttaataaatataaataaaggaataaatacttttacaatacagtatattgtgtattataatgtcagagaaccttaaagcaatgtccagcattacacatgactgaccaggcttcgtaagacatttctagtgggaaggtcctgactccctcatctctgtaaagcttgtgttcaggaccccgtatgatgacagacaggttcacctcataagaccatggctcctgagacagctgtatggaagaacagccctagcctgagacattctatgactgaaaacatccattctcaattttctctgcaacctcccagcatc

SEQ ID NO: 355589 - DNA, 548 bp, Homo sapiens
atcttgagctttactgtttctgtgataaacacagagggttgctatttaaaagtgactttttctccctaccaatatccacaggagaatggctgaggatgatggcatgggggactacggctataagttattcccacaatgaacctcaggtttctcatctgtgaaattggyttaataacctgtcaggagtgttgagaaatgcagtgagttaaagtataaagtaatttctacatagcaaacatttaataaatataaataaaggaataaatacttttacaatacagtatattgtgtattataatgtcagagaaccttaaagcaatgtccagcattacacatgactgaccaggcttcgtaagacatttctagtgggaaggtcctgactccctcatctctgtaaagcttgtgttcaggaccccgtatgatgacagacaggttcacctcataagaccatggctcctgagacagctgtatggaagaacagccctagcctgagacattctatgactgaaaacatccattctcaattttctctgcaacctcccagcatc

SEQ ID NO: 355590 - DNA, 548 bp, Homo sapiens
agtattcagcacataatgggtgcttaatacacrctgggtgagtgaatgaacagataataacataaatggggcaatatgataatatagagatgacctcatcattcattgctatgactgtattgatttcaacatgtaaaaatcagcacagacaagaaaaggtatatcaaaaacagaatacttgggctcagctgcaaaatgaaagggagctacatgttctattacaggggttaaggtaattcccttcaaagtggtaattacgggagatgattctaattttaaactggttttctaatgggtgtttggcttttaaaaatctcacaggcctttaatttatatatattttgcttaactcttcatagctcaccccaaccaccaacgaacccctcaaattctttcttaagatcgaggaggtgagtcacataaggtccaagaattaccagctactattcagatcattacttgttatccaaaatcttaaaaagataaaattattaaaacatatgaaataaaagcattaacattataaaaaggtgtttctgctaaaatat

SEQ ID NO: 355591 - DNA, 581 bp, Homo sapiens
ctaaattctccaaccagcaaaacacagaattttggaaacaggaatgaatttttgcaagtggttaataaggtataataatggaagatgtcacatctatatcaaccccttgatttccagacccatgtgttataacagtgggagaagtagcatctcatatcagtccctcgtcagagtttatgctgcgtcccaaccttgtaaggtcktaaccactagctggcaccataattatttatttgataaatcttgttttatgtgggtagtgagctacatggttagaatagtgagctccacgaggatcagcccactggcccacttcttttgctgaaagatgggtgtcttgctcaaggtatgtcatgcagaaaactctaacaggagaagttatgcatgttatattcatcagaagtcttgggtggtgaggtgaggcaaacccaaatgcctaagtatctatttcataaagacaaatcatggtttctttcatgaaggtagggttgcaatataatcagcattctaccagatagctagctggacctccagggatttgatgctggtttctacagaatattgactacccagaagaagga

SEQ ID NO: 355592 - DNA, 614 bp, Homo sapiens
atttggctgtgtccccacccaactctcatcttgaattgtatttcccagaattgacaggtgatatgggagggacccggtgggaggtaactggatcatgggggaagttacctccatgctgttcttgtgatagtgagtgagttttcatgagatctggtggctttataagaggcttcccccaaccttcactctgcactcctttttgctgctgctgtgtgaaggaggacatgattgcttccccttccacgaagattgtacrtttcctgaggccttcccaaccacactgaactgtaagtcaattaatcctctttcctttataaattacccagtcttggatatgtctttattagcacacaataacagactaatacacaaggctattattaacaccttcatgcacacatactaggaaatctagaggacatcaataaattcctgaaaatatacaaccctcctagattaaatcaagaagaaatagaaactctgaacaataacaagtagcaagattgaacagtaataagacaaattgccaacaaaaaaaagttccggaccacatggattaacagctgaattctatcagacattcaaagaagaactggtaccaatcctgctgaaac

SEQ ID NO: 355593 - DNA, 614 bp, Homo sapiens
atttggctgtgtccccacccaactctcatcttgaattgtatttcccagaattgacaggtgatatgggagggacccggtgggaggtaactggatcatgggggaagttacctccatgctgttcttgtgatagtgagtgagttttcatgagatctggtggctttataagaggcttcccccaaccttcactctgcactcctttttgctgctgctgtgtgaaggaggacatgattgcttccccttccacgaagattgtacgtttcctgaggccttcccaaccacrctgaactgtaagtcaattaatcctctttcctttataaattacccagtcttggatatgtctttattagcacacaataacagactaatacacaaggctattattaacaccttcatgcacacatactaggaaatctagaggacatcaataaattcctgaaaatatacaaccctcctagattaaatcaagaagaaatagaaactctgaacaataacaagtagcaagattgaacagtaataagacaaattgccaacaaaaaaaagttccggaccacatggattaacagctgaattctatcagacattcaaagaagaactggtaccaatcctgctgaaac

SEQ ID NO: 355594 - DNA, 614 bp, Homo sapiens
atttggctgtgtccccacccaactctcatcttgaattgtatttcccagaattgacaggtgatatgggagggacccggtgggaggtaactggatcatgggggaagttacctccatgctgttcttgtgatagtgagtgagttttcatgagatctggtggctttataagaggcttcccccaaccttcactctgcactcctttttgctgctgctgtgtgaaggaggacatgattgcttccccttccacgaagattgtacgtttcctgaggccttcccaaccacactgaactgtaagtcaattaatcctctttcctttataaattacccagtcttggatatgtctttattagcacacaataacagactaatacacaaggctattattaayaccttcatgcacacatactaggaaatctagaggacatcaataaattcctgaaaatatacaaccctcctagattaaatcaagaagaaatagaaactctgaacaataacaagtagcaagattgaacagtaataagacaaattgccaacaaaaaaaagttccggaccacatggattaacagctgaattctatcagacattcaaagaagaactggtaccaatcctgctgaaac

SEQ ID NO: 355595 - DNA, 615 bp, Homo sapiens
tcagtaaagggtaagtcaaactatcactgttcactgatgatatgatcatatacctagaaaaccctaaagatttatctaaaaagctcctagatttgataaatgaattcagtaaagtttcaggatacaaaatcaatgtccacaaatcagtagcactgctatacaccaacaacaaccaagctgagaatcaagtcaaraactcaatacctttcataacagctgaaggaaaaaaaaaagtacttaggagtatacccaaccaagaaggtggaagatttctgcaagaaaaactataaaacactgcagaaagaaatcataggtgacagaaacaaatggaaacacatcccatgctcatggatgggtagaatcaatattgtgaaaatgactatactgtcaaaagtaatataaaaattcaatgcaatttgcatcaaaataccatcattattattcacataactagtaaaaacaattcctaaaattcacatggagccaaaaattaaaaaaaaaaatgcccacaaagccaaagcaaaattaaacaaaaagaaccaatctggagacatcacattgtctgactttaaactatacaacaaggctctagttaccaaaacagcatagtggtgg

SEQ ID NO: 355596 - DNA, 615 bp, Homo sapiens
tcagtaaagggtaagtcaaactatcactgttcactgatgatatgatcatatacctagaaaaccctaaagatttatctaaaaagctcctagatttgataaatgaattcagtaaagtttcaggatacaaaatcaatgtccacaaatcagtagcactgctatacaccaacaacaaccaagctgagaatcaagtcaagaactcaatacctttcataacagctgaaggaaaaaaaaaagtacttaggagtatacccaaccaagaaggtggaagatttctrcaagaaaaactataaaacactgcagaaagaaatcataggtgacagaaacaaatggaaacacatcccatgctcatggatgggtagaatcaatattgtgaaaatgactatactgtcaaaagtaatataaaaattcaatgcaatttgcatcaaaataccatcattattattcacataactagtaaaaacaattcctaaaattcacatggagccaaaaattaaaaaaaaaaatgcccacaaagccaaagcaaaattaaacaaaaagaaccaatctggagacatcacattgtctgactttaaactatacaacaaggctctagttaccaaaacagcatagtggtgg

SEQ ID NO: 355597 - DNA, 544 bp, Homo sapiens
gttctccaaaaaaggaagtagttatggaagagtatagttgttttccttcaaaatctctactgtgaacctcttattggaactttccagacacatcaaataacttcctgctcttctataaatctttaatcacttttggttccactgggctttgttggtctatatcatggacaagcgagggagactccctcgcttcaggttctactcaaaactagccctttgggtcatatgataaatttttcaaaatagtaaatttttcaaaatagtaaactcaaatatgttatacattacctaaatatccaaaggagtctaacaaatgatgccattagttttgatayatagagtgctaggtacaactacttatctttcactttggagagaagatccctgtatactccagactactggatccccagaaactaaaccaaggtagcaactccttacatatttttgatatttactttacaccttatgtcctatcaagacatcaataattcctaattcctgctctctagatcctataaaaattgtgtcataaatgtaatgg

SEQ ID NO: 355598 - DNA, 611 bp, Homo sapiens
cctcagaacaaagtttaaactccttwcctttttaacttccccatcttttgcatcttcaaagtaccagcagacaaaactaatatttagcaatgtgcttttgttgtttctaagcttttgcaacttgccagcctctctgttaggaaccctttgtctcccctcttgtttatatcttctctctttcctctagccattgccaacacacacacacacacacacacacacactctctctctcacacacacacacacacacacacacactctctctctctctctctctctctctccctctctctttgtcattttgctttggtaattccaaaacattcctgtggtcttctcttaaatatactttccatcattcccactaggaagatctatatcaatgagatattcctcattatgcacccatagtgggtggggaaagagataagataaagcaggctttgtcagctttcgtctggattcaaatctcagccctgtcacttattatctagggacattgtacaagttattcaacctctgggcctcatatacctcaaaatgtacttaaaatggtttattatgaggaataaataaaaaaggatatatactgtgtactgcatatatgca

SEQ ID NO: 355599 - DNA, 611 bp, Homo sapiens
cctcagaacaaagtttaaactccttacctttttaacttccccatcttttgcatcttcaaagtaccagcagacaaaactaatatttagcaatgtgcttttgttgtttctaagcttttgcaacttgccagcctctctgttaggaaccctttgtctcccctcttrtttatatcttctctctttcctctagccattgccaacacacacacacacacacacacacacactctctctctcacacacacacacacacacacacacactctctctctctctctctctctctctccctctctctttgtcattttgctttggtaattccaaaacattcctgtggtcttctcttaaatatactttccatcattcccactaggaagatctatatcaatgagatattcctcattatgcacccatagtgggtggggaaagagataagataaagcaggctttgtcagctttcgtctggattcaaatctcagccctgtcacttattatctagggacattgtacaagttattcaacctctgggcctcatatacctcaaaatgtacttaaaatggtttattatgaggaataaataaaaaaggatatatactgtgtactgcatatatgca

SEQ ID NO: 355600 - DNA, 609 bp, Homo sapiens
gatgcctaggaatctggagggttgggtccaacatccttattaataagctctgcaaacaattcttatttttattttaatttttaaattttttatttttaaaaaaacttttgttatagtttcaaggtacatgtgcaggtttgttatgtaggtaaactcatgtcatgggggcttgttgtacagattatgttgtcatccaggtattaagcctagcacccagtagttattttttctgattctctccctcttcccacctttcactgtcaagtaagccccagtgtcctttgttcccctctttgtgcccgtgagttctcatcatttagctctcactgctaagtgataacttacggtatttgattttctgttcctgcattagtttgttcaggataatggcctccagctccatccatgttcccacaaaagacatgattttttatagctgcacagtactccatagtgagtattaccacattttctttattcartccgtcattgatgggcatttaggttgatttccttgtctttgctattgttaagagttctgcaagcaactcctattcaggtctcatgtccctcccctcttttcccatcccataatagaatcatagattc

SEQ ID NO: 355601 - DNA, 609 bp, Homo sapiens
gatgcctaggaatctggagggttgggtccaacatccttattaataagctctgcaaacaattcttatttttattttaatttttaaattttttatttttaaaaaaacttttgttatagtttcaaggtacatgtgcaggtttgttatgtaggtaaactcatgtcatgggggcttgttgtacagattatgttgtcatccaggtattaagcctagcacccagtagttattttttctgattctctccctcttcccacctttcactgtcaagtaagccccagtgtcctttgttcccctctttgtgcccgtgagttctcatcatttagctctcactgctaagtgataacttacggtatttgattttctgttcctgcattagtttgttcaggataatggcctccagctccatccatgttcccacaaaagacatgattttttatagctgcacagtactccatagtgagtattaccacattttctttattcaatccrtcattgatgggcatttaggttgatttccttgtctttgctattgttaagagttctgcaagcaactcctattcaggtctcatgtccctcccctcttttcccatcccataatagaatcatagattc

SEQ ID NO: 355602 - DNA, 615 bp, Homo sapiens
cagcaccttcagtgcagaatgaatgctgcattctgaaatttgaagaggaaaagaagcttgtggttgatgtaaatgcacgatagaccaaggagacatatatgtcagcatttttcaacaaagagctaattggagagcagaagcaactactgactcaggaaaaaacaaagttaaaattcctttattttatagctaacctcaccataatatctgatttgcctcctaccaatttattattattaatattatttatgctaattctttaaaaaatagtgtatgctctcttctcactcataagtgagagttgaacaatgcgaacacatggacacatggaggggaacaacacacattggggcctgtcaggcggtggggaacaaggggagggagagcattaggacaaataactaatgcatgtggggcttaaaacctagataacgggttgataggtgcagcaaaccactgtggcacacgtgtacctatgtaacaaacctgcacgttctgtacttgtataaagtaaaataaaacaaacaaaaaaataccrtatgcttatggtacaaatgcaaagaaaccaaaagagtataaagtgaaaagtagtttttttttcttattcatggcctt

SEQ ID NO: 355603 - DNA, 566 bp, Homo sapiens
cccataaacaggtatgtgtgaatgagagaagtggggagaaatatacatttcctcataatatcctcatatgcttagaaggtactgaaactcgtcttccattaaatatgaagtcttctattccataactagtgacataattattacacggtagcagtgattcttaaagtgtagtctttgagccagtcgggtcagccacacctgtgaacttgttaaaaatgcaaattctcgggctccatctcagatctactgaatcagaaactctggcggtgcaatcttgcaatctgtgttttaacaggtggttctgatgcacactttgagaaccacttcattctaatatgaagaggtttcaaagcagtatgtgtcaacaatgaacaactcccatctttgggaatgatggagatgggataatgattaaaatacacagtcagtagaagagaaagggtcatgaccaataaaaaacatagstaaagtttgggggagtgggtctgagagagacagacacctacgtaaaaaaactatacaaatttgtgtggggtggtcctgtttgccattcactgtagaggaaa

SEQ ID NO: 355604 - DNA, 566 bp, Homo sapiens
cccataaacaggtatgtgtgaatgagagaagtggggagaaatatacatttcctcataatatcctcatatgcttagaaggtactgaaactcgtcttccattaaatatgaagtcttctattccataactagtgacataattattacacggtagcagtgattcttaaagtgtagtctttgagccagtcgggtcagccacacctgtgaacttgttaaaaatgcaaattctcgggctccatctcagatctactgaatcagaaactctggcggtgcaatcttgcaatctgtgttttaacaggtggttctgatgcacactttgagaaccacttcattctaatatgaagaggtttcaaagcagtatgtgtcaacaatgaacaactcccatctttgggaatgatggagatgggataatgattaaaatacacagtcagtagaagagaaagggtcatgaccaataaaaaacatagctaaagtttgggggagtgggkctgagagagacagacacctacgtaaaaaaactatacaaatttgtgtggggtggtcctgtttgccattcactgtagaggaaa

SEQ ID NO: 355605 - DNA, 530 bp, Homo sapiens
aactctctttttttaagggattgctaatcaggcaggatatagtcctgaaacttctggaggccacagtgcttcctcttggagacagcctgcctgagaatgaggccaacagagagaagcagaggttgtggttggaacaaataatgttcccggagacattatttgattacctggatttagccatgctgggacattttagttaaataaaccaggatattcctttttgggccaaaggcaacttatgatgagtttctgtccaataaagcgcaaagcaaccaattcaccttctacaacttccatggcaggaagtgattagccytctctttaatcattccagatggacagatcttcattttctaccaggactctgggtattgggttctgaggctcagttcttccttgtattgagcaaaatctgctgtctttaatctgtacccactactaatgctttatttgttcatgcagttccttgtttagttagggaacggcaagtataagagatttgaggtggattcgaatttttgtatgttgaa

SEQ ID NO: 355606 - DNA, 612 bp, Homo sapiens
agacttggaatagatactgcccaggatcattagaaaaaaaaaaaaagaagtttgagttttacgaggggattgtcaacatccaacatatccaattctagtgacaaattttgcatatctttatccctagtgtcttgagaatgcagtggccttgacacatcataactaagggaatctcttcaaaatcaggtagaatcaggtctacagggcagatcttttcagcactgttatgcagatgcaaggagatgactggtcccaattattaccgtttttaaggaaggcaatgcaatgtggtttagagaaaggctacttctgggaakaagaaaacctggtaggctaggcacagtcttgtaactgagatgtctggtaaggcatatgcctgactcttagtctctatgtttatagaatgaaaatactacagtcatcattcactagaaagttatgagacactgtgaaaaagttgtggccctaggatgaaaggaagatgtgtagaatatcactggcaagacaagattatcctcaaaatgaacaaaattagaaagatactatcaaagccacattctaactaatgtaattacattgacttgctcacatgtggaaatggtccaagagcat

SEQ ID NO: 355607 - DNA, 559 bp, Homo sapiens
agttttttgatcctctccttcctcccaccctccaccctcaagtaagccctggtgtctgttgttcccttctttgtgtcawtgtgtactttatgtttagctcccacatataaatgagaacatgtggtatttggttttccattcctgcattactttgcttaggataatggcctccagctctaaccatgttgctgcaaaggacgttatctcgttcctttttatgactaccatagtattgtacggtgtatatgtgccacattttccttatccagtctatcactgatgggcacttaggttgattccatgtctttgctattgtaaatagcgctacgatgaacatacacatgcatatgtccttatggtagaacaatttatattcctttgggtatgtacccaataatgagattgctgggtcaaatgataattattttttgagttgagaaatcaccacactactttccataatgaatgaactaatttgcatttaaaccagcagtgtataagcattcccgtttctctacaaccttgctagcatctattattttttgactttagtaatagc

SEQ ID NO: 355608 - DNA, 618 bp, Homo sapiens
aaagttgactcagagtcactaagaccctcttgagaaatctggcctcatatcttgtctgtacagtccctgtacaaggttcctgacctgtggtaactaaagaatatcactttctaacagacccacgagccccaagtgatcttaggacctccagaggagaagaatttacccagctcctaagtattcgaggatacaaacccatggctagcctcagcttttaaaaagtcttatctgagattccttatggaacagagtcccatcaaagccaattttaaaagcctatgtgaaaaaataattattctcgctgcactttatgcacataatcaggccaagtacaataagactatagtttattttttaaacaaatcagttctatcatgatttgtttttaatagaaaatggggactggagagagaaaaaaatatacttcaaaagaaaaactatagtatatctgttgttagctgttcttgaattttttctgcagtttggagtaaatcctaaattctttgtgggctacaagtcccaaaactaatgytttcaaatatttacttttaaaactgggaattgcacttcttaccctagtcggtattaaaactatagataacaatactaacacctttg

SEQ ID NO: 355609 - DNA, 391 bp, Homo sapiens
aaagacgataatagccctttcacaaaacaaacctccctcttgactggggactagactgcctttgtaagaccaagaaattagccacaagattagaaattatgatttaggagtcatgcagctggaagctacaagattctgaccctctgtaacctgctcctaagatcaatgcttgagatattttgcagatcctgcacttgacggattagctggcaccagccagwttgataaactggctcatctgaccttgtggcccccacccaggaactgactcagcacaagatgacagcttcagctccctattatttcatctctgacctgaccaatcagcactcctggctcactggcttccctccacccaccaagttgtccttaaaaactctgatccctgaat

SEQ ID NO: 355610 - DNA, 593 bp, Homo sapiens
aagacttatctccctccaagttcctgtatatatgaacaagatatggaaatgaccaaaaatctggatgaggcaggttatgtattaggaggaagagaragaaggagggaagaatgatgcctgccagatgtgaagagttgattctctctctttcttaaggatgagactttaattactatggctaccacctaaatacacattggcttaggggatcattttataaaaaccttctcatttaataataattcactgagatcacaaatatggcaggtaaacattttattcgtgacaggatatgatttttgaagctacttgttagagcttataaattggtattaagatcgctttgtcattgatcctatccaaaaggtttctataatgccaactccaaaaaaactaaatcataaggagcttctaaaaacatgatcctctagggaagtctgcaatggaaacattaaatgtgacaatatttggatcatatgccactttaagtcattaaagtaaaaagaaaagtaggattcaagcataaatccccttccatatttattccataaaactgcataaatggtgcatttcacaatttgagtacattgatt

SEQ ID NO: 355611 - DNA, 604 bp, Homo sapiens
attaagctggcctgagggatcagctgaaattgtaaggacactcatccacacagtctgtaatttctgaaaccttatgctaaatctgcattggaaaactttgatgtactagaaggggatgggataagaaagtggcaagaagatagagaaattagtatgcttttcatgtctactttatgtgggtggctgaaaggacagatcctagagagccttctctctatccctacagaacaccaaaacaccagcctatcttccttagcctgtttatgttattccatcataaaaagactaayagccatgatgcaactttctcatcaacactgcctaatggagtctttccttatacataggtacacctctccaatctgatgcgagtttaaattaaccatgtcactatcagcataagaaatcagatggcatcatttttctagcattacaacctagtccatgcacatgttgagcctgctataaaagtaaaagaacacaaaaatagtcaacttttgaaaagtaactggccaaaaggattgtatacgaaatatacacatatttaaattatccattctctttcatttacttctatgctcataaaaatgttggtcttaaattt

SEQ ID NO: 355612 - DNA, 458 bp, Homo sapiens
tttatcacccatttatatatataaatttatcaccctctctctatatgtgtgtgtgtgtttatgtaaaaaaatgttttaagtaccaccacattaacaatgctaaaaattgatgaaacccatgaacagatttctggtgaagcacatatgccaagttttacctcaggaatattttaaaattctttttcttaaagcaatttttcaaaaacaagttgacatgtcctcaattctatttgccttagctggcaacactcaagacttagaaagcttagaactcaagaacagaagctaaaactatcattgtacgacaaaacagtctataaattcagcatttttagtataactttggacttatttcaatccatctaaaaattaaagacyttgtacttggacccaataatctagttttaagttgtccagctctgaaaaattcaaagttctttgtcattgtggaagtcttg

SEQ ID NO: 355613 - DNA, 609 bp, Homo sapiens
caagtctcaaatgagcagagtggaaacaagggcgtctcctgatgcttctcctggaaacaaagccccagcatctgcctacaatgcacctggggccatgtgggccagattagagtgtgccatgaacacccgcggtatggcagggcctggagaaccctgccattatcctcaccatgcacaaattcccagaggcaaacaccacaggccactttgcacttgcaaacacataaaaacaagattgctcagattctcaggaataaaggtgttggaggctcactctgctcccagctgctcctgagctccaactctttcaagcctgtcttctggctctacaaccacccactccaacccacctcaccccagcaagctccccacctggaagattccaattcctccttccaacccgctcagacactccctcctccaggcagtcttccttgccttccctctgcctggcatcccttatcctcatgacctgctcaacacacagtgggttcagattctgctgcttgcatgtctcagtcccctaccaagggacaagtttgtgaraacagggctcatggcagattcacgctgtcacctcctcctttttgcagggcacctgacacatag

SEQ ID NO: 355614 - DNA, 580 bp, Homo sapiens
tgatttaggacaagtcatattacttgactgtgtctaattattytttgaataaataggtagacacaattagtacttttaaactgtacctgcctaggtacagtcttgcatttatcttttttatccaaatagtatttcacttaaaaaaaaaatggaaaaaataggccgggcgtggtggctcatgcctgtaatcccagcactttgggaggccgaggcaggcagattacgaggtcaggaaatcgagaccatcctggacaacatggtgaaaccccgtctctcctaaaaatacaaaaattagctgggcgtggtggcgcatttctctaatcccagctactaagggaggctgaggcagaagaattgcttgaaccagggagtcagaggttgcagtgagccaggatcaccccattccactccagcctggcgacagagtgagactccgtctcaaaaaataaattaattaattaaattaaataaaaaataaaaggaaaaaataaaaggacagtccttgaattagaagatctctaaaggtcccccaatgtcttcaaattataagtgctctaaataaaatatatcattcttaaca

SEQ ID NO: 355615 - DNA, 607 bp, Homo sapiens
taagctttgtaacagcaaattttttttagcaagtgtattttgttataccctaagcctaaaagaagttaaataaatacacacctgactgtgtatgacttgaaaggggagcaggggaagattttatcagcatgctattagtgatctcaaccaatatgtattactactctgtgcacaccactgagctaaattctggtgatttaacaaagacaagattgttcttgcctttgtataaatctcctctgactttcactatactcatctatatgttctcaactgctctaggcaggacatgtagaatacatctctttctataggcagcactgccagtattaacctaggttcaggcccaggtccgtattttgttgttgtttttgttgttgtttggaaatcaagttttgtttttatatgaacagaagtagaccatctagaaatatttcagtttacctaaattgttaagtagaatatgaaacygaatttgtagctagtaccagagaatggacttaaactgtttggtgttcaatgagaacagcttctacacaggatcccaaaagacttacagaaaaggggcaaagctgtaatattaagcaaataaaactcatgtttcaaa

SEQ ID NO: 355616 - DNA, 451 bp, Homo sapiens
tgcatatttgtttttatataattttcactttattgttaatctctgtttacaattaaaatactaatgtcaatgatttaagataatagtcatatattttgtaacttcaaagatatgaaacttgaaaaagtacaaaattacacttaactacatggcattttatcatataattctttctatgaagatgtgttttattagtggtgaaagagtcaggttgacttctaagctctgcttaacttggttatttttagaaattaatcatccttgaaatgtttataacgcttgccaacctaggtaatttgtaatatctgcagtaatataactatgtttatagtcaaatacattatacagaaaaatctgtgtcatggtaatgatatatgaggttactgctaacacatccaacgccatccacattarccagtgggtactgagatttaaaataggtattttgtaa

SEQ ID NO: 355617 - DNA, 594 bp, Homo sapiens
ttttttgttttgggaatgtttcagattttctggaaggctatttgcctggagttacccacttaaattctcatctattttatgttgaatcatgcaccatttgtctaccctcatcacttcaaattctccaaccccctttttgtaagacagggtttcactctgtcacccaggctgtagtgcagtggcataatcagagcccactgtaacctcaacctcctgggctcaagcagtcctcccacctcagcctcccaagtggctaggaccacaggcatgcgccaccacacctggctaatttttaaaattttttcataaagatggagtcttgctctgttgcccaggctggtctcaaactctagacctccagcaatcctcctgccttgacctcccagagcactgggattacgggtgtgaagcactgtacccagcccccttttactcatgtatttgattcctcaaagtagttcattcattcagaatttttttraaaaaataatttttaatcattatggatatttaatagtgcacatttatggggtacatataatatttgatacaagcatacaatttgtaaggatcagttactccagggtaattagg

SEQ ID NO: 355618 - DNA, 618 bp, Homo sapiens
aggaggccttttagattagttacaaaagctggattgttggaatagctgtgatagcacagatgtattagaggttacaggctgttggcaggctttatgttgtccctctgcagacagataaaaaaccaccatgtcgatttttaaaagtaggtgtccaataataatcacatccaacataacrtaatcgatcattttgacatttgagcctgttaacatatttgctgtcttgttaaacagaatttaggcattcataaaaactaacggaaattaagatgtgatatggtttggctctgtggccccacccaaatctcatcttgaattgtatttctataattcccacaggttgtggggggggactttaaaacagattgagtttgttgtgtgtatgtgttgagaagggtggatgggtggcaaaaatatcttactaccattaaaaagcaaaacagttctcattcttctcagctgtcttcagaaatgccagttattatttacttaggagagggagctagaactccctaacaaaacagacctctgtcaatatgtggatcatttttgctcattttgcccacacattagttacaattggcagtatgattaaggtagagtgcctcattactatag

SEQ ID NO: 355619 - DNA, 621 bp, Homo sapiens
tggttatttgaaaggatgaacaaaattgatagatgccagctagattaacgaagaagaaaagatggaaaaaagcacaatgccaaagaaagacaaaagattatcaaagactattatgaaaatctctatgtgcacaaactagaaaacctagagaagtgggtaaattcttggaaacatacaatcttacaagactgaacaacaaggaaaaaaaatacaatcctgaacaggccaataattagttatgaaaatgaatcagtagtaaaaaaaactaccaacaagaagaatcccaggaccaggtggattcacacctgaattctaccagatgtacaaagaaaagttggtaccaatcttaatgaaactaatccaaagagttgaggagaaggtattcctctttaacacattctatgaaatcagtatcatcctaacaccaaaatctggcaatgacacaacaaatgaaaactacagaccaatatccctgatgaacacagatgcaaaaatcctcaacaaaatactagcaaaccaaatccaacaccctatccaaaaataatccatcacgatcaaatgggtctyattccaaggatgcaaggatggttagacatacacaattcagtaaatttgatttac

SEQ ID NO: 355620 - DNA, 551 bp, Homo sapiens
gttttctgttcctgtgttaattcacttaggatgatggcctccactggcatccatgttgctggaaaggacctgatttcattattttttatggctgcatagtattcttccatgctgtgtgtgtgtgcrtgtgtatatatatatatataattttatttatccagtctaccattgatgagcacttgggttgattccatgtctttgcaattataaatagtgctgcaatgtatatacaaatgcatatgtctttttggtagaataatttattttcctttgggtatatacccaataatgggaatactgggtagaataatagttctggttttagttctttgagaaatctccaacctgctttccacagcagctgaactgactagcatttccaccaacagtatgtaagcatcccttttactccatagccttgccaacacctgttattttttgtctttttaataatagccattctgactggtgtgagatggtatctcgttgaggttttgatttgcatttctctgatgatgagtgatattgagtgtcctttttgtgtttgttgg

SEQ ID NO: 355621 - DNA, 665 bp, Homo sapiens
tacaatgaaattgggaagcaacttctgcttataatgagctaaagcatatacagttaaaatccttgattccataacatttttgtatcaagcactttggtgcagataatttattcatggtatgttaatgtctttaccgatcaaatagtcagctttcttttgcataaaattgtgtgtgcacatgtgtgtgtgtgtgtgtgtgtaacatcactattctatatacaataactatctttaaaaactaaatgctaccatagcttaataataataaaataggaaggaccacctcaccaaaacttgaccatgttgtcagattaaaatcgggctatgaattttctgacttaataatggaaaattcattcgatttttctggtgcatttgactgttttgattttacgtaatttgaatagaggctcaaactatggctgaaattaagtttagatgtattgaactgaaaaattaccaaaaagctatgaatctttttttaaattacgtatcagatatatttytgaatggtgcttttttcaaggtttagtaaaaaattttttcatttatttctgtatatttaatcagggttttcacatgaactgaacaaaataactaactacataaataaataattttattaataaataagtaaagaaataaaatagggaggaggggatagc

SEQ ID NO: 355622 - DNA, 534 bp, Homo sapiens
tgacatagtatgatatttaattttaataataatgatcttgaatttacaaaaatttgtttttgttttttatcataagaagaatacaatatattttagataaaattcaaagaataaaaagtttactacttgggagagtaaattccagttatttggaaaattgtactatgtgtagaaacttaagacattattaataaatgaactactgaattaaccaattagttctaaataatataaaatgtatatttcttgggtaaatgatcatttctctgctcagatatstaacatggcttctgttaatcttgtgcataaaaatctagcttgccgtttccagagtttgctgtaatagtcgcccaataacatgtctacttggttcacatctattctcccagtggctgtattactttcctctctctttaacacatacttttttatgaggggtcttctcactttcctagcctagccacagtgattggtccaagggagggggcatgtgaccatggatagtctaatcagaatctttccctaggatttttt

SEQ ID NO: 355623 - DNA, 534 bp, Homo sapiens
tgacatagtatgatatttaattttaataataatgatcttgaatttacaaaaatttgtttttgttttttatcataagaagaatacaatatattttagataaaattcaaagaataaaaagtttactacttgggagagtaaattccagttatttggaaaattgtactatgtgtagaaacttaagacattattaataaatgaactactgaattaaccaattagttctaaataatataaaatgtatatttcttgggtaaatgatcatttctctgctcagatatctaacatggcttctgttaatcttgtgcataaaaatctagcttgccgtttccwgagtttgctgtaatagtcgcccaataacatgtctacttggttcacatctattctcccagtggctgtattactttcctctctctttaacacatacttttttatgaggggtcttctcactttcctagcctagccacagtgattggtccaagggagggggcatgtgaccatggatagtctaatcagaatctttccctaggatttttt

SEQ ID NO: 355624 - DNA, 534 bp, Homo sapiens
tgacatagtatgatatttaattttaataataatgatcttgaatttacaaaaatttgtttttgttttttatcataagaagaatacaatatattttagataaaattcaaagaataaaaagtttactacttgggagagtaaattccagttatttggaaaattgtactatgtgtagaaacttaagacattattaataaatgaactactgaattaaccaattagttctaaataatataaaatgtatatttcttgggtaaatgatcatttctctgctcagatatctaacatggcttctgttaatcttgtgcataaaaatctagcttgccgtttccagagtttgctgtaatagtcgcccaataasatgtctacttggttcacatctattctcccagtggctgtattactttcctctctctttaacacatacttttttatgaggggtcttctcactttcctagcctagccacagtgattggtccaagggagggggcatgtgaccatggatagtctaatcagaatctttccctaggatttttt

SEQ ID NO: 355625 - DNA, 556 bp, Homo sapiens
aagtgaggagggtataaccaaggacaattgcattgatggggatattcattaattatttcgggttgctaaatctagtctctttaacaagattggaagcctctccttgtgccttacaaagtattaaggactcattcaacacttaatgactgcttgtgaaatggtcaacacaaaacaatgtgggaactgatattaaaatggagatttgtgctaactaaatccaacattgttttggtgttgatgcactttacctattaagatgctactaagccaaaggaagatttaattaataataataataataataataataatgataaggctctttgtgaaggaaaatctggcttaatagacatgcttggatccaaccaactgyaggaaatcaaatagccagtctttggtgaaacaagacttttggctgatttgctcccttatattgtgttgctctaggaaggaagataataattatgagtattttggagaacagtacttatttgcgtcaggcagtgttctaagtacttcacatgctctagttcatttaatcctcataaggacccta

SEQ ID NO: 355626 - DNA, 619 bp, Homo sapiens
ctgggagctgccgactggagctgtttctattcagccatcttgccagatcccctaatgttgtttttatgcctgctaatagaacacccattctgcagcccatggatcaaagagtaatttagactttcaagttttatgatttataaaatgtattttgtaaggctgccacagacagtgattcccctgatggatctgggcaaagtaaattgaaaacaccttctagaaawgattcgtgatttttgatgccactaagaacattcatgattcaggagagaagatcaaaatagcaacattaactggagtttggaagaagtaatttaagccctcctagatgactttgaggggttcaggacttcaatggaagaagtaactgcaaatgaggtggaagtaggagacaactagaataagaagtagagcctgaagatggaactgaattgctacaatctcaggataaaactctaacagatgaggagttgcttcttatggatgagcaaagaaagaagttccttgagatggaagctactcctggtggagatgctgcgaacattgtcgaaatgacaacagaagatttagaatattccataaacttagttgataaagcaagagcaggttttgagaggat

SEQ ID NO: 355627 - DNA, 619 bp, Homo sapiens
ctgggagctgccgactggagctgtttctattcagccatcttgccagatcccctaatgttgtttttatgcctgctaatagaacacccattctgcagcccatggatcaaagagtaatttagactttcaagttttatgatttataaaatgtattttgtaaggctgccacagacagtgattcccctgatggatctgggcaaagtaaattgaaaacaccttctagaaaagattcgtgatttttgatgccactaagaacattcatgattcaggagagaagatcaaaatagcaacattaactggagtttggaagaagtaatttaagccctcctagatgactttgaggggttcaggacttcaatggaagaagtaactgcaaatgaggtggaagtaggagacaactagaataagaagtagagcctgaagatggaactgaattgctacaatctcaggataaaactctaacagatgaggagttgcttcttatggatgagcaaagaaagmagttccttgagatggaagctactcctggtggagatgctgcgaacattgtcgaaatgacaacagaagatttagaatattccataaacttagttgataaagcaagagcaggttttgagaggat

SEQ ID NO: 355628 - DNA, 542 bp, Homo sapiens
attaagtctttgcctgtgcctatgtcccgaatggtattgcctagattttcttatagggtttttatagttttgggttttacatttaagtctttaatccatcttggggtagtttttgtataaggtgtaaggaaggggtccagtttcaattttatgcatatggmtagccagctttcccagcaccacttattaaatagggaatcctttccccattgcttgtttttgtcaggtttgttgaagatcaaatggttgtagatttgtggtctatgccttaatccaggacgggtgctaaactattgtgggacaactgtaaggctgttcttttcttcatttccacacctaagaactatggattttaacaatccatagtgatcagacttatttatgtgatgccctttgttaaaggatagcaacatgtcctttaccaaaaaatcaaaagcaaaaacatataaaaccaccaccaccaaggattcaaaagtaaaagaccacctgaagggacttacttcaaaataatcaaattggcagagtgagaggccattgtgaat

SEQ ID NO: 355629 - DNA, 542 bp, Homo sapiens
attaagtctttgcctgtgcctatgtcccgaatggtattgcctagattttcttatagggtttttatagttttgggttttacatttaagtctttaatccatcttggggtagtttttgtataaggtgtaaggaaggggtccagtttcaattttatgcatatggatagccagctttcccagcaccacttattaaatagggaatcctttccccattgcttgtttttgtcaggtttgttgaagatcaaatggttgtagatttgtggtctatgccttaatccaggacgggtgctaaactattgtgggacaactgtaaggctgttcttttcttcatttccacacctaagaactatggattttaacaayccatagtgatcagacttatttatgtgatgccctttgttaaaggatagcaacatgtcctttaccaaaaaatcaaaagcaaaaacatataaaaccaccaccaccaaggattcaaaagtaaaagaccacctgaagggacttacttcaaaataatcaaattggcagagtgagaggccattgtgaat

SEQ ID NO: 355630 - DNA, 661 bp, Homo sapiens
ggcaaatccttcccccagttcctcattggtcgagtattatggggttacaatcttcccagacgttgcctaagcttaattattccccttataaggtcataccccagtcccttttcccacttaagtttcgacttcccaataactaaactttcttcccttttatgggctgacccctcctctaaattacgttcatttatcatggctttctagaagaatgagctgtgtggcttgttacatctgcaggctggctcccagtgcttagatttatcatgcctgaaaatggaccatttaaaatgccttctcacaggactcacctaagagttgcagtccctatgacagattrcctttcaagtttacttggagacacagagtgcttgcagcaatggaggtgaggtttgaaggctctcaagtttggaccactaggattggtaattcccctctggctagggctagtttaaatgctccctttgtgggcatgggtgggtgacagctaaatttgggccagttttcctctctgttctaacaggacagcactgagttcaatgcctcacaattgctgcattctccctccctcagtgcccagaggcactccccacagctgctaatgccttggatggaggacgggtggcatccatgatccaggactttttttctatctcttcgg

SEQ ID NO: 355631 - DNA, 547 bp, Homo sapiens
tccattatttataatttcatatttaaaatctagtacattgaatccaattctttttctacctcctagcctttccagtctttttttttttccaatgataagacccgtcagtttattcaacttttcatcgtgtatgttgtgcttttgcatgtttgtctccactctggtagattttctcaggagacaatctgaatttatctttctgggttttcagcatcccacttaaagaaggctagccataacttaacacaactctctgaccagtataaattgtgtcttagtcccaatattctagatctcagaattctatgacagtggccatgtctcatttaaaacaaagatgatacaacgggttcaccaaatcccattacctttttctctccttkgcacatagctagactacatttctgattcctctgcagttagttgggaccatgcaatggagttctggccaatggaacatatgtggaagtcatatatccacttctaggtctggcctaaagttcctgaaactattctcatgagattctttgtgtactctttctcatcc

SEQ ID NO: 355632 - DNA, 563 bp, Homo sapiens
ggggattacaattcaacaggagattttggcagggacaaatattcaaactttgttacccaccaacttctagccctcaatgactgtaggctagtctgtgggcattaaatctctagcagacttctatctgagcatattctcrtgtctttagacaaaaagccatcagcttgtggagtactgtctgtagaaggactttgtgaagggagatgtctaagggaatacagcttagacgtttgctacagagcatgtggaattttctgttttcctaaattcaatctaaatagacattctaagacattaaaatcctaccattcatggtatccataaggaattttacctacgtatcaatgtgtttatgtatctgcctacttacattaattggtgaatatatacttaatacgttgtttccacagttttaaacaatgagcattaaatataagctaaaacatcttcccatttaacagtcgtgtatagctcacaaatggaattgattctttttccatttctgattgcttaatacatatttttcctggaataagctttactcacatgagtaaaataaccca

SEQ ID NO: 355633 - DNA, 582 bp, Homo sapiens
catccccctctgatccctttaccgggttagtatatgcttgccccagcacctgcatgcctttgtactttctttcctctttgcgggacaccagaaagctctaaatgctggaaacaaatgtctctatcacacaacctacagaataactggtgtgrgagtagagaagtttagcttccttgtgtttaactgggaaaaacattggaggataatttattttcctgatatcctgggtgggaagaagttgaggtcggtactaaaattgcattcttgctggatcctaccatttctttgtattgcatgccccactcccttactcatttgtttctggaattgcttctttaacaaattacttgcacatggaatcctcattggagtgactatttccaggatactcatcttgagaggggtatggagattgaaggttttgaaaaaattaactaaaaaagggaaaaataggttatatcccttgactcactttattctaaactccaagaaatgcctcctactgatatattttacttcagtaaaaacaaattacctcctgttggaatttaaagtaaaagataagcaaaagcaaaggtgaat

SEQ ID NO: 355634 - DNA, 589 bp, Homo sapiens
cgtaaattgcctagtttagtgcctaccacattacaggagcttcataaaattagttcatgccattttcccaactagggattagtcaagtacttagggacaaatacaatatggaacctcaacaaaaatattactaagcatcaaccatatatgtggtagcttttttggtgggaattgataaaaagaaagagacagataatataaaatttttaaaaaggtggtatcctaacctaaggaacttacaaygtagtaggaagagggacacatgattaaggcaaattaaaccagcctagaaaaatagcatactatgggagaaatattggttttggtttagaagatattgccttgaatcccaggtccattaatggtgaatttatccactgtcaaatgtaattgttattaataacacaactggcaacattgtgaatattaaatgaggatgagttgttggagagtttttggtacattgcaaaattgtctataaatcaggttcattatatttacgagacatgttgaatatccttttcattgtactcccattgcatttcctttactatatattagtacttatctcacatgatcacatcaaaca

SEQ ID NO: 355635 - DNA, 572 bp, Homo sapiens
aatataaggaaactagctcctgagggaacagaatctactgaacattggttggstgtacagtgatcaattcatttacaatgtctaatatacccaaagtcctaagataaactgtcctgcccatacatcccttctgtgagcattggtcttagtacctggagaaggactggccatattctgcatcatatgactcactgcctctactgattagaattcactgggtaaggccaggcatttcacttaatgtacaccaaagtttagtctggcctgtgggttgtgagatatccttgtggccaaagctaaagaaagaccaaacataatgatttgagagttcttcctaaagtctccattagggaaactgtgaacttgaaaataaatgaacaagtaattaggtacaaggaagagaagctataagaaagatactatagagatacatggacagagtcaaagaatgctgctaagagatattaagagaagaaagaataaaagagctcttgctattaaataggcagtaagttcccagagccatgtgatagactgaattattgttcagtgtatattccaccctgtcactc

SEQ ID NO: 355636 - DNA, 572 bp, Homo sapiens
aatataaggaaactagctcctgagggaacagaatctactgaacattggttggctgtacagtgatcaattcatttacaatgtctaatatacccaaagtcctaagataaactgtcctgcccatacatcccttctgtgagcattggtcttagtacctggagaaggactggccatattctgcatcatatgactcactgcctctactgattagaattcactgggtaaggccaggcatttcacttaatgtacaccaawgtttagtctggcctgtgggttgtgagatatccttgtggccaaagctaaagaaagaccaaacataatgatttgagagttcttcctaaagtctccattagggaaactgtgaacttgaaaataaatgaacaagtaattaggtacaaggaagagaagctataagaaagatactatagagatacatggacagagtcaaagaatgctgctaagagatattaagagaagaaagaataaaagagctcttgctattaaataggcagtaagttcccagagccatgtgatagactgaattattgttcagtgtatattccaccctgtcactc

SEQ ID NO: 355637 - DNA, 572 bp, Homo sapiens
aatataaggaaactagctcctgagggaacagaatctactgaacattggttggctgtacagtgatcaattcatttacaatgtctaatatacccaaagtcctaagataaactgtcctgcccatacatcccttctgtgagcattggtcttagtacctggagaaggactggccatattctgcatcatatgactcactgcctctactgattagaattcactgggtaaggccaggcatttcacttaatgtacaccaaagtttagtctggcctgtgggttgtgagatatccttgtggccaaagctaaagaaagaccaaacataatgatttgagagttcttcctaaagtctccattagggaaactgtgaacttgaaaataaatgaacaagtaattaggtacaaggaagagaagctataagaaagatactatagagatacatggacagagtcaaagaatgctgctaagagatattaagagaaraaagaataaaagagctcttgctattaaataggcagtaagttcccagagccatgtgatagactgaattattgttcagtgtatattccaccctgtcactc

SEQ ID NO: 355638 - DNA, 587 bp, Homo sapiens
ctataaattttcctcttagtaatgcttttgctgtatcacacaggattgggtatgttgtgtttctattatttgtttcaaaaatttgtcaatttattttttaaatttctttattaatccacttgccattcagaagcacactgtttaattaccatgtgtttctatggttctcaaaattcgtgttattgatttatagttttaatcaattgtggtcagagaagatgcttcatattaaggtttttttttaatgttttaagatttgttttgtggcctaacatatggtctatccttgagactgaccatgtgttgaggagaagaaagtgtattctggagcagatgaataaaatgttcagtaaatatctgttaggtccacttgttctatagttcagactaagtcccatgtttccttgttgagttttctgtcttgaagatctgtccaatgttgaaagtagggtgttgaagtttccagctgctattgcaytggggcctatctctctctttagctttaataatatttgtgaaatatatcacattgctttaacattgagtgcacatatatttacaatcattaaatccacaagctgaattga

SEQ ID NO: 355639 - DNA, 569 bp, Homo sapiens
tctttcccgtgaaacaacttttaaaaaaagaagaaaaatatacgaaatcacagtgttcaagacactaaatagaaatcagtgaaagacccagaattkcaagagatgagaaacacaggagataaactctccaatagaccagcttattgacttaagaaagtttctagggcatgttgtagtgaggtagaacctagatatagcagcataataatggccctccaaagatgtacatgtcctaatcccctttacctgtggatatgctaccttacatgggaaaggaacttcacagatgctgattaagaatcttgaaatggagagataatcctggatatctagatctaatcgcatgagtctttaaaataaaagaaactttcccagctcagtttagagttagaaggacatgtggctgttgaaaaatgattagagagatgcaacattgttgacttggaagatggaagaaggggacacaagccatggaatttaggcatcctcccagtgctggataagtcaaggaaatgaactctcccctagagcatgcagagaggaactcagccctgctgactccgtggttt

SEQ ID NO: 355640 - DNA, 597 bp, Homo sapiens
caagtattcctggattgcaattcttctgcttattccaaaataaacgcatctttggagaatctctttctgttgttatttttggttggcactacttagagatggtataacatcccacaggttgagggctctgtcccagatgacttctccccaattcagatgccaaccacacttcccaggttgtgacctatacatccgactgactggctataaattggggtttctatgactcccttcttgggtttcattaatttgctasagtggctcaaataactccagaaaacactttacttatattcacccatttattataaaggatattgcaaagggtacagctagatggaagagatgcatagggcaaggtatggaggagggaacacaagctgtgcgctgtctgggcaccccatcccgcaggaacctccacgtgttcagtaatctggatcccaaacccagtccttttgggttcttatggaggcttaagtagacatgattgatggggctgaaagtcttaactctaatcatgctttgggcttttaggtgaccagtttccattttaaaactatctaggggccaaagcaaccagtcattttgttagcaaac

SEQ ID NO: 355641 - DNA, 597 bp, Homo sapiens
caagtattcctggattgcaattcttctgcttattccaaaataaacgcatctttggagaatctctttctgttgttatttttggttggcactacttagagatggtataacatcccacaggttgagggctctgtcccagatgacttctccccaattcagatgccaaccacacttcccaggttgtgacctatacatccgactgactggctataaattggggtttctatgactcccttcttgggtttcattaatttgctacagtggctcaaataactccagaaaacactttacttatattcamccatttattataaaggatattgcaaagggtacagctagatggaagagatgcatagggcaaggtatggaggagggaacacaagctgtgcgctgtctgggcaccccatcccgcaggaacctccacgtgttcagtaatctggatcccaaacccagtccttttgggttcttatggaggcttaagtagacatgattgatggggctgaaagtcttaactctaatcatgctttgggcttttaggtgaccagtttccattttaaaactatctaggggccaaagcaaccagtcattttgttagcaaac

SEQ ID NO: 355642 - DNA, 620 bp, Homo sapiens
accaatcctactcaaactactccaaaaaatacagtaggaggaaatatttccaaactcatgctatgagaccagcattaccctaataccaaaatcaaagacatatcaaaattagaaaactagaggccaatatctctgttgaatatggacgcaaaaatcctcaacaaaatactagcaaaccaaattcaacaatacattagaaagttcatttatcatgaccaaacagaatttatctatgtgatgcaaggattgttcaacatacacaaatcaatcaacatgatacttatatcaacagaattaaggattaaaatcatatgattatttcaataaatgctgaaaaagcatttgagaaaattaacatctctctatgataaaaatcctcaaaaaccaggggatggaagaaacatacctcaatataacaaaagctttataggacagatcaacagctagtattatactgaatggggaaaaactgaaagcttttcctctaagatctggaacatgactaggatgcccacygttaccactgtcacttaacatagtactggaagtcctagctagagcaatcagacaaaagaaatgtataaagggcatccaaattagaaaggaagaagtcaaattat

SEQ ID NO: 355643 - DNA, 544 bp, Homo sapiens
gatatatggtgaatttctcacttatatcctgattttttctgatttatgtgtattgtttatttatgttcttttgtattgcattttccttaatattgttattttgaattttttctatatttaaaatttttttctgtattttttctatattttataagtttatttttatttgaaatctattcctggataattattgtgttactttacaggttctttttttcaaactttttaatgtttcttgtgtttttactttgatatctgaacatctggtgtgatagttgctccttccaatttttttggattagcttttgtaggggagggctttttcctaaatttggttggatttggttaggtagggcattttggcttttattctgggtatgtgctgtagtatagtctctgtatacattttttttggctataaacacgattgttttgtgatttayttttggtttgggctgtgattattagtgcaaggctgtgtatgtagatggtggggcagtcttcaggccccagtggtggcagtggtggaccacacctgcctgtt

SEQ ID NO: 355644 - DNA, 490 bp, Homo sapiens
gcaaggtcactagtcattctccctgttcctttttacccttcaaagtcttcatatgtttgttttatatacaatatccagcatttcccattatgattagcagaaataataagaaaaatgtatctactccatcttccccaaagcagaagttttgcagcagaatttaaaaaaaaaattaatgaaagaatgtgagaaccaaagaatttatatccaaccaagtatgcttccatcctttactaaacatgcctttcaactcattcaatgtatttttaatcatacacattgcagttatcatctctaaaaggttgattcagatattttatatcttccatgtctttactgaagatattccagtttttctcttcctttttgaacayaggaaatacagttataagaactcttttgtgtctgcggctcccaattctttcatttgtgtcagtttgtggtcacttttgatttatcttcctcctcataatgggaagcattttcatat

SEQ ID NO: 355645 - DNA, 581 bp, Homo sapiens
tggtggctaatagtttagggctgatggtcagaaacttggaagaagtacagtgggaaaactagtgaaaagatctgagaaagaagtatgtaaatgggcctttcaaatagtcacagattttgaaggtatttgtgcccttgtgaattctcatcaaaaaaacaacttctgcagtagaaggtaataagatggatagaattactcactctgataacatctgtcaacctgttttcttggctaagctgtttattatgagcccgaggactcatgataaaatggttgtcttgacaaagatgaaggttttgcacggacttagcagtacagacttccactcatcaaggctgatatagcttcaggcacaactatgcgtaccatatgacaacagcagaaaccaatcttaccccctgatgtggcaccagtccccaggaaatcagccactcacctggtgtcagattaattacataggactgcttccatcaagaaatgtgcaaacttttgtcctcactggaatacatgcttactctggaatgtgtcttccctkcccacagcccacaatgtttctgccaaagcagttgtctgtagactca

SEQ ID NO: 355646 - DNA, 596 bp, Homo sapiens
gtgggaaaactagtgaaaagatctgagaaagaagtatgtaaatgggcctttcaaatagtcacagattttgaaggtatttgtgcccttgtgaattctcatcaaaaaaacaacttctgcagtagaaggtaataagatggatagaattactcactctgataacatctgtcaacctgttttcttggctaagctgtttattatgagcccgaggactcatgataaaatggttgtcttgacaaagatgaaggttttgcacggacttagcagtacagacttccactcatcaaggctgatatagcttcaggcacaactatgcgtaccatatgacaacagcagaaaccaatcttaccccctgatgtggcaccagtccccaggaaatcagccactcacctggtgtcagattaattacataggactgcttccatcaagaaatgtgcaaacttttgtcctcactggaatacatgcttactctggaatgtgtcttcccttcccacagcccacaatgtttctgccaaagcagttrtctgtagactcagggaatcccttatttactatcatattttttcatatagcattgattctaaccaaaaaattcaccc

SEQ ID NO: 355647 - DNA, 582 bp, Homo sapiens
atagttatatgcatctatttctattaatatgaatacatttatgcatatatcaactagtttttcattttctcctctcccacttctctatcatctgacataaaatatgttaatagaatttaactttgtatctcagtatttaaattataaaatatcaaagggagaatatgactcagaagaagaataaatatcactcaaaaatagataaaaggactttgcatcctctgttgaggagaaggttgtctatttcagtattcaagaagaataattgcattatgtttggcaaaggcctaatttttctgttgcctttatttggaaattaatttaacaatatttgaaaaaaatatgcatgtggatgccaaataggcaaggagtagcctatggaggatttgtattgggtcatctttactaagctggagttatatttcccagaatttctcattctatattgttctggctcaatgtgggtcacaagagactatttgcctgagttttggaaagcaaaagagccatggaagccatattattttatgctccaayggtcaagacaataaaagcagacactgctgcagctctcacacattg

SEQ ID NO: 355648 - DNA, 430 bp, Homo sapiens
acagagatggaattcagaattttgtcagataaatttaagaaagagattgaaataattaaaaggaatcaagcagaaattctggagctgaaaaatgcaattggcatactgaagaatgcatcagagtttttaaatagaagaacagatcaagcagcagaaaaatctagtgagcctgaagacagactatttgaaaatacacagaggtctcaaaagaaaaagaataaaaaacaataaagcatgcctacgggaattagaaaatagcctcaaaagaacaaatctatgagttattggccttaaaaagaaggtagaaaaagagataggtgtagaaagtttwttcaaaggaataacagagaactttccaagtctagagaaagatatcaatatacaagttgttctacaacctacaagaaggttatagaacactaaacagatt

SEQ ID NO: 355649 - DNA, 430 bp, Homo sapiens
acagagatggaattcagaattttgtcagataaatttaagaaagagattgaaataattaaaaggaatcaagcagaaattctggagctgaaaaatgcaattggcatactgaagaatgcatcagagtttttaaatagaagaacagatcaagcagcagaaaaatctagtgagcctgaagacagactatttgaaaatacacagaggtctcaaaagaaaaagaataaaaaacaataaagcatgcctacgggaattagaaaatagcctcaaaagaacaaatctatgagttattggccttaaaaagaaggtagaaaaagagataggtgtagaaagtttattcaaaggaataacagagaactttccaagtctagagaaagrtatcaatatacaagttgttctacaacctacaagaaggttatagaacactaaacagatt

SEQ ID NO: 355650 - DNA, 638 bp, Homo sapiens
ttacactggagctccaatatgttgggcagctggtttttaagtagaaaccttacaggccaggagaaagtggcatgacatatttaaaaagcaggaggaaaaatcttttaccctaaatggtaaatccaggaaaatatccttcacacaaggaggataaataaagactttccaagacaaacaaaacttgaggaatttcatcaagaccagagcttsaggagcctcaacccatagccaccgccacccctggccactaggagtactgccagactaccaccaatgttcccttaaggcaccaggactcataaatcagcttgtggtgaatgttccctggactaggattcacacttcagggcagtgggcttctgtctggccaggagcagatccagaaatgctgtccaagagtcaagtcgtggaatcagggaccccaagaacccacttggtgctttgtccttctgtggccctgctggcacctaaggtgcaagacaaatctccctttaagagaaaaggctaaagtctctaaggaagaaggaattctgcctccagactgccttcagactgcagctgcaacagcaactcttccctgggtctccagtccactgtcctgcgctgtatgttttagacttggtagcccttataattgc

SEQ ID NO: 355651 - DNA, 569 bp, Homo sapiens
atttagaatgtttatccaagtagcattaatggattgaacattaaacagatggacttcaggagtttctttaacagagtgttgcaatagtccatggaatagattagggcctaaattaagttagtagcaactgaagttgaaaatttaatgtaagcagatgtggtagcataaaaataaaaacactaaccaagatctctggatttttgaaataaatgtgaataagaactttatttaaaaatttttttagtactacggaatgatatgagcaagcatagtgtctttaactcatatgatatataaattaaggatttttttggcaagtctygatctttttttctttctttaataatcttttctctctgaacagtgaaaagtgactttatttttgcttgtttgttttttattatcttgaagcttcaggctagtaattttgaactcttagtaacaagtgtacaataatagtaatcaatatgaaagacacatacttaggagacagctgcagtgagggcccagaatactgaagtagaagtcaaaagagaggtaattctctccttcttcctctgccttgctgt

SEQ ID NO: 355652 - DNA, 323 bp, Homo sapiens
gccagtcatttttgatacattcatgtttcaattattaaacacccaaccccatccccataacccctccctaccctgttttttcttttcacacagcttctgtgtcttttgattacctggaaatcttcaagtaacagaatttcagtgaaagtgctagagatcacttcaccacagtatctttatgagtcttttaatgccattttcatgaaarcacttgggcagggccttctgaagatgacacagaaagcaggccagtctttcttgtgtagcccagtgaaaacactcttttactcagcacagcttgacctacattttctgatgcgccc

SEQ ID NO: 355653 - DNA, 555 bp, Homo sapiens
tcccataggttttctgtcttacatcatgacttctgcctccaaattcttccattcaatttacttttatgaaattgaatggaattcaatttcccatgattcacctgcctgtatttcttgcttagagatatgaacctagtacttctagatagctttataattataatataaaattcttgaaaactagaagtatgtcttgtgctttaaaaacctagcacctgattccatttttgcaacactatgaacacatataatgtraatatttcctagtgacaatttattgagcaccttctattatggtggtgatatagtcactctacacaggtcatttgattaaatgctagaaacaactctgcaaggtgagtacaataatcaccattttgcagatgaacaaatggtaagggaaagaaaaagcagtgaaaatttcaccttagctctgagaaaaagaagtatcacaaattttgtttaaatcaaattgagctgcgtcagcaagtaggaaattgcattttaatcatttctggacttccctcctccaattccacttccaggtgacacaga

SEQ ID NO: 355654 - DNA, 652 bp, Homo sapiens
ctatgttcattagatgatcaattcaattaattctgtttaattatagttactgaataagtgcacagttaagcactattgtttgaaatttgaatagtctttccatatcaacagtaattaattactgatgcattaactatacagtatctattctagtggtttctgctaccactatataaatttgaaataaatactatttcaaattaacttatgatagtctctccctacactaacaagatttcattttatcataactgttatatcaaggtcaatattcacttaatgctacttctacctttgttatttttgtttttcagaggcagggtctcactttgttgcctggagtgcagtggctattcacgaatcattgcacactagagctttgaactcctgggctcaaawgatccttctgcctcagcctctcaagtagctgggactacaggagtgctccaagcccccctacactaccttcctgtcctaactgaaatttagctttctcctgatttcttcccttgaagcccatttcagtgacagccacttccttctactagtcttaaacctgcaagagagtcaccattttcttcttccagagtacagcttccagtcttttcttaaaacaaacaaaaaacactctgaatgatttgtactgatcttt

SEQ ID NO: 355655 - DNA, 526 bp, Homo sapiens
aatttttgcctgtgattggatttaagtcctccttttgttctctagggcatattctgtctgtcctcctctcttctttctcttttcttctccactagagtatttttgctcctaaaagcaatacttctcataaagttactaccctattgagctaccagccactacccatctttctttctctgctgaattttccactggctggtttacaatcactgctcagtttttctacctgctatgtgtaatctgacctccatctttcatctactwaaactattctcccatttataccttttggcttaattgccaaaattaacaacttcaattattgtccttgcactaagaagctctctctctcttgctctctctctctctttttttcttttttggaaactttcttctccatttattaattatattgcattctcaagttccatttactcctactccaccctggccctgaattttctagtcatgcctcagtacaccaggttggagggacttgctgctctgtggccatggactaacaata

SEQ ID NO: 355656 - DNA, 331 bp, Homo sapiens
caaaaactatgaacatgatgttatttatattctcatctttcaaattgtatttattttttactttttgtgagaaaggggctcactctgttgcctgggctggtcttaaaatcctagcctcaagcagtcctcccatgtcagcctcccaaagtgttgggatcacagttgtgagccattgcactcagcttccattttataaataagtaaaatgatattctaggtatatatacgatttgttcaagaccarcatctgactccttacactttgcctgtgcagctttagctttctaaagcacagatggagtctcctcttcacaaaacaatgttaatgtct

SEQ ID NO: 355657 - DNA, 366 bp, Homo sapiens
tttcaccagaccttcagagggtgaaatagtttttcyttggccccaacaatggtcaaaatcaaacccaagttttatactttgtccttttctttcctaaataccactccctggactggtgctagcctggtttctaccaagactcacctgggaagtgtcataaaaatgcctgtgtcacacacaggctccagaaaatccaattcagtgtttggagtaaaatctgggaagctgtgttgcttttttaaaaaaaaaaagtaaatcaaaaaataaaattctaaggcccccgcccccaaccaacagaatggacccctcctctcagccaagggcatttcaaagttaacctgaaaaaactagttcaggccacgatgg

SEQ ID NO: 355658 - DNA, 517 bp, Homo sapiens
atctgacctgcattctgactttgctgtgaatcattaaagttggaatgtttttgaattttagtacattttgtggcattaactttcctacccacaaacgaagagccttcaaactacctagatgagatcaaacgtcgatgacatttatatttttytaggagtcaggaagaaaaatataatcccacaacgttaaatgcctttcaaggaaaaaaagtgagcacgtggctggatgtttgacgtgaaagacagaaaaatcttctgtctctgtttagtgttcccaaacgtcaggcattcttctttttttttttttttttttttttttacttttttctctttcccctggctctctgaattataattagggacctggtgaacagatctgaccctcacttgggctcatttttattaatatataaagtctaatggaggactgttctgcttcttcacaaatgattgattctaattctttggtgttcctgacacaaatctgtggggtgttgccaattgtcttacaaacagc

SEQ ID NO: 355659 - DNA, 517 bp, Homo sapiens
atctgacctgcattctgactttgctgtgaatcattaaagttggaatgtttttgaattttagtacattttgtggcattaactttcctacccacaaacgaagagccttcaaactacctagatgagatcaaacgtcgatgacatttatatttttctaggagtcaggaagaaaaatataatcccmcaacgttaaatgcctttcaaggaaaaaaagtgagcacgtggctggatgtttgacgtgaaagacagaaaaatcttctgtctctgtttagtgttcccaaacgtcaggcattcttctttttttttttttttttttttttttacttttttctctttcccctggctctctgaattataattagggacctggtgaacagatctgaccctcacttgggctcatttttattaatatataaagtctaatggaggactgttctgcttcttcacaaatgattgattctaattctttggtgttcctgacacaaatctgtggggtgttgccaattgtcttacaaacagc

SEQ ID NO: 355660 - DNA, 517 bp, Homo sapiens
atctgacctgcattctgactttgctgtgaatcattaaagttggaatgtttttgaattttagtacattttgtggcattaactttcctacccacaaacgaagagccttcaaactacctagatgagatcaaacgtcgatgacatttatatttttctaggagtcaggaagaaaaatataatcccacaacgttaaatgcctttcaaggaaaaaaagtgagcacgtggctggatgtttgacgtgaaagacagaaaaatcttctgtctctgtttagtgttcccaaacgtcaggcattcttctttttttttttttttttttttttttacttttttctctttcccctggctctctgaattataattagggacctggtgaacagatctgaccctcacttgkgctcatttttattaatatataaagtctaatggaggactgttctgcttcttcacaaatgattgattctaattctttggtgttcctgacacaaatctgtggggtgttgccaattgtcttacaaacagc

SEQ ID NO: 355661 - DNA, 550 bp, Homo sapiens
agaattgtctagcatgactggaaataactgatcagggcaggcctcccacatcaacatttacctcattccttctgtttagagaactgattaggggtggggtagaatattctaaagaatactctttattttaattttaatttaatttaatattattttatttgagatggagtcacacwctgttacccaggctagagtgcagtggcacaatctctgctcactacagcctctgcttcccaggttcaagtgattctcttgcctcagcctcccaagtagctgggattacaggcatgcaccaccacgcctggctaatttttgtatgtttagtagaaacagtgtttcaccatgttggccaggctggtctcaaactcctgacctcaggtgatccacccacctcggccacccaaagtgctgagattacaagaatactctttaggagagcaatgttcaagatgacttgggcacccaacacttaactactcctcctacaagtagacccagcacttaactattactcctagagactaggaacaagagtggggatttttgtgta

SEQ ID NO: 355662 - DNA, 550 bp, Homo sapiens
agaattgtctagcatgactggaaataactgatcagggcaggcctcccacatcaacatttacctcattccttctgtttagagaactgattaggggtggggtagaatattctaaagaatactctttattttaattttaatttaatttaatattattttatttgagatggagtcacactctgttacccaggctagagtgcagtggcacaatctctgctcactacagcctytgcttcccaggttcaagtgattctcttgcctcagcctcccaagtagctgggattacaggcatgcaccaccacgcctggctaatttttgtatgtttagtagaaacagtgtttcaccatgttggccaggctggtctcaaactcctgacctcaggtgatccacccacctcggccacccaaagtgctgagattacaagaatactctttaggagagcaatgttcaagatgacttgggcacccaacacttaactactcctcctacaagtagacccagcacttaactattactcctagagactaggaacaagagtggggatttttgtgta

SEQ ID NO: 355663 - DNA, 503 bp, Homo sapiens
aatgctagttgttccttgccacactaagtgttgttagtattgttgatgataaactgcctgattgtcagggttatggcgcctagagggatgtgacttggtacatactgccagagggttacatgtcaggcatggggaagaatagctaaggaatgggagggggagcttccttgactctcaagtggtcttgctgaaaaaagcaagtgcatcattcttgctttttttcaggtgtgccccatgaaatggacaggcaccgagctatgcytgagatattgccatatctactaatgcagtggctgcttgtctgagcttattctttgctgttttgtgtcagataaagctgaataaactgatgttgatcacttactgtggtctttcattcttttgtgaattctgaacccagaaccaactgataatgagtcagtggttgtgtacaatgctgtattcataaaagtaagttccattctcttatgtaaatttataatttgttttctctttcagttaag

SEQ ID NO: 355664 - DNA, 593 bp, Homo sapiens
ggcacctcatgcacctgacctcaccatcctgtaatcccaacactttgggaggccaaggcaggagaattrcttgagcccaagagtcaagaccatcgggaaatatggtctctacaaaatatttaaaagtaaataaaagagaagactgtgagtcacttgaataccagagcaaaaggagtagatattagagagctgctaaaaattttgagacaagataaaagcaatgttaggaaaattaacttgtggttgctactcggaaagatgagagagacaaaagttcagagccagtgagatgccagattaggatccaactttgtggaccatgatgagaaaattaagacccagattggtaaaagtatggatgtgtgaacaaatttaaagtttgggtcaatacaatatggaaacaaatccaattctggtctagttcagtagtttctttcttttagttgattaagtttttagttgattttttctaaaagcaagtaattctctttttttcacactaatgtagaactcaacttttccttttctcaaagcccaactttttttgtgcacaaacaaatcaatactcaaataagagttatacacttaagaga

SEQ ID NO: 355665 - DNA, 597 bp, Homo sapiens
gacatgagtgaagtaggctctatgagccagcaggtgtgtgcacaatggtacagagaggaagaccaaagttcagctagcccctgtagcctgctagctcctgtcttcctkcccagccaactttcactcaactgcacaatagaaactgagggaagggcatggtggaggatgtttttgatctcttggaagttccatttctgccctctcactcattgcgacttgaacaggtcattgcctcctgcttgtcctccttcatttttctttagtgtaaatccttgctctaaactcatcccattttttaaaagctcagtggatacaggacactcaacaaattgtcagtggctcctcatgacctaccaataaattccaaactctttagctagacaatctaagaactttctaacccataagctatttatattctgctttgtattggggctatttctgcagaaatcttatctttactactcaattgttagcttcttcaggggagggattgggagttatctagcatttatcagagagcttgtcttataacaagcacttaatatattttttgactctgtgttaagataaagcattgaacagctccaagacatg

SEQ ID NO: 355666 - DNA, 585 bp, Homo sapiens
agagaggaaaaaagtgtctatattacacacacgcagagccatctttagttactcatagagcataggaacaatttcttagactgcttcaggctgtcaaggtatggatcccccaaggaatagttttgaagtgaagggagctttcactaatggcaaagccagccaagaatttcccatgtgaaaatttatcagtaatcaccacaatttggcaacatygcagaagtaaagacttttgtcttaccctatcacaaaatcaagctcaccaggtttgtgacagtcttggtatagtctaaaccctggatacccaaagctcaggtagcttaacaatggagagacattctgtctcaccaagtgagacttttattgctttgaggagagattgcaagtgctgagagagaaggaggagggtcatgggtgcaataagaagctctactttctaccctaaggcttttttccattcaggttttgcaggtatcttgctgaaagcagttccatttcctcttgcaccttcctcctaactgcccctgagatctctgctggcaaaagatggagtggcaaaagagggagtggctctaaatagcccagaca

SEQ ID NO: 355667 - DNA, 487 bp, Homo sapiens
ctgtaactataaacccagccatagtgaccttgtacctcttggttatgatcagccttgccagtaagcaaaggaaatggctgctttcacagcaacaagtggaaggcttgagcagacccttcggtgaggaaacgttgcccctttacctacatctgcctgaaattcattcaatacttagatgatcttaaagatcatctgacaaatcatccaaatagagaagcagagtcccaaagagatgagggaayttgccctagattatccagcaaattagcagcagagtaaacacagaaccaagttctcaccaccttagtccagcccactttccaggagtccacactcgaatccccagttacttagtagcatccagcatggattggtggagctcataagccacctccctgggctggacactagagggaaaggtgagtcagaagtgatctccacccaatatgttctctcggtctagacagagatacttaaaacaaagaca

SEQ ID NO: 355668 - DNA, 564 bp, Homo sapiens
tcttttttttttagccattcttttaacctactcttcctgctctttctctttcctgttctttctttccaatttttaaacatccaagttacctttttttttttcttttcccactcacatttccttatgtcactttcttgttctggaatatggctctcgctgtggtatacagtattaaatatgtcttaacaagaagagaatacaaggaggagagtttaaaacccacaaactgtgatttatgcataggattgatatactgactacaaagcgatggttgaaaaaattgagtcaagttggagtcatttttactaatgaggaagtgtccatggccacaaagtcagcttaraaaatacagggatctcatgctattcctctgccccttgcccactgcagacataactaatccatcatggtattccttttcatttgacactagaatcagccttaagtcccttttctttgcatccctttaagtagccactaacagtagcctgtctgtcatgcatgatgaaacattttgccattctggacccaaactctgcagtaggctaaagctagaggagttag

SEQ ID NO: 355669 - DNA, 580 bp, Homo sapiens
tgatgtagccaggcccttttccagttcagaagtcagcaaagtcccctcaggagacaacattttgggagagacctgaacgatgagaaagagccagacaggcaatggtcctgagaagtttgttgcagcaatggaaacaacaaacacaagggccctgcatccttcccacgcagcttctgtatccaaccttattgcctttttgattacctagcccagtgacagacctcaagatacccagtgattttgagaacaatgctatggtcatccagcttctctgtaattcttcatcacatcaccactttaatcatagcactatgatggatagagaagtactggctatgggtgctttagccacatgacccttaccttcctaagatcacccttccttaactcttgatcttagccttagttgctccactagctaytcaacaggtaaggaattttatcttgccctggagttttgggttagaaagaaggtagtatcctggaagttttcctcttggaagaacattccaccaaaaaagcaaaccttcgacttcctcagtgctctatttccaaactcctcctgggtactaaatgttag

SEQ ID NO: 355670 - DNA, 492 bp, Homo sapiens
ccccaagacattaatgtaatacaacccaacagaaggagacaaagtcgctgcaatgctccctggaaaggcaaagggatcagcaaccaggcatttggaaggccccctgattagccaggccacttggaaaagtcatttaatctctcaaagctgctctttatctacaaataaaaataataattctgtcatttcctactctacagggtcatggtggggatcaaaagtagaaaagctgctgcatagaatcactgactggatttcacaccttgttccctcctctctcttttcttggcttccagcaccccacacaccgtcctgtttccctctaatgcattggctattcctgctcatactgctatgcaggttcactctttgatccccaaattttggagtaccctagacttcagtccttatcctttttatctggtctatcwgtagtctctctttaggtaatctcaaggtcctatgtatgattccttttgctgatcattccca

SEQ ID NO: 355671 - DNA, 650 bp, Homo sapiens
caaaaattccaagaaagtcagtctctggccctgactagatccaatgaacattcctggaccaataattgatgacctcagagatgaggttctatgattagcccagcttgattctggaacccctcctgacgcaatcgttgcatcagaagatgagttcacattaacttggctgctctcagcagaaggatgagggaagtcataattcccagaggaagggactgttattcccagaagaaaaacatgctagccagatacaaaagagcttaaaatataaaggcactcagtatcctttttaataaattagataatkaaaagataaattggtataatcaattaattggaagaggaatttagcaatatctatcaagactttatataatcttatgtccactaattccacttttggtcctgtatcataaaactaacatacatacacaaaaagtattaatttattaacttgttcatcaaatatttagtgcatagtgtgtgcttactattcgaacagctggaataatagtaataaaaaagatacaatttttctatatttacatttgagtggagaacagaaattacaaataagtgactggcacataacaaacttttgttactaagcattctgtccaatttcaatgtctagatgtcataaacttaca

SEQ ID NO: 355672 - DNA, 537 bp, Homo sapiens
ttattgcctataaattacaattgctttagcaccatttgttgaaaaagctataattcctcctatgaattgcttttccatctttgtcaaaaattgccgagaccatacactggggaaaggacaatctcttcagtaaatggtgctagggaaattaaatayccatatgcagaagaatgaaactagacccccattttgaactaaatgtaagacccaatataataaaactattaaaataaaacagggaaatgcttcagaaaattggtctgggaagatattttatgaataaaacctgaaaagcacaggcaacaaaaacaaaaatagacagatgggatgaaatcaaactaaaaacctgcccaccaaaggaaataatcagcagagtgaaaagacaatctacagaatgagataaaatatttgcaaactatttatcctacaagggattaatattcagaatatacaaggaactcaaacatctcaactacaaaaaaaatttaattaaaaaatttaaaaataataaaaatcatttgggcatatttatgtagt

SEQ ID NO: 355673 - DNA, 593 bp, Homo sapiens
ctcaacaaattacttgcaatccaaatccaataacatataaaaaggattatacaccataaccaaatgaaatgtatcccaggaatacaaggttggcttaaaatatgaaaatcaaccaatttaatatactaaatacactaaaccataaaactacaatcatcttaatagatggagaaaagcagtaaagtggtgataacttgtatatcaattgcatggtgaaataataataatttgcatatattgatttaaataaaatacattactcaagttaatttcacttgtatctttttaatttttaaaatgtggctagtgcacaccttaattccagcagtttgggaggccaaagcaggaagctagcttgagtacaggagttggagaccagcctgggcaacayagcaagacttcatctctacaaaaacttttttttaaaaattagttatgcattgcagtgtacgtctgtagtcctagctacttgggaagctgaggtgggaggctgcaatgagctatgatcacaccactgcactctagcttgggcaactgagccacaccctgtctgtaaaaaataaaatgtggctactagaaaagttcacattaca

SEQ ID NO: 355674 - DNA, 484 bp, Homo sapiens
cacacataacatgatgtccactgaccttttttgttaggccatcatttaaacaccatttctgggaggtgggcacctggcaggtaycactgaacaccctaatgtctttggggtatcagccaggaggaagcagctgaggctactgatgtctctctgatgggatctacctatggggaagactgatgcattactggttaaatgtatctatggactgatgacttgaacatttcccaagtttggcatttgctgatcatggagtccagtactgagcagccttcttttacatgaaggccaatacaggaataatatgtatggatacatacatgtacacataggggtgtatgtgtgtgtgtattacttagaggctatatttctttcattcaaaaagaaaatagacttattgggtttcataggaaatatatacatccttggaacttaaattgcctgctttattgagtagaagaatgccattaagaaagttggcact

SEQ ID NO: 355675 - DNA, 484 bp, Homo sapiens
cacacataacatgatgtccactgaccttttttgttaggccatcatttaaacaccatttctgggaggtgggcacctggcaggtaccactgaacaccctaatgtctttggggtatcagccaggaggargcagctgaggctactgatgtctctctgatgggatctacctatggggaagactgatgcattactggttaaatgtatctatggactgatgacttgaacatttcccaagtttggcatttgctgatcatggagtccagtactgagcagccttcttttacatgaaggccaatacaggaataatatgtatggatacatacatgtacacataggggtgtatgtgtgtgtgtattacttagaggctatatttctttcattcaaaaagaaaatagacttattgggtttcataggaaatatatacatccttggaacttaaattgcctgctttattgagtagaagaatgccattaagaaagttggcact

SEQ ID NO: 355676 - DNA, 484 bp, Homo sapiens
cacacataacatgatgtccactgaccttttttgttaggccatcatttaaacaccatttctgggaggtgggcacctggcaggtaccactgaacaccctaatgtctttggggtatcagccaggaggaagcagctgaggctactgatgtctctctgatgggatctacctatggggaagactgatgcattactggttaaatgtatctatggactgatgacttgaacrtttcccaagtttggcatttgctgatcatggagtccagtactgagcagccttcttttacatgaaggccaatacaggaataatatgtatggatacatacatgtacacataggggtgtatgtgtgtgtgtattacttagaggctatatttctttcattcaaaaagaaaatagacttattgggtttcataggaaatatatacatccttggaacttaaattgcctgctttattgagtagaagaatgccattaagaaagttggcact

SEQ ID NO: 355677 - DNA, 495 bp, Homo sapiens
gaacttcaacatatgaatattagggggaaacacaattcaaaccataacaaatatcaaacatactctcttaatttaaattttatttttattttggggtagctattggggtggggctaatgaagattatttggaggaaatgttccccacccaccagccactcattgttgctgccaaaaatttgytgctgtgtattcaggtgacttcaagatattcaaaagcatatgttatgctaagtgaaagaagacaagcacaggagaccacatattgtatagttcaatttctatgaaatatttggaataggcaaatccatggagacagattcatggttgtttaaggctggggttggggctgggatgtggagcacagctaatggatatgagatttcttttgggggtgataaaatgttctaaaattaaattgtggtaatcaacatataactgtggatatattaaaaactactgaattgtaacttaaattgggtgagttgtatgatgt

SEQ ID NO: 355678 - DNA, 495 bp, Homo sapiens
gaacttcaacatatgaatattagggggaaacacaattcaaaccataacaaatatcaaacatactctcttaatttaaattttatttttattttggggtagctattggggtggggctaatgaagattatttggaggaaatgttccccacccaccagccactcattgttgctgccaaaaatttgctgctgtgtattcaggtgacttcaagatattcaaaagcatatgttatgctaagtgaaagaagacaagcacaggagaccacatattgtatagttcaatttctatgaaatatttggaataggcaaatccatggagacagattcatggttgtttaaggctggggttggggctgggatgtggagcacagctaatggatatgagatttcttttgggggtgataaaatgttctaaaattaaattgtgrtaatcaacatataactgtggatatattaaaaactactgaattgtaacttaaattgggtgagttgtatgatgt

SEQ ID NO: 355679 - DNA, 588 bp, Homo sapiens
tatgagccttggagggtgattgtggttgatatgcattgacatgggtgaaagggaagagacatattttcaactttgtatttttcaacacatccagctgcrtgctttcagcccagcaggtgctcaaaataggtttactgaggtgaaaaccaattcttgcctctaaagggtgttccatggtctcacaggaattaggaaggagtgaggagcatctttagtaaataaacaatgtgctcatagcataaaaaatacaactttgggtttgttagactttgctctgtcttacttattaattagaacccaaatttcattcatgtgattctttttcttctctttcttcttcttgctttcttatttttttctgcaaaattctcatcaacacatttcaatgagtataaatgaggactccatgtcccaggaaacagggtagccaagcagtgaggtggccgccggggaggagtagggagagaatgagagagagagaaagagagagagagagagagagagagagagagagttatgatgtctgaatctcctggtgcttaccaaatctgcagaaaatgacctgattgcatgagaaagataagattg

SEQ ID NO: 355680 - DNA, 588 bp, Homo sapiens
tatgagccttggagggtgattgtggttgatatgcattgacatgggtgaaagggaagagacatattttcaactttgtatttttcaacacatccagctgcgtgctttcagcccagcaggtgctcaaaataggtttactgaggtgaaaaccaattcwtgcctctaaagggtgttccatggtctcacaggaattaggaaggagtgaggagcatctttagtaaataaacaatgtgctcatagcataaaaaatacaactttgggtttgttagactttgctctgtcttacttattaattagaacccaaatttcattcatgtgattctttttcttctctttcttcttcttgctttcttatttttttctgcaaaattctcatcaacacatttcaatgagtataaatgaggactccatgtcccaggaaacagggtagccaagcagtgaggtggccgccggggaggagtagggagagaatgagagagagagaaagagagagagagagagagagagagagagagagttatgatgtctgaatctcctggtgcttaccaaatctgcagaaaatgacctgattgcatgagaaagataagattg

SEQ ID NO: 355681 - DNA, 588 bp, Homo sapiens
tatgagccttggagggtgattgtggttgatatgcattgacatgggtgaaagggaagagacatattttcaactttgtatttttcaacacatccagctgcgtgctttcagcccagcaggtgctcaaaataggtttactgaggtgaaaaccaattcttgcctctaaagggtgttccatggtctcacaggaattaggaaggagtgaggagcatctttagtaaataaacaatgtgctcatagcataaaaaatacaactttgggtttgttagactttgctctgtcttacttattaattagaacccaaatttcattcatgtgattctttttcttctctttcttcttcttgctttcttatttttttctgcaaaattctcatcaacacatttcaatgagtataaatgaggactccatgtcccaggaaacagrgtagccaagcagtgaggtggccgccggggaggagtagggagagaatgagagagagagaaagagagagagagagagagagagagagagagagttatgatgtctgaatctcctggtgcttaccaaatctgcagaaaatgacctgattgcatgagaaagataagattg

SEQ ID NO: 355682 - DNA, 588 bp, Homo sapiens
tatgagccttggagggtgattgtggttgatatgcattgacatgggtgaaagggaagagacatattttcaactttgtatttttcaacacatccagctgcgtgctttcagcccagcaggtgctcaaaataggtttactgaggtgaaaaccaattcttgcctctaaagggtgttccatggtctcacaggaattaggaaggagtgaggagcatctttagtaaataaacaatgtgctcatagcataaaaaatacaactttgggtttgttagactttgctctgtcttacttattaattagaacccaaatttcattcatgtgattctttttcttctctttcttcttcttgctttcttatttttttctgcaaaattctcatcaacacatttcaatgagtataaatgaggactccatgtcccaggaaacagggtagccaagcagtgaggtggccgccggggaggagtagggagagaatgagagagagagaragagagagagagagagagagagagagagagagttatgatgtctgaatctcctggtgcttaccaaatctgcagaaaatgacctgattgcatgagaaagataagattg

SEQ ID NO: 355683 - DNA, 594 bp, Homo sapiens
ttgcatgtatatttgcatatatttgcacaattataatttaatgcttcaaaatagcattttatctgttccaaatcttataaatgacttagaaccatcttggcttgggaagggaatgtcactgagacatcccacagcaggtattttctatccaccagatcatatcattttcatgtaccatgagtcacagcaaattcattcattattagaagctgatttartaagtgaattatcatttaaaagtcctcttagttagaacaactctaatgtttagttccttccaggatttagaatcttgaaaaacacaattctgtattggaatgctgcccatttaatgagatggtttggacaattgaagagataatggaatcacagttagttgctcatagtagatacttatccctttcaagtgtttgtggtttgcaaacaacaaaaacaaactctggcttatttaagcaggaaaggaattaaatggaaggaaggcaaggtagaaatgctcatagaattggtaagaaggctggagaaacagccttagaaagtgggcagaaaccacaggaagcaaggcccagccaccaccaaccacaggcccagtcaatg

SEQ ID NO: 355684 - DNA, 579 bp, Homo sapiens
ctggaagggtcaaggaaattccttacctacagccttcagaggaaacatggctctgctaataccttgatttcaaccttctagcctccagacctgtgagagagtaaaactgttgttttacccaggttgtagtacttcgttatggcagccctaagaaactagtttggtttgaaaacaccaaaaccagttgtttggtgcaaatagtaaaaatattatgtctatgcaaaacacaataataagaaatagtgttatcactaagaaggatattaggaaaaagaaattctttttttttgagacggagtctcgctctgtcgcccaggctggagtgcagtggcgggatctcggctcactgcaagctccgcctcccgggttcacgccattctcctgcctcagcctcccaagtagctgggactacaggcgcccgccactacgcccggctaattttttgtatttttagtagagacggggtttcaccgttttagccgggatggtctcgatttcctgacctcgtgatccrcccgcctcggcctcccaaagtgctgggattacaggcgtgagccaccgcgcccggccggcaaaaga

SEQ ID NO: 355685 - DNA, 625 bp, Homo sapiens
tgcatataattccatgacttaagtaccatatataagccaatgtctcccaaatttctatctccacacctgacctctcacctaaacttcatactcataaatgagtcttgcttaacatcctcattagatayttaataggcatctccagtttaaggccttgattttccatacacacttgagtctccaaaaactattcctcctccaatttctccaactgaggacaaagttaaccatactgctcaaagccccctacccagaaatagaagaatcataaaactgggaaagccctttctcatttttgcttttagggcaaagtctctccaaacaagaaggaaagcttcatcagtgcaaggaatttgtttttgttaattgctaacatcaccagtgactagaacaatgcctggcatgttttaggaacatgacaggaacacgtaggatcaatgaatgaatgatatattgaacatcataaattcctaattggaataatttctaattatatataaagaaccatctttagcagtactttcatttactcattggactgttgtgaagttcaaataaattacttatagaaaatggtttttttggcaataaaatggtagcttgctctactaatctctgcagaaca

SEQ ID NO: 355686 - DNA, 625 bp, Homo sapiens
tgcatataattccatgacttaagtaccatatataagccaatgtctcccaaatttctatctccacacctgacctctcacctaaacttcatactcataaatgagtcttgcttaacatcctcattagatacttaataggcatctccagtttaaggccttgattttccatacacacttgagtctccaaaaactattcctcctccaatttctccaactgaggacaaagttaaccatactgctcaaagccccctacccagaaatagaagaatcataaaactgggaaagccctttctcatttttgcttttagggcaaagtctctccaaacaagaaggaaagcttcatcagtgcaaggaatttgyttttgttaattgctaacatcaccagtgactagaacaatgcctggcatgttttaggaacatgacaggaacacgtaggatcaatgaatgaatgatatattgaacatcataaattcctaattggaataatttctaattatatataaagaaccatctttagcagtactttcatttactcattggactgttgtgaagttcaaataaattacttatagaaaatggtttttttggcaataaaatggtagcttgctctactaatctctgcagaaca

SEQ ID NO: 355687 - DNA, 640 bp, Homo sapiens
ctctttttgtccccaattctctctcttcttgtttgttgtagttgcctaaaattagttggatctcagctagccaatctctctggctgcctaggtaaattgccatttcaaagagagtcaagcatactagtgtaaaattgtgatccttttcccctaaaacaggaaacactgctccactgtcattttgtatctattgctgcatatgagaaaacatgaaaagttatgagtttctttttatctttggaatatggaaaartcaccagactcacttggaattatcttcaattcctctctttctcacaccccaccaccttctacctatcagtaaatcttgttagttctaccttcaagatggagttcaggcatggtggctcacacctgtaatacctaactttgggatgccaaggtgggaggatcacctgagcccaggattttgagaccagcctgggcaacatggtgagacccccatcttatatagctgaaagaacactcaaggggccataggcaggtgaaagatggtttcattcagcagctctcttacactgtctgtctctgtctcagctacctgttctggctctgtgactcctgccactcccacacacagctgcaaagccagctgtctctacagggtcagaagcttaac

SEQ ID NO: 355688 - DNA, 584 bp, Homo sapiens
tatatgggatcacttaggataatggtagttctatcagatggctcaagagttatcattattatatattatattgcctatagttttccttgtgcctattttttcttttctttcttttttctttcctttttgttttttttaagacagggtctcactctgctgcccaggctggagtgyggtggcacaattatggctcactgcagccttgaactcctgggcccaagcaatcctcctgcctcagccttccaagtagctggaactacagctgtacactaccatgcctagctaattttatttttcttttgtagagatagggtatcactatgttggccaggtgcattttgaactccttttaaatttttttcctgatccatgatctttgctattttctatctcattgaaaaagtcataacctttcaccattacaaataaagaactacaatttttttttttttttttttttggagacaaggactcactgtgtcacccaggctgaagtgcagtggcgtgatcttggctcacagcaacctctgcctcccaggttcaagggattctcccctcagcctcctgaacaagctgggaccaca

SEQ ID NO: 355689 - DNA, 431 bp, Homo sapiens
attgctggggttggttgctggagtaaagcgtaagctaatttagaagggctgaaacgtaaccatccggcaacttaaagttttggaaggaattccgttgtaatgatggtgagatgtttttaggatcataaacctgtactgcttatgaaaactaaaaacgcggaacgtgttgttacctcttaaaaactggccccgtgttaagggtgtgcgttagattctgcttgggttttctttttggaaattgccttagctgattgctttcagatagttcccamccggttgttcctagtttaaaaagtacttataaattgtaactgcccatcaaaataagaaaaggcaaggaattactgtatgctagaaggaaataaaggtcttaaatgtctaaaaatttcggtgtagttgtagtttcatctaagtttttttaaatgtttgta

SEQ ID NO: 355690 - DNA, 521 bp, Homo sapiens
tcagtaatggctgatgcccctccccccaccaagctccagcatcccaggttgacatcagactgccgtgctggcagcaagaatttcaagccagtggatcttagcttgccgractccatggggtgggatctgctgagctagaccatgtggctgtctggcttcagccccctttccatgggagtgaacaattctgtcttgctggcattccgggtgccacgtacaaaaaaaaaacctcccgcagctagcttggtgtctacccaaacagccacccagttttgcgcttgaaacccagggccctggtggtgtaggcacctgaaggagtctcctggtcggtgggttgcaaagaccaggggaaaagcatagtatccgggccagataggaccgtccctcaaggcacagtccctcacggcttcccttggccagtggaaggagtttcctgaccccttgtgcttcccaggtgaggcaacatcccgtcctgcctgcttctgttcaccctccgtgggctgtacccactgtctaaccag

SEQ ID NO: 355691 - DNA, 548 bp, Homo sapiens
aaaaataaaagtctttgtagtttaaatcactaataaaatcagggctcttgctactggcagcagaacactagacaactgacagcatagttgctaccatttaattgtttttctctagggatatggaaaattgtcaagattttacttataatctgtattccagaataggcaccacttcaaatatctgatcaggatatattagtgcccaacactttgaacatcatccttctgttaatgtaacctagtatgttagtgatttaagcaactccatcatatttaatatgtgatcaactatatcctcagttatttaccctttaacctgtaaaatctatatatataatatttcayatttatgcaacagacatttttacattaaaaacttgccatgaattcagcacaacttagaaattacatttctattgactacactattacatgcagtgcagtgacggcctgaaattgtgaacttcatgtgtccttcttggccaaaggggcaataatttgctaaggaaatataaggatgagctaatgtataatgatattaatgggat

SEQ ID NO: 355692 - DNA, 506 bp, Homo sapiens
ttaagcaatcaacttacaaatagaacagcaggagtaaattgaaaaacaaagctacaagaaagacaacaaagagcagacattcatgaaataaaaataagacacaaaaagcaaatagttggttcattaaaaagacaaataaacaatatttcagtgaattgacctattaaaaaagagaggcacaaacaatatcagaaataaattgagacacaactagagtgagaaagyttaaaacaataagaaaatgctatgaaaatcatttaagctaataaatgttactagtaaaagaaatagtcaaatatctagaaagaataacttttcaaatatatttaagaagacataaataaaatctgatttccactggagaaactccataaatggttaaccttccgcaaagtaaatcttctagacttggggaaaaaataatacaccttaactcattttataaggtgaatgaaaccttataatcaaaattagaaaactacactaaaagagaggaaaattacagg

SEQ ID NO: 355693 - DNA, 649 bp, Homo sapiens
gtcaatagcatcaggtaagttattgagaagtcaggtaaggtaaacattaaaagtaacactgtgtttagacgtctcagtcatcagatcttaagtgagagaatgagagcacagaacccagaattagagtggggtaatttactaaagttcttacttagaagctaccaatataattattgaaaatcattaccaacattgaatttggcatgtctttgaaccagaatctgacttgctaacaacttattatccctttcttatagatgaggaattagaggaattatgtcaggtaaggaaacagacagaaaggataactggtttgataagtgtgactgtgagggaaggaaagaggttcagtggtagcaggacaggtaggaatggaaggggctgagagatcactgatcttttgttttcaaaatgagaaacagtatggaccatgaaagcatttgcttctatttacttgcactaatattatggtaatgataggaaaaaaatttttttattccagcaaaaagcattaccatataatttttcaattcccttgaattgggcataaaggtctctcactttgctgggtaatgaataaaaaggaccaaggtcatttgatgatgactcaaytgttttcttagcaacattaatttcctcagataggaga

SEQ ID NO: 355694 - DNA, 610 bp, Homo sapiens
ttagtgttacaaaaattatcctgatatactgaggctaaattttgccttcttaaaatttctaccattgcatcagagtactacctctggaactggactctttttttgtttgtatgctgtttttcacatattcaaaaacagctcttattgcccccaagggtttctcttttctgttgcttttatctgtattaaataatcaagttttaggccattcactgtcctagttaccctttgctagatgcaacccagtttgccattgccttctgctccctgtgggtaaagccattccacagcaatttgagattgtttccttcttgatctcaactrtggttctaagtctgaaattgcttggcttctttgaagcttcattgttttactattttcatatataaatcagaattagctttccatcattttttaatggtgctcacattgcttacattaccttaattgttctttacaacaaacctatgaggtggacaaagtcagtgttacccccaatttatagatgaaaccactaagattgaccttgtcccgttaaattaggagttcttggggttggtagggatgaagttatagtcatttcctttgctatagcacctaaaaaaaaaag

SEQ ID NO: 355695 - DNA, 568 bp, Homo sapiens
aacatatagaaattaacatgagataatttctgtgttgaacaatttcataattagataaatggtgctaacagatctcaaccaaattatgaaggcatttgtaaaccatcagggggcagtgactattyacttttcctctagaattggatgggcaatgtcccttgtttctattctataatgttattttggaatgtagaaaacaagcagccttagctattgaaatgatttttaaagttctaaatatttagagttatatactgctttcaaagtttaccagtcatagtgaaaattacactcctgggtttattacatagtatataatatacacttgctatatgatatagcatgagttcgaaatggttaaaaatatatacctctttcaaaagtccagttcagcccgcaaggggactcaggctgagatccggctgtaccttgcaggcctggcagggcagagctgcaggaaggttaaaagcaggcagcagcaaccaaccacatgttgaaaaccagactctaatctcaactggcaggctctctatcacctttctgtcttggttcagcacagtttaaacca

SEQ ID NO: 355696 - DNA, 568 bp, Homo sapiens
aacatatagaaattaacatgagataatttctgtgttgaacaatttcataattagataaatggtgctaacagatctcaaccaaattatgaaggcatttgtaaaccatcagggggcagtgactatttacttttcctctagaattggatgggcaatgtcccttgtttctattctataatgttattttggaatgtagaaaacaagcagccttagctattgaaatgatttttaaagttctaaatatttagagttatatactgctttcaaagtttaccagtcatagtgaaaattayactcctgggtttattacatagtatataatatacacttgctatatgatatagcatgagttcgaaatggttaaaaatatatacctctttcaaaagtccagttcagcccgcaaggggactcaggctgagatccggctgtaccttgcaggcctggcagggcagagctgcaggaaggttaaaagcaggcagcagcaaccaaccacatgttgaaaaccagactctaatctcaactggcaggctctctatcacctttctgtcttggttcagcacagtttaaacca

SEQ ID NO: 355697 - DNA, 356 bp, Homo sapiens
tacccctatattttaaaatacccacagtattttagacctaaagaaaaactaaataaaagcygctaggaaatgcgatactctaagcaaaaaagatgaatataaagaacctcacatgaggcttttaaattagtggcatttggtatgtgatgcactccatcaccatcaaattcaaaaaaaagaacaaatatatgtcatccgtacagttctgtcacgccgccctggtgtggactgtcactcagctgaaagggtggggaagtgttcctcaggcacattacacaggaaggggacctgctctgcctacatccattacagcatgatctggactatccgcatgttcataggtcttaactacaatc

SEQ ID NO: 355698 - DNA, 516 bp, Homo sapiens
gaagcaagtgtcttcgatgcctatgtgcttcccaagctgtgtgtgaagctacattaccgtgtgagttgtgcaattcacagcaaagtagtcaggaatcgatctcgtgaagcccgcaaggaccgaacacccccaccccgatttagacctrcgggtgctgccccatgtctcccaccaaagcccatgtaaggagctgagttcttaaagactgaagacagactattctctggagaaaaataaaatggaaattgtacttaaaaaaaaaaaaaaaagatttggggcctctgaacaggtgagctgtagagaaatgttccaaaataattcagacatgtggtcacttacttagataaataagcaaagtcaccaacatgcaacactctattcctcatcagttccctagcttggtgtccttttcacacctagggtccatagtggcactagccatgatagtgagtgccagtgaaatatctttcggctagatgcaaagggccaagcaaagagcagtgaaagaagagatgc

SEQ ID NO: 355699 - DNA, 516 bp, Homo sapiens
gaagcaagtgtcttcgatgcctatgtgcttcccaagctgtgtgtgaagctacattaccgtgtgagttgtgcaattcacagcaaagtagtcaggaatcgatctcgtgaagcccgcaaggaccgaacacccccaccccgatttagacctgcgggtgctgccccatgtctcccaccaaagcccaygtaaggagctgagttcttaaagactgaagacagactattctctggagaaaaataaaatggaaattgtacttaaaaaaaaaaaaaaaagatttggggcctctgaacaggtgagctgtagagaaatgttccaaaataattcagacatgtggtcacttacttagataaataagcaaagtcaccaacatgcaacactctattcctcatcagttccctagcttggtgtccttttcacacctagggtccatagtggcactagccatgatagtgagtgccagtgaaatatctttcggctagatgcaaagggccaagcaaagagcagtgaaagaagagatgc

SEQ ID NO: 355700 - DNA, 516 bp, Homo sapiens
gaagcaagtgtcttcgatgcctatgtgcttcccaagctgtgtgtgaagctacattaccgtgtgagttgtgcaattcacagcaaagtagtcaggaatcgatctcgtgaagcccgcaaggaccgaacacccccaccccgatttagacctgcgggtgctgccccatgtctcccaccaaagcccatgtaaggagctgagttcttaaagactgaagacagactattctctggagaaaaataaaatggaaattgtacttaaaaaaaaaaaaaaaagatttggggcctctgaacaggtgagctgtagagaaatgttccaaaataattcagacatgtggtcacttacttagataaataagcaaagtcaccaacatgcaacactctattcctcatcagttccctagcttggtgtmcttttcacacctagggtccatagtggcactagccatgatagtgagtgccagtgaaatatctttcggctagatgcaaagggccaagcaaagagcagtgaaagaagagatgc

SEQ ID NO: 355701 - DNA, 541 bp, Homo sapiens
agatatcaattaagctgcacagtggctggcaaataataggtgcttaataattaaaagaactaaataacaaatcaaacatcaaaattacacagaattgaatttaaaaatgagtctacaacagtttctttcaaaccccaagaaccaacaccaatagakaaatattaaaggggaattttaactgaacattatttaatcaatggacctaattatttttaatggagctactgagatcaactacttgttttagtactgtgtaggtaacaccttatgataacagtagatagcaataaactattactaaaaaaaatacgtatcaataaaagttgactttctaagaattaaagcccaaagtaaacaatttaaagatatctctgtttcttggtcgaattgaaagctacgtctaagaacaatgccctaataaaaaatcttttttctactaaaaacaaatcagcttttactatattagaatgcacttattatatagtagtgcaggcactttggaaggtggcacttcagctgaaatagcatttgttgaacattt

SEQ ID NO: 355702 - DNA, 492 bp, Homo sapiens
tccactaatcatagcaaccacaccatcggtaaattaatgtgcagaccatgatgttatctcaattttaaaaagcgtgtcacgacgacactagatcccccaaattatccatcaatgaactgctagaactgaggtctcttactctggcgttcttgacttttaccaatacttcagagcagggagaaaaaaaaggraagaattaatttgaacaacttaagtggaaataattgaacaatgaagtccttcttcaatctaacagtggaaggggtttctgaaacttgatgaccataatccagggcaaaagacttactggaggaatgtccgttgtgttgaatatgggtttagagatgatttgctgtgacagtgttgaaggtgagcagctggggtggaaaggggcagtgtctctgacgtaacagagacctggccatcacttaggataacattctcaggtgaacaggtacagctagtcaaactgaggaggaaagtaaagctttc

SEQ ID NO: 355703 - DNA, 492 bp, Homo sapiens
tccactaatcatagcaaccacaccatcggtaaattaatgtgcagaccatgatgttatctcaattttaaaaagcgtgtcacgacgacactagatcccccaaattatccatcaatgaactgctagaactgaggtctcttactctggcgttcttgacttttaccaatacttcagagcagggagaaaaaaaagggaagaattaatttgaacaacttaagtggaaataattgaacaatgaagtccttcttcaatctaacagtggaaggggtttctgaaacttgatgaccataatccagggcaaaagacttactggaggaatgtccgttgtgttgaatatgggtttagagatgatttgctgtgacagtgttgaaggtgagcagctggggtggaraggggcagtgtctctgacgtaacagagacctggccatcacttaggataacattctcaggtgaacaggtacagctagtcaaactgaggaggaaagtaaagctttc

SEQ ID NO: 355704 - DNA, 657 bp, Homo sapiens
agcataatgagacccacatctacaaaaaaaacacaacaaatcagctgggtgtggtaactcccacctgtagtcccagctactcaggaggctgaggtgggaagatctctcgagcctaggaagttgaggctgcagtgagctgtgattgtgccactgcaccccagcctgggcaacagagcaagaccctgtctaaaaaaaaaaaaaaaattgtactatttgaagtgtccaaaacttaaatttttyggtagtttactgaaaaattactggttgcattatcttcttaactctgcacccagataaccacaaactcaaccgcagggaagactgggtgaaggaaccctagtgaccaactgtttgcctcagtaaagaaattttcttctctgggcctcagtatcccaaatctgtaaaatgcaggcattggattagatcctttctagctccaagagctgacaattctagatataacccacttaatggtttataagactatttcctatgtgaagcttattaaccacccctcatgttatcgtaacattagttcccttgtgatttgccacccacaagtgtttgaatcttaggtactccaatctaccaaacttttattttaaggtttctgcccactattcatgctaaaagaggcctttctggcaaccaagatta

SEQ ID NO: 355705 - DNA, 428 bp, Homo sapiens
tttcttgcacgtgaattctacccttgctgaaatcacatcatgaacatatgaaaagattaataggattaggtgacccttctgaaagcctgacctctaaaaagtaacctgtctacccactaagatgccttcatcccggctgagacttgactttcaaacctgctcttgccatcaggagtcaggatctcatcagcactttatttctggcctgtccccacttaggaactttgttctgtgactgtaaacacagggcaagagtgtcttagattgctttaaatctgtttgcgtgcgtgcatgtgtgcacttgggtatgtgtgtgttgaaacktacatccagaaacagtccatctgcaaacaacagaaaggagcctttaaaagtcatatgtagagaattaattaaaatgtgccatatacatacaaaaacacagctac

SEQ ID NO: 355706 - DNA, 598 bp, Homo sapiens
ttatattagtcccattgggtattcttgaactggttgcacaaaatagactttaaaagtgtttatttagataaacataaaaatgttggcagttcattagattaaaacagcaggaaccatcacaaactgacattagaatacttatacttttctgggtagctaatccctagaataaaaaayaccaggagttctattatcagaaaatttaaaataaaattatatcattttagactgttatttaaaaaacaacaataatgtgtgggctccctctgctggatcttcagactgtggctaccagaaaggggtttagtacattatagttacctaaatgattgtataactcatagtgatgaaattaacacgaagaagtggataattgatttcaaatctacattttaaaagttgccaaataaagaagctgaaatcagctggagctatatttttcttcagctttaaaaacagagacttttttttgttttaagtagaagatagtaaattttttttaatttttgtaaaaggaggcactgacactcttcagagaggggtcacttgtggtccatggtgcctgttgccagggtaactatatcctctgtctgtacat

SEQ ID NO: 355707 - DNA, 448 bp, Homo sapiens
acaaatgaaaataccctattccagtaacaatgccgtcagtgagtaggtggtaggttytgttaaggcaggggtctgcaaaattcttctgcaaaggtcatgacagtaaatatttcagactttatgagccacaaacagtctctgccacctgtcctttgccttttgtattacagcttttaaaaaaatgtaaaaaccatccctcaaggcaagtaccaggttctcttttcatatccccacagttagtggcttactgaatatagacaggtggactgaaaagatgggcttcatttttcagttatctgagttatgaaactgttcaagagtagctctgcaaaagatgaaaagaggaatacaatttccaaaactgtctttcaagaatgcacaattgcatgggttgtttcctcagttctatattttggtcagagaagtacttcatcaaatgaaaatcttc

SEQ ID NO: 355708 - DNA, 537 bp, Homo sapiens
gttagaaccatccacagcactctttgaaattaaatttggtacagaagataattctacattttctatgggcttataagaagatacaaacgtagctgggtacgtcaatcaatccatcagtccctgagagaaacttggcatgagttatctggaagcctctctgaggtgaagttygaaggatcactcgtgccatgaaatttcatggagacctagctgggcactccaaccaccccatgtgacacactacagtgccagcacttcagtcactgctgctgtgagggcattaacaactggtcactaaacgctttgagatcagtagcagatagaaccagcctaaaagccctcctggaatgttggattacctcccagtactaagtgggccagtacatagaccacactcttcctccttccaccaaccccatatgggattcccagcatcttaagaaatgagaaccaggaaaaagaaatgggaaaaccgttgaaggaaaaagaagcttgaaatgcaaagttttcaactgaaggacaataactacatttgtt

SEQ ID NO: 355709 - DNA, 611 bp, Homo sapiens
ggagttgaagatgagaaggtaggaaaatatatctttgcctttggtttaaagttcctgtgtatcccaggcaatagaacaaaataatattaacacttatttcgctgagggtaatctcatatttatgtatttccagagtatttacaaatagatgtgacagcactataccaatttttggcactttttttttccacattgctgctgcttcatttatatatttaattttttgactatttatacatatgagttctgtattagtctgttctcacattgctttgaagagatrctcaagactgggtaatttataaccagttctgactcacagttctgcatggctggggaggcctcaggaaacttacaatcgtggcaaaaggggaagtaaacatgtctttcttcacatggcagcaggagagaggagtgaagggggtaaaagcccctaataaaaccattagatctcgtgaaaactcactcaccatcatgagaacagcatgggggaactgcccccatgatctaatcacttcccatgaggtccctcccccaacatgtggggattacatttcagattacaaatcaagatgagattagggtggggacacagagtatattattcaacc

SEQ ID NO: 355710 - DNA, 537 bp, Homo sapiens
gttagaaccatccacagcactctttgaaattaaatttggtacagaagataattctacattttctatgggcttataagaagatacaaacgtagctgggtacgtcaatcaatccatcagtccctgagagaaacttggcatgagttatctggaagcctctctgaggtgaagtttgaaggatcactcgtgccatgaaatttcatggagacctagctgggcactccaaccaccccatgtgacacactacagtgccagcacttcagtcactgctgctgtgagggcattaacaactggtcactaaacgctttgagatcagtagcagatagaaccagcctaaaagccctcctggaatgttggattacctcccagtactaagtgggccagtacatagaccacactcttcctccttccaccaaccccatatrggattcccagcatcttaagaaatgagaaccaggaaaaagaaatgggaaaaccgttgaaggaaaaagaagcttgaaatgcaaagttttcaactgaaggacaataactacatttgtt

SEQ ID NO: 355711 - DNA, 542 bp, Homo sapiens
tgtttattcatgccactgatatttgattactcctgggtttcaaaatggctattctttcacaaaactttccttctgaaagaggaactatatgtattgttattttccttctgaaagaggaactatatgtattgttattttccttctgaaagaggaaatatatgtattgttattttccttctgaaagaggaactatatgtattgttattttccttctgaaagaggaattatatgtattcagcaggactttgggagctcggagacccttatacgtaggcacctgtttttcctgagatgttagcaagtatccttggtgaacgaggaacgtgctgctttctaatataccataaaagagggtttgtttagattctctttcaggaaaagaagttagagattagacatactgaggttgtcctagcttcgtggagaaaaaaaaagtttcttaaaactgcttccttaaaatatggcactgtccaaattgaatcattgtattacrcaagtgctatctagttttcaaatctaaatgtaaacagatgggggtgaca

SEQ ID NO: 355712 - DNA, 657 bp, Homo sapiens
aattggcatataatatttaatttttctattgccttcaactgagttaaatacaagataaggctgatctactaacataaccctgacaacattcccttttcttgtgttattatctgaaatattttatatgagataaaaatgatctattccataagagtttggtaggattcaccagtaaaatcattttagtgtgcttaaagatgagtaaaaggacaggttttattttatcattttaatttccatagtgattactgatctattccagtagtttattttttctgtgtcaataatttcccaaactattcaatctatatttaaaaattgtcatataatttttacaatagtagtatattatctttygagtgtttatgtttttccacagctattctcccttttacactgtatatttcgtggttgcctttttattcttaacaacagtaccagttgtctgtctaacttatcaacactttcaaataactatcttaggtttcaattatttgcgtttctgtgttatttttgcttttcctctagttattttacttattctttatttttattactttatttattcttacttttgaagacttgatctgtttcctttttcctaacttgttgaagacttttttcatttatttttactatttcttgtttttcagtaaa

SEQ ID NO: 355713 - DNA, 548 bp, Homo sapiens
aggcaggctatgccatagttagtgatgcagcagtacttgaaagtaagcctctttccccagggaccagtgctcagttagcagaaccaatggcgcttacccgagccttagaactgggagaagggaaaagaataaatgtgtacacagatagcaagtatgcttatctagtcctacaggcatatgctacaatatggaaagaaagggagttcctaacctctggaggaacacccattaagtrccacagagaaatcacggagttattgcacacagtgcaaaaacctaaggaggtggcagtcttatactgccgaggacattagaaaggtgaaggagaagaagcagaaggaaaccgccaagcagacacttaggacaaaattgctgccaggtaggactttccttcagaaatgcccatggaagggcccctggtatggagcaaccccctccaggaggttaagccccagtatttcccaactgaaacagaaagggactttcacaaggacatcgttttctcccctcggagtggctaacaacagaggaaggaaaggtgctcatac

SEQ ID NO: 355714 - DNA, 565 bp, Homo sapiens
cttttttcactgaggattcacggatgcttcattgatgctttcttagaagtttctgaacttcccagcctatttaagtagtcacctctaatactgtgatagagtaaaggctttctatctccttgtgactatacgagctttgtctatactactaaaataaaaacaaatctttaaaagaaatttaaaactgtaggtgagaaatgtcctacagttgcttgtagatattgcaaacatggatacatcagttgtgacgtattcatatttcagatataaaaggctgtagaatgtgaatctttcatggatcaatatgtttatacctcccccttcataaaagcgtcayaattgtgtctatcaagagcataaatgttgtgctaggaaagagatagctgtacaggctatcaatcaaacaaatcatttactgatggctgcttttctcaaaactgattttaaggaggactttcctcctttgtaaatagcccaattgccactagaatgcaaatttctcaggcatatgaatgtaacaaacatttcttgagcatttactacaaagggccagcaccgtgttggg

SEQ ID NO: 355715 - DNA, 618 bp, Homo sapiens
ctgcagttgcagcttagcaactcatgttcagctatcatgcagaaatgttcctacagggaaggcaaaaaaccccctcagtattctaagtatcaggtagaacactaagaaatcagtcttctttggaggtgatgtgaaaaggtwtgttgatttgagatagaatttctatgtactttagtaggatgcactcttgacttttctttctaatacatacccttaagaggtacctgtgaaataaaccagaagagaacaaaacaatccttccccagtctcactccactttacatggtacatacccattacagcagtttattaagaaattgtttctaaaaaatgtaattgggaggccattaggctgagaggtatccagtacctttgattcctacataagcaaactaaagccaaatgtaaatagtaaaacaaaatttaggctaaaccaaccagaaactgccaactaacttctaactagggactttccagcagattatacctaaataagcatctagcagtagccaatctagtaatttctttccttgatttccccattcagctataaaagctcactgcccatgctgctgaagcagagctctctgaacctcttctagtttaggcaactgcccc

SEQ ID NO: 355716 - DNA, 618 bp, Homo sapiens
ctgcagttgcagcttagcaactcatgttcagctatcatgcagaaatgttcctacagggaaggcaaaaaaccccctcagtattctaagtatcaggtagaacactaagaaatcagtcttctttggaggtgatgtgaaaaggtttgttgatttgagatagaatttctatgtactttagtaggatgcactcttgacttttctttctaatacatacccttaagaggtacctgtgaaataaaccagaagagaacaaaacaatccttccccagtctcactccactttacatggtacatrcccattacagcagtttattaagaaattgtttctaaaaaatgtaattgggaggccattaggctgagaggtatccagtacctttgattcctacataagcaaactaaagccaaatgtaaatagtaaaacaaaatttaggctaaaccaaccagaaactgccaactaacttctaactagggactttccagcagattatacctaaataagcatctagcagtagccaatctagtaatttctttccttgatttccccattcagctataaaagctcactgcccatgctgctgaagcagagctctctgaacctcttctagtttaggcaactgcccc

SEQ ID NO: 355717 - DNA, 600 bp, Homo sapiens
tatgtgacaggcattgtccttgctgcctggatactgaatagtcaacagaataaatctgattcctgccccccagggcaagaaaacagcctgttgaggaaaacagatatgaaacaaaacgaaagaaataaaatattgtcacagagggctgagaaataaaagagcaatatattgatgaataaaaacatatgccatcatacgtagataaatttggaagcataaacatctgtcatcatacacacgtagatttagaagcattaccctctattccttctataagaaaacacagatatttgttacctagagcaaacattttgtaatctggccctgcagtgttataatttactgttttgctggccccctcattctctctataaggttccatgagtgacttgggcactggycttccctactttcccacatgatcaagggaattctcattctacaacaagtcctaaaaagtcaaatcaaactccacttcgaccagtcaaggctattgtctccttgaccgactactaagttttcatgctgaatggtgcatgcatctctgcaaattgttcttctttattcaccactttatggcccactttgtcacctgctatt

SEQ ID NO: 355718 - DNA, 516 bp, Homo sapiens
tagtcattatcatcacattatattcattgcagctaaccctgggactgccacagtaagcttacttttcaaatggactctggtggtcatttctttttaaaaaatatttaataaatttacttaagacagagagctgattccacagggcccattttgtattctcaaacatggaagcctataattggaaatggatcagagttaagtcaggaaattctctgtattatcttttaaaataataatagtgagttggaatgattggcttcctattttctttaaaaagaaaatcatgggcttttccttttaaaaacaaagtcatcaggtttcagtaattggttttatatttgtttttcggttttatttttttttttttactaactttaccaggtgtttgagttgatgtgtacatttagccaaaaaatttaatmggttgaatgtgtaagaatagcctaagtattaaaggtctctgaaaacttttagaaaactatcatcacccttccaaagcattatccattgttaatg

SEQ ID NO: 355719 - DNA, 585 bp, Homo sapiens
acttttgctcttccttcttcacttttcattgtcctcttccaatcagttcccaacatggtggtagactgtagtgtcttaagatggccaccacatctcctagcctatatttcttctcaaaccttcctgctgtgtctattaagatgtggaatcgatgcccctttttcttgaatctaagttggcctttctactgcctcaaccaaaatactagaaacaatgttaagttgacttctgagttaagttataaaaatgcaattcacttcccctttgttsttttgaaatgcttgctgttgaaactagccaccatactgtgaggaaacccaagcaacctatggagaagcccattttaaggaaatcaaagctctcagaaccacagccttagccaagctgcaaagtgacagccagtaggaattatcggccatgtgagtgaaccatcttaaaatcagactcttcagatccactgagccacatgaggtgatatcacacagagcagaaacaggacattcccactgagacctagccaaactgcaaatttattaggaaaaaactgctgtctttttaagccagcaattattttgagccactaaa

SEQ ID NO: 355720 - DNA, 585 bp, Homo sapiens
acttttgctcttccttcttcacttttcattgtcctcttccaatcagttcccaacatggtggtagactgtagtgtcttaagatggccaccacatctcctagcctatatttcttctcaaaccttcctgctgtgtctattaagatgtggaatcgatgcccctttttcttgaatctaagttggcctttctactgcctcaaccaaaatactagaaacaatgttaagttgacttctgagttaagttataaaaatgcaattcacttcccctttgttcttttgaaatgcttgctrttgaaactagccaccatactgtgaggaaacccaagcaacctatggagaagcccattttaaggaaatcaaagctctcagaaccacagccttagccaagctgcaaagtgacagccagtaggaattatcggccatgtgagtgaaccatcttaaaatcagactcttcagatccactgagccacatgaggtgatatcacacagagcagaaacaggacattcccactgagacctagccaaactgcaaatttattaggaaaaaactgctgtctttttaagccagcaattattttgagccactaaa

SEQ ID NO: 355721 - DNA, 585 bp, Homo sapiens
acttttgctcttccttcttcacttttcattgtcctcttccaatcagttcccaacatggtggtagactgtagtgtcttaagatggccaccacatctcctagcctatatttcttctcaaaccttcctgctgtgtctattaagatgtggaatcgatgcccctttttcttgaatctaagttggcctttctactgcctcaaccaaaatactagaaacaatgttaagttgacttctgagttaagttataaaaatgcaattcacttcccctttgttcttttgaaatgcttgctgttgaaactagccaccatactgtgaggaaacccaagcarcctatggagaagcccattttaaggaaatcaaagctctcagaaccacagccttagccaagctgcaaagtgacagccagtaggaattatcggccatgtgagtgaaccatcttaaaatcagactcttcagatccactgagccacatgaggtgatatcacacagagcagaaacaggacattcccactgagacctagccaaactgcaaatttattaggaaaaaactgctgtctttttaagccagcaattattttgagccactaaa

SEQ ID NO: 355722 - DNA, 579 bp, Homo sapiens
gaacatgctcctttagctcggagaagtttgttattgctgaccttctgatgcctacttccatcaacttgtcaaactcattctccatccagttttgttcccttgctggcaaggagttgtgctcctttggaggaggagaggtgttctggcttttggaattttcagcctttctgctctggtttctccccatcttacaggttttatctaccttttgtctttgaggttggtgacctatgaatggggttttcatgtggatgtcctttttgttgrtgttgatgctattcctttctgtttgttagttttccttctaacagagaggtccctcagctgcagatctgttcgagattgctgcaggtccactccagaccctgttttcctgggtatcaccacagaggctgcagaacagcaaatattgctgcctgatccttcctctggatgctttgtctcagtggggcacccaactgtatgaggtgcctgtcagccctaggagttgtctcccagtgaggctacttgggggtcagggacccacttgaggaggcagtctgtctgttagcagattttgaatgccatgttgagagaacc

SEQ ID NO: 355723 - DNA, 572 bp, Homo sapiens
gttgcattcttttgagtttctgattagcctctccaaataaggcaatcatatacgcatttgtttcaatgagcagcagggtgactgaatagaatgggaggcaggtttgcyctaagcagttcacagcttgacttttccatttagcttagtgattttgggccccgagacttattttcctgtcacatttccccctttttatttttaaaaatcttttggagaaagaattttaggagaaaatgagtctctggtctcatgtttcctctgatctgtcatggctgggatggtttattcctagattggtaggtcctgagttattaggaaagttcattgttagcaggttgtgaagtctcatgtcctgtaaagaaaaagtagggggaggaaggaagaaaaacaacaacaagccaaagaacaattctggaaggccaggtgtggtgctaatgcctgtaatcccagaactttgggaggccaaggagggctgatcatttgaggtcaggagttcaagaccagtgaaaccccatctttactaaaaatacaaaaaatcagccaggcacagtggtacgtgcctgtaatcccag

SEQ ID NO: 355724 - DNA, 569 bp, Homo sapiens
aaggaaatactttcaaatatgaaaacataaaatatatataacataaaatttattattataatcatttttgagcatacaattcagtgacattaggtacactcacaatgttgtgtaatcatcaccaccatccatctccaaaactttttcatcagcccaaatcagacttcatacccattaaacaataactttccatttyttccttcccccatcccctgccatcccctagtaacctctattctacttttcatgtctatgaattgcctatttttggtctaggtactgcatgtaagtgtaatcatataatatttgtccctgtgtgcctgtcttatttcacatagcataatgttttcaaggttcatgcatgttgtagcatgtatcagaatataaatatatatatatatatatatatatatatatatatatatatatatatatatatatttttttttttttttttttgagacagggtcttactctgtcagccaggttggagtgcagtggcgcgatctcagctcaccgcaacctccacctcccaggcccgagtgatcctcccacctcagcctcctgag

SEQ ID NO: 355725 - DNA, 569 bp, Homo sapiens
aaggaaatactttcaaatatgaaaacataaaatatatataacataaaatttattattataatcatttttgagcatacaattcagtgacattaggtacactcacaatgttgtgtaatcatcaccaccatccatctccaaaactttttcatcagcccaaatcagacttcatacccattaaacaataactttccatttcttccttcccccatcccctgccatcccctagtaacctctattctacttttcatgtctatgaattgcctatttttggtctaggtactgcatgtaagtgtaatcatataatatttgtccytgtgtgcctgtcttatttcacatagcataatgttttcaaggttcatgcatgttgtagcatgtatcagaatataaatatatatatatatatatatatatatatatatatatatatatatatatatatatttttttttttttttttttgagacagggtcttactctgtcagccaggttggagtgcagtggcgcgatctcagctcaccgcaacctccacctcccaggcccgagtgatcctcccacctcagcctcctgag

SEQ ID NO: 355726 - DNA, 569 bp, Homo sapiens
aaggaaatactttcaaatatgaaaacataaaatatatataacataaaatttattattataatcatttttgagcatacaattcagtgacattaggtacactcacaatgttgtgtaatcatcaccaccatccatctccaaaactttttcatcagcccaaatcagacttcatacccattaaacaataactttccatttcttccttcccccatcccctgccatcccctagtaacctctattctacttttcatgtctatgaattgcctatttttggtctaggtactgcatgtaagtgtaatcatataatatttgtccctgtgtgcctgtcttatttcacatagcataatgttttcaaggttcatgcatgttgtagcatgtatcagaatataaatatatatatatatatatatatatatatatatatatatatatatatatatatatwtttttttttttttttttgagacagggtcttactctgtcagccaggttggagtgcagtggcgcgatctcagctcaccgcaacctccacctcccaggcccgagtgatcctcccacctcagcctcctgag

SEQ ID NO: 355727 - DNA, 556 bp, Homo sapiens
gcaacatattttataaaactgcatggaaaaagatatcagcaatcaatctttagagtagtagacttttgcaaaaacatgatttctcttgtatttgtaccctaataagaaatctagcagtcttctagcaaagaacatcacaacatcttacagaaaatttggtttgaactaagagactaaagagacatagagaccaaatttttaaagttaaaatatttctatcaataaccttttattcaagcattattgagtgttgttttcattagataatggcactggcttctcatatatattgcatatagtattgcagtctgggaatggcatagtcactttcctccattatggtaagctttgcctgtgtctgaatgcccagccttaacagtgttgctaatcacttatgcgaaatgtgtgaccaagtctacatttgctggaaatttytgacattgtaaatatttgggtatattgttgtaatcatcattaattagtattttcaggaaggaaccaggggtaacatatagcaacctagcaagtggatttacttttacagattcattcctct

SEQ ID NO: 355728 - DNA, 564 bp, Homo sapiens
gtttcaattaatacaatcagcaactgggtctggtactatctgtagttcagtcatccactgggggtcttggaacrcatccccctaagactgggggggtcgtggttactgtactttctctcctatcttccatagtttttattatattttttataaaaaataaaagttatggctgggcaaggtggctcatgcctgtaatcccggcactttgggaggctgaggcaggaaaatcactagaggccaggagttcaagaccagcatgggcaacataaagagatcctggttctactatatatatatatatatatatatatatatataaattagccaggtgtggtacatctagctactctgggaggctgaggcagaagaattgaacctgggagttcaagattgcagtgaactatgattataccactgcactcttgcctgggcaacagagtgagactctgtctcaaaataaataaataaataaataaataaataaataaataaaagttatattattcttctaaaaattcgagtgccaggacaattcagtgagggaaagaacaagtttttccaaca

SEQ ID NO: 355729 - DNA, 618 bp, Homo sapiens
aataagtacataaataatttaaaacaaacaaaagcacaagtaacagggtatattagttttctagtgcgattgtaacaaagtaccacaaacttagtggcttagaaaacgtaaattttttttttccctctgcaggctgggaattctagatcaaggtatgaagacagccagttcctagattcagagccatgaggaagaatccattctgtgacttttccctagcttctgatgtttgtctggcaatctttggcattctttggctcgtagacctctgttttcatcttctcaagaaaatttccctgtatgtttgtctaggtctaatttttcctttttatagaacaccagtaagattggactggagctcacgctaatgacctcactttaacttcattatctctataaagaccctatctccaaataaagatacattctgagatgtttggggttacgaygtcaatatatgaattttggggggggacacaattcaacccataacatagggctacccctaattcagagagggaatacacaaggatatggcagttttagttcatttgttgaatcagacttgcatattaactactacatttttatattttgaaataattctaggtgacaggg

SEQ ID NO: 355730 - DNA, 608 bp, Homo sapiens
aagactattttacatttgcagttttctattcaattttttttcttctatttgttatatgctcttgcaggtattttcaattgcctattactctgcagcctaggattagtctcctgttttcaaattgtttaaggaaatccattttattaattgcttcttttaaaactgtcagatcagaccaggcacagtgactcacacctgtaatcccagcactttgggaagccaaggcgggtgaatcacatgaggccaggaattcaagagaagcctgggcaacatggcaaaaccccatctctactaaaaatacaaaaattagccagacgtgatggcacatgcctgtaatcccagctactcaggaggctgaggcaggagaatcgcttgaactcaggaggcggaggttgcagtgagccgagattgtgccactgcaattcagcctgggcgacagagcgagaccctgtctcaaattaattaattaattgattgattaattaattaattaatttwaaaaataaattaaattaaattattaaaaaaaggtcagatcatttgggtggcatcataataaaacaaaccaaaacaataacagcttaaatctacagaggctgacatagcac

SEQ ID NO: 355731 - DNA, 599 bp, Homo sapiens
agtgggtttgctggatcgtatggtagttctattttcagtttctttttttttttttttttttttgaggaatctccacagtgttctccatagtagctcttctaatttaaattttcatcaccagtgtacaagagtttctctttctccacatcctcatcagcatttgttattgcctgtctttttgataaaagctrttttaactgggtgagatgacatctccttgtagtttttatatgcatctatctaatgattaatgatgttgaacattttttcataaaactgttggtcatttgtttgtcttcttttaagaaatgtctgctcataccttttatccatttttgtactataatttgaagtcaggtaatgtgatgcctgaagctttgttctattttgctctgtaattccatatatattttaatattttttatatttctgtgaaggatattattggtattttgatggagattgcattggatctgcagatttcattgaatagtactgacttttaaacgatatagatagttttttttactgtgcagaagctttttagcttaattaggtcccatttgccagttttttgttgtcgttgcaattgtttttgg

SEQ ID NO: 355732 - DNA, 480 bp, Homo sapiens
aatgctcagtcaagagaatgttgtttaatttacatgtgtctacatagttttcaaatttcctcttgttattgatttctagttttattccacttttgtcagaaaaggtamttattttgaaatttacaggacttgttttgtggcctaacacatatactatctttgagaatgtttcatgtgctgaggagaagaatgtgaagttggctgctgttatatgaaatgttctataagtgtctattaaatcaatttgttctatagtacagaataagtcttctgttttgttgtttattttctgtctagatgatatatccaatgctgaaagtacagtgttgaagttctcaactattactgtattggggcctatctctctctttacctcagataatatttgttttatatatctgggtgctccagtattgagtgcatatatatttacaattgttacatactcttagtgagttgacccctttattattatataat

SEQ ID NO: 355733 - DNA, 532 bp, Homo sapiens
cagcaaagttattcataaaaattcatcattttataccacaaatgaaatcttaatactaaaaaaaaaaaaactaagagcattctgtgaattttgaataaaacaataatttgtaacaaatttgaaaacaaaaaattcttccacatggtattaaaatggacagtgttaaacaaccccgggatcaaactggaaacaaataaaactacattatttctcaaaattaaaatggggcttatcaggatttatgggatacagctaaagtaagaatcagagaacatttgacagcattaaatatatgcaccaataaaaattagaaaaaaaattgaattaatatcatttttaaagttattttaaaaccaacaacatattaaacctaaagaaaacagrgagaagaatttgagggaattgtcacctaaattagagtgtacctcagcactgttttacattagtggaccagagctgtttaaataaacagtattgctgccttcatggaactttcagacgatttgaattttaaaaaggactggcttggaaa

SEQ ID NO: 355734 - DNA, 458 bp, Homo sapiens
tctctgattattagcataacattttctcccctcttaggtcccatttacccttcaacagcctcatttacatttgacttactcactcagcaatactgaagagcttcatagaaagaaaatagactgtatrtggacagaaaaactaagcaatagttctagatttgtctgtgtgtgggaaggggggtttaatatcgttattttcattcatatcaacatctttctgaggcttaccgcttttcttttattcactgttcatgttagcctagatttctcatagtttttatttcccaatctttttcttttccaaataggagtaaagtctgtaattagttttatttggtttcctttctttctaaatcttttcttacattcaaacagtatttatttattgttataaataacagaatatcatgggaatcattttgctaacatcttaaactgactgtcagataggctcatca

SEQ ID NO: 355735 - DNA, 561 bp, Homo sapiens
tgcaaaagctttatgctagcttgtcatttcttttatataagtgtcttttcattattaaatttttcctgtctgcaccaaaacttcctgctgaaggaattcttactgattcagtaagaggtatgtttgagtgttcatattagaracactaaattccttcttctaagtcctcctgcagtttatatatcccttaattacaccaataatcatttggcaggcagtatttttagttgtggacatgtcctatatgtctcattagattgtatttcttgacaacacggaacatgtgatattatattacacattaaaaaaaatttatatgaggcatagaatatttccttataaatactacaagaccaatagatgtttctttagttgtgctatttttacatatcaatcctaaaggcatcggatacatttgtcacttttgataactgccaactaattaatatttttatgcatattcttcacagagttcccacggatttataagaaggttcgactatgcttttcccggataaaacgtgtctctttccctttcattgccatctgctggatgacaat

SEQ ID NO: 355736 - DNA, 561 bp, Homo sapiens
tgcaaaagctttatgctagcttgtcatttcttttatataagtgtcttttcattattaaatttttcctgtctgcaccaaaacttcctgctgaaggaattcttactgattcagtaagaggtatgtttgagtgttcatattagaaacactaaattccttcttctaagtcctcctgcagtttatatatcccttaattacaccaataatcatttggcaggcagtatttttagttgtggacatgtcctatatgtctcattagattgtatttcttgacaacacggaacatgtgatattatattacacattaaaaaaaatttatatgaggcatagaatatttccttataaatactacaagaccaatagatgtttctttagttgtgctatttttacatatcaatcctaaaggcatcggatamatttgtcacttttgataactgccaactaattaatatttttatgcatattcttcacagagttcccacggatttataagaaggttcgactatgcttttcccggataaaacgtgtctctttccctttcattgccatctgctggatgacaat

SEQ ID NO: 355737 - DNA, 577 bp, Homo sapiens
aattttaaactctgtgattttcttactttttggagatcattatccaagactttgttttttactaatgcacattttaaagacacatttttggatatgactattacaatgacagatacatattcacattttaaaataacattaatatttgaattttaataaacatattttggccactgatatatgtcagcatgattctttgtttattgtttcatgtaataatgatcttttwatttatttaattttcaccataaactgcagtatccatacgtagcttcttaaaccaggcaacagtttatagcaaaatgtacatccaagaattttgaatataaacttccatacagaagaattcagactgcccttttaagaggaggatgttgaaatgacgagttaatgggtgcaacacaacagcatggcacatgtatacatatgtaactaacctgcactttgtgcacatgtaccctaaaacttaaagtataataataaaaaaaaaagaggaggatgttgatatttgacggaaatatgtacagaagtaaaagcaggcaagtgactaaataaaaggaaaaggagtacccaggtt

SEQ ID NO: 355738 - DNA, 560 bp, Homo sapiens
aaatgacgagttaatgggtgcaacacaacagcatggcacatgtatacatatgtaactaacctgcactttgtgcacatgtaccctaaaacttaaagtataataataaaaaaaaaagaggaggatgttgatatttgayggaaatatgtacagaagtaaaagcaggcaagtgactaaataaaaggaaaaggagtacccaggttcaatatagagctcttggtttttttccatcagggtgtgttttttcttttcaaaaagtattctcaatttaatgtagacaacggactctgtaaacagtttatgattttgcaatatttttctcaaaactctatttcttgctcaggaatgtattttaaaactttaaggttaatacaggttgtgtcctttagtctttctactaccatcccctatatgcacagatcagattaccggtgtggtcttcaataatatattatagtattatactagagatgacacagtaccagttattgggaatgcctttaatgctttgtacccttgagaaagaagaaaaaacagcccttcactatcagtacctgcctgac

SEQ ID NO: 355739 - DNA, 560 bp, Homo sapiens
aaatgacgagttaatgggtgcaacacaacagcatggcacatgtatacatatgtaactaacctgcactttgtgcacatgtaccctaaaacttaaagtataataataaaaaaaaaagaggaggatgttgatatttgacggaaatatgtacagaagtaaaagcaggcaagtgactaaataaaaggaaaaggagtacccaggttcaatatagagctcttggtttttttccatcagggtgtgttttttcttttcaaaaagtattctcaatttaatgtagacaacggactctgtaaacagtttatgattttgcaatatttttctcaaaactctatttcttgctcaggaatrtattttaaaactttaaggttaatacaggttgtgtcctttagtctttctactaccatcccctatatgcacagatcagattaccggtgtggtcttcaataatatattatagtattatactagagatgacacagtaccagttattgggaatgcctttaatgctttgtacccttgagaaagaagaaaaaacagcccttcactatcagtacctgcctgac

SEQ ID NO: 355740 - DNA, 586 bp, Homo sapiens
tataaacattgcacatttaatctacatttaactttaacgttagctgactgtaacttttttactttctaaactcttaaacattttgaactttttgactcttttgtaataacacttagcttaaaacacaatcagactgtacagatgtatgaaaatatttctttctttatatccttattctataaatttttttccatttttaaatttttcaatttgtttttgtttttaaacttttttgttaaaaactaaaacacacacacattagcctagacctacacagagtcaggttcatcaatatcactgtcttctacctccatggcttgtcccaagggaaggtcttcagaagcagtaacacgcattgagctatcatctcctatgacaatgccttcttctggaacrtctcctaaagaacctccctgagcttatttgtgtgatttatactatagcaaaatagtagactattctaatactattctagaaagcatagaatagtaaaatcacctacaaatatatgtacacacacacatatatatacatgcacatacatatacatatatgttaaccattatatatacattagtgtgcatat

SEQ ID NO: 355741 - DNA, 594 bp, Homo sapiens
tagaaaaactcagctggcatcagtattatgtggaaaaaattgattaaaaagcagctcatagacaaattgcacctgatgacaaacaaatggcaaggtttgcattttggagaatctaacaaaattaattgatttctccctccatgtacattcacacactgcttttcagttatcgatgaactatattactacttctcttgatattggaatatatttcttaaagctagtcatggaaacagaatagttaagaacaatagatctgattatttattttcctttatctacttgttacagtctgagttgtctcccaaaattcacaagttgaaatcctaatacccagtacatcagaatgtgacagtatttgaagatgtgatctttaaagaggtagtacattttaagtgaggtcatatggatatgmcctaatcaatatgattggcatctttttaaggaatggaagtgaggatacagagaatgcacaaacgggaaccatgtgaggacagtgagaaggtggccatctacaagacgagatgagaggcctcagaagaaagaaaccaaatctacagacaccttgatcttcaacttctggcatccaaaact

SEQ ID NO: 355742 - DNA, 559 bp, Homo sapiens
aatgaaacatatgctattttgtatataacttaaaatcagatgggaattgaagggatacactatttttagctatgatagatgccttaccatatatttatttaggacaggatgtatggccttgtctcatgctttatccacgcacacactgaataaataacactattgtagttccaccaatcaatctaaatactcaaatgactgaaaggtgtcacgaaagaggctactgttgtttttcctttccctgacttggttggttgttaattcccacagctgtataaaaagaaaaatgttgcctataaatagaaataaacaatttatggcttcatgagaggtttctttggagaaataagattcttttttttttctgtatattttytaacttttcctatccaagtaaaatacccatgacaacttcaaattaatccaaggaaaaaacttctcacaagtaaaacatctttcgtgcatcagaatttatgttggaaagcagaattttgggcaagtttatcacatgcaaaataaaacattctgactttcactgtgttaattgcttaaattaaaa

SEQ ID NO: 355743 - DNA, 559 bp, Homo sapiens
aatgaaacatatgctattttgtatataacttaaaatcagatgggaattgaagggatacactatttttagctatgatagatgccttaccatatatttatttaggacaggatgtatggccttgtctcatgctttatccacgcacacactgaataaataacactattgtagttccaccaatcaatctaaatactcaaatgactgaaaggtgtcacgaaagaggctactgttgtttttcctttccctgacttggttggttgttaattcccacagctgtataaaaagaaaaatgttgcctataaatagaaataaacaatttatggcttcatgagaggtttctttggagaaataagattcttttttttttctgtatattttctaacttttcctatccaagtaaaatacccatgacaacttcaaattaatccaaggaaaaaacttctcacaagtaaaacatctttcrtgcatcagaatttatgttggaaagcagaattttgggcaagtttatcacatgcaaaataaaacattctgactttcactgtgttaattgcttaaattaaaa

SEQ ID NO: 355744 - DNA, 627 bp, Homo sapiens
acgtactgaactccgacagtcagttctcagttctcatcttacctctattagtatttgacttactattccttctcgaaacaaaatcttcacttggctttaaggatatcacaacctcctagtagatgatactcttatcacagtaaccattttttattatcattctccatttgctagtttctctttagtttcccatcatctaaatcattgggtagtctgactagcatttctatctgcattttctcctttgtgatcctctttcataagcttacataccaactatatgttcataagaccccattaactttaggttatctaaaacctggtcatctcttattagatttggatatataactaaatgcttgacaattccatttggaattctaaatcagtaactcaaayataacaagttgaaaatttaaccaaaatcttaatttctccctctttaccaccaatattgatgatgtcttccccatcacagatcataggtaaagtaaaacaataaaaataaaaaataaaaaaacaaacaaacaaaagaaacagattactcccaggtatatagtatagagtatgatgtctagcaaacaactcttacccccatttacagaggaaaatcatattttttgtaaa

SEQ ID NO: 355745 - DNA, 563 bp, Homo sapiens
gtccatgcatattgacttgacagtagacaaatacagttcaagtcaaaggcaaatctcttagcctcctgtcctaaccaattgcttttcttcaattgctcttataaatagtatgaaatatgtaagactgctataagtattaacagcctcagagtttaatgaatacctatatttttttcaggtcttaaagaggaatcagaaatgaataagatctcatttaatataattaaatgcatttctgaacctttccctatcaggataaacaagaagtaggtctagctactgcctgttatcaagatttctaatgacaaaaccgcaggagtaagtccaaacaagtttctcaattaggaacaatggcacagaaagtaaaaacagcatcaagtgaaaataagataaatcatgaggttgcagaagctgacatacaaataaaacagaagtattcactggttggtggtttgagtaaagtggagcacaaaaaacttttagaatgtaagttttgttagagtygagtcgtgatttgttttgtcctctgctgtatccacaggtctgagaaggatgccagacac

SEQ ID NO: 355746 - DNA, 572 bp, Homo sapiens
taatatttcatgggaaacatgcaaatatctttatagagttgataaaaatattattttagaagatagtagacattgtctttgttcccctaatttcctgacttaagccattgtaaatatgcaatacccagaatgaagtttattatctgaaaattacatgaggtatacaatatgtacaaaaaacttgtaggcttccaatatttttatgaatattttgcccactgtagtttgacccttttgtttccttatctttaattgaaagtttaaaatttaagcctatgttgatcttaaggcacaactagtaatttatcaaagcaaaagttctactaagtaaaagtattttcatacttccatataaaacctgtattgtgccctcacaatcatcyttgtgatttatctactgtgtgtttacccttcagtcccatcactttcatcttcttactttgaaaaaaaccgacatttcttcaaactattccattttctttgcaacccagaatggcaataaaataaataaaaaatgagtaccacacctatttatttaaaatgcattgaacactgatagtgtgccaagtaaa

SEQ ID NO: 355747 - DNA, 661 bp, Homo sapiens
aaatataaacatgcatttgtttaaatgttatttgtgagtattttaacattcttttccatatatagctattgtatcacactagagtgaatatttcattttataatactgctctatggcaaatatttttgaaagataacagagaattgttgtcttttgtacttcagaacaataccatcagatggaagacatctggagtatattttcaagctctatattacagatctcttaaaaatcagaaagtaattaggcaaaggagataaagaagtaaaagcatgtttattraaaaaaatttaccaagaatatggaaacattataagaacaatctgttctgtaaaagaagtactaccttgaaataataaactataagagactgaattttaatggacttttcttaaataatgatgattctaatgcaaacactaactttgtttttcatataaaattttctaaattgttttacctagccattttaaaaaacacgttagcaagttttgtgtttgggaaataaaagaacatacagaagaaaaattacagtgtattatttttctcataagcaatttatatttcacatttttctaatgaaattaacagaatcacttaccttcttgaatactatttcagaatcagccagtttaatttatgggtaacactattttaaaag

SEQ ID NO: 355748 - DNA, 564 bp, Homo sapiens
aaaagttaatgttattaaactaattttaaaccataacttcatcagaagtgttctatactttcaattgctatgctatattacttggaattttaagtgagtttactacacaaaaaatgatatagagtrtataactacagctaaagtgtctttatagacctaggtagacatagagttttagtatcataacttgttttatactttaggagttagggtctgtatgttttataataacaaatcctctattgctgcatggggcggggcagctgtaagtgaatggctatcttggttgaggatacctttcaataaaaatatggaaaaaattaaggactatagatatgaaaaaatagagaaacaatatttgtaacatttcatcaagcttcgtaacacattaaggtttgttattttataatttatgttacccaaaataattaccagtaaaatcactgaaattaaaactactagtgaacttctctctgaagagaaaaagaagcttttctttagagatggacttctcatacatggcatgcatcatggctgattgaaagttgaaaggaaagagtttaa

SEQ ID NO: 355749 - DNA, 564 bp, Homo sapiens
aaaagttaatgttattaaactaattttaaaccataacttcatcagaagtgttctatactttcaattgctatgctatattacttggaattttaagtgagtttactacacaaaaaatgatatagagtatatarctacagctaaagtgtctttatagacctaggtagacatagagttttagtatcataacttgttttatactttaggagttagggtctgtatgttttataataacaaatcctctattgctgcatggggcggggcagctgtaagtgaatggctatcttggttgaggatacctttcaataaaaatatggaaaaaattaaggactatagatatgaaaaaatagagaaacaatatttgtaacatttcatcaagcttcgtaacacattaaggtttgttattttataatttatgttacccaaaataattaccagtaaaatcactgaaattaaaactactagtgaacttctctctgaagagaaaaagaagcttttctttagagatggacttctcatacatggcatgcatcatggctgattgaaagttgaaaggaaagagtttaa

SEQ ID NO: 355750 - DNA, 469 bp, Homo sapiens
cccccctctacccagtatttccctgcctcctgtctgtatcacaaacaccaaacagtctcaatgctccataaattgttccagagcattgaaaatgaagaaaatctatyaataactcttatgaagcaaatatattattaaagctcctaaaaacagtacccaaaaaataaagccagatcattattactttgctgtaaaagtgttaaatggaatatttgcaaactgaatccaatgctacattaagaaagtaatatatgaaaaccaaccagcatttattccatgaattcaaggctgattcaatattaggaaaatcatcaatataattcactagattattagatgtaatcatgttactatttctatatatgatggaaaagccttcagcaaaatttaacatccaattctgattttaaaaaaaaactcaaaaatttatttattcttgacaatgtatttatctatatttatatataat

SEQ ID NO: 355751 - DNA, 661 bp, Homo sapiens
aaatctcatagaaaataaataataaaaatttataaaacatttacaaaaattgcttagtgaaacaaactttagttactattagcaataaaatattctttcaatcagcagttgctgaaacttactttttctttgttactacaacatttagtttatataaacctgctgactttagttcctttcctcatcttttaaagcaagaagatagacaaaaaattgctaaaatcacttatatacattattacacctctctccaaataactgaaattacttttaaaatacatttcttcaccagtctgtgagccattcaaggtcaggtgctagttctattttttattgtttatcaagcctatgtaataaagatttgtggrcataatgaatataatgatcataataatgatcatctcaatctgtgctcctataacaaaatatctgaaatgaggtaatttataaagaccagaaatttactttttcacagttctggagcctgggaagccccatatcaaggtgccagcaggttttgtgtctggtgagaacttggtctttactaccaagttggtactttgacctcacatgaaggaagagcagaaaacaaacccactccctcatgcccttttataaaggccctaatcccatccactagagctcacccttatacttaatc

SEQ ID NO: 355752 - DNA, 566 bp, Homo sapiens
ggaaacctgccttcaggaatgtccctgcctggtttctgtcacacgttgttcagtacatttataggacagtatatcacatttaaaaatgtatctgagaggaatgtgagaatcaatcaggatatatccctcttggtattttttttttggcaagttgctttgaccattgttttggaaacaatgccatgatatgtttaaaatataatccaatcctcgatcagtaaagctggcagtcaagaaatgttatttataaggagacatataggttamagcttataacaaaatgtcaaaggaaagtggaggataaacagaggaaccaatttcatcttccaattcagagactcaatgtaaaccatccagaatgtatattacagaaaggcaggcatgttaatttaggaggctttattttttcttcaaatagtaggttcttaacaattatctgctgaatgaatgaatgaaaattgaaattagaaagagttggaaattgaatcaagtcaattctactgctgtgtcccattgtcacactgtgaggtgaaagagtagtataatctatggtgatggtcatgcta

SEQ ID NO: 355753 - DNA, 575 bp, Homo sapiens
aattatttgactttttcaaagcacaatatatttggcagcttcctgaaccattccatgctttgacttagccagtgtgaatggattatagatgtcttgccacaactttgtcctctaatgtggaaaatttgattgttgttttactagtagacttacctaatgcacacaatgtgtccaaagtgagcctataagaaagtattaaaaaaaaacctaaataactcagaaggtaaaacatgaaaacaacagcttgttttcatcaagtcataaaaattaaattatagaaaggggtgaaactatttatccaaaccctgaacagaggaatacagttcaaaataacaataatgtagaaatagatcaaatttagcatacataaatacrgagatatagtgagatgaatatattttgacagtgggaattggtacttaggaaaattacttggaagtatgtagcaagaatttctaaaatgtgttgttttctttttttctttttgaaccagtaatttcaattcctgaagacataatatgtaggatggttgaggaaatatctcagtatcttgacaaaggtgctcttaccaatgt

SEQ ID NO: 355754 - DNA, 543 bp, Homo sapiens
catcatactgtacgggcaaaagctggaagcattcccctttaaaactggaacaaggcaatgatgctcttctcaccactcctattcaacatataactggaagtcctagccagagaaatcaggaaagaaaaagaaataaaaggcatccaaatagggagagaggaagtcaaactattctgcttccagacagtatgattctatacctggaacaccgaatagtctgcccaaaagctcttaggtctttataaacaacttcagcaacatttcaggatgcaaaatcaatctaaaaaaatcagtagcatttctttatacaagcaacatccaaactgagagctgaattgaatgaaatgccttctacaatagccacaaaaagaaaaatgtctaggaatagagctaaycagtgaggtgaaatatgtctacaatgagaattacaaaacactgataaaagaaatcatagatgacatgaacaaaactctcaaagctatttagagattcaatactttcccatcaatttaccatggcattcttcacagaattaaaaacaac

SEQ ID NO: 355755 - DNA, 357 bp, Homo sapiens
aaatgtttcccctttttacagcaggggcatatagaatggggttcttttcccacgttaccttggtctctactattggggcactccctcttcgtatgacctgactctgcataggaaacaatttgggtttctctcccttttcaccttaggaggctttaatgccatagccaatattttggctttgtgtgtttcagtmcccaccagttgacatgctcatgtaagtccccagactggggctgcctttcctctgattgcctgcattgcttgctggcagtcaatgttagtgttttcataagccaattgcaacaataagatatcagcggcctgggtatgactaatttgtctcttaattccctgggc

SEQ ID NO: 355756 - DNA, 607 bp, Homo sapiens
taggaaacaatttgggtttctctcccttttcaccttaggaggctttaatgccatagccaatattttggctttgtgtgtttcagtccccaccagttgacatgctcatgtaagtccccrgactggggctgcctttcctctgattgcctgcattgcttgctggcagtcaatgttagtgttttcataagccaattgcaacaataagatatcagcggcctgggtatgactaatttgtctcttaattccctgggctaaccaattgataaattcaacaaatggctcctgaggcccttgctgaacatttataaaagatctctgttgaacttcacttttgagaatttggtcccaagccctgagagtgcacaaagacacttgtgcataggtttgggaagccaaacttaattgttgttgtacactggcatagggacccctcccctggagcatagcagctgttacgtctcgcccggccacttgattctggttggcttgttcacacaactcattatattctgccttccagaggagatattggctgggctgtaaggttgttttagctagcactgaccagtcccatgtgggtatatggaagttgtttgctatggcttcaatt

SEQ ID NO: 355757 - DNA, 619 bp, Homo sapiens
aacataacaggtaaaatatagaattaagacaaactttaaaatttaggtatttgagaaataggaagtgtatccaattcctcaaaataaagcctgtcttgccctgtgcaatagttattattcctttctcagcattaattaattyagctggaacatcacataattaaagagttgatgataactttgatacataaaattggtttttgtttaatgttgaaaattattcaagatcaaaaggaaataaaaacaggaaaatgtgatttgaatgatcattactactatatctacaagtaagagagaagacaaattaggaaattaataaacaatcccaaatgtaataattgtattttcagcagtgttgtataattgacacacaaagctattaagtaaatgtgatatactatagagtttcttctaccctcacctgtgaagaatgactgaaaaggcataagctcagtaattgctttaattaccagagattctccagtttaggtaggaaaaatgaaatatgtaagttcattcctcatgaaagcacattttggttaaatacctccaaacatctgggtatattactgcattgcatggtgaatgaaaatttcaattgagatatatttttaaaatg

SEQ ID NO: 355758 - DNA, 568 bp, Homo sapiens
aacagcaagtcatagtggcagaaaggaaggcatgcttgtagacttagactctgcctttaattctgtcacagattgtcatgtaattataaaccagccagtgtttgttttttgtagggaaaagacagagagatcagactgttactgtgtctatgtagaaaaggaagacataagaaattccattttgatctgtactaagaaaattgttttgccttgagatgctgttaatctgtaactttagccccaaccctgtgctcacagaaacatgtgttgtatggaatcaaggtttaagggatctagggctgtgcaggatgtgccttgttaacaatatgtttacaggcagtatgcttggtaaaagtcatcaccattctccattctcaattaaccaggggcacaatgcactgcgcaaagctgcagggacctctgcccaagaaagcctgagtattgtccaaggtttcccccgactgagacagcctgagatatggcctcatgggaagggaacgactggaccatcccccagccccatacccgtaargggtctgtgctgaggaggattagtaaaagaggaagg

SEQ ID NO: 355759 - DNA, 603 bp, Homo sapiens
cactgagtgcaaaagaaaagagagcattggtattctagtttcctcagtaaggtatctaaagatggaattacttcctatgcacttccaaaccgaaatgtaggaacaggagatattgctatctgcactttgaagaggagaaaaatgataagaaaaaggtaatgaataatgtgatcatgttttgtaaactaggagaattgttttttcatgggtataatagatcttcactaatattttaaaatttaacttatgatttttaattttgtgcaatctatcagttttagagctgatatttcagaggatgattatatcagaagaaatgcataatgttagtaaagtataaattttatatgcattattactttattttaaaatttatttaatttcctcttgcgatcaaagaataaaataaaactgtccttggaagaaagacaaagttataaataccaaccttaacccagccattaacatactgaatattaggcaaatatttgatttgaaagatgcagataatsattttactggaaattgtttttgtaaggaattatctcattgctttagttctttaggttaaaacaaaatgagattatattatattagaaacat

SEQ ID NO: 355760 - DNA, 597 bp, Homo sapiens
gcaaaattattaatagtgttcccttccccctcgaattgtactgacttggaaaataaattatatggtcattccagctatagaggtctttatataaaagtaattttctttttcaattaattgttttgagaacgaaacataattataaattgtcaatacatgttattacttttttaaaaaattaatagctttaaagttacaggtggtttttcagttacaaggatgaattgtatagtggtgaagtataggattttagtgcacccatcacctgagtagtgaccgttgtatccaataggtagtttttcatccttcactccctgcccacccccaaccttctagtctccaatgtccattgtaccactctgcatgcctttgcatacccatagcttagctcccacctrtaagggagaacatgcagtatctatgcagtagctggtttcaattcctgagttactacacttagatcaaaaaactacagtatcatccaagttcctgcaaaaggcattagctcattctttcttatgactcagtaatatttcattatatatatgtgtgtagatttatatttacacaccacattctctttatccactcatttgt

SEQ ID NO: 355761 - DNA, 401 bp, Homo sapiens
  misc_feature (1)...(401): n = A,T,C or G
tccaataacagtttcctaagatttcaaatgtctgcattcttataaacattatactgagcacctcatcattttctccctgacataatctaatttatctccctttagaccacagaaaccatccttttctcattttccaaaggtctctatgttgtgaaacaatrtcatttatcttgatctttctctgccttctggtcatttttaacaccattaacggcaacagcttctgcagaaccactttaactcctgctttcaagtttgtcacaaacccctcagttagtttccttaaattttcagtggaagagaatttccaattcagcactctgctgataacaaacactgtgtccttggcagcctgcatctgaccctgagtgnnnnnnnnnnnnnnnnnnnnnnnnnnnnnn

SEQ ID NO: 355762 - DNA, 385 bp, Homo sapiens
cctatttgcctgtgtgaaaaagagatggatcttggagaataacaacagattatccaggaacagaatcaagtgaacttaaattgcagttgctgtttcagatgtgatttaattgcttgagcaaattaacacatcccttggtacctggtgtgcagccatcgatttgtcaaatgcttttttcttgatatctgataacatagacaagcagaagyagtttgtctagctggcaaggccaccgataaacctgcacttgaactcgcttgaactcgggaggcactatcctgcctctagggtatatcaactctctaaacttatatttagtccatataaattaattcagctaaaatttagtccacagggactttgattgcctttcccttctacaaga

SEQ ID NO: 355763 - DNA, 515 bp, Homo sapiens
tatttatagagttaattatagattataaaactaattatgcactctgtggtttttccctctgaagctgctccagatagtctacattcaccttcactacatctttgtgatgtggtcatcagatcaattatttttctctaataaaaagaaaaggagggaagtggtttgcacaaggtcactgatcaaattagcactaaaacttggcagcttgaagctcgagtcccatgattcctgctcctgtgctcaacccagaaagccctgctgcctcccagagcatgatgctctctcaggaatggctccatgtaagctaaacaggcagacctccccsttatgttcagctacacagagaggatgcaacctactgcatggtcaaatctgttctcacccttcaaccaaataatagcatatgctaaagagattacacaatgaccaagaagcagccctcatctttatccagtgcaatgaaccctgatggagcacctcagccttataaactccttgttacaatgacagaaaaa

SEQ ID NO: 355764 - DNA, 603 bp, Homo sapiens
gttaagcttccaaagggggccatagagttcagtattttctaaactttattttagaaacttttactttcaaaaacaaactgggctgatgttcacaaattataaggcagggttcttttgtagtctagctatgatgttaggaaccaaatgttartactttccctgctgttctttctcattgttgaaatggagataatcacccctatctgtcaaagactcaggaagcctgttggtaagttgggtttgcataagcacataaaagcattctaagtgtaaagtataacaatagttttgagctgtacatctcacacagaatccactttataaaacatactcatagctttataatctgtaaactttgcttgcagattgaagaccaaattttcaaagagtagcttttcatttgcatcctgaaggacatgcagtggcaaacattgcatgtgcagcttgctggactggcaattcttaccaaggcagctgagagccactgcttacatctaatgaaaaaagactccttaaaattatctccagttatatacctaatgtaaatgacgagttaatgggtgcagcacagcagcatggcacatgtatacatatgtaacaaac

SEQ ID NO: 355765 - DNA, 603 bp, Homo sapiens
gttaagcttccaaagggggccatagagttcagtattttctaaactttattttagaaacttttactttcaaaaacaaactgggctgatgttcacaaattataaggcagggttcttttgtagtctagctatgatgttaggaaccaaatgttagtactttccctgctgttctttctcattgttgaaatggagataatcacccctatctgtcaaagactcaggaagcctgttggtaagttgggtttgcataagcacataaamgcattctaagtgtaaagtataacaatagttttgagctgtacatctcacacagaatccactttataaaacatactcatagctttataatctgtaaactttgcttgcagattgaagaccaaattttcaaagagtagcttttcatttgcatcctgaaggacatgcagtggcaaacattgcatgtgcagcttgctggactggcaattcttaccaaggcagctgagagccactgcttacatctaatgaaaaaagactccttaaaattatctccagttatatacctaatgtaaatgacgagttaatgggtgcagcacagcagcatggcacatgtatacatatgtaacaaac

SEQ ID NO: 355766 - DNA, 603 bp, Homo sapiens
gttaagcttccaaagggggccatagagttcagtattttctaaactttattttagaaacttttactttcaaaaacaaactgggctgatgttcacaaattataaggcagggttcttttgtagtctagctatgatgttaggaaccaaatgttagtactttccctgctgttctttctcattgttgaaatggagataatcacccctatctgtcaaagactcaggaagcctgttggtaagttgggtttgcataagcacataaaagcattctaagtgtaaagtataacaatagttttgagctgtacatctcacacagaatccactttataaaacatactcatagctttataatctgtaaactttgcttgcagattgaagaccaaattttcaaagagtagcttttcatttgcatcctgaaggacrtgcagtggcaaacattgcatgtgcagcttgctggactggcaattcttaccaaggcagctgagagccactgcttacatctaatgaaaaaagactccttaaaattatctccagttatatacctaatgtaaatgacgagttaatgggtgcagcacagcagcatggcacatgtatacatatgtaacaaac

SEQ ID NO: 355767 - DNA, 497 bp, Homo sapiens
ttttaaattttcttgtaaaattacttactgctcagtagaggtcagtaatggaacacgacagaaagagataaaaaaatgaaaacaataaatgtgaaaaacctggagacattaatattaaagtttatatgtatgagtctcaaaaaatcgagttagaaatatgccttgtcttaaactacacattcttaaaatgcgtgtgcatttggtttttaaaaagccatctttatggaagcataagttactgtcaatagagttacctcttttaagcaaacaattcagtgacttctgagtaacgtacacktccatgaaaccgcccccacaatcaaggtataggacattcctatcacctccaaagtttccttgggtctcttctcaggcaatgactaatttcttgccaggactatatgtttgttctttgggagtttgtatagatgcacattaaacctttaattttatatcttaaataattttaaatgtgataggagaaccatccatcaaac

SEQ ID NO: 355768 - DNA, 497 bp, Homo sapiens
ttttaaattttcttgtaaaattacttactgctcagtagaggtcagtaatggaacacgacagaaagagataaaaaaatgaaaacaataaatgtgaaaaacctggagacattaatattaaagtttatatgtatgagtctcaaaaaatcgagttagaaatatgccttgtcttaaactacacattcttaaaatgcgtgtgcatttggtttttaaaaagccatctttatggaagcataagttactgtcaatagagttacctcttttaagcaaacaattcagtgacttctgagtaacgtacacttccatgaaaccgcccccacaatcaaggtataggacattcctatmacctccaaagtttccttgggtctcttctcaggcaatgactaatttcttgccaggactatatgtttgttctttgggagtttgtatagatgcacattaaacctttaattttatatcttaaataattttaaatgtgataggagaaccatccatcaaac

SEQ ID NO: 355769 - DNA, 497 bp, Homo sapiens
ttttaaattttcttgtaaaattacttactgctcagtagaggtcagtaatggaacacgacagaaagagataaaaaaatgaaaacaataaatgtgaaaaacctggagacattaatattaaagtttatatgtatgagtctcaaaaaatcgagttagaaatatgccttgtcttaaactacacattcttaaaatgcgtgtgcatttggtttttaaaaagccatctttatggaagcataagttactgtcaatagagttacctcttttaagcaaacaattcagtgacttctgagtaacgtacacttccatgaaaccgcccccacaatcaaggtataggacattcctatcwcctccaaagtttccttgggtctcttctcaggcaatgactaatttcttgccaggactatatgtttgttctttgggagtttgtatagatgcacattaaacctttaattttatatcttaaataattttaaatgtgataggagaaccatccatcaaac

SEQ ID NO: 355770 - DNA, 547 bp, Homo sapiens
gattgactacactgggcaacagatataattggaaattcaagaatatttcctttattaatcctctcttttagaggagtgcagtcttcttaaggatccataygcttggagtgtcatgttagacaaaacagaaaacaacttagtgattgctctctagaaatgtatgaactaataaaattgaatgaagaaaaaatatacatactttttaaagggaaaaagatgcttttatttttttattcagtctggaagttattttcatataaggtaagaagtacattttatctgcagagaaactcttttcatctgaacttgacccatgttaacctcattggttatagggggtcacaggaatatgaaacctccccatatgttctttggaatagtttcaactttagtttcattgtttaaaagttgttcttctttgtgcttttacttccttttaatattcttcctgctgctatttccaagtagttaatttaactggcagtggattaactcaccttggctagcaatggaacaatgaaaaatttaacacagtgtttatttattc

SEQ ID NO: 355771 - DNA, 546 bp, Homo sapiens
tgtgtcagtttgcattaggctgggttatatatcacagaaaagccccaaaacaatggcttaaaagatattctatcatataaaataaattcaatattaggcagactagagataatgtaatatctccacaaagatataaggtctcaggctctcccatctttcttctctattatcctaatcaattacttatcttctcaaggttatcttttggcccaagtgtgctgtgctggcctcarccaatctttttttccatctttccttatataattgctttgctttcccccataatcctgcttaacttgaagtctcagacttatcctttttgggtgagggatctagaatgcttgtgctaaccttaagggcacttcgtcgcaccctgtcatggtcatctcagtcaaatcataaatcaaatgcatgaccattatagtgcctctcatgttcaaggtcactccaaagcatttaacccataatttctcatgacatcaacaataaactttctctgtgcaaagagaaaagtttttagatatacctacaagatatatctagttt

SEQ ID NO: 355772 - DNA, 572 bp, Homo sapiens
tgactatattgatattaatcatttctctcttcttttttcagtctttcaatatacataacttgtgggtagttaactttgcagttttgcatataattatcctgggattattcagatctgcctgtaggaaccaactcgactttggatcatttcctgttagttgtgtgagagatgtctcactctgctaggtggagataagttttaacgtatgaatatattaagatggtgtgtatggatgttggatgggcaaatgtgaggcccacagtggtcactggtaagtttctagctatctrtcactcaaccacccacttcctccagcatcacaaactcctctggggaattctccaccatgacagtccagggaaagaagtagtagcctcccattgtggaagccagaattgctgattccatctctctctctggcttacagaaaattgtattctttggctgcaattaaagtgactgaaggaggaggaaacagttgggagtctgattcataagctgacatctgctatgtgaacaaggctgaagagcatgttgtttagtcctccagagctccctgggttcttgtcctc

SEQ ID NO: 355773 - DNA, 581 bp, Homo sapiens
gtggaagccagaattgctgattccatctctctctctggcttacagaaaattgtattctttggctgcaattaaagtgactgaaggaggaggaaacagttgggagtctgattcataagctgacatctgctatgtgaacaaggctgaagagcatgttgtttagtcctccagagctccctgggttcttgtcctctattcaagscttctccattatctgaaaccctgatatataataatgtattagtctgttctcacactgctaataaagatataccccaaactgggtaatttataaataaaagaggtttaatggactcacagttccacatagctggggaagcctcacaatcatggcagaaggcaaaggagaagaaaagggatgccttacatggtggcaggcaagagagcttgtgcaggggaactcccatttataaaaccatcagatctcgtgagacttattcactaccatgagaacagtactggggaaatgtctcctatgattaaattatctccatctggccctgcccttgacatgtggggattattacaattcaaggtgagatttgggtgggaatgcagccaag

SEQ ID NO: 355774 - DNA, 581 bp, Homo sapiens
gtggaagccagaattgctgattccatctctctctctggcttacagaaaattgtattctttggctgcaattaaagtgactgaaggaggaggaaacagttgggagtctgattcataagctgacatctgctatgtgaacaaggctgaagagcatgttgtttagtcctccagagctccctgggttcttgtcctctattcaaggcttctccattatctgaaaccctgatatataataatgtattagtctgttctcacactgctaataaagayataccccaaactgggtaatttataaataaaagaggtttaatggactcacagttccacatagctggggaagcctcacaatcatggcagaaggcaaaggagaagaaaagggatgccttacatggtggcaggcaagagagcttgtgcaggggaactcccatttataaaaccatcagatctcgtgagacttattcactaccatgagaacagtactggggaaatgtctcctatgattaaattatctccatctggccctgcccttgacatgtggggattattacaattcaaggtgagatttgggtgggaatgcagccaag

SEQ ID NO: 355775 - DNA, 510 bp, Homo sapiens
cctgtgtaacaaaactgcacatcttgtacatatatcccaaaacttaaaacaaaatttaatttaaaaaaattgcactagagacaaagaaggactttttataattataaagtgtcaatgtccatcaagaagatatagcacttatagacatattaacaaagtaaaatgcaacatatagaatggtagaaaatatttgcaaatcataattccaataaaagtgtagtttccagaaaatacaaagaatcctcycaacttgcaataaaaagacaaatatccaattaaaaaatgggcaaaggatttgcatagtcatttttccaaaaaaagatatacatatagataataaacacacaaaaagatgatcaacagcattggtcattagggaaatgcaaatcgaaaccacaaggagatagcccttcacacacactagaatggctaaaatcaaaaagaaagacaagaacaagtgttagaaagaagtcagagaaattacaaccatcatacattgccggtgtaaat

SEQ ID NO: 355776 - DNA, 580 bp, Homo sapiens
atgaaagttcataataagttgcctttctgtaagtgagcttgacttagaaaacctgggtagcctaattcattgtgttaaaaggccttaagagcagtgctgagggtttcagacagaagaaattctgcctgtggacaacaggctcaactcatgcccagcagttccagtctgcctttcctggtagctttccctacagattttagaggacattggtaatatggctcggctgtgtccccacccaaatctcatcttgaattgtagttccaataatacccacatgtcatgggagtgaccaggtgaaggtaattgaattatgggggagcttttccccatcctgttctcgtgatagtgagttctcacaagagcttatggttttataaggggcctccccctttgctyggctctcattcttctctctcctgccaccttgtgaagaagatgtgtttgcttccccttctgccatgattgtaagtttcctgaggcctccccagtcctggggaactgtgagtaaattaaatcactttcattgataaattacccaatcttgggtatgtccttatagcagagtgagaatggactaata

SEQ ID NO: 355777 - DNA, 587 bp, Homo sapiens
atcccagggttctgtgggggatttcttagcatccacacacgacttaaaccacaccagctgggtttgtcaatctatttattatgaagctgggtactctttagataaaaggctttaactgctgaaaaaaaagtttagaaaatatgaataaaatgccttaaaagcctgtattttactcctggctttacactgtctagccctgtggccttggatgtttaactcatctaaactgtaaattatctaactataaaagaagagtagtaacatctcacagggctcttaagagaacaaaagttcataaacataaaacttttattggaatgcctgacacttagtgctcaaaacacagtggtggttgttaatactattgtaatkttatcagatctagaagtttaggaagagtctggagtggtcttcagcattatgaggtcatagttatccttgtgtccagctttagcatagagcagagtctgctccttaatgcatccctggatcatagcagactctgcctatagaggcctggggtccctttggcagcacttttctcaagaaagtagagtcgtggacaaccaactgcacaggttgggagg

SEQ ID NO: 355778 - DNA, 558 bp, Homo sapiens
tcagactcagttaaatctgtcttgcatcaagaaacgatctgaaaacaaagggagattctcaataggatgtagacgttccccacaagagacagctttgcagtgctatttcaaaatatgtcaaaggaatatattttagagtgaaatacttcaatttctttcagagcctgctacstatcatatgatgctatattagagccaggttggaatttgatattttgtgctacaaagagtctgttttgtcactcttaagatctctgttttactgttaatgctggttaattgtgcctgaattccaaagggaggagagtgtaatgacgcatgtccaacctgtccatgccattgtggcctgaactagttttccagttttactctggaatgtctttggccaaaagaaaggatccattccgttggttaggggcttttaatttcatttttggtttacaaaagaagaggctgaggcaaaattaatataagtaagaagaaatttatttgtgcaaatcttgccaattgcaaccaaagaacatacattcaagtttccctgaatacacactcctatta

SEQ ID NO: 355779 - DNA, 580 bp, Homo sapiens
aatctcatttattgctaattaggcgttagtgtggatatataggctgggcacggtggctcaaacctgtaatcccagcactttgggaggcccaggaagatggatcgcttgaggccaggagttcaaratcatcctggcaacatagcaagacgctttctctaaaaacatttttaaaataacagccatgaattatgtcacacacctgtagtctcagctactcgggaggccaaggtgggaggaccacctgagtctaggagtttaaggttgcagtgagccatgatcatggcagtgcactccagcctgagcaagagagtaagcctctgactctatttttaaaaatgtgtgtgtgtgtgtataagtgatttgataaccaaatcaaaattttacataatctttgacctagtagttccacttccagaaatttaaccttaggaaataaacatgaatatgaataaagaggtatctataggcagcatgtgtataaaaacaaggggaaaagctgggaggccaacatttttccaaaaataaggggtggggagaaaatagaaaataaagtaggcacattaataggataaagaactat

SEQ ID NO: 355780 - DNA, 554 bp, Homo sapiens
gtcatattgttttgattataactttatgactttatggtatgttctaatatttcttaaagtctcccttactggttttctttttacactttcctcctaaagtttgaatacattttatcaaatttcaaaatcaaagtcaaatagccacaacaaaactccttcttgacattttcatagaaaatatattaaatttaatattatttgtaggaraggtgatattcctatggtattgtcttcccaaccaagaatatgtaccttttcttttgttaaggtatagttttatgagctttctcaagattgaaattatagaagaaactagaaaaagtagaaaggttcacagctgagccttttttttctttttaaattaagttatattgtacttattatgaaaagtacagatcttaaatacacaattagatgtctttgggcaagtgtatacacccctactaagatatagaacattaccgtcaccccagaagcttcccttgtgagtcttccaatgaatccccacaacaaaggttactatggttctgattttcagcactatagttttagtg

SEQ ID NO: 355781 - DNA, 544 bp, Homo sapiens
cccagggctcctgggtttttgggtatgcattgtgaaaaagtacccattcataacaacaacttgagttcgtgttgtctcaaaaagttccaggaagaagctcagccccagcaaaacaaaaaactggtcatatgcagagatgcctgactggagatgaactttggcaaactctcctcattatcatactaaaaactccacccgaggaggagcttatttgtcattttctaaacatgccagtatttggaagcatgatctgcatctgtgctgcctttattccacctctacatacagtgactgagctaactagcccaataaaagccctgttttcagcattgttaggggagacactgctttgggaactmtccctggtgtcctccttacttgttgcataaaatcttgctaaatccttcttggtgttgtgatcattggactatcatgcgctatgccattgactttacctattgtataggtaacaaatgtcagtaaatgttcatattatctattattattgtcactagtgtcattgttattactactcctactatga

SEQ ID NO: 355782 - DNA, 597 bp, Homo sapiens
catacacctatatccatagcacaatatcattatcagtcccaacaagacctttctcctattttcatctaaatatcaccttggttctcaaacatcactttcattactttccccacataggcacccactgtaagatgcttgatgtatgttcttacatgtttatgtctgctagtggattatgcagtgttagtgtgattgttggggaagtacttcaatgtacatagagagtatttagctttaagttttttctgtttctttctgtggtcactgaatattctgtataagatcaattcagctgtttgtacatctggcgcttctcttttaatgactgtgtaatatcctatggtatgaatctactatgatccatattgccatggtgactgataactaggctggcacccacaccaactaaagcaaacatcataaggacaaaaatcctcaatcctatccctctattgaactgtgcaagaatttctctgggatacatactcaagagggtcataagtaggctatgaggaayacacatattttatttctctaatattctttccagactagtcataagcatttacacttccaccaacagggcataagagttcc

SEQ ID NO: 355783 - DNA, 555 bp, Homo sapiens
ttgttacataggcatacatgtgccatggtgatttgctacacccatcaactcgtcatctacattaggtatttctcctaatgccatccctcccctagcccccacctcctgacaggccctggtgtgtgatgttcccctccctgtgtccatgtgttctcattgttcaactcccacttatgagtgagaacatgtagtgtttggttttctgttcctgtgttagtttactgagaatgattgtttccacctttatgcatgacrctgcaaaggacatgacctcatccttttttatggctgcatagtattccatggtgtatatgtgccacattttcttttatatatatatatatatataccttaaattctagggtacgtgtgcacaatgtgcaggtttgttacataggtatacatgtgccaagttggtttactgcacccattaactcgtcatttacattaggtatttctcctaatgctatgcctccccctgcccccaccccatgacaggccccggtgtgtgatgttccccaccttgtgttcaagtgttctcattgttcagttccc

SEQ ID NO: 355784 - DNA, 555 bp, Homo sapiens
ttgttacataggcatacatgtgccatggtgatttgctacacccatcaactcgtcatctacattaggtatttctcctaatgccatccctcccctagcccccacctcctgacaggccctggtgtgtgatgttcccctccctgtgtccatgtgttctcattgttcaactcccacttatgagtgagaacatgtagtgtttggttttctgttcctgtgttagtttactgagaatgattgtttccacctttatgcatgacactgcaaaggacatgacctcatccttttttatggctgcatagtattccatggtgtatatgtgccacattttcttttwtatatatatatatatataccttaaattctagggtacgtgtgcacaatgtgcaggtttgttacataggtatacatgtgccaagttggtttactgcacccattaactcgtcatttacattaggtatttctcctaatgctatgcctccccctgcccccaccccatgacaggccccggtgtgtgatgttccccaccttgtgttcaagtgttctcattgttcagttccc

SEQ ID NO: 355785 - DNA, 607 bp, Homo sapiens
gcctatgtttcaccatttgggatatagtgaaatctaactctcatcatgggcctacggagtgatggaggtgaatcagcatcatcttgctaggcaattatttgtagactataattatacaggggaaggctatttccctcagatgggagttggggaggctgcctctgctagtaagggagatttggggagatccaatggtatgaagttctcagtttcatctacgtaaatttaaatctcttttcttcccttcccttcacttcccttkatgtaagaggcctgtcagatctgagcatgtgttggcatttcaattctgcaacctttataactgggtctggttcttagtcctcagccctatctaccctgcaattacaggagataagggacttcttcaaaggtccatgaggctttctgattttccatgcatgctctcaactagatagtcacagttttccatttctccttttacaactaggttcacttgctgggttaccagaagaagccaacagatgcctcatagtcccctaatgtaacagccacttgatctttcagcacatcagcttccgcctacatttcatctcactcgtgttcatttaaataagcatgtgccatc

SEQ ID NO: 355786 - DNA, 613 bp, Homo sapiens
acacatatgagtctaaaaacaggaagcttatcagagttgttctcatagaagaaaataacgtactaatacatcactatttaaactacagtagctaaagtaacactctttaagcaatgagaacaagtacaaatgcgggtactttaaaaatgacataagagctcaggtgagccagaatkgtctctaagcgttaatcagatcatgtcattccccttgttaaagccctccaacatgtccctctacacttagaacaaaactcaaacactttaggatgaacttcaaagctcaacatgttgtattccttgtcaaacccttgactttcctccctgccccttgcctactgagacagtatcctttctgttctggaatatggcaagctcattcctactttatagttttgcaccaagtgctctgtttgcctggaatgcccttccagtaaatcttcacatggctggctctttctcgttgatcagaaattttatcaaatatcaccctctcaaaagcgacctccatgaatacccaatcttaaggaacccctccaaacctctgctctttaatttcacatcaacctataaagcagctatagctgtatttataatataaactccatgagatt

SEQ ID NO: 355787 - DNA, 627 bp, Homo sapiens
attatgaaacgaagatgaaatttaaatgtatttaaataattatatattttatttcctttataatggcacagaaatatttttgattgctgcattataatattttgtgatttcagtatgattgaacatttatgtccatgttcataatttacttataaataagtaggaacattttgaaacatacaagaatagaattttaaaagagctaaagatgtgataaaaatattttatataattgtgtatcttcttttaatgcctcaaaaacacctttcttgttttcctattattttttcttggcttactgtaayttaaaggtctaaatctttgttgaatttacttggatgctcggactcttggttttaatgggtataatagttagaaaaagtaactccagagaaatatgttataatctgtgcattcccctatatttcaaatagtgtgtttaataattttaaattttttaatataagattagattgtcattgttttgaatttcataatttggaggaaaaagttctagtaaaaaagttcgagtaaaaaagtgtcagcgctaccattttctcacagatcagctatgcttgcactattagtattatagttgctttgtaggaatccttttaagccactggt

SEQ ID NO: 355788 - DNA, 627 bp, Homo sapiens
attatgaaacgaagatgaaatttaaatgtatttaaataattatatattttatttcctttataatggcacagaaatatttttgattgctgcattataatattttgtgatttcagtatgattgaacatttatgtccatgttcataatttacttataaataagtaggaacattttgaaacatacaagaatagaattttaaaagagctaaagatgtgataaaaatattttatataattgtgtatcttcttttaatgcctcaaaaacacctttcttgttttcctattattttttcttggcttactgtaatttaaaggtctaaatctttgttgaatttacttggatgctyggactcttggttttaatgggtataatagttagaaaaagtaactccagagaaatatgttataatctgtgcattcccctatatttcaaatagtgtgtttaataattttaaattttttaatataagattagattgtcattgttttgaatttcataatttggaggaaaaagttctagtaaaaaagttcgagtaaaaaagtgtcagcgctaccattttctcacagatcagctatgcttgcactattagtattatagttgctttgtaggaatccttttaagccactggt

SEQ ID NO: 355789 - DNA, 557 bp, Homo sapiens
gaccttcgctactcctgtcccttttgtaaacacctacctgaaatcaaacccctcctgcttgaatcaacccagtagtgkctctcttcctgacagaatcatgactctatgtaaggttaaagtcccttttaaggaccaccatgttcattcctgcttgacttcctctctgacccagatgtaaatattgtcatcattttagtgtctgtccttttagattgtatatatacataaatagacacaaatacagatggtatcttatattttttagtattttttctaaaacacaatggtattactgtgagtgttctgtttatctattggtgcataacaaaccacacaaaaacttactgctgtaaaaagcctgacatttcttatgctcacaattctgtgagtcaaaaattagggcaaggcacagtaggaacagtgtggctgctccacaatgtctggaacttcagctgggtggttcaaaaggataaggatggctgcgattgattgactggggccatatgtccaggaccttggctatcctctacatggcatctgctgggaccataatgtcc

SEQ ID NO: 355790 - DNA, 567 bp, Homo sapiens
cccaggtggaacctgcaaagcttcttaagacccagaatgacttctgccacacttttctggtccaggaattcattgaaacaagcccagattcaagggaaggatagaaatagatgtaacctcttgatgggggaaatgacaagggaaaggattaatggtgccactctggagacaagttatcacaatgaataccattctgtaactaggtttcacactcagcaataagtctcggtgatctgccaagctagtccatacagatctacctcatttcttctcattcttgtgtaatatttactaagatttttccacaatttatttggacactttctcctttatggacgtatacatggttatcatttttctgttttaaaatcattcttgaccatatttatttttgtttatgttccagtatttctcaggttaatactgagaagtaaaattatatttttagcatcaaagaataagagcatatttaattaagagcactacccaattaccttctaaactggctcatccagtttgtattacaccatgactgtatmagcactagtttccctagtaatcacttga

SEQ ID NO: 355791 - DNA, 636 bp, Homo sapiens
tctaatccttactgtgttctagttgtgggagacaagacaattagttcacttaccctcccatcttcttttctattctgcaagatggataagataattcatgccctgttcatctcacaagatcatagtgaggtgagatttgtcaaagtattttataaacacaagtattttataaacaaagtattttataaacacaaagtattttataaagcatcctctatgctttttcatgatgtacttatgagagggtagattttggtktaagacacatccattggaagctacatccaaaggagtttcctaaaattgtctccttcaggagctatgctaggtctcatctttaaagtttccccaaaggcagaattgcagagaggctacgcaaaactgggaaaggaaaattcttgaagaatatacaaatagtcaaaaagtctttcttgatgcctgatagttccatacctaaataattaccattctgcagtggactgaatgtttgtccccaccaaaattcatatgttgaaatcctcaccccaaggtgacggtgtcagtaggtgaggcctttgggaggtgattagatcatgagggtagagccctcatgaatgggattagtgcccttagaaatgagacccaagagagctatct

SEQ ID NO: 355792 - DNA, 492 bp, Homo sapiens
gcaaaactgggaaaggaaaattcttgaagaatatacaaatagtcaaaaagtctttcttgatgcctgatagttccatacctaaataattaccattctgcagtggactgaatgtttgtccccaccaaaattcatatgttgaaatcctcaccccaaggtgacggtgtcagtaggtgaggcctttgggaggtgattagatcatgagggtagagccctcatgaatgggattagtgcccttagaaatgagacccaagagagctatcttaccacttctgctctgtgaggacacagtgggagacggacatttgtgagccagaaaacaggyccttaccagccagcaacttgatcttatacttcccagcctccagtactgtgagaaatgaattttgtttgtttgtttaaaagccacccagtctacggtaatttgttatagcagtctggctggactacgacacattcttaaattctacaccttttcccctagtcttaacagcc

SEQ ID NO: 355793 - DNA, 492 bp, Homo sapiens
gcaaaactgggaaaggaaaattcttgaagaatatacaaatagtcaaaaagtctttcttgatgcctgatagttccatacctaaataattaccattctgcagtggactgaatgtttgtccccaccaaaattcatatgttgaaatcctcaccccaaggtgacggtgtcagtaggtgaggcctttgggaggtgattagatcatgagggtagagccctcatgaatgggattagtgcccttagaaatgagacccaagagagctatcttaccacttctgctctgtgaggacacagtgggagacggacatttgtgagccagaaaacaggtccttaccagccagcaacttgatcttatacttcccagcctccagtactgtgagaaatgaattttgtttgtttgtttaaaagccacccagtctacggtaatttgttatagcagtctggctggactacracacattcttaaattctacaccttttcccctagtcttaacagcc

SEQ ID NO: 355794 - DNA, 597 bp, Homo sapiens
ttagttttttctttaaccctgggccatacacaacatacacaaaaacactatgcagaaggaaattagaactcaaaagaaatcaatacctaagatgtttatttttaaattttaaagtggtaacaaaatggcatttatcaaatagggtgttattcctatacatggcaagaactcttgttagctttttgtactttgaggggtagaatgaaaaagtacatacttttactgattatgaaggtagtctgagtttatagaaaaagagaagaaactagggaaagaaaataatataattcttatataatttttattaatatcatttatcaagggttgtgtttaacattttaatatattttcttccagacagctttctatagaaacaaatagacttgcatatatgttttacaagttggatgaaattgtatatatagtattagatcttcatttttttaatttagcatttttattatgattatagttttatacccttaattrttcttcacagtcatgattttaactgtttttatcttacttcattgtatggaggaattgtgatgtaatttttttctccaggtgttggacacattaacataacaataactg

SEQ ID NO: 355795 - DNA, 630 bp, Homo sapiens
ttattttattatacagtttgtgaatcaaagcactgtgctttaaagaaaatctatttatatttatgaaattcccatttctctctaaaataacaaaatgttgtgatatccaggaaaactatcttctcatcatataaaaaaggatgggaggagagtaagagtcttctattgtacataaatattctcacagaacagcctctagctacctccactgtcagagctaccacttaaaccttgatagctatgaggctaccctatctaaaaaataatggaaacaagggttgaagaagatggaaaatgtagtcttcttgcatcttaggatggctagaatattgcctcttaaatagaagaaaacatgttataaaagggatgtagcagctgattgcttgatctcttaaccttctgacatttcattttggaaaaataaaatttatgccacaagtgcaaggctcagctaacagagtagtaatgacatggagaaaaacgaaaactgtggagtatttattgggcagaaagtaacagaataaaagagccaaatacagcatcattttaaaggaacagttcttaaaataataagwtttaaagggcctcgtggcataaagaatgtgttaaattcccctgcacagtcattac

SEQ ID NO: 355796 - DNA, 537 bp, Homo sapiens
acgatgacagagtagattcagtcaatgcaagctatatccttaggccactaaataacaggattttctgtacgttcaaagactgagagaatcctaagccaggaacctaggatttggtggttaagcaggattaagttaactgccctgaacttcttgaagcatgaagttctcagtttgatttcttagccctttgggctacagtgggtgtatggtatatcccttgtgaagtctgcacttcactgggctttaagcaatgactgatgaaggatcaaaaatagttccaatttaagtggttaaaaaatgaaaagtaaaagagacatggaaatcagcactcacaacacyggtaggaatcaaaattgctgctacatttcttagggaaaaggtggcagtatttatcaagagactaagtgagcataccctataacccagcaaatggatgtctaaaaacttatcctaaagagctgacaatgaaggggcctaaagatttacaataaggataatagttgcaaggttatttataatgttttttaatgtaagccc

SEQ ID NO: 355797 - DNA, 642 bp, Homo sapiens
acaaaaacaggtaacaaaactagtaagaaatcaattwtaagtgaaatatgccagtcacaaaaacacaagcaccatatgaggccacttatacgaagtacctagaatcatcaaaatcacagatacaggaagtagaatggtgattgccaggggctggagggactgcggagtggagacttgttgttcaatgggtacagagtttcaattttgcaagatgaaaagagtttttagagattatgtgcagaacaatacaaacgtacttaatgctgctaaactgcacccttaaaatggttaaggtggtaaattttattttatgttatgtatgttttgccacaattaaaaatttaaaattttaataacaattatatcttgaagatgacattttgagtagttttaattttcttcatttagtttgtctaagttttctaaatattttctggaaaccatgcattttgtttgtaagaagtgggggatctagttatatgaaaaaaaactcattctttctttagttgatatttttagtagctgatagctttgtgtgataaaagaaagatatttggttattgtccctgtggaacatatttgttttacccagaatgctctcactgcaatatacccccatacttacctacagaagatgtacac

SEQ ID NO: 355798 - DNA, 642 bp, Homo sapiens
acaaaaacaggtaacaaaactagtaagaaatcaattataagtgaaatatgccagtcacaaaaacacaagcaccatatgaggccacttayacgaagtacctagaatcatcaaaatcacagatacaggaagtagaatggtgattgccaggggctggagggactgcggagtggagacttgttgttcaatgggtacagagtttcaattttgcaagatgaaaagagtttttagagattatgtgcagaacaatacaaacgtacttaatgctgctaaactgcacccttaaaatggttaaggtggtaaattttattttatgttatgtatgttttgccacaattaaaaatttaaaattttaataacaattatatcttgaagatgacattttgagtagttttaattttcttcatttagtttgtctaagttttctaaatattttctggaaaccatgcattttgtttgtaagaagtgggggatctagttatatgaaaaaaaactcattctttctttagttgatatttttagtagctgatagctttgtgtgataaaagaaagatatttggttattgtccctgtggaacatatttgttttacccagaatgctctcactgcaatatacccccatacttacctacagaagatgtacac

SEQ ID NO: 355799 - DNA, 517 bp, Homo sapiens
agctggaataatttgacaacaaaatggataccattgtattagattataacccaaagcatactataaatatccatgagtcgataatcatatgaataaataattgaatatagaataaatatgaggaaaacaaaaaaatctgtgcaaaagaatgccaaataacttattgatatccctttctcaaagaggtagagcataactcytccctccttaagtatggcctgcacatgataacttccttccagagccaattgtgtaaaggagggaaaaaagtagctttacagtggagaaatctgtaaaacactacctcaaccagggagtcaaggttaacatctacagtgacaagtcatgatgacgggatgatgtgataaaagtggcactgtaactctatggtcttcccccctcaaacccataaaccatgtttaatcatgagaaaaacttaagacaaaaccaaatggaggaacagtctccaaaatacctgaccagtactcctcaaaactgtcaaggccatcaaaaacaa

SEQ ID NO: 355800 - DNA, 517 bp, Homo sapiens
agctggaataatttgacaacaaaatggataccattgtattagattataacccaaagcatactataaatatccatgagtcgataatcatatgaataaataattgaatatagaataaatatgaggaaaacaaaaaaatctgtgcaaaagaatgccaaataacttattgatatccctttctcaaagaggtagagcataactcttccctccttaagtatggcctgcacatgataacttccttccagagccaattgtgtaaaggagggaaaaaagtagctttacagtggagaaatctgtaaaacactacctcaaccagggagtcaaggttaacatctacagtgacaagtcatgatgacgggatgatgtgataaaagtggcactgtaactctatggtcttccccccycaaacccataaaccatgtttaatcatgagaaaaacttaagacaaaaccaaatggaggaacagtctccaaaatacctgaccagtactcctcaaaactgtcaaggccatcaaaaacaa

SEQ ID NO: 355801 - DNA, 576 bp, Homo sapiens
taacaggaattagacttgttctgaatgttcctaaagaatggaatgagtgtyaaagtttgtaaatttacatttatttgcacgattacttgttttatatgtttcccctccgctggtgtctaagcttcctgatggcaaaagttagatttggtcaccaatttatccccagtgcctaacatgcataagagccacttatataatggttaacagactgagagaaattttttttattctctagtgtaggagttagggtacaaaataagttgttataacaaagggaatcaaataacagtggctttaataggatagagatttatttccttttcccaaatgttcaaagcggagatgagattcccaggctagaagggcctctgatgtacacccaggaacccagatttcttctgcgttgctgctctgccatgtcgtagggcattgttcttgcatatgtggttgatgccagctcactccatgtcaacattctagtcagtaggaaggataaagtggtaggcaactatcttatcaagaagatagcctagaaattgcacacaacacttccatttgcatgtcacgggcacaaat

SEQ ID NO: 355802 - DNA, 557 bp, Homo sapiens
agatatttgcagtaatccaagtataatataataagctaatagwatacgaatatagaggaagatatctgagatatttacaaaaaaaattaccggactttgtcaaagactagatattgggaagaaaaagaagggagagtagaagattataccagaatgtctcatgatatttactacctttttttttttttttttgagatggagtcttgccttgtcacccaggctggagcgcagtgacgtgatcttggctcactgcaacctccgcctcccaggttcaagcaactctcctgcctcagcctcccaagtagcggggactacaggtgcgcaccaccacacccggctaatttttgtatttttagtagagattgggcttcaccatgctggccaggttggtcttgaactccacaattcctgatctgcccacctcgacctcccaaagtgttgggattacaggcatgagccactgtgcctagtgatatttactactcttaattgtttgttttacatctgagagcttctttaatcttcatgatgatgttgtaaggttggaattattgttc

SEQ ID NO: 355803 - DNA, 557 bp, Homo sapiens
agatatttgcagtaatccaagtataatataataagctaatagaatacgaatatagaggaagatatctgagatatttacaaaaaaaattaccggactttgtcaaagactagatattgggaagaaaaagaagggagagtagaagattataccagaatgtctcatgatatttactacctttttttttttttttttgagatggagtcttgccttgtcacccaggctggagygcagtgacgtgatcttggctcactgcaacctccgcctcccaggttcaagcaactctcctgcctcagcctcccaagtagcggggactacaggtgcgcaccaccacacccggctaatttttgtatttttagtagagattgggcttcaccatgctggccaggttggtcttgaactccacaattcctgatctgcccacctcgacctcccaaagtgttgggattacaggcatgagccactgtgcctagtgatatttactactcttaattgtttgttttacatctgagagcttctttaatcttcatgatgatgttgtaaggttggaattattgttc

SEQ ID NO: 355804 - DNA, 557 bp, Homo sapiens
agatatttgcagtaatccaagtataatataataagctaatagaatacgaatatagaggaagatatctgagatatttacaaaaaaaattaccggactttgtcaaagactagatattgggaagaaaaagaagggagagtagaagattataccagaatgtctcatgatatttactacctttttttttttttttttgagatggagtcttgccttgtcacccaggctggagcgcagtgacgtgatcttggctcactgcaacctccgcctcccaggttcaagcaactctcctgcctcagcctcccaagtagcggggactacaggtgcgcaccaccacacccrgctaatttttgtatttttagtagagattgggcttcaccatgctggccaggttggtcttgaactccacaattcctgatctgcccacctcgacctcccaaagtgttgggattacaggcatgagccactgtgcctagtgatatttactactcttaattgtttgttttacatctgagagcttctttaatcttcatgatgatgttgtaaggttggaattattgttc

SEQ ID NO: 355805 - DNA, 662 bp, Homo sapiens
tggcagttgcaggcagatgctgaccagatggtggatacgaggcacacagcagtgtctgtgtctggcaaggtcttgaggacaacctacttcagtgttgctggctgagattgtaggtagtgggcttyttgacctgccctttccctagcccatttgacagggatgaaaccttgaatctcctgtattgaaatacaaagaacaacttccatttgcctgaatgaacactgaccaatacaagactaaacatcagttacctaaacaattaggaaatttgttaatatgagacactcacttttgagcaatgttaagcaaaagggtcatatagacatgaaaagtaagtgatgtccctaaaccaagtaggagtgagtggatattagcgagtgcttccagccatgtgcactataaatcatatgatagggttcattcctatacgtttagtggacagatactgaggaaagaaattctgtctgaattatgaacttttgcattttcttgtagaccaagttcttgtcctaatgcctgacacacccgagtgctcagtaaatgtttatttagcatttggatttgcctgggcaggatgaatccctccctgtccagttactattaacaacttaatagtcaatagttaatattatcaacagtagtcaacaatgtatcattatcac

SEQ ID NO: 355806 - DNA, 463 bp, Homo sapiens
ctcttacaatagttggcaaagccctccataattcagccctgcttatgtctctgatcttatctcttaccactcttcccttgcccactccactccagccatagaattagttttcaaacacactgagattattccaactcaaaggcctttgcactagcattttcctctgctgaaatattcttccaattgttctttgtataatggtatactgcttctcatttaactctcgagtttcatctcctcctagagacacttgrtgaccactcaatctacaggagctcctgctgactcatatctttccatcccatcaccctaatagttatcatatccaacacttctttctttcttttccttcctacattctttcctttctttctctatccaatttttatactcttgctcaaatcctgtctcagaatgtgcgatggtttgaatatgtccctcaaagttcatgtgtcagaaactt

SEQ ID NO: 355807 - DNA, 579 bp, Homo sapiens
cagggcatttgtcttaccttatttaatttagcttcctttcttgagtcacttgcagaaaatcatcagttacataggggatcatccccacatggctctgtgcatctgctaccctggcccatctctcattcctccctattttggaaaatttccaccatgctatcyggaattcaaaatccaccatctgcaaaattcccagatcctttatttcttctctgaacactgtttgcttttttgctcaatggaaacctggctctagtgtgaggagcgtgctgtcttgcatgtagcttttcttcccatacccctctgactaccaggccttgggggccagtagatgccggccagcccctcatcgctgtctccaacaattctcctctccacctctctaacccccagctttgaagtctttgtcatccaacgattgcacaaccccccttcctactgcagtcatctacttctagtctctcctcttcatttctataatgtttttagatcctggctcactgtcaatttccccctaaaactcctgtgacaagttttggttatttcagtatccagacagatgatcattttgaaacatgg

SEQ ID NO: 355808 - DNA, 404 bp, Homo sapiens
aaaacagttgagttggttttgtgcagcatttgtactattctgttgagaatatacacatgtaagtgtgagctacaaaatccaaactgtaattttgatgattccacacaagttaaatgcacgtatacttacatttagatctggcaatatacaacatagagataartgacaaaaacttatgctaaaagtttacaatttaaacttttcttaggacaatattaagtagcaaatgcaccatagtaagtcaagagagcgaatgtggaaaggaatcactttatattgtaatacactttcctgctttttgaagcaaggagctcttcattgttattttgtgtgggtcccacaaattatgtaggtggacatggggccaggcattgtgttaggaaatgaggtcaatgatgaacaag

SEQ ID NO: 355809 - DNA, 609 bp, Homo sapiens
ggtcgcttagagttaacaaaaaattaaggttgttatggcatggtccctgaacacgtgaaagaaaagtgaaaaatctagtcatctgtgcatcatttataaacaagaaggcattaaaatagtcagcaatttttacaaaaagacgcaacctttttgttttcctttccttttcctgaatgctttggttctaaaagtctaaaaactcctataggctttttgatctttggtttcagagacaattttagtaccttaagttgactgttcacatacctcacaaaagtgtgcccctgacatattctcaactaatagctggttgacaaaatgaataatcctattaaaaatgaaatcagctatggtaactttatatagagtgatggatcactcagcattgccaagttaagtattgactggaggctaaaaagaatgaaagagagagatttcattaaaagtggaaacattactgaaagtaaaataaaacattttggaataaaatatacaagggcctggtaartatgttatatgttaaggcaaaaatccaatttcttactaagagagtataaaatagaaacatgatctaataaagtctaaaatgaggattctaacaagcattcc

SEQ ID NO: 355810 - DNA, 607 bp, Homo sapiens
taatttttggcttgttataagggaatgatttctagcaaatcaagctgttcgataagtattatcatgtggcacccccacatacaagattatatagaaacagaaggatagacttttaatttaaatcacacaggtttggcaaacgctgtgtcttttctctccaaacttaagatctgcaaaaattacatctctctctctctctctctctctctctctcwcacacacacacacacacacacacacacacacacacttgaaaataagaagggtaaggaagctcttcatgaaagagaagcccctgaaagataggaggtaggaagttgcaactgtgaggaatattgcagcaggaaaaggtgagcccacagacaagaaccatcccccatttgaggaaaattgactccaggagggagagacacagactcaaggtttgaaatgagctacttttgaggaaatagttaatagaggctgatgatgttgtagctagcctgttggagaggcctggattaaacaaatgacctcttatccctttcagttctgagaagctattgaatctatataaaaggatgaaagaattctgtttctgaaagtgttattggtagcccttggcttg

SEQ ID NO: 355811 - DNA, 593 bp, Homo sapiens
ccagctcacagatctagcagtagaagccagaagatcccccaggtatcccctcccactcactatctgctccttccaagggtatcctctatcctaacttctaacttcttagttttgcctctttttgtacttttatataagtagtattactcagtgtgtagacaaaatrtggtatatccatatagtggaatattatttgcccataaaaaagaatgaagtacttactgataatgctacaatatggatgaaccttgaaaatattatactgagtgaaagaactcagttacaaggaccacatattatatgattccgttaatttgaaagtccagaatggggaaatctatacagacaggaagcagatgaatctgcttagggctgggggaaacagggaatagaacagagatagctaaagggtgtgggatttccttttgaggtgatgaaaatgttctaaaattggtgatggttgcattatctgtgaatatatgaaaaccattgcattgtacattttaaatgggtgaattgtatggtatgtgaattataggctcaataaagctattaacaaatttaaaaaagtattcagtaatttatgtaaatag

SEQ ID NO: 355812 - DNA, 612 bp, Homo sapiens
ctaatactagcccatatatttcctttgaataaataattcagcacagactagatgatgttttaaaatatctaagagttaaatgaattttgaaagctatcagacttacagggtgtaaccaacttatcacagttgttttgtttcaaatgtgtgtatggggatattagattaagatatttttggcagggcgtggtggctcacacctgtaatytcagcacttttgggggccaaggcggacagactgtttgagctcaggagttcaagaccagcctgggcaacatgatgaaaccctgtctgtacaaaaaaaatataaaaattagctggttatggtggtgcatgcctgtcatcctagctactcaggaagctgagatgggaggattgcttgagcctgggtggcggaggttgcagtgagctgagattgcaccagggtgacagagagagaccccatctcaaaaaaaataataataaaataaaatacagtgggatatttttgaaggagcccatgtgaaaagccacaaggactttttgaggttggctgtcataataaggtattctgtagaagggatagtagaagcaattacagtttaaaatgctgaagtaaaataacctggaata

SEQ ID NO: 355813 - DNA, 612 bp, Homo sapiens
ctaatactagcccatatatttcctttgaataaataattcagcacagactagatgatgttttaaaatatctaagagttaaatgaattttgaaagctatcagacttacagggtgtaaccaacttatcacagttgttttgtttcaaatgtgtgtatggggatattagattaagatatttttggcagggcgtggtggctcacacctgtaatctcagcacttttgggggccaaggcggacagactgtttgagctcaggagttcaagaccagcctgggcaacatgatgaaaccctgtctgtacaaaaaaaatataaaaattagctggttatggtggtgcatgcctgtcatcctagctactcaggaagctgagatgggaggattgcttgagcctgggtggcggaggttgcrgtgagctgagattgcaccagggtgacagagagagaccccatctcaaaaaaaataataataaaataaaatacagtgggatatttttgaaggagcccatgtgaaaagccacaaggactttttgaggttggctgtcataataaggtattctgtagaagggatagtagaagcaattacagtttaaaatgctgaagtaaaataacctggaata

SEQ ID NO: 355814 - DNA, 561 bp, Homo sapiens
aatgaattttgaaagctatcagacttacagggtgtaaccaacttatcacagttgttttgtttcaaatgtgtgtatggggatattagattaagatatttttggcagggcgtggtggctcacacctgtaatctcagcacttttgggggccaaggcggacagactgtttgagctcaggagttcaagaccagcctgggcaacatgatgaaaccctgtctgtacaaaaaaaatataaaaattagctggttatggtggtgcatgcctgtcatcctagctactcaggaagctgagatgggaggattgcttgagcctgggtggcggaggttgcagtgagctgagattgcaccagggtgacagagagagaccccatctcaaaaaaaataataataaaataaaatacagtgggatatttttgaaggagcccatgtgaaaagccacaaggactttttraggttggctgtcataataaggtattctgtagaagggatagtagaagcaattacagtttaaaatgctgaagtaaaataacctggaataagtgatcattttgtgcaattattttgt

SEQ ID NO: 355815 - DNA, 457 bp, Homo sapiens
aaaacctaataaaatgaataaaaaatgtgtttaccaaactactggtttactaagctactgacaccattttctgttgttttgatgcaggttcttctgtctgtttcttctcttgctcatttcactagtctactagcaccattttcatcctgttcaccatcattagcagatttrgtttttttttaaccttgaaacatacttttcctttagcacacccaggccagacagcttaattaccctttcctcttcctttaaatctgcaaccttttgactcctatttgtttagggattctcgtgttggtcttctaagatttttttcaatgcttctttttccacctctccttctagtacttcccaattcacttctttgttcttaattgtaggttaccgttacttgcgtctttggctttacccaatacttccttgacatttacgttaattagaattattccatcccctg

SEQ ID NO: 355816 - DNA, 575 bp, Homo sapiens
gatgattggaaatgtctatgtctgtattgttcaaaatggtatctgctacccacatacagctactgtacacttaaaatgtagctagtataatgaataactgcatatttactctaaattcacttatatttaaatagactcatacgactagggattatattaaatagcacagctctagatatyctacttaccaagaaatgatttaaatgttatgtgcttacatttaatttttaaagtttatatctctttgcttattttcagatggttctttgaaacatatagttagttggattccaaagttggtaacagtaaatttactgagcaattccataacaaaaagtggtgtttctgatcacatttacatgacttaaagtatttgagaataatcccattttatctcaagagtaatctagtcaccctgaagatatatgtgtttctagtatagtgagttgccatgtaattctgctctgcatagttttattaaaataatctattcataaagttttcaggagaaatgcatgaactatttattattactcctgtgcaaaagtatgaaagagagacccattttggtggcc

SEQ ID NO: 355817 - DNA, 514 bp, Homo sapiens
gatttcataaatattctctagtattggccatttcaaaaaacaccttctggaaataaaactgtgtatgagttattgcgttctgcacgtgttttcacactcgtatgacctgagggtagttctgtgaattggtcatcttattaagtcattgctgtttcttgcctctcttctagaagataggcaaggacagatagaacctacatgtcctttcactcccaatgacaatgtttgcatagttatggactcattaaattttacatcaacaaaatgcttagtgcattttttacagtaaatattgtgcttatacttactttccagggtataaaatcactttagawtgaaaataaaggtacatagttttatatcttagcttttgatagggatttttatatgtattcaaatattgcaggaaggtatcccatgaaaccaattttcttgaggcctttgttctcaataatacaaagtcctatcagaaaatgagagggtagtttaaacttcagaaagaaatgagagttca

SEQ ID NO: 355818 - DNA, 476 bp, Homo sapiens
gtgtctctgtgtcacattttggtaattcttgmaatattttgaaagttttcattattattatatctgttatggtgatctgtgatctttgacattattagtgtaattgtttgggggcaccaagaactgtgcccatataagacagtaaacttaattgataaatgttgtatgtgttctgaccactccaccaattggctgttggctgttttcccacctctctgcctctcctcaagctttcctattccctgagacacaacaagattcagccaattaataagcctagtttgtaggtgttcaggtgaaaggagaagtcacacaactctcactttaaatcaaaagctaaaaatgattaagcttagtgaggaaggcatgtcaaaagtcaagacaggccaaaagctaggcctcttgcaccaaacagccaagttatgaatgcaagtgctactctagggaacccacacatgataaggaaataaaagagc

SEQ ID NO: 355819 - DNA, 496 bp, Homo sapiens
ctgtggttgacaactgcagagaggcactaagggcccacttgagacacagtcatgaaaattaagagagatccctcagctaagttagatgttcctctccaaccatgaactgcaagcttggtaaacatttattaaatgtttattawgtgccaagcactattctaaagacttcatttttatattactttatattaatacgtttgagcctgcaacaactccattagataggtatacatgaggaaactgaggcacagagcagtgaagaaacttactcaagccacatggctagtaaatgttcgactcaggattcaaggagcgtgggtccagaacccacaaccttaatcactaaactatgtgacatttctgtgagtgcttgggattaaccagtattgatgttctgccatttgagtaaggcagagagtgaggcaaaaaagctgaggacatttacaagtaattaaacaatggaatctaagctggacaaggaggaagtgaggataaa

SEQ ID NO: 355820 - DNA, 496 bp, Homo sapiens
ctgtggttgacaactgcagagaggcactaagggcccacttgagacacagtcatgaaaattaagagagatccctcagctaagttagatgttcctctccaaccatgaactgcaagcttggtaaacatttattaaatgtttattatgtgccaagcactattctaaasacttcatttttatattactttatattaatacgtttgagcctgcaacaactccattagataggtatacatgaggaaactgaggcacagagcagtgaagaaacttactcaagccacatggctagtaaatgttcgactcaggattcaaggagcgtgggtccagaacccacaaccttaatcactaaactatgtgacatttctgtgagtgcttgggattaaccagtattgatgttctgccatttgagtaaggcagagagtgaggcaaaaaagctgaggacatttacaagtaattaaacaatggaatctaagctggacaaggaggaagtgaggataaa

SEQ ID NO: 355821 - DNA, 496 bp, Homo sapiens
ctgtggttgacaactgcagagaggcactaagggcccacttgagacacagtcatgaaaattaagagagatccctcagctaagttagatgttcctctccaaccatgaactgcaagcttggtaaacatttattaaatgtttattatgtgccaagcactattctaaagacttcatttttatattactttatattaatacgtttgagccygcaacaactccattagataggtatacatgaggaaactgaggcacagagcagtgaagaaacttactcaagccacatggctagtaaatgttcgactcaggattcaaggagcgtgggtccagaacccacaaccttaatcactaaactatgtgacatttctgtgagtgcttgggattaaccagtattgatgttctgccatttgagtaaggcagagagtgaggcaaaaaagctgaggacatttacaagtaattaaacaatggaatctaagctggacaaggaggaagtgaggataaa

SEQ ID NO: 355822 - DNA, 569 bp, Homo sapiens
tgatttcaagagccattcctaaacagaatgtacctcaaaacctaacattttgagaattctttcctgcagttccaacccattgctaaaggcatctccacctggatgccttacagtcagtcacctcacactccaacaaaaatcacactcatcttcctaaccaaaaccagttattctcctgatttctctaattctggttaaagaagccaccaatctcatggtcacccaaactaaaaacctctgtttttaatctactctagtcagttagaatggttaactttttctatctccaccctaggtctgayaatcatcccctcttcttcacgcctacaattatattataatggcttcttaattgcctctttgcctctggtttttccaccatccagtctgtccaggatattactgccaaataaatattctaaaacccagtattatgacatttcttattcagtaacctttagcagcctcctaccatatagcaaactaaagtcaaactacctaacctggcaaccaaacccctctaagctgcttgtatttctctggtaatacttatcttacaatagagtcaa

SEQ ID NO: 355823 - DNA, 573 bp, Homo sapiens
tgagggaatagccatgctgacctagaacaggttctattaatagaatgacttaaatcattagttcttcaaaaactgattccgaaggatattgaagaaaatgtcatcttggtaaaaagactatgtttttaatgtcagtagcaaaacatggaagaaaagtttccaaaagctaagagctcaggatttaaagcagacagccttgagtctttgtgttttagtcactggtcagctgctaccagctatgtgatcttaagtccattgcttaagctctctcagtcttagttttctcaattgtaaaatttggcaacagtacgtttctcaaaatcattatgaatcttaagtcaaacaactcacttggtacagatggagcacatagtaagaattcaataatagtyggctattattaaaattagcaatattacctttcagatgtgaagggtggatggtgatgccatcattttcctaaagtttcctgcatagtcagtgcttcccttcagctcaagactttatactctagccaaatttcctccttaccatctccaaaatgtgacagcccctgattatcatgcccaggtg

SEQ ID NO: 355824 - DNA, 581 bp, Homo sapiens
tcttcagttatgggactcgaactggctctccttgctcctcagcttgcatacatcctattgtgagaccttgtgatcttgtgtyaatagttaataaactcccctttatatatatgcctatatatcctattagttctgttcttctacagaaccctgactgatacacctaccaatcaagcttccaatttctgtgtgaaactgttatgagttacaaacaaaatgacttaaaaattttggaactaaactggggcttgtctgaatccaaatgactaaaattatgtattcagagaaaacttcatgaactttccgtatgacttatttgaagatacagattcaagatatcttttatcttgcatgtttatttaagatgggaacttatagccaacctaatggtgaactagcctgattttttttaacttagctgactagatgtttctgtgatacaagtatcccatagccaagcaaggttacaagtttagctactgagaaattattctgttttctagaaaacaataattttttaaattgtttttgtcctttttattctcctttagtaatggagaagaacatcaggaatctaaatg

SEQ ID NO: 355825 - DNA, 534 bp, Homo sapiens
tggctctccttgctcctcagcttgcatacatcctattgtgagaccttgtgatcttgtgtcaatagttaataaactcccctttatatatrtgcctatatatcctattagttctgttcttctacagaaccctgactgatacacctaccaatcaagcttccaatttctgtgtgaaactgttatgagttacaaacaaaatgacttaaaaattttggaactaaactggggcttgtctgaatccaaatgactaaaattatgtattcagagaaaacttcatgaactttccgtatgacttatttgaagatacagattcaagatatcttttatcttgcatgtttatttaagatgggaacttatagccaacctaatggtgaactagcctgattttttttaacttagctgactagatgtttctgtgatacaagtatcccatagccaagcaaggttacaagtttagctactgagaaattattctgttttctagaaaacaataattttttaaattgtttttgtcctttttattctcctttagtaatg

SEQ ID NO: 355826 - DNA, 402 bp, Homo sapiens
tggctctccttgctcctcagcttgcatacatcctattgtgagaccttgtgatcttgtgtcaatagttaataaactcccctttatatatatgcctatatatcctattagttctgttcttctacagaaccctgactgatacacctaccaatcaagcttccaatttctgtgtgaaactgttatgagttacaaacaaaatgacttaaaaattttggaactaaactggggcttgtctgaatccaaatgactaaaattatgtattcagagaaaacttcatgaactttccgtatgacttatttgaagatacagattyaagatatcttttatcttgcatgtttatttaagatgggaacttatagccaacctaatggtgaactagcctgattttttttaacttagctgact

SEQ ID NO: 355827 - DNA, 548 bp, Homo sapiens
aatctaaacttctgacttgcaaataatacacaattgaaccgacagtctagggtggagggcacccaaaacaagactccaaagagcagcaaacatctatcttgaatagttagaacaaagaaatatcaattagctaatgaagtttgatttattttaatayttagtccacctgaaagtaatttgtttatgtgatctaattgcaaaccttgccttcaatcaccacgcatagcaagttaggtaaattcatcctttacttttctgtttatcagaaaacaagagaagcccgcattttttgcctcaaaagtgttttaaagacagaaaaacaaagggtcttaatgttttggtagagctcatgagaagatatatcaagtgcagtgtctacttgtttgcttctatcctttcaatttagggcaaatagtatgtactgcctatctgtcaagtgctgagcactgcactgtgtgctgggactacaaagattgaaaaaggagtttccttcctggaataatttatattttttaatattctttaacttacagatttgagtctgctgg

SEQ ID NO: 355828 - DNA, 548 bp, Homo sapiens
aatctaaacttctgacttgcaaataatacacaattgaaccgacagtctagggtggagggcacccaaaacaagactccaaagagcagcaaacatctatcttgaatagttagaacaaagaaatatcaattagctaatgaagtttgatttattttaatatttagtccacctgaaagtaatttgtttatgtgatctaattgcaaaccttgccttcaatcaccacgcatagcaagttaggtaaattcatcctttacttttctgtttatcagaaaacaagagaagcccgcattttttgcctcaaaagtgttttaaagacagaaaaacaaagggtcttaatgttttggtasagctcatgagaagatatatcaagtgcagtgtctacttgtttgcttctatcctttcaatttagggcaaatagtatgtactgcctatctgtcaagtgctgagcactgcactgtgtgctgggactacaaagattgaaaaaggagtttccttcctggaataatttatattttttaatattctttaacttacagatttgagtctgctgg

SEQ ID NO: 355829 - DNA, 580 bp, Homo sapiens
aagggaattatcatttgcacaaatagaccagaaacaaagtggaattaatgtgggctcacttgagctattaaactggaacttattaaagatcaacctaattatgtcaaagagtccctgaaatctaaaaggtggtgatcctaagggaaaagatgaagttaaattcctagagyaacagaacaatttaaaaggcaagaagtcataaagatcttaacaccaataggaatttattttcaatgtgaaaatattttcaatcaatataaagtacacttgaatgctctgtttctgtagtagcaagatacttgatggaggggagcaggtgtcagaaaagtacatggtaggagataaaaaagggctaaagataaattagtgtttggtgaaaaaaaattaaaactataatacatgaaaacaagagaaaggagaagaaaaaaagaatgatttctcttctagggaatttgaaaatattctgtatgctgtcaggtgtttttgataagtcagggatgtaaaattgccgttaaatccagtaaacaaccaggctttgacttcccttttggccccaggtggacccgaggtgtttgaatga

SEQ ID NO: 355830 - DNA, 572 bp, Homo sapiens
agttgtttgcaaaacctgagcattttgagatacatacatgcatacacataattatcttaaaaaattacccacttctatcaaaatgtaatcattggtaaagccttttatttgttttctattactatcrtaacaaatcgccacaaacttagtagcttaaaaacagcacaaatgtatgaatatttggggcatcttacagttctggaggttagaagtctggatgggtcttactgggctaaaatcaaggtgtcaccgggctgttttcttcctggaagccctatgagatggtctgttttcttgccttttctagcttctagaggctgcctaccttccttagcttgcatttggatttgaagcacgtctatccctggtgcaaccgtttgtaatagtgtttcagggtttggttcaccttctgtttcagaattaatcaagtttatttcattacctttaattttccattcttcgcagcttttttatttttattcttgcctctgttatgaatattttatagctaaatgataaacttaagtgaaagaaagactatttcacacctacactgctgaaaattaaacagg

SEQ ID NO: 355831 - DNA, 499 bp, Homo sapiens
cttcacagcagtccctcccatcacagtcctggagacctagaaggaaatggtttcctgggccaggcccagggtccccatgctgtgtatggcctagggacttcatgctctgtgtcccagcagttccaactatggctgaaagrgggcaacgtagagctcgagccatggcttcagagggtgcaaatctcaagccttgggagcttccatgtggtgttgagcctgtgagtgcatgaagtcaagaattgaggtttggtgacatctgcttagatttcagaggatgtatggaaactcctggatgtccaggtagaagtttgttttcaggggtggagctctcatggagaacctctgctagggcagtgaagaagagaaatgtggggttggagccccccctccaacagagtacctactggggcaccacctagtggagctgtgagaagaaggccaccatcctccagacctcagaatggtagatccaccaacagcttgcaccatgcacctgtaa

SEQ ID NO: 355832 - DNA, 444 bp, Homo sapiens
tttctaactacagtaatggcattatcagatgtgtgtctgtttttaagcatgatcacaggtaaccatgtgaagtttgccattagatttattaccacagatggcaaagcctgtattttggaccagacaactttcataagtaatgtgatggatacgtatataccgagagatttctgactaaattttcagtctttttttcttccatgtggttggtcagattgaattttakcaactgtaatgtgccaatgaaccctggcatttaagttaatagggtaaaaatgaagacacagcgtgctctctgaatggttgtaacagcttgctggatcatcaatcatgaagcagctcatgctaggaataaacaacaaagaaaaatacaaacaatagttggtaagaaaggggtgtcgctgcatttaaacaggcataggaatatatttgtaacattaaaat

SEQ ID NO: 355833 - DNA, 571 bp, Homo sapiens
agctttgtttctcatgcccattagctccatccttagctataacattctcaatctatttcctttaatcccaaacctttttgactatgtttctccactcccttagatgaaatgacataaatatatgtgactggattggaagaatacaccttcccccactgggataaagctctgtaaaattatttttaacctgsagtacaagcctttaaaaaaaacacacacacacaagttttaggtttattttacaatcactactttccccttatccctgacaaagacatgacattttttgtcaggttgaaaaaatgttaagtggaaaatgttaaggttcttggaggtaaaactcacaaaagtgaaagtaaccctgaagagcaggtaccccacaaatttctcactctcacactagtttaaaatcagcctccaataattcatcaaaactaccatttaagtgctctctgtaccttctgctccaggtaagcagatcttgattatgtccctgtgagactttgtgtctccaaattttgtaatgctggtttacctgacaacttaaacataattgattttcaatttatct

SEQ ID NO: 355834 - DNA, 583 bp, Homo sapiens
tcagtaagctgataattataaaatgcttcatgtagtgacaatctgaaagaattaattttggaaaaagtaacatgtagctaaaatatccttgaagtgtacttagtcatatgattttcaactaaattcagcaaattaaaatcataatgagctctaacttcatccttattagaatagctataattatgagtgtgtgtgtgtgtgtgtgtgtgtgtgtgtgtgtgtgtgtaaattacaccaaatgctggcaaggactcacaacaagacyttagtagcaaagaacatacatagtacctggtcttgatttcttcataccactcttcaataaaaggacaaaacttccttgggaaaatggcttattttagggccctgaagcacattttagggccaaaaagtgataaattgctaaaagaaataacatgtaagtaaaatatacaagcagcagcttgagtgtccccagtgatcaaagctgaaacaatttaagtaataaaatacatatagtgttggattcaaaccctaagaaagaaagaaatattcataagtccacaatgacataaacgattgaataaatgtatacattcaggag

SEQ ID NO: 355835 - DNA, 583 bp, Homo sapiens
tcagtaagctgataattataaaatgcttcatgtagtgacaatctgaaagaattaattttggaaaaagtaacatgtagctaaaatatccttgaagtgtacttagtcatatgattttcaactaaattcagcaaattaaaatcataatgagctctaacttcatccttattagaatagctataattatgagtgtgtgtgtgtgtgtgtgtgtgtgtgtgtgtgtgtgtgtaaattacaccaaatgctggcaaggactcacaacaagaccttagtagcaaagaacatacatagtacctggtcttgatttcttcataccactcttcaataaaaggacaaaayttccttgggaaaatggcttattttagggccctgaagcacattttagggccaaaaagtgataaattgctaaaagaaataacatgtaagtaaaatatacaagcagcagcttgagtgtccccagtgatcaaagctgaaacaatttaagtaataaaatacatatagtgttggattcaaaccctaagaaagaaagaaatattcataagtccacaatgacataaacgattgaataaatgtatacattcaggag

SEQ ID NO: 355836 - DNA, 583 bp, Homo sapiens
tcagtaagctgataattataaaatgcttcatgtagtgacaatctgaaagaattaattttggaaaaagtaacatgtagctaaaatatccttgaagtgtacttagtcatatgattttcaactaaattcagcaaattaaaatcataatgagctctaacttcatccttattagaatagctataattatgagtgtgtgtgtgtgtgtgtgtgtgtgtgtgtgtgtgtgtgtaaattacaccaaatgctggcaaggactcacaacaagaccttagtagcaaagaacatacatagtacctggtcttgatttcttcataccactcttcaataaaaggacaaaacttccttgggaaaatggcttattttagggccctgaagcacattttagggccaaaaagtgataaattgctaaaagaaataacatgtaagtaaaatatacaagcagcagyttgagtgtccccagtgatcaaagctgaaacaatttaagtaataaaatacatatagtgttggattcaaaccctaagaaagaaagaaatattcataagtccacaatgacataaacgattgaataaatgtatacattcaggag

SEQ ID NO: 355837 - DNA, 593 bp, Homo sapiens
tgatcagtaatcttcagttataaaagacaagactgagaaattctcaaaaattagaagatgacaagttaatgggtgcagcacaccagcatggcacatgtatacatatgtaactaacctgcacattgtgcacatgtaccctaaaacttaaagtataataatwaaaaaaaatcattaccattattcatgaaattaaaaaatcttccaaaaaaaattagaggacaataagaagatatgattaaatacagtattgtgtcctagattggatcacagatatatcaaaggataacagtgggaaaactgctgaaatctaaatgaagtcctagtttgtaccttaacattgtaccattattaatttcttgtattgttaaagaatccatggttatgcaaaatgttaacctcaggaaaaactgagtgaagtgagtagagaaactctctgtaatctctttgcaactctttaaaccaaccaaatgttatttcaaaataaaaagttcaaatgtgaaaagaagtctacttacatcctgacaaattaaataggcctttttcttacatttgcctgtcacccctctttatagctaaatagtgttttagtagtt

SEQ ID NO: 355838 - DNA, 621 bp, Homo sapiens
catacatgattctaacacacattggtgaatgatagtagcatccactgagatgaccaagtacagtggctggcagcatgtctgaaaagagaaattaaaagttccattttgagttgcctgtgagaaatacaattggaaacatttcagctcacttattcagttcatgtaagtctctggctgaatgccacctcctcagaaagtccttccctgatgactatctaaaattaccctcrtaagctagtagttctgtcactccaactactctatggcagtttctgaattaatgttataaatttatttctgattgtaattttcctccagtggaggttaagctacatgtgggtagagaaattgtatgactttttaaatattaaagtacctagcagagtgatgggtacatggtaggtaataaatatgccagtgaatagatgaatgtatggatgaataaaggaatgacaagaaagagcaatcagacatataaatctaccactcctgtatagagcgatatcctctcctatgaagaagtagaaaaataattgacagaactgaaccacacaacaatgattgcaatgtctggaggtgcttacaccaaaagagtaaacaaaggagatgcatgttgttact

SEQ ID NO: 355839 - DNA, 621 bp, Homo sapiens
catacatgattctaacacacattggtgaatgatagtagcatccactgagatgaccaagtacagtggctggcagcatgtctgaaaagagaaattaaaagttccattttgagttgcctgtgagaaatacaattggaaacatttcagctcacttattcagttcatgtaagtctctggctgaatgccacctcctcagaaagtccttccctgatgactatctaaaattaccctcataagctagtagttctgtcactccaactactctatggcagtttctgaattaatgttataaatttatttctgattgtaattttcctccagtggaggttaagctacatgtgggtagagaaattgtatgactttttaaatattaaagtacctagcagagtgatgggtacatggtaggtaataaatatgccagtgaatagatgaatgtatggatgaataaaggaatgacaagaaagagcaatcagacatataaatctaccactcctgtatagagcratatcctctcctatgaagaagtagaaaaataattgacagaactgaaccacacaacaatgattgcaatgtctggaggtgcttacaccaaaagagtaaacaaaggagatgcatgttgttact

SEQ ID NO: 355840 - DNA, 626 bp, Homo sapiens
ttcttataaaaagaaatactggtttagtcctaattgaaatagcaccattatttctaaaatgtgggtgtatattttatgatatagtaatatttatgagttgatctcaaatgactttcttaaaccccaggtgggagtcaaataaccctcttaaactccagatggtggatttctatttagggagagtattataagggaaatgtaattccttatttctaaataggtgtcttaaaattgaagactacaatgtgatacaaatacaatcaatactaatgttttactgaataaacaataaaacaaatttggtacagacattttgggtcaaaattctgtcatttsattgtaagaaaatttattttattagtggcaataaagttaaaataggatagctatcttcacaatgataattaaggattgggtagctaaagtagtttattcatctgtattgttgcactacacactattggccaattttttgcacttatttccagaaaacaagaattataacaagatgacataagtgctataactgaattttctatgacaaaaacatcagagaaaacaagaagagatcacactgaccctatctagcagactacaaaagtgttaatgtgagcagaatattggga

SEQ ID NO: 355841 - DNA, 626 bp, Homo sapiens
ttcttataaaaagaaatactggtttagtcctaattgaaatagcaccattatttctaaaatgtgggtgtatattttatgatatagtaatatttatgagttgatctcaaatgactttcttaaaccccaggtgggagtcaaataaccctcttaaactccagatggtggatttctatttagggagagtattataagggaaatgtaattccttatttctaaataggtgtcttaaaattgaagactacaatgtgatacaaatacaatcaatactaatgttttactgaataaacaataaaacaaatttggtacagacattttgggtcaaaattctgtcatttgattgtaagaaaatttattttattagtggcaataaagttaaaataggatagctatcttcacaatgataattaaggattgggtagctaaagtagtttattcatctgtattgttgcactacacactattggccaattttttgcacttatttccagaaaacaagaattataacaagatgacataagtgctataactgaattttctatgacaaaaacatcagagaaaacaagaagagatcacactgaccctayctagcagactacaaaagtgttaatgtgagcagaatattggga

SEQ ID NO: 355842 - DNA, 220 bp, Homo sapiens
taatgtttgcctatctatacaaccaataaatataaagtatttctgttaaaatagatatatttgaaatttatatataatatatattatataaaaatttatataccattaaatttaaattcaattttatatatacatatatttaaacatattctccagtgcagaaatggaagycccaactggtaagatgagataggtgagataaagaaaataaagcaataaa

SEQ ID NO: 355843 - DNA, 620 bp, Homo sapiens
ttcaagtatcacttttcttctgcctttatcaaatttctaaattgcttgcaggtgcagctacattcacaacaaattcctttccttgaggttattctaatggctccaataagagaaaaaaaatcttcctcctattacactgtattaatgactactaataccactgatttattaatagatatcagaaatcattgctgtgtgttattttgcaygaatggtttgtaattatttatttatttatttatttatttatttatttacttactttttgagggacggggtctctctgtgtttcccaggctgaactggaactcctgggcttaagcaattctcctatcttagactcccaagtagctgggactacaggagtccaccaccactgcacctgaaaattcttacactttttaatcctaaatagtgttgtatttagatttgaggcacaggaaaaaatatttatgactgataaggtgtatgtaaataaagaactcagaactcagggcttagcagggatataagttttcaaggtctttaaaatctaaaaacaaccactctctttttaacattttgctctctccctttaacgaacttaactcaatttttttataatttatttatttaagatt

SEQ ID NO: 355844 - DNA, 620 bp, Homo sapiens
ttcaagtatcacttttcttctgcctttatcaaatttctaaattgcttgcaggtgcagctacattcacaacaaattcctttccttgaggttattctaatggctccaataagagaaaaaaaatcttcctcctattacactgtattaatgactactaataccactgatttattaatagatatcagaaatcattgctgtgtgttattttgcatgaatggtttgtaattatttatttatttatttatttatttatttatttayttactttttgagggacggggtctctctgtgtttcccaggctgaactggaactcctgggcttaagcaattctcctatcttagactcccaagtagctgggactacaggagtccaccaccactgcacctgaaaattcttacactttttaatcctaaatagtgttgtatttagatttgaggcacaggaaaaaatatttatgactgataaggtgtatgtaaataaagaactcagaactcagggcttagcagggatataagttttcaaggtctttaaaatctaaaaacaaccactctctttttaacattttgctctctccctttaacgaacttaactcaatttttttataatttatttatttaagatt

SEQ ID NO: 355845 - DNA, 644 bp, Homo sapiens
tggaaagtggtatttggtagctggaaaccctgctcaaataattcattaatttatgacccaaatatttatatatagcccatgtcaaaaagcctaattaaaataatataacagaatgtgaaaagaaaataaggaaataataataaataaaatataatttactcaaaatgtctgaggcaataaagtggagactaaaagacctaatgatcatcatttgcattaaatgatgtaaagtgagattacgagaaacattactgatttccagactcaatttccttaataaaaatggtgcgagatttttgtctatagaagtgttttctttctattttgcttctgttatctgccatcagttacatatctctaaacacatattgaatgtcctgcctctagtccaccccctttatatttctgagcagccaagcacctatatttcgtaaacctaaactttattcttaccacttgattagtttctccagtgaagccaacacgcatgcaggaaccccgcagatcctgtkgttattgttatgttatctgtagacagcctctccacaggggctgccgtatctctgccagtcccatgcctccgccacttactcctactgattttcctgccaagttcagtgctctgaaaaaaagaataaccagct

SEQ ID NO: 355846 - DNA, 587 bp, Homo sapiens
catcaaactaaaaaggttctgcacaagaaagaaatcaacaaagtaaagacacaacccatagaatgggagaacatatttgcaaaccacccatttcacaagggattcataaccagaatatttaagggacgcaaaaaattcaatagcaaagtcatcatcatcatcatcatccaatttaaaatgtgcaaaaaaatctgaatagacttttctcaaaaaacataaaaatggccaacatgtgtatgtaaaaaatactcaacatgactaatcatcagaaaaattcaaatcaatacaacagtgagataccatcttgccccagttaaaactactttataaaaaagacagtcaaaaatacatgctggcaaggatgtgaagaaaggaataccatcattygtacactgttggtgggaatataaatgagtacagccactatgaggaacagtataaaagttcctcaaaaaaactaaatatagatctaccacatgatccataaattccactactgggtatatattcaaaagagaccaatatatcaaaactatatctgcattcccatgtttattacagcactattcacaataaccaaaatatgg

SEQ ID NO: 355847 - DNA, 587 bp, Homo sapiens
catcaaactaaaaaggttctgcacaagaaagaaatcaacaaagtaaagacacaacccatagaatgggagaacatatttgcaaaccacccatttcacaagggattcataaccagaatatttaagggacgcaaaaaattcaatagcaaagtcatcatcatcatcatcatccaatttaaaatgtgcaaaaaaatctgaatagacttttctcaaaaaacataaaaatggccaacatgtgtatgtaaaaaatactcaacatgactaatcatcagaaaaattcaaatcaatacaacagtgagataccatcttgccccagttaaaactactttataaaaaagacagtcaaaaatacatgctggcaaggatgtgaagaaaggaataccatcatttgtacactgttggtgggaatataaatgagtacagccactatgaggaacagtataaaagttcctcaaaaaaactaaatatagatctaccacatgatccakaaattccactactgggtatatattcaaaagagaccaatatatcaaaactatatctgcattcccatgtttattacagcactattcacaataaccaaaatatgg

SEQ ID NO: 355848 - DNA, 557 bp, Homo sapiens
gtgcaggcaattcaaacagttcaaaagaatatgcaacatggttcataatttcakctttgacttgaaattttaagctcttatatagtctacaggtggtgaaagcacctcatgggtatccaccctattcaaattaatgataataggatatttgttttaataggaacattaatagtttacattacaaaggactataaaaatgtacatggtagagcctgcaagtggtgagcattaatcctgttttctctttgacttcaggactcacagcaaacatgttttttctgccttacttaaagttaatgtggtcatgtccctgggttctggcaaattgaatctgactggaattgatgttgccagttccagaaaacctgttttaaaatgtcccatgtgatggtcagtctctttcctcatatgcttatggatttttataacctagtggtggtgagagcaatgcaatcagaagagtccgagtcattcgttccagtgagttataggtctcccttccagaaatcatttacctccatctgcattaaactcaagtgggaatgggaatttaattt

SEQ ID NO: 355849 - DNA, 590 bp, Homo sapiens
ggatggatggtactctgagtctcacccatatctgatttatatgtatttaaataagatcattggactttgaacttttaagtttaagcaggaaagactaaagtaatcaactattttgaatccataaaatctaatccaaaatgtatagcagacaggtgactaatgaagaaaaagacagctgaatttctgtaagagaatgttgtgggattttcactcaccarcttattatccctcaatttcccggtgggtgcgtgttcatgtggatggtggcctgcattcccagtatagtttgctggaaccagggagctaatataaactttatgcttaaaatattatggccatgtgttttgaccagtcttgtcgtttcctgaatgataaagaagctggcctttggtttcctgcctctcttttgtacttcagtgggtatcaggtattagcagtgtgtctgttgaaaaattcagtgatgtacactgtgcctacttgaggaaggggatattggataaagccagcagcagacagatttaaaagcctaagaaagagaagcctgaggagaaagtttcttgaagtaacaagagccaagaaggagcaacaca

SEQ ID NO: 355850 - DNA, 592 bp, Homo sapiens
cacagcaacctagatggaattggagactattactgtaagtcaagtaactcaggaatggaaaactaaacatagtatgttctcattcatatgtgggagctaagctatgaggatgcaaaggtgtaagaatgatacattggactttggggactggggagtaaggatggagggtggcaagggataaaagactacacattrggtacagtgttcactgctcgggtgatgggtgcatcaaaatctcagaaatcaccactgaagaacttattcatgtaaccaaacaccatctgttccccaaaaaactattgaaataaaaaaattaaataaaaaaactccaaaagaaaaaatattcaaaaagctgccaactgagaagcttacagcctgcaaaactatctttcaaatattaaagtgaaataaaaacattcccagaggaaaacatggagggaaatgctatctgatctgtgttacaggcaatacttaagctagttcttcaggctataaagacgtgacacaaaagagtaattaaaatccatatgaaaaagtgaaaagtattggtaaaggtaattatatagataatatgaagcacagtaaaattaca

SEQ ID NO: 355851 - DNA, 626 bp, Homo sapiens
aagtgattgaagaggtctatgtcatatgccagcaccttgactgctggtgtacctaagataacaagtaacaagcaattacttgggaaacggactataccttattacttgtggtaattcatgctcaatagctctacagcctcttaattgtatacatggatatgatttagagtatacttttctttataggatgtatcagttttattcaaaaacactcctatcttgtaagagtttaatgttctcaaatttgatacaatattctcagagattctgtttacctcctagttcgaattttcttgctggccttttacatattactactatgctcaggaatattttaacacwtagttcaagtattcacaatggatttgtgccatacacttttaattagaatgaatatattttattggagccaaacatttcactttagtttgatggagaaatttacaacggtcagtcaagtcatttactaaaatatcatctaataggccagacactgcagcccagctattcaggaagctgagacaggtgggggaatttcatgagccccatagttcaagtccagcctaagcaacatagcaagacctctgtatcaaaaacaaaacaaaacaaaacaaaacaaaacaaaa

SEQ ID NO: 355852 - DNA, 567 bp, Homo sapiens
gatgtaaaactttgtaaaaagcctctggccaattttataatccaggactgtctttttcaagaatatgacagccatgcctttgaaatataattatgaaagaagatagaacccttatctcttactctctgtgagtaggagcctatcttctgtggatacttttatcttacttataaaactatttcctactatgacagtatgagaaagtttacttttaataaacacacatgtcctacaatccctccctattccccatcctaacttagctctttaaaactctccaggcctctatttcagtggagtggaatctaggttgcagtctccctctcctaatgtattagccttgaatacattcttccttgcctgtttaactttgccccaygtaatttttgctttgacacaggtatcagcagaatcaaaataattaaatatacttatctttgataaattcatgttttaagtcataatacaactgcatatttttaaattttgtataattaacatatttaccaaggcagaaggaatgttttaataatttggtgcattacttatattttgaaatatgtggac

SEQ ID NO: 355853 - DNA, 567 bp, Homo sapiens
gatgtaaaactttgtaaaaagcctctggccaattttataatccaggactgtctttttcaagaatatgacagccatgcctttgaaatataattatgaaagaagatagaacccttatctcttactctctgtgagtaggagcctatcttctgtggatacttttatcttacttataaaactatttcctactatgacagtatgagaaagtttacttttaataaacacacatgtcctacaatccctccctattccccatcctaacttagctctttaaaactctccaggcctctatttcagtggagtggaatctaggttgcagtctccctctcctaatgtattagccttgaatacattcttccttgcctgtttaactttgccccacgtaatttttgctttgacacaggtatcagcagaatcaaaataattaaatatacttatctttgataaattcatgttttaagtcataatacaactgcatatttttaaattttgtataattaacatatttaccaaggcagaaggaatgtyttaataatttggtgcattacttatattttgaaatatgtggac

SEQ ID NO: 355854 - DNA, 472 bp, Homo sapiens
tttctttcatataaattgcctttaaaaattgcacgtaatcaaccaggtgcagtagctcaaarctatactcacagctttttgggagactgagggaggatcacttgaggccaggagtttaagaccagcctgggcaacacagtgagatccccttctcttcataacatttttttaaagataaaattattgataataatcattgctcaatatgcatttttaaacaaaattgaagcacattagtgtagtttacaaatgtaagatataaaattgtacatattttggacttcatctggacttcatcatttcatatttataaactattaaaagagaaacctggaaatcaagttatcttatattgttttatgaaaaaaaggactccattcaagcaggtattattacttatgtatcgtttccctacgaaaataggttttacactgttatttattatacttattgaatatcgttgtgtgtatgt

SEQ ID NO: 355855 - DNA, 472 bp, Homo sapiens
tttctttcatataaattgcctttaaaaattgcacgtaatcaaccaggtgcagtagctcaaaactatactcacagctttttgggagactgagggaggatcacttgaggccaggagtttaagaccagcctgggcaacacagtgagatccccttctcttcataacatttttttaaagataaaattattgataataatcattgctcaatatgcatttttaaacaaaattgaagcacattagtgtagtttacaaatgtaagatatraaattgtacatattttggacttcatctggacttcatcatttcatatttataaactattaaaagagaaacctggaaatcaagttatcttatattgttttatgaaaaaaaggactccattcaagcaggtattattacttatgtatcgtttccctacgaaaataggttttacactgttatttattatacttattgaatatcgttgtgtgtatgt

SEQ ID NO: 355856 - DNA, 601 bp, Homo sapiens
gggtaatttatattaaaataaacacaattgtgggtaataatataaatacataccaatctaactaataattaaccaattagtcaattaaagacattaaaacatttgtttaaaaaatctgatatttggacattaacaaaatattaacarcacttgattatgacagagtttgattaataaaagcatatcatttccagaagtgatagcaatctataaggcctactataaccacttggaacaaattaataatatatatcaaaatataaaatattcataatcaatggagcatttttatatttaaatattgtcatatggaagtacttacaataattacaaaaacttcactccatattgttggtaatagcaaaaataaaggaagcaaatgatagtcaatcaacaattttaccattaattttggtgttttcaatgaactgctttttaatatttaaagtcatagatttatatgtactttaagataaaatttaccacagagtaggaaataaaacacaaagccaatagcaaggtattatccttaatatagtgtaacagaaaataatatttgctcatatataaataagaaatctgaaaatacagataaaagaca

SEQ ID NO: 355857 - DNA, 614 bp, Homo sapiens
aaaatagttggagctagattaaatgttacacattatatatatctacactgcttagcctctatgagttcataataattgtactttaaaaaaattgagttcacataaaatctgaattttaggaatgtctcaattatctttttttacataataaacaaccctaaagtttagtsattttgatagtgtaggatatgaggccagggtagcttctaaagtctagatgtaagattgggagccctgctggtgccattgactgggtgtttgattttcttctgtgtaggcatctccgcttagctgttttggctgtttcaaataattgtggaggggttccaaaaggaaaccctgtaagagaacagaccctaagtgccagcacttatcatttactgatgcttcacttgcatcacccttaaagatatcccactggccaaagctagtcacatggtcaattccagaaattctgtggaaagagatttcacaatggcatgaataacagaaagtgcggttaattagagggcaccaaagtcagtctgctgtaaatatttttgggtaatctgaaatctctgcttaaaccacatagcagctgatttccttatgagccatgaattttcccaattcca

SEQ ID NO: 355858 - DNA, 562 bp, Homo sapiens
aagggtagacacaggtcagaggaaacttccatttgcatttctctgagacttagggggccaactgscctcagaaaaagaaatgctatgaaatggaacttatttgtgtatttttttggactcactaaattccaatgtctggtcctcactcagccctgcaagtccagaaatctgatatttcagaacaaagaaaatgtacctatctatcatccttatcctaaccatcaaatactacacacatagggatgagcacttaagaacaagtatgacaatttgtcaatttaattttatttcagcagaaagtcaaattataaccagagtaccagtttcataacttataatagcaaagcgaagcaattatttgcagagaagcacatgtatccccttgttcagagcattttctttccttaaagacaaattgtgtgagaggctaaactctcaaaaaaaaatttttgtgagaagggaatcagaatatgtcataagatggcattcagctttgtgtcccagctgtggtggtttaaaacacattaaaaaccaaggaaatcatatattcagtcaagacttg

SEQ ID NO: 355859 - DNA, 576 bp, Homo sapiens
atttttcagttttaaagctaacctttgtatatggaagttactatagaagataaggatttaatgtctttaaayctactccactcattcctgttttcatatgaacagaaaatgcacaggcctcctcccatcctcctagtctattcatatgttgtttttcttaaattgatatctagtgtttattaatttatgaacatatagttcaatatacgtttatattatgaccaaattgttcactatacatattactatatatagtaatacttctataatatgtaatataaatatgtttatttactttttattattcacacttgagctacctagtttactaagattatgttactgtaaaacttttagatttacataaaaaattaataatgacatcacttttcacttttgttagaaaagtggttcttaggaaccacttctttgttcctattgctaactcattcccaatttttctaacaaaactgaaaatatatattattacttgattctgtatgcaccagttgccttacaggacaactccacaactgttattatgaaacctgttctattttggatatttgtcccctc

SEQ ID NO: 355860 - DNA, 555 bp, Homo sapiens
atttcttcctagatcctctttcttgcttgcaagtttatcctgtgatgcccactaaagaacaacacactaaaatgctcattatcagacctcttcatatgtgagtagatttcatcttaatgtgattttgatgcaaaccaattaattttctgccactctttgttttccctggttgtataatcctgaatgccagcattgtgggagacaagaaggtgaagggtgaaggaagtctcaccattaactattcagattttcacttaaccttcctctttccagtatagcatctcactccttggtctcagcttgcctgatatgtcaagcacagaagcaaagctccagttttacactgaggaaggaccaaactgccctgcaaaagatagggtgatttgtggttcaaatcaggattgtttcttgtttgttytaccgtacagactagcccttgtctttctccaatttgtcagttaccatttgtccatcccattctatagactccaaaaattgtcatctcagctttatcttcactctcattctctttgttgcgcagtgtacacccacaca

SEQ ID NO: 355861 - DNA, 560 bp, Homo sapiens
ttttaaaaaagaaattagaagtggtaaaaactgtatttatattcttatgtaagtacactctaaaagacctatgcctagataagcctctcaaccctttcttttatttgaaacaggaaatcatttgaggtttatccctgtaggcttgaggataacttttaccttgaagaactcatctaaactcacagatctttttgaagacagttattcagttactgctgctgatggaatacaaaagaaaagtaagagctctgagtaacaggctttctatataaaaataaataactcacctccaaaaatattacagacatattcttgattaatattctacactattcatatttctgcaattggaaggagattaagagaaagcaaattttccattgttgtaaataccagtgccctctgagaaacctactaaatatccactgtacagtaactgatggtaatttgagtttctcatcctgaagctgttttgggatgaagggactgaggccagctcacagtgggcataaacccttcatmtgagttccagttcagtagcttcaagtgcccactgagtc

SEQ ID NO: 355862 - DNA, 553 bp, Homo sapiens
taaataatgataaattagtcaatgttcataaattgctctcaagatgaaaagcactccatcacctctaagcatttttatttattagaaaataaattgatgcattatcggtatctggaccatacttgtgatttatgctataaacataattaagctttttctctagttctgaaatctagttctgcctttcattctgggatgtagacccttatatcactgtcamtgtgctaagatggatgatgaaattcaatgccacatactaagcctgaatcaatgttgtggattttagaatttagagcagttggcatagccagggtctcattctgacagtctggtctaagttttaccctctatcttggaaggcctagtgctgattgagctaaggcagagttttgttgaaggctggttctggaagtatgttactttgagctcaggatgcctctggagatattcatatccaaggatcttgcaaaaccaaaacatcatgcccagaagcaaatgcaggatttgcagaaggtcctttatctaagggggatcagacacctgtttcaaagga

SEQ ID NO: 355863 - DNA, 553 bp, Homo sapiens
taaataatgataaattagtcaatgttcataaattgctctcaagatgaaaagcactccatcacctctaagcatttttatttattagaaaataaattgatgcattatcggtatctggaccatacttgtgatttatgctataaacataattaagctttttctctagttctgaaatctagttctgcctttcattctgggatgtagacccttatatcactgtcaatgtgctaagatggatgatgaaattcaatgccacatactaagcctgaatcaatgwtgtggattttagaatttagagcagttggcatagccagggtctcattctgacagtctggtctaagttttaccctctatcttggaaggcctagtgctgattgagctaaggcagagttttgttgaaggctggttctggaagtatgttactttgagctcaggatgcctctggagatattcatatccaaggatcttgcaaaaccaaaacatcatgcccagaagcaaatgcaggatttgcagaaggtcctttatctaagggggatcagacacctgtttcaaagga

SEQ ID NO: 355864 - DNA, 553 bp, Homo sapiens
taaataatgataaattagtcaatgttcataaattgctctcaagatgaaaagcactccatcacctctaagcatttttatttattagaaaataaattgatgcattatcggtatctggaccatacttgtgatttatgctataaacataattaagctttttctctagttctgaaatctagttctgcctttcattctgggatgtagacccttatatcactgtcaatgtgctaagatggatgatgaaattcaatgccacatactaagcctgaatcaatgttgtggattttagaatttagagcagttggcatagccagggtctcattctgacagtctggtctaagttttaccctctatcttggaaggcctagtgctgattgagctaaggcagagttttgttgaaggctggttctggaagtatgttactttgagctcaggatgcctctggagatattcatatccaaggatcttgcaaaaccaaaacatcaygcccagaagcaaatgcaggatttgcagaaggtcctttatctaagggggatcagacacctgtttcaaagga

SEQ ID NO: 355865 - DNA, 542 bp, Homo sapiens
tcgaagtcttgggaaacaacacaatacttcatctgatattcacaactatgattctgtccactttgcggatgaagaaacaatctttgagagacttttaaagatctatgtcaaaatggaggcatttagtccatagcagagctgggtctgaaaaccatgaatggcttaaatcaatattcctgctcataactactatgttacataactactatgtatctctttatgacagtaataaaaggscaggcataataagcatcaaaggccaagattgagtggaacagggattctcaatacaacttataaaaatctttaaacatgttcctactccagtttccttaaactcattttggagttataaagagactgcaattaaagagattaaaaatgtggactctacatcagtggtctagcattggtaaagcagctttcgtagcttctgggggggtactttgtagacagacatcagctacctagcagatcccatgtggtcaacacaaacagaagcagtaatggagccacctttaatgagcaccagccgaagcaat

SEQ ID NO: 355866 - DNA, 542 bp, Homo sapiens
tcgaagtcttgggaaacaacacaatacttcatctgatattcacaactatgattctgtccactttgcggatgaagaaacaatctttgagagacttttaaagatctatgtcaaaatggaggcatttagtccatagcagagctgggtctgaaaaccatgaatggcttaaatcaatattcctgctcataactactatgttacataactactatgtatctctttatgacagtaataaaaggccaggcataataagcatcaaaggccaagattgagtggaacagggattctcaatacaacttataaaaatctttaaacatgttcctactccagtttccttaaactcattttggagttataaagagactgcaatkaaagagattaaaaatgtggactctacatcagtggtctagcattggtaaagcagctttcgtagcttctgggggggtactttgtagacagacatcagctacctagcagatcccatgtggtcaacacaaacagaagcagtaatggagccacctttaatgagcaccagccgaagcaat

SEQ ID NO: 355867 - DNA, 719 bp, Homo sapiens
ggtactttgtagacagacatcagctacctagcagatcccatgtggtcaacacaaacagaagcagtaatggagccacctttaatgagcaccagccgaagcaatattgtctttgcagggcatctttgaagtgtggcttcaaagcaacctctttgggctccaagatgagactggagataagggggaaatgtctaacactatggcaaagccaagaggactttttcacaaaatatatatgaggtaaaccctaaaattacttgacaagaattttttttggatatcagtgttctcataaaatgaattattatgtctgagctaggaaattatgacatttgtgtcatgactgtagttactacaactattctagtttttattatttttaaagtttcttccagatcttatactctgcaatttttggatataatattttatattattagttccttctactcmaaataatcacattgagttggaatctccaagtcaagaaaagcagacatcatgacaatgttagtgtacaaggagttcaaaaaataaaggaataaccacgtttgaatttttttaagtactgatactaaacaataaactgaaacgtgagttaccaacagcttcttgttgttttccactctgaaagactaagaaactttagaatgcttaattgcttcctatgtattaaaagttatgtaatttcacatctagaatcattctatgtgaagtctaag

SEQ ID NO: 355868 - DNA, 719 bp, Homo sapiens
ggtactttgtagacagacatcagctacctagcagatcccatgtggtcaacacaaacagaagcagtaatggagccacctttaatgagcaccagccgaagcaatattgtctttgcagggcatctttgaagtgtggcttcaaagcaacctctttgggctccaagatgagactggagataagggggaaatgtctaacactatggcaaagccaagaggactttttcacaaaatatatatgaggtaaaccctaaaattacttgacaagaattttttttggatatcagtgttctcataaaatgaattattatgtctgagctaggaaattatgacatttgtgtcatgactgtagttactacaactattctagtttttattatttttaaagtttcttccagatcttatactctgcaatttttggatataatattttatattattagttccttctactcaaaataatcacattgagttggaatctccaagtcaagaaaagcagacatcatgacaatgttagtgtacaaggwgttcaaaaaataaaggaataaccacgtttgaatttttttaagtactgatactaaacaataaactgaaacgtgagttaccaacagcttcttgttgttttccactctgaaagactaagaaactttagaatgcttaattgcttcctatgtattaaaagttatgtaatttcacatctagaatcattctatgtgaagtctaag

SEQ ID NO: 355869 - DNA, 608 bp, Homo sapiens
ctttgggctccaagatgagactggagataagggggaaatgtctaacactatggcaaagccaagaggactttttcacaaaatatatatgaggtaaaccctaaaattacttgacaagaattttttttggatatcagtgttctcataaaatgaattattatgtctgagctaggaaattatgacatttgtgtcatgactgtagttactacaactattctagtttttattatttttaaagtttcttccagatcttatactctgcaatttttggatataatattttatattattagttccttctactcaaaataatcacattgagttggaatctccaagtcaagaaaagcagacatcatgacaatgttagtgtacaaggagttcaaaaaataaaggaataaccacgtttgaatttttttaagtactgatactaaacaataaactgaaacgtgagttaccaacagcttcttgttgttttscactctgaaagactaagaaactttagaatgcttaattgcttcctatgtattaaaagttatgtaatttcacatctagaatcattctatgtgaagtctaagatgatcaagaataggtattaaagccatttgatgacc

SEQ ID NO: 355870 - DNA, 601 bp, Homo sapiens
cttagacactgctttggtctcatcctctggttcttctttttcttctttttttttttttttttttttgttgctattctagattgcagaatgtacctgctatattcaaagataagctagaacaatatgactggggcttaaaaagttaaggcagagttgccaatcctcctgcagagtaattcctctacattccacttcaaggattatgcataattaaattgaaggcgtttgacttttctgcctttatgtaactgcctttctacctcccttcactacctctttactgcaacgaaagaagcatttctgcctccaggtcttggctcaagtttttactttcacggtgatgtccttgtcctatatttttgtctaagtatattgccacagttgagacaytcctctgcctttaacatttctccaactttcttgcctccttcagactcttttagcacacaacatctctgtcactcattacacatttaataatatacctttgactttacctttttatgctaactgttcttcatgttaatagccatgaatttcttacgcttaaaaaaaagtactcaatgccaaacacagcatctttcctattgcaggttttagt

SEQ ID NO: 355871 - DNA, 578 bp, Homo sapiens
ctgttatctttgtaagctgaggatgtacatcacctcaggaccactgtgataattgtgttaactgtacaaattgattgtaaaacatgtgtgtttgaacaatatgaaatcagttcaccttgaaaaagaacagaataacagcgattttcagggaacaagggaagacaaccataaggtctgactgcctgygaggtcgggcaaaacagagccatatttttcttcgtgcagacagcctataaatggacgtgtaagtagggaagatattgataaattcttttcctagcaaggagtattaataattaataccgtggggaagaatgcattcctggcgggaggtctataaacagttgctctgggagtgccggtcttaagtggttgagataaggaccaaaatacgccctggtctcctgcagtaccctcaggcttactaggttggagaaaaacctcgccctggtaaatttgacatcagattggttctctgctctcaaaccctgttttctgttgtttaagatgtttatcaagacaatatgtgcacagctgaacacagacccttatcagtagttctgttttgccttgtcctg

SEQ ID NO: 355872 - DNA, 578 bp, Homo sapiens
ctgttatctttgtaagctgaggatgtacatcacctcaggaccactgtgataattgtgttaactgtacaaattgattgtaaaacatgtgtgtttgaacaatatgaaatcagttcaccttgaaaaagaacagaataacagcgattttcagggaacaagggaagacaaccataaggtctgactgcctgtgaggtcgggcaaaacagagccatatttttcttcgtgcagacagcctataaatggacgtgtaagtagggaagatattgataaattcttttcctagcaaggagtattaataattaataccgtggggaagaatgcattcctggcgggaggtctataaacagttgctctgggagtgcyggtcttaagtggttgagataaggaccaaaatacgccctggtctcctgcagtaccctcaggcttactaggttggagaaaaacctcgccctggtaaatttgacatcagattggttctctgctctcaaaccctgttttctgttgtttaagatgtttatcaagacaatatgtgcacagctgaacacagacccttatcagtagttctgttttgccttgtcctg

SEQ ID NO: 355873 - DNA, 552 bp, Homo sapiens
ctcagattattcctttttattagagtctcatggaaaatattttaatatatttctaaaacagaaagatatttggtaaatatttcttaatttatatattcaagacagagaggaatcccttgaatctcctgaaagcatcacttctaatataaagaatgttttcatatctgttgtgatttttctctgcttctgtattcctttctagaagtctctagcctggcctagaaaggttttatagtctggcaagaattgaatgagttaaaaccaagatgattattactaaagccccaaatgtttattagaggggggcatcagatctaaatttaagggtaaaaaacaaagaatatctagtaatgtataactcatgctaatttgacagagtgaagagggaaacagacatctaatcactggtagacccatgatcaggaatcatgtctctgcataagcagagatggtacccttagggagaggstcatggctatgttgaatgtgtccatcatgaagccattcacacttcatccatctgcctcagtgttcttgtccaaagaggactgg

SEQ ID NO: 355874 - DNA, 595 bp, Homo sapiens
tattgagtttaaaaattcggaagttccctcagacaaaaatgttgaatttgagttttaacatttgaatttgagtttcaaacacttggattaaattaatttcaatgtttattccctgagtatatcacgatgaactagggaccgctaagttgattgtgacagaaaatgaggaaatgcctgttgactttgaagacaccttgaacctaaagtagactcgagagaaaaatcaaccaagtcagcaactaagtcatttaagagaaaaagatagggttgcactgcagagaagtaactaattcataaagtacctttatgtttgatgtttaattccaaaatgctatgggttattttaagcatcttttgatgaaaggtgtttgcagataaaagttttacaggaacttgtcttcctcatctgaaaattaagccttttataattcagtatgggaaatagtaaatgcagttttatggagcaaaactttgatcacattttattaaatataaggtgtatttttaaaaagcattttarcatctcaaatcaatttgcattttttaaaatcaataatgtttgttgatcattgttggtatagactgagatcatttt

SEQ ID NO: 355875 - DNA, 566 bp, Homo sapiens
agaacgtattccctctgaggactggaaaaagacaaggatgcccactctcaccactcctctttaatatagtactggaagtcctagccggagaaatcagacaagacaaagaaataaaaggcatccaaattgtttaagaggaagtcaaaycctcactgtttgctgatgatatgatcgctcacttcaaaaacctaaagactccaccagaaagcccctagaactgataaaagaattcagtaaagtttctggatacaaaattaatgtacacaaattaactctcctatacaccaacagtgaccaagcagagaatcaagtcaagaacttaaccatttttacaatagctgcaaaaacaaacaaacaaacaaacaaaacacttaggaatatacctaaacaaggaggcgaaagacctctacaagaaaaactacaaaacaatgctgaaagaaatcacagacaacacaaagggaaacacatcccatgctcacggatgggtagagtcagtactgtgaaaatgaccatactgccaaaggcaatctacacattcaatgcaatccccatcaaaataccaccat

SEQ ID NO: 355876 - DNA, 612 bp, Homo sapiens
atgaacactgctatgaacactgtaatacatttttctcgtagcgtatgtgcagaaaagttctcatgattgcgtaattactggttcatacagtatataaatgtgaatccatactatttccaaaacttggtatggttatgactttttaacttttcactatgaaagtgttatraaatagttttgcatcatggtcttgatttgtattttaccaatcacatatgattattggccatatgtttttctcttcagaaaagtctacttttctatttgtttttgtttttttaaatatatatatatttttattatactttaagttctagggtacttgtgcacaacgttcaggtttgttacatatgtatacacgtgccatgttggtgtgctgcacccattaactcgtcatttactttaggtgtatctcctaatgctaaccctcccccctccccccacctcacaacaggccccagtgtgtgatcttccccttcctgtgtccatgtgttctcattgttcaattcccacctatgagtgagaacacgcagtgtttggttttttatccttgcgatagtttgctgagaatgatggtttctgcttttcttgataatttatagagttcatttg

SEQ ID NO: 355877 - DNA, 444 bp, Homo sapiens
atgtatacacgtgccatgttggtgtgctgcacccattaactcgtcatttactttaggtgtatctcctaatgctaaccctcccccctccccycacctcacaacaggccccagtgtgtgatcttccccttcctgtgtccatgtgttctcattgttcaattcccacctatgagtgagaacacgcagtgtttggttttttatccttgcgatagtttgctgagaatgatggtttctgcttttcttgataatttatagagttcatttgctagtttctgtaacatgagtatcttctgtacacttggaattgtctttattttcataaaggtgccctttgatgaataagtgttcttaatatttttttattcaagtcaatgcttttggtattttatttaagaaatagttctctattacaagatctgaactatatacaacaaaatgttttaaagc

SEQ ID NO: 355878 - DNA, 620 bp, Homo sapiens
cccttctcccttgattcttcccttggggtgggctgtccacatgtgcagtggcctgccagcacttgggaggggagcatgcatagtgcatttactggaggtgtacacatgctaatttgaggcattcctcccttaccaatcaaatgtccctaggaggtaatataccagttaatctctgccattttgcctcttagtgtacatgcttgagcccacttgcccaactcctgagatcttaatgggaagctggtgatcaccagtttcaggtgtttctatctatagagagactgcctttccctggtgctggttgcaaccaattattttagagagacagttaaccacatgacaccacctagtggtcgcctgacattcctggttgtgggtagggggagccctctcccgccctgctctgtctgactasctgcccactgtaacaagaataattctctgtgtaattatactaagtcccaagtgattaatgtaagtaaaatattccataaatatatttaagttgtgtttgtctgtgtcttggctagtcagcaaattcatgcatttatgcatttgttgaaaatgaggcagtcatcgctaatgaaactgcagctagatgggagaagaaagtgatttga

SEQ ID NO: 355879 - DNA, 596 bp, Homo sapiens
ggtagatatttatgtatctagacataaaaaaggtacagtaaaaaaataaagtgtaagagattaaaaaaacggtcacctacatagggcacttaccatgaatggaatttgcaggactgaaagctgctctgcctaagtcagtgagtgagtgatgaaaaataaaaattaatttctaagcccccagcagactgaaaggactccttgcgatcaaagggacrccagagaaaaggtggaggctgaattcctgtgggatgggaggtaagacgcctcattatactccctccctcaataacctccattaggctttttcccctaagggctaaagagaaaccagcagtttcaaaagtcctccaccactgattttaaccaactgcctgaagctgcccctcccttttgctaacttgaggcagtatctgaccagcattccttcctggtaagagaccaccagccatggcggggtggttctgaccactctatggaggatgtgcagttaacatttccgtgtcctctgcttcaccttttgacatcagagggtcaaaaaactccacgcttgagccatgctaacacggccattttttgaacatgagaccgaagaaaag

SEQ ID NO: 355880 - DNA, 506 bp, Homo sapiens
ttgacatcgttgttttaaaatttcaaaagcaaactatatctaatttattatctcgttttactttagtgttttcattactagaatagtgtgctggcaatttttttttttttttttttactgaaaagaagagtagcagcatattattgaaaacactctcgtctgaaattcaggtgatctgaactctattccttaatctaatataggcagtgtggtctccaaaaagtcaattttctaagcatcagtttcattatctataaaatgatatgcatttgagaagggaaggaagatttaaagtagaaaatgtcacgattctttgactctaagtcccctctttattgaagtttccttttcctgagtmacctaaaattcttcttcactatccactttgaatacacttatttatctctaaagtgtttttgttggctgtgtgtggtggctcagacctataatcctagcaatttgggaatccaaattgcttgagctcaggagcccaggaccagcctgaa

SEQ ID NO: 355881 - DNA, 562 bp, Homo sapiens
agtgagttcaggatcccaatttttttttttcctttcagtgttacaaatcagagtgagtcttgtaaatctacccaaaggtttaggtaactaaggcatgaagaaatttctagtcaagagatagagttaaaaacctattctttaatcactgaatttttatctttttgcttacatacactgtgacaaatagggctaattgttttgggaagtgattctctaacccttctgkgcaatattctttctccagctgatttacaaggaagaggctggagaaactaaggctaagcaccatctgggaaccttgtacgatttttgtctactaccggccaacgcagagacatttgctgaagaaaacaggctgaacacagcctgaattcctcaacaagttctatcactaacaataagttaatagctaacatttgatgacaacattccatatgttagactctctcctaagtagtttttaatgcattcgctgttccacataatttaatttactttatatatttacaactttaatactctttaccgtggctacttccatctaactacttatagttacctc

SEQ ID NO: 355882 - DNA, 539 bp, Homo sapiens
caattatgttgtggagttttgctatgaaggaggacaggtagattgtgtaatagctggaaggaaaatgcacgcaagagaagttttcttttttctttctttttctttgtttcttcttcttttttttttctttttctttttttgagacaragtctcgctctgtctcccaggctggagtgcaatggtgtgatctcagctcactgcaacctccgcctcccgggttcaagtgattctcctgcctcagcctcctgagtagttgggattctgtaatctctcctgccaccatgcccagctaatttttatatttttactagagatggggtttcaccatgtttgccaggctggtctcaaactcctgacctaaaatgatccgccccccttcggccttccaaagtgctaggattacaggcacgagccactgtgcccggctctgtttttgttttttaagatggaagagacaaaagtaggtttgtatgctgatgatgacctatcaaaaaggaaaaatggataatttaggataagagatgtaaaattgctgggat

SEQ ID NO: 355883 - DNA, 585 bp, Homo sapiens
aactgcctccccagatagagagcttgcttgaggataactctaacaaagaggaaaccattgccaagttatgttgatggaccaatttctagtaagttttgcgggttcatagatgtagaggtgctggaggcaagtactatttctggaattrcattgcctaatagattctccatttttgtttaagctaatttaagtttggtttctttcatttgcaactaaaactgccctaataattaaattaatactaaattaaaaatcaagtaagtgatggccaggcacagtggctcacgcctgtaatcccagcactttgggaggctgagacaggtggatcgccacaggtcagaagttcaaaaccagtcttgtcaacatgacgaaaccccgtctctactgaaaatacaaaaattagtcgggcatggtggcacgtggctgtaatcccagctactcaggaggctgaggcaggagaattgcttgagcccaggaggtggagttttcagtgagccgagatcgcgtcactgcactccaggctgggtgagacagcgagactctctcaaaaaaattaagtaagtaaatgagatctgtcattatatt

SEQ ID NO: 355884 - DNA, 521 bp, Homo sapiens
cagaaaaaccttactgtatgtttgttgaatactttatggtgtttgtaggaaatttcttgtgggtaaaggcaataacaaggtggagaacggaattgcataggtagagagaaatatgaatgcatgaggaaaactatggaggagttaaacctgtgaatctcctctatcatttatatgtttctgtatttccaggtacatgcaatacaaatattggttatcacacagtgcagaggtttaatacaacacagaggcaggaatgtttcaaggcatgttataggactcttttgatttcatagaaatatagrtaaatgccatttaaataacagaagctaaccatgaccaacaatttgtagaatcctgttaagccctggactaagctgtttgcgtaataaattatcccatttacaaatgaggagatgaaggctttcagaggttggatatcttactcaaggttacaatgtcattaagtagcacagctggaaggaaaatccagttgtatgatagtattcatttgtcttcaagat

SEQ ID NO: 355885 - DNA, 521 bp, Homo sapiens
cagaaaaaccttactgtatgtttgttgaatactttatggtgtttgtaggaaatttcttgtgggtaaaggcaataacaaggtggagaacggaattgcataggtagagagaaatatgaatgcatgaggaaaactatggaggagttaaacctgtgaatctcctctatcatttatatgtttctgtatttccaggtacatgcaatacaaatattggttatcacacagtgcagaggtttaatacaacacagaggcaggaatgtttcaaggcatgttataggactcttttgatttcatagaaatatagataaatgccatytaaataacagaagctaaccatgaccaacaatttgtagaatcctgttaagccctggactaagctgtttgcgtaataaattatcccatttacaaatgaggagatgaaggctttcagaggttggatatcttactcaaggttacaatgtcattaagtagcacagctggaaggaaaatccagttgtatgatagtattcatttgtcttcaagat

SEQ ID NO: 355886 - DNA, 581 bp, Homo sapiens
caaccttacttttcggatactgtctcctagatttttctacctagtgcgttccataagtctgtcgtaagttcagcctctttgggaatcaggaaatgcacccaggggaacagcatctttaagttcaaaattgtattctttcgatttccgtcttctggatttggcccagtaatttttcaatttcttgttagctgccagtttgatttaattcttactcgatttttctagttgtccttagcagatgaggaggtttgaaatayctgctcaccattactagaagtgcacatccttgccctggttctctcttgatcctcctaaagcggggagagtgggctttctccaagtgaaggacaagtcagaggtttacctttactctcattctgaagaagtaagtctgaggtaaatggaaattgtcctgatatccataaacctgtctcgctgtctggagccctcataatacaggaaggactagaaggctcagtttgtttctctattgagagaaggcgggattacccctgttgtgtggggcttattgaccaggatgtttccaggaaagtcttcgttttttctcttacagcattcat

SEQ ID NO: 355887 - DNA, 581 bp, Homo sapiens
caaccttacttttcggatactgtctcctagatttttctacctagtgcgttccataagtctgtcgtaagttcagcctctttgggaatcaggaaatgcacccaggggaacagcatctttaagttcaaaattgtattctttcgatttccgtcttctggatttggcccagtaatttttcaatttcttgttagctgccagtttgatttaattcttactcgatttttctagttgtccttagcagatgaggaggtttgaaatacctgctcaccattactagaagtgcacatccttgccctggttctctcttgatcctcctaaagcggggagagtgggctttctccaagtgaaggacaagtcagaggtttacctttactctcattctgaagaagtaagtctgaggtaaatggaaattgtcctgakatccataaacctgtctcgctgtctggagccctcataatacaggaaggactagaaggctcagtttgtttctctattgagagaaggcgggattacccctgttgtgtggggcttattgaccaggatgtttccaggaaagtcttcgttttttctcttacagcattcat

SEQ ID NO: 355888 - DNA, 581 bp, Homo sapiens
caaccttacttttcggatactgtctcctagatttttctacctagtgcgttccataagtctgtcgtaagttcagcctctttgggaatcaggaaatgcacccaggggaacagcatctttaagttcaaaattgtattctttcgatttccgtcttctggatttggcccagtaatttttcaatttcttgttagctgccagtttgatttaattcttactcgatttttctagttgtccttagcagatgaggaggtttgaaatacctgctcaccattactagaagtgcacatccttgccctggttctctcttgatcctcctaaagcggggagagtgggctttctccaagtgaaggacaagtcagaggtttacctttactctcattctgaagaagtaagtctgaggtaaatggaaattgtcctgatatccataaacctgtctcgctgtctggagccctcataatacaggaaggactagaaggctcagtttgtttctctattgagrgaaggcgggattacccctgttgtgtggggcttattgaccaggatgtttccaggaaagtcttcgttttttctcttacagcattcat

SEQ ID NO: 355889 - DNA, 581 bp, Homo sapiens
caaccttacttttcggatactgtctcctagatttttctacctagtgcgttccataagtctgtcgtaagttcagcctctttgggaatcaggaaatgcacccaggggaacagcatctttaagttcaaaattgtattctttcgatttccgtcttctggatttggcccagtaatttttcaatttcttgttagctgccagtttgatttaattcttactcgatttttctagttgtccttagcagatgaggaggtttgaaatacctgctcaccattactagaagtgcacatccttgccctggttctctcttgatcctcctaaagcggggagagtgggctttctccaagtgaaggacaagtcagaggtttacctttactctcattctgaagaagtaagtctgaggtaaatggaaattgtcctgatatccataaacctgtctcgctgtctggagccctcataatacaggaaggactagaaggctcagtttgtttctctattgagagaaggcgggattacccctgttgtgtggggcttattgaccaggatgtttccaggaaagtcttcrttttttctcttacagcattcat

SEQ ID NO: 355890 - DNA, 605 bp, Homo sapiens
tatacttagtatatgacacagtaattacacttttatttgtttaccgtccaaaaataaaaacacatatccacagaaagctctrtacaaaatattcctagctttatgtttttatgtgtatataaaatatttatagcttgatttctgtaataatgacccccaactggaaaaaatccaaatacagagtatgtgttgatgtatccatataacgtatatttctactcagccaataaaaaggaataaataactaaaacacacaacgtgaattaacatcaaaaacactcaagcaaacaaaggcaggcaaagtgagtatgtgctgtatggctccatttagttaaattctgcaagtgacaaattaatctagagtggcagagtaaagatcagaggaacgcttaagccctggcatgtggtggtggcggtggtggtgtgtgtatgtgtgtgtatacgtgtgaaggggctgttatatgggtgggggagtggggagctattttgaatgagaacaggaataaagggaaatttgaggaataatggcaattttctatagtttggttgagtggttatccatgacatacatttgtcaaaactcaaactaataaaaggtctgtgtt

SEQ ID NO: 355891 - DNA, 605 bp, Homo sapiens
tatacttagtatatgacacagtaattacacttttatttgtttaccgtccaaaaataaaaacacatatccacagaaagctctgtacaaaatattcctagctttatgtttttatgtgtatataaaatatttatagcttgatttctgtaataatgacccccaactggaaaaaatccaaatacagagtawgtgttgatgtatccatataacgtatatttctactcagccaataaaaaggaataaataactaaaacacacaacgtgaattaacatcaaaaacactcaagcaaacaaaggcaggcaaagtgagtatgtgctgtatggctccatttagttaaattctgcaagtgacaaattaatctagagtggcagagtaaagatcagaggaacgcttaagccctggcatgtggtggtggcggtggtggtgtgtgtatgtgtgtgtatacgtgtgaaggggctgttatatgggtgggggagtggggagctattttgaatgagaacaggaataaagggaaatttgaggaataatggcaattttctatagtttggttgagtggttatccatgacatacatttgtcaaaactcaaactaataaaaggtctgtgtt

SEQ ID NO: 355892 - DNA, 584 bp, Homo sapiens
ggaatacatttccacaatggaaaagaacttttctccagaatgaaagaagttacttgggtaccaaaatatcatctttaaaaaattataataaaaatctgaaacaatataaatgcaaaaaggactagcaaatgcaggsacagagtaaaatttgtttatttggagattgggtcatgagactggattcccctatcaactcccttcagtttctaagggaattgcagaagaatccccttgtactcctggcaggggaagggaaaaagaaaccattttgaaatatagcaaagcattctgttcttcttaacaaggtctgcccttaggagaacgatttagccagaggctaacctaccggggttttatcagcccctaactgacctgggagagaggaaatacacaaaagcagccttctgtagttttccatgtgggggaagcaaaaaacagaactttaacccgctctagctatcctgcctcacctaagtggggtgtgggggcggggtgaggggatccgagatgcacattaagttcacagttcggaggtgcatactcattaaaagattgagacataaccatagcactacagagcagtc

SEQ ID NO: 355893 - DNA, 584 bp, Homo sapiens
ggaatacatttccacaatggaaaagaacttttctccagaatgaaagaagttacttgggtaccaaaatatcatctttaaaaaattataataaaaatctgaaacaatataaatgcaaaaaggactagcaaatgcagggacagagtaaaatttgtttatttggagattgggtcatgagactggattcccctatcaactcccttcagtttctaagggaattgsagaagaatccccttgtactcctggcaggggaagggaaaaagaaaccattttgaaatatagcaaagcattctgttcttcttaacaaggtctgcccttaggagaacgatttagccagaggctaacctaccggggttttatcagcccctaactgacctgggagagaggaaatacacaaaagcagccttctgtagttttccatgtgggggaagcaaaaaacagaactttaacccgctctagctatcctgcctcacctaagtggggtgtgggggcggggtgaggggatccgagatgcacattaagttcacagttcggaggtgcatactcattaaaagattgagacataaccatagcactacagagcagtc

SEQ ID NO: 355894 - DNA, 472 bp, Homo sapiens
cgtgtgtgggagccctctcctgccctgctcatacctgaccagctacctcctgtaacaggattatattaaactaaactaaaaaaaaaaaaaaggaaaaaccttctgcaccgttagacaatattcaacagaatgaaaatataatctgtagaatgaaataaagtatttgtaaactatgtatctcataaggggttaatttccaaagtatgtaagaaactcttacaratcaatggcaaaaaaaaaacaaacaccaaacaacaaacaaaaactaatttaaaaatgggtaaaagacttaaacatttcttcaatgtagacgtacaaatgccaaccaggtatatgaaaataccctcaacatcactaatgctcagggaaatgcaaatgaaagctacaattatcttttccctcacacctgttaggatggctaatagtgtatttgaaaggatgtagaaaatgtggaacccttgtacaatgctgg

SEQ ID NO: 355895 - DNA, 564 bp, Homo sapiens
tggaacccttgtacaatgctggtgggaatrtatgatggtgtagtagctatggcatacagtacagaagttcctcaaaaggtaaaaataaaatagaactaccttattatctagcaatcccacttctgagtatatgtccaaaagaattaaaatcaggatcttggagagatagcttcacccatgttcattacaacattcatgaagctaagttatggaaacaacccaagtgtccattgacagaagaatggggaaataacatataatgcagtatttattattcagtcttgaaaaagaaagaaatcctgtcctttgtgacaaggtgtatgaacctggaggacattatgcttagtgaaataagccagtcacagaaggacaaatatagtagacttccacttacatgaggtatctataacagtcaaactcatggaagcaaagaatacaataaagaatacaataatgggatttggggaaactggggaatttttaatgggcatcaagtttcacttatgctagatgaataagttctagaaatcagctgtctaacgtagtgcctatagttaacaatat

SEQ ID NO: 355896 - DNA, 520 bp, Homo sapiens
agagaaccccactgcctccagcagcaacctgcagactgttttcagatagtgcttgattttgatgcaggaactacttaactattcttawaatttggatcccttgattctgcccttcttttggaatttttctcctcatttttgtacgattggatgtaatagtgcctggtatatggtatagggtaaagagatacttgcttaatgaataaccttagtttgagtctcaatcaggtacttaccatgtatgtggtcttggacactttgtctaatccctttaaatctcagattattcatatgtataatgaaaagactaatagtacttcgaggtctgctagcagctgccccaacaaaataagtctgcaataattgccataatgaaataccacagactgggtggcttcaaaaacagaaatttattttttcacagatttgggatctcaacatccaagatcaaagtgtcggcaggtaaagagtttttgcacagcaaaaggagatttcaacagggtaaacagacaacatgcag

SEQ ID NO: 355897 - DNA, 567 bp, Homo sapiens
tggtgactaagttgtatatttagccacagagaaataaatatttgttaacaagacaaaacaacaagtccaccaagagccaagagacagggctgccctcgaaaacaggttttattcatrccagcaatagctgccaaccagacaaattaatttctaaaacagatgtaaagaacaactatacccatactcagatgaataacaacagaatctatatttttaatttgaatacaaacaattacatattgtgattaattaaactggtaaggcagaatcaatgtccatttcccagttcacaatgggctggtcattactactcacaggctctaacgcaagtctatattctccagtcatttaagcccaaaatccattctcccaccacctagctgcctgatgtttgctaaccacagtgcttggtcctcttgcgtatcctgtggttctaaggtacatccaacaggccctcttagtcttttctatttgttttgctctgcacagctgtataattcccacaattcaggatgtgagatcaaataggatcagagatgggctactgaaagtttaacaaccgactgt

SEQ ID NO: 355898 - DNA, 577 bp, Homo sapiens
gtgacatgaatgagtataccatctattttgtatggaaccagaaaagacttgtgaatctgttacagtcaatgctccaactagaacagaatctatgcaacaaatgacaaataaaacttgaaagaaagttgaaatggtgagctatttcacttggacatagtattattcaatagaaaattctaatattagttatttagatttatttagattcatagttacatattcactgagggaaggaaaagtcattttctatattttatcaaagaaattatatatccatttcagtagttctcaactcctttgaggtaaagaaaactttggagaattgatgaaagagggttcatacaagaaaaatatgtctatatacagaaaaatcttagcatacaattttagggattttatagattcgtaaggatcactccaggaccccggataaatgcaccagttatctctaagtttggactttatatagaacacagaggaaatgcatcagaaatatcarcgggtactttatcgttcccatcatggttagcacattgttttgtataccattatctgtgttcaggaaaactaacaattt

SEQ ID NO: 355899 - DNA, 551 bp, Homo sapiens
gcctgggctggggtctccagaacctggctctggcctcctgctgtcaggccccagagccccaaccccaaggagggagaggtggggagtcatcacaaagccagacctcttcccacagactactgagtcctcctgagggccttcttgggggttgaggggcttccaaaggctggcgggtgctgtgacagagagctccacttcccatccctagtggagcaggggtcacttgttgctgagctgagatgcagstggctccccactgagcagtgatgagggggccaagtcattatggggggagatagagggcagggggtacagtcctgggcctaagcagctttgggtcatgagggtgtcatggggagcttggctggggaggtggcagtttcagcttaactcacctggttctctttgtgcatttccctggagctcaacagggacctaattaactgacagttggtctgattgccaagctgaggggcggggcggggaggggggcggtcagttgctgcttggctcacgtagcaaggagggcaacttttcatttctcacaagga

SEQ ID NO: 355900 - DNA, 578 bp, Homo sapiens
agccaccaggttcagtcctgttgtgcagcctccatgcctgtctctggggagggggctgcagcagggcagagccttgagtctggtggaagggacagagtggccatcctcaaagraggaagcagcctgccctagaccacaccacctaacgccaggctggaaaggaactgaagtttcacttgagccatgatttgtcccgggggaagcttgggctgagaagggcagggccctttgaccaggtcaagaggagcagaagcagcaaggctcagcccagagcccaggccagacaggggcactaggcagccttgcgccttccagagcttggcaccccgagaacctgactggctgtgcagcagttctgccccgcctgtaccccttctcctcccattctctcctgagctccccagacctgcatttggaatgcatcttactgtctgacctgcctgctacagtgccagacagagtgtagcttcttgccccctccctctgtcccctgcctggccagttttcctggtacattggagccaactgagcagttcctggcctttcctcatctccgccaggcctgtcccaccctagcg

SEQ ID NO: 355901 - DNA, 578 bp, Homo sapiens
agccaccaggttcagtcctgttgtgcagcctccatgcctgtctctggggagggggctgcagcagggcagagccttgagtctggtggaagggacagagtggccatcctcaaaggaggaagcagcctgccctagaccacaccacctaacgccaggctggaaaggaactgaagtttcacttgagccatgatttgtcccgggggaagcttgggctgagaagggcagggccctttgaccaggtcaagaggagcagaagcagcaaggctcagcccagagcccaggccagacaggkgcactaggcagccttgcgccttccagagcttggcaccccgagaacctgactggctgtgcagcagttctgccccgcctgtaccccttctcctcccattctctcctgagctccccagacctgcatttggaatgcatcttactgtctgacctgcctgctacagtgccagacagagtgtagcttcttgccccctccctctgtcccctgcctggccagttttcctggtacattggagccaactgagcagttcctggcctttcctcatctccgccaggcctgtcccaccctagcg

SEQ ID NO: 355902 - DNA, 578 bp, Homo sapiens
agccaccaggttcagtcctgttgtgcagcctccatgcctgtctctggggagggggctgcagcagggcagagccttgagtctggtggaagggacagagtggccatcctcaaaggaggaagcagcctgccctagaccacaccacctaacgccaggctggaaaggaactgaagtttcacttgagccatgatttgtcccgggggaagcttgggctgagaagggcagggccctttgaccaggtcaagaggagcagaagcagcaaggctcagcccagagcccaggccagacaggggcactaggcrgccttgcgccttccagagcttggcaccccgagaacctgactggctgtgcagcagttctgccccgcctgtaccccttctcctcccattctctcctgagctccccagacctgcatttggaatgcatcttactgtctgacctgcctgctacagtgccagacagagtgtagcttcttgccccctccctctgtcccctgcctggccagttttcctggtacattggagccaactgagcagttcctggcctttcctcatctccgccaggcctgtcccaccctagcg

SEQ ID NO: 355903 - DNA, 446 bp, Homo sapiens
caattgcctacagtattcagtatagttacatgctgtacaggtttgtaatcttaaagcaatgggctgtaccatatagctgaggtgtgtagtaggttataccatctaggttgctttaagtacattctgcgatgtttgtggtgccccaaggagttaaaagaaaattgaaaaatgagcttagctgggaaaaacagaaacaggaagagatgaatgaatgtttgaraaatggggtgaaccataagcagctcactaacatctaagcattctgttataagcactcagctcccagcaccctgcatccaagcatcctgtttgtagcattcagctaaagcagcatagccttatagaactccccatccagtccctgcctctttgagacaactgacagccttccttctgctgtcttgtcagttgcatccttgcaatgtatctcccctttctttaataaa

SEQ ID NO: 355904 - DNA, 446 bp, Homo sapiens
caattgcctacagtattcagtatagttacatgctgtacaggtttgtaatcttaaagcaatgggctgtaccatatagctgaggtgtgtagtaggttataccatctaggttgctttaagtacattctgcgatgtttgtggtgccccaaggagttaaaagaaaattgaaaaatgagcttagctgggaaaaacagaaacaggaagagatgaatgaatgtttgagaaatggggtgaaccataagcagctcactaacatctaagcattctgttataagcactcagctcccagmaccctgcatccaagcatcctgtttgtagcattcagctaaagcagcatagccttatagaactccccatccagtccctgcctctttgagacaactgacagccttccttctgctgtcttgtcagttgcatccttgcaatgtatctcccctttctttaataaa

SEQ ID NO: 355905 - DNA, 446 bp, Homo sapiens
caattgcctacagtattcagtatagttacatgctgtacaggtttgtaatcttaaagcaatgggctgtaccatatagctgaggtgtgtagtaggttataccatctaggttgctttaagtacattctgcgatgtttgtggtgccccaaggagttaaaagaaaattgaaaaatgagcttagctgggaaaaacagaaacaggaagagatgaatgaatgtttgagaaatggggtgaaccataagcagctcactaacatctaagcattctgttataagcactcagctcccagcaccctgcayccaagcatcctgtttgtagcattcagctaaagcagcatagccttatagaactccccatccagtccctgcctctttgagacaactgacagccttccttctgctgtcttgtcagttgcatccttgcaatgtatctcccctttctttaataaa

SEQ ID NO: 355906 - DNA, 547 bp, Homo sapiens
gtaataacatgtttttccacttttccatctgaggggacatttaattctgttaccagctagaataattgttctgatgcaacagttcatctgtggctggggatacttgaggcacttcattcatttgtgttagtgaattttaattgattgattgctgataccttgcagaatatagaaatcttgtttccagggaaatacattstttaacatttaccttatcaccagtcttttatatttaacttttaatatttgaattaaatatttctatacctatttgccctactttgagtcttactataatttagcaagaacacattaaattaaatgacatgggattggaatgtaaggcaattcatacacttgatttgaaagcatgaaatgatagggcttttaagttgaaatacattatgagtgatgtaagtctcctgaaaattagactccttaaaattaacttacgtgtttacttattagcactgatttatgtcttagttcttgctgtgaccaatacttgaaagatatatcacttggctttcaatatttcataattagg

SEQ ID NO: 355907 - DNA, 600 bp, Homo sapiens
gagttactttccatcttaaaatcacacagatattataccagatgtataaaatggctaacgagaacccatataatttaataatattcatctcagaaatctcagttaaagctaggtagagagtgatgattctcttcartcttctagcttttcctataggtgtgctggcttataagaaacaattaccatattgaagattgtgcctgccaatttttctctagctgtaaattgatggaagtgagagcattttcagaaaaaagaaaaaaagaaaaacgattgttagcagccttttcctttgcagtaagtgaagcaaagcattattttaagggaaagatgaaagtagctgcaaaggccatttagacttgaactcctatgcatgaaggccatccaccccaagcctatcaatcacatatgactaccagccaatctttgcaggctataatttctctagcaaaaggtaaggcagtgcagccatccccagctttgatgaaacttttatgaaggaaaatttatactagttgtacctgatgctcagttgggagctgattaaatgatttatattttgcctgatcagaaacccaggcagattaaaaattgtggcaa

SEQ ID NO: 355908 - DNA, 467 bp, Homo sapiens
tacttagcagtgccagaagaatcccattactggaaggtaaatttgggaagctagcattaaaaggggctgaacaaaaaagtagtccccacgtatttaattcctcattcatggtgttgccattgttctttgcatatatttttaattttgccattagctgtctgcattattattatcatttatacatctctactagactgatttgtctcatttatttctgtttcagtgtgtataatagtgcccagaatgaagcagatcctccataaacatttttttatgtggttggaggaacaaataaataagacragtcatcaaaggttctgctaatcagaggtcatataatatatttcctggggaacagaaatccaggcagataaaatacaaggacactgtatactggtgtccttttaagaggcacaatcaacatatttagacataaaattgaaatgatgtaaatgttatgcgagagt

SEQ ID NO: 355909 - DNA, 594 bp, Homo sapiens
aggtgcttcaactggcgatagaaagctcagtttcaaacccatctcccaaaacaactaaaaccagaggtttacatagcaaggaagaaatgtaacaacgtgtaagaaaacaggaactagggaggggcaaggaagcaatcatgatgaatgaagggtctggcatctcattggatgtggtgatctggtgagtttcagttaggcaataatttttttgagaggcctgaaggccatttcctaaggaaggaactcagatgaaataaatgtaagcttcaagttttaagaccagaaagtttcatttctaaggctatccaaaaagcaaaaacaaaacaaacaaacaaaaaaacaagattattgggtcagtttcaaacctaagcataaaaatagacaatgtcccytatgtctttggttcttcattctgaaggccaccatatacacttaatgaatatgtataccttttatttgattaatctgtctcttgtcagtgattttcagcaaacctttagagggcaaaggggaagttttcgcttgggccctacactatcctgcttgaaattcagagaaatgaacgtgtaccacactagcagagcctacctgcct

SEQ ID NO: 355910 - DNA, 573 bp, Homo sapiens
atggagaacgacaaagaccaggctggagcatgtgcctttaagcctattaggcaattggatttgctaaaaccaaagcctagatttagggaaaatttactgtctkgttgtaaaaaggccaaaagtccttcacatgactagcattgggggagaagcagcagctatactccttgaagacagcttgctctcaagagaaggaaggatagagctgagcctagagtgcacattatcttcctcaagtttattggtcagagaaattttgttattacttccaagaatagagacaggaatagtatgaagagagggcaaagatttacttaggaaaaaataaatatgactttgttaaaatcaaggttaaagtgcagaaatgggcactatgagatttaacaactcgtctgtgctaacccagaaaagtagtaaacccaggacttgaattcatgcatgtaagactctagggcttttgcaatatctttcacaaatacaccaggaatgcaaatgtagaaattaaacaataaaacagaatctgaatagaagacctatttaaattaaatctttaaatttaactttttctaccat

SEQ ID NO: 355911 - DNA, 573 bp, Homo sapiens
atggagaacgacaaagaccaggctggagcatgtgcctttaagcctattaggcaattggatttgctaaaaccaaagcctagatttagggaaaatttactgtctggttgtaaaaaggccaaaagtccttcacatgactagcatkgggggagaagcagcagctatactccttgaagacagcttgctctcaagagaaggaaggatagagctgagcctagagtgcacattatcttcctcaagtttattggtcagagaaattttgttattacttccaagaatagagacaggaatagtatgaagagagggcaaagatttacttaggaaaaaataaatatgactttgttaaaatcaaggttaaagtgcagaaatgggcactatgagatttaacaactcgtctgtgctaacccagaaaagtagtaaacccaggacttgaattcatgcatgtaagactctagggcttttgcaatatctttcacaaatacaccaggaatgcaaatgtagaaattaaacaataaaacagaatctgaatagaagacctatttaaattaaatctttaaatttaactttttctaccat

SEQ ID NO: 355912 - DNA, 589 bp, Homo sapiens
caaacctttgcaaaatggttataacaatttactttctcactartatggtgtgaagattcctaatgctccatatactaatgcttagtgtttcaatttttgccagccttgtgtgcatgtgtacttgtataagcttttttcttctttgcaaagaatagactaaaggctacataatggatgtactatgcaaatgaatgatatccttgatatctttcaaagttttttaatataatagagaattaagtcatggaataaatgccactgttttctaaatagtaaaaatgaaaatgagactaaagaaaacaccttagcaaatgcaatcaatgaactacaagtgatttcataattgtttgcccggtcttgaaaaaattcagtctttctatttcacttataattccaaagtcatgtttggctttgtttgtttcctaggattttcattttactctttctggccatcctttgatagtgttctgccatcattcaggcccactctggactcttagcccctttccaggttatacgtgatcactgctctgggtcaaacactgtgagtattaatttctccctgatctcaactactttgagcctgatc

SEQ ID NO: 355913 - DNA, 604 bp, Homo sapiens
tttgttgccaacattctgctgtcccatttgttattaacatctattcttgtttgtcatttaaatagataagaagtgtatcagaagcagagctctaatggtgggactaaaataatctaattagaaataattttcattaagatacatttatttgtctgagtcaacggtgacactgtgttgtaggaatttgaggactatacttttcatactgttaaaatttagacaattaaagcatygttctatttaaatcttatctctaccaattattagttgtgtgacattggatcaactagtccttttttcatgtacctttctttatctataaagtgagggacacaattttaactacttgtgaggattaaattggtttatacgtataaagattttcaaatagctcttggcatatggtaaacattcaataggcaataataaatttaattatacttattcataattccagggttttttttcattacactatactacactgatacttatacatatctgtgattatctcttcagttcttgcccataatcataaatcttgcccataatcataaatcatatatcttttttacaaataaaaaacaaaatatgtttaaaatag

SEQ ID NO: 355914 - DNA, 528 bp, Homo sapiens
agatgcctgcaggacataatacctacatagaggkgccaccccacctatggtttgatgggaatgctctttgtggcttatgacaggagaaaacttttccttttgtgagtgaataaagattgagagaagccaaagaaaatgccaagaagaaaaactactcaattctcttaatctccatgaaatgaatctaaaactttgtgcagcctcttcagtatatatggatttttggctcacatcttatcaaattttgaggttgttcacatgggcttatccatttcataatattttcaaggacctaggatttttctatctttccagcatgccatggttatgtacatgtttgacatatgggattttgttcttatacaggcagcatagcaccttcagatgcaggtatcttgttcttattgaagaaggtaagaatgggagaaccagtaccatggagcctttggaaggaagcacatattacccaggaactctctgtagacttttgtttacatctcattgtccagcatgactaacagttgtcac

SEQ ID NO: 355915 - DNA, 561 bp, Homo sapiens
gaatttttatgtaaaataattatgttttgataatatcgacattttacatattttccacctctttaaaaatgtgtgcatataaattcagtaatcccccaaataacatgtttaaagcaaaaaaaaatgcttggtacatatgctatgtcaagtatcatccaaggtactaatgatgcattgatgaattagacacagccacagctacggtgaagctaatatatttgtagatgtcaaacagaaaacagtgggcaaatgttggcttcaacagcttttagtttgcttattttgttttgttttaagcgtattcaaggcatgtcgcttggatgtattaattacataagatagtagacattctttctcacagatttctttccctattttaccccttaaattctagcrttctacaggtttccattctaaaccttctttgaatgatctcattacactgcattaaattttactacctttcaaatgctttcagaaccatctctccaggcaacatctaccttagactgaagaaagtatgttgggtcttcccaacacctgtatgcccttggcacagct

SEQ ID NO: 355916 - DNA, 519 bp, Homo sapiens
ggcaacaaataacacgatgcatgtagaataatagaattgtaccctacatctcaatactaatgctgaatgtaaatggcctaaatgctccacctaaaaactacagaatggcagaatggataagaatttaccaactaagtatctgctgccttcatttgactcatctaacacctaaggactcacataaacttaaagggrtggaaaaatatattccatgcaaatagacaccaaatgtgagcaggagtagctattcttatatcagacaaaacaaaatttaaaggaacagcagttaaaaaagacaaagagagacattatataataataaaagaccttgtccaacagtaaagtattacaattctaaatatatatgcaccaaatttatgaaacgattactactagacataagaaataaaacagatagctacgtaataataatgggggccctcagtactccactgacaacactagacaggtcatcaagacagaaagtcaatgaagagacaatggatttaaactataccc

SEQ ID NO: 355917 - DNA, 519 bp, Homo sapiens
ggcaacaaataacacgatgcatgtagaataatagaattgtaccctacatctcaatactaatgctgaatgtaaatggcctaaatgctccacctaaaaactacagaatggcagaatggataagaatttaccaactaagtatctgctgccttcatttgactcatctaacacctaaggactcacataaacttaaaggggtggaaaaatatattccatgcaaatagacaccaaatgygagcaggagtagctattcttatatcagacaaaacaaaatttaaaggaacagcagttaaaaaagacaaagagagacattatataataataaaagaccttgtccaacagtaaagtattacaattctaaatatatatgcaccaaatttatgaaacgattactactagacataagaaataaaacagatagctacgtaataataatgggggccctcagtactccactgacaacactagacaggtcatcaagacagaaagtcaatgaagagacaatggatttaaactataccc

SEQ ID NO: 355918 - DNA, 519 bp, Homo sapiens
ggcaacaaataacacgatgcatgtagaataatagaattgtaccctacatctcaatactaatgctgaatgtaaatggcctaaatgctccacctaaaaactacagaatggcagaatggataagaatttaccaactaagtatctgctgccttcatttgactcatctaacacctaaggactcacataaacttaaaggggtggaaaaatatattccatgcaaatagacaccaaatgtgagcaggagtagctattcttayatcagacaaaacaaaatttaaaggaacagcagttaaaaaagacaaagagagacattatataataataaaagaccttgtccaacagtaaagtattacaattctaaatatatatgcaccaaatttatgaaacgattactactagacataagaaataaaacagatagctacgtaataataatgggggccctcagtactccactgacaacactagacaggtcatcaagacagaaagtcaatgaagagacaatggatttaaactataccc

SEQ ID NO: 355919 - DNA, 519 bp, Homo sapiens
ggcaacaaataacacgatgcatgtagaataatagaattgtaccctacatctcaatactaatgctgaatgtaaatggcctaaatgctccacctaaaaactacagaatggcagaatggataagaatttaccaactaagtatctgctgccttcatttgactcatctaacacctaaggactcacataaacttaaaggggtggaaaaatatattccatgcaaatagacaccaaatgtgagcaggagtagctattcttatatcagacaaaacaaaatttaaaggaacagcagttaaaaaagacaaagagagacattatataataataaaagaccttgtccaacagtaaagtattacaattctaaatatatatgcaccaaatttatgaaacgattactactagacataagaaataaaacagatagctacgtaataataatgggggccctcartactccactgacaacactagacaggtcatcaagacagaaagtcaatgaagagacaatggatttaaactataccc

SEQ ID NO: 355920 - DNA, 634 bp, Homo sapiens
ccccaaattaccactttgaagagcttctcaccaaacaagagaataagttttgagttttgcttaattaagaaataaacaatagtgtgattgaggcattatgcattatagaaattttattgaatgaatgatataacatgactttcagagtgattactttggtttacaatataattaaatattttaccataaagtcaatggtttttggaatatatagaattttttgagttgcacaattcaacgtggaaaagagtttaaaaattctttgagaatagtttttttttttttttttttaracagctgtgttgccaggctggagtgcagtggcatgatctcggctcactgcaacctctgcctcctgggttcaagtggttgttctgcctcagtctcccaagtagctgggactacaggcatgcactaacatgcccagctaatttttgtatttttagtagagatggggtttcagcatgttggccagcatagtctcgatctcttggcctcgtgatctacccgcctcagcctccctaattgctgggattacaggcatgagccaccatgcctggccaagaatagatttttaaaaaatactgtacaccaatttatttgcaaaaatttgagccattctggggctgccaca

SEQ ID NO: 355921 - DNA, 591 bp, Homo sapiens
tgtgtcttctctttcaggaactctcacaaggatgcagttaatgtgttgggcaggaaagggggctcaacacttgcctgaggaaggacccatttgtaaattcatgtggttgttggcagaattaagttccatgtagatgttggactaaagtcctcaattctttgctaattacagtccagagtccacctttagttctttgctggttggacctcccagacatggcaactgacattatcaaagtcagctagaactgagccaggaggaagagaggttggcaagtattgaaaaggtacctatcggatactatgctcgctacctgggtgatgggttccatcctacttcaaacctcagtatcatgcaatatatccatgtaacaaacctgtacatgtgccccctgaatctaaaacaaaaaattgaaatgattaaaaagtaaaatacagataataaagaaacaaaaagtcagctagaragagtctgctagcaagacgtaagtcacaatcttatgtaatttaatcagggaagtggcattccaccacatatgctaaatttggtcagatgccagttgctaggccagctcaccctcaagaaactgag

SEQ ID NO: 355922 - DNA, 560 bp, Homo sapiens
ctgggttcaagctgaaattgaagtaatttttctttatcaatttttgatttattatgttattttctaatagatgtcttaaaagtgaaatgtaattgttctcttcagtgacttctaatttctcaaatttttttcctttttatatatattatccacttactggatgatttttatctggtagattttataacttaagatttctcagtatgtgaaatttagagaaggaattcaagctttctgtaccttgatacatccatctctctcctctggtgaactgagcatccattacctgcattaggagacaatagtgtttgctttttgtttctaaccttgtcatttaatcttccatgttagtaggcaatccacctactctatctatgtgtcaataggtatatccacatagggtaagtaggaggcagctacctgctaacaccaagggacaataaatgtactcttacttcacaggtytttctttccaaggaaattgaattgctctatacactgtcattggtcctcaccaaatcttgaggagagagttggcagatgtctttatgtcacagatg

SEQ ID NO: 355923 - DNA, 560 bp, Homo sapiens
ctgggttcaagctgaaattgaagtaatttttctttatcaatttttgatttattatgttattttctaatagatgtcttaaaagtgaaatgtaattgttctcttcagtgacttctaatttctcaaatttttttcctttttatatatattatccacttactggatgatttttatctggtagattttataacttaagatttctcagtatgtgaaatttagagaaggaattcaagctttctgtaccttgatacatccatctctctcctctggtgaactgagcatccattacctgcattaggagacaatagtgtttgctttttgtttctaaccttgtcatttaatcttccatgttagtaggcaatccacctactctatctatgtgtcaataggtatatccacatagggtaagtaggaggcagctacctgctaacaccaagggacaataaatgtactcttacttcacaggtctytctttccaaggaaattgaattgctctatacactgtcattggtcctcaccaaatcttgaggagagagttggcagatgtctttatgtcacagatg

SEQ ID NO: 355924 - DNA, 561 bp, Homo sapiens
aatgggtgtagtcctcctcccctggagtgactgggtcaggagcaagataagaaggggaaagaaaaagaagagtctggttaacagttactctgaccctgtaggaactctgtcccataatttggaaatcaaattatagccgtgtcttatttttccaacctaaatttttaagactgcagataagtactgcatcccataatacacagtataatgtcctgtagttctctctctctctttatcttctttcttcttcctttccagactggaaaaaaaattttgtttataatagaktgtgtatgtcatgtgttgtgatagattatcaagatgatagaggtagctcctgcctaagagaatttccagcttagtagaagagacaagcaaaataataaacatacatatgatatgtgctattatatatgtatgaatagggaaatgttggaaaagagaggagccatatataacaaagcctgggcaaggcaggagggttataatgattttcagatatttttgcaaaaagttgtaaggttaagacaatttctttaggtcatatatacataagggggg

SEQ ID NO: 355925 - DNA, 573 bp, Homo sapiens
ggctttgtggcttcttgttatacttctcagagagcattcacatttagtagctcttctagttgtaatccactaaaaaacactacaggctcactggtgtagtggtaggctgtggtagaggaaagtcatctatagtctcccaattaagtctcctctcttagtagaaccatgtctgggaggtgtttcacacttcacaagtgtttctgtccctcctacacaaatacagaggttttttttttttcctttctcatcttttactcttttccctggataatgttccagatttactttcttgcatcctggtgactacatttcaatgtttcccctccacctcttaggtatgacagaaaggctagaagaacacaggtagaaaaatatttcagcattgccctatgagaagcctttttctcagagttgccctttgttatagagaagaatctgggaggattatatcaacactttggctactctcccaatacccctgccaaaggcttgagggcatttctatcwgatcttcactgtaaaagtctgatgaggttcatggaaaaaaactccatgacagtgtggaaactcccg

SEQ ID NO: 355926 - DNA, 565 bp, Homo sapiens
tgtcttacaatcaaatctgagcaacactactgcttttttgcaaaggcaaatttattctatcacttttgaagtcatactttttttttatggtaggatgaacaatttttttattatctacattgtcattgacaaacaatatctaactgaatttcttttttgttttcctcttaagatgtgctttcccttctgctatatctgttatctttgttaccatcaccttagcttccagttattgagaacttactatgtgccagatactgcttacaactccagtctttgctcaatcaaatccacccagttgcttttattcattccatgaatatgtaggatagcatgatggttttgcagtcyctgtaggcattattataggtggaaccttttgcaaagcctgcattttaaaagattctgaaatacttttgtgggtgtcctgtttcagatgctagaaagatgctaatggacccttctgactttctttttggtgcttctcttaggcagcattttcaaaagatcactaactcatacatgggctttacctctctagatgaagttgcacgatgtcaaggta

SEQ ID NO: 355927 - DNA, 514 bp, Homo sapiens
ttctataatctcttactctccttgaatacacatatagatagccataagttttactaattctgtttaaaatataaacgttatacagcatctcagctctggaattctccaattagtgaggccccctcatcactaattaaatctgagctatggagtaagctggtcttttccttctccttggttcttcaatccattcaaacactaagtctatagattttccactagcacaatctccagtctctgcaacctctaagtcatcttgtgatctgatggcttttaccatatacttctctaaaaacctacaacacctcttttctgcctgtcacattaaacttttcagttgacctctcagcctgcacctccgctggccctctattaccctaagcagcctagcttccactgctcaccaaaacaaaattcctactctgccacaccgmtatgatgatgggtcccctgtactaccacacacaccaagctcattctcctttggtgtctttcttcttggtgcttcctgcat

SEQ ID NO: 355928 - DNA, 503 bp, Homo sapiens
agaaactaagtgtgccacttatcactttattgcctctcagtttcaactgtagtcatcattgccctgttagtgatagctgaactggaccctgtaaacatctcttctttgccaactggcatggcgtcacactgtgtcagtacagggcactgaagggccagtgcagcgcatgrgggtggctttcttcctggttctggtatgccttttttacttcttgctccagtagtgcctggccagcaggcaggcaggcaggcaggcaggggcacttgtctctagcaagtgtaagtagcacctcttccctggggcagcttcccaggaggttctagcacaccccaactggcttcccagtgaatttaacagcacccctccaggaagcttcccagcaagttatgtggatgccccaccagcaactcagccacaattctccctgtgggtagttccaggtgagctccactaaagccctagccagtttcccagcaagttcaataacactcctggggcagatt

SEQ ID NO: 355929 - DNA, 328 bp, Homo sapiens
ccagcagcagacatggtaaccacaatatttattttagtaaatgtagagaaagcgaaaaacatcacttttgcctctaatatttcaaagacttggacttgctttttttttttttwataatatatatgttactaatgctgtacgtgaaaaatcagatgcatttgctggcatgcggaccagagctgacagcctcatttaccaactgaacaaacaccccacagaagattaaacatggttcatgttctccccaaacaaccacatcgccagagccagagccctgacctaaaaaccactgttagtaaaaagccagtccagtcactacacatgtcaa

SEQ ID NO: 355930 - DNA, 526 bp, Homo sapiens
aaacatattgtttcgattggtgttgacatttggattgcgagaaggtttgaaaatgtaactgtagttgggattttccagcccatccaagtttttccatggaggagctcagcagacttaagccggtgactgggtgaatgtcctcttactgccaacgtgggcactggaaaaggctgagggcttcacggcttggagactgcaccagcggaggccgactgtgctctttggtggtgtggggaggggttgagcatttcaggatgccgagccctctgggcaatgtgggggcaaccaagtgtccagcatgayctgaactacttagaacgcctactacatgcctggcaccttatccgcactatctcacatagtccttgcaccagggctagagagtatcgtgtgactattcccacttcacagattgggacactgaggaactgagggtttcaatgacatgccaaagccacccaggagaaaagcaaggacttaaacttagccctctctggagctccatggcttgccgtacaccacctac

SEQ ID NO: 355931 - DNA, 526 bp, Homo sapiens
aaacatattgtttcgattggtgttgacatttggattgcgagaaggtttgaaaatgtaactgtagttgggattttccagcccatccaagtttttccatggaggagctcagcagacttaagccggtgactgggtgaatgtcctcttactgccaacgtgggcactggaaaaggctgagggcttcacggcttggagactgcaccagcggaggccgactgtgctctttggtggtgtggggaggggttgagcatttcaggatgccgagccctctgggcaatgtgggggcaaccaagtgtccagcatgacctgaactacttagaacgcctactacatgcctggcaccttatccgcactatctcacatagtccttgcaccrgggctagagagtatcgtgtgactattcccacttcacagattgggacactgaggaactgagggtttcaatgacatgccaaagccacccaggagaaaagcaaggacttaaacttagccctctctggagctccatggcttgccgtacaccacctac

SEQ ID NO: 355932 - DNA, 526 bp, Homo sapiens
aactaagtggttggctatcttaggaacattcggggctaaacataaatttagaggtcaccagattattgatgatatttaaagtgattgaaactagatgagactacttaaagaaagagtttgaagaagagaatagagcctaggaccgaattctcagaagtctggtgatggttgaggaactagcaacagagactgagaagaagcaccaagactagccaacaaattgttatactcattcatggtatggatcttttcaaggttagactaaattatacagaaacacatgggagaaggtactggaagttcctcatccccagtatacccaattctgcttaatccaacaaagctcttatgtarggacctttccagatttggaaagcaagtatttgttttcattgttttacagattacagaatcagacagcccttctatcctttaggcttccagtaggtcataagaatggtgtatgctcaagagaaatagatgcttttttttaataagaaatgggactttatcataagttttcata

SEQ ID NO: 355933 - DNA, 526 bp, Homo sapiens
aactaagtggttggctatcttaggaacattcggggctaaacataaatttagaggtcaccagattattgatgatatttaaagtgattgaaactagatgagactacttaaagaaagagtttgaagaagagaatagagcctaggaccgaattctcagaagtctggtgatggttgaggaactagcaacagagactgagaagaagcaccaagactagccaacaaattgttatactcattcatggtatggatcttttcaaggttagactaaattatacagaaacacatgggagaaggtactggaagttcctcatccccagtatacccaattctgcttaatccaacaaagctcttatgtaaggacctttccagatttggaaagcaagtatttgttttcattgttttacagattacagaatcagacascccttctatcctttaggcttccagtaggtcataagaatggtgtatgctcaagagaaatagatgcttttttttaataagaaatgggactttatcataagttttcata

SEQ ID NO: 355934 - DNA, 626 bp, Homo sapiens
tagcagtgtgagaaaggactaatacagataattgctaccaaaaaagtgaggcactgttataaagatatctgaaattgtagaagcaactttggaaatgggtattgggcagagattgaaacagtttggagggatcagaggaagacaggaagatgagggaaagtttagaacttcctaaagacttgttgaatgattgtgaccaaaatgctaatagtgatatggacagtgaactccaggctgaggtagtctcacatggagatgaggaacttactggaaattgcagtaaaggccactcttgctatgctttagcagagattggtggcattgtgctcctgctctagagatctatggaaatttgaacttaatagagatgatttaggttatctggcagaagaattttctaagcatcaaagcattcaagacatagcccagctgcttctaaaagcctatgctcatttgcataaacaaagraatgacctgaaactagaacttatatttacaagagaagcagagaaaaaaagtttggaaaatttgcagcctgaccatgtggtagaagagaaaaatctattttctgggaggaattcaaggctgaagaaatttgcataagtaaagaaaagctgaattttaat

SEQ ID NO: 355935 - DNA, 546 bp, Homo sapiens
ggaagcccacccatttcatcagtgtggcctggatgtgagacatggagtcaaaagagatcactttggagctttaaggtttaatgactgtcctgatgggtttcagacttgcatggggtctgtatctactttgttttggccaatttctcccttttggattgggagaatttccccaatttctgtacttccattgtgtctaggaagtaactaaattgcttttgattctacaggctcatttttgaaatgtgagacggacatgagattccagaagtggaatgatatggtttggttctgtgtccccacccaaatctcattttgagttgtartttccaatgttgagggaagaaactggtgggaggtgattggatcatgggggtgtatttctcccttgccgttctcatgatagtgagtgagttctcacaatatctggttgtttaaaagtgtgtggcatttccccctttgctctctctcctgctccacaatggtaaggcatgctttttttctcctttcaccatgttgtaagtctcctgaggcttctcagctatgctt

SEQ ID NO: 355936 - DNA, 546 bp, Homo sapiens
ggaagcccacccatttcatcagtgtggcctggatgtgagacatggagtcaaaagagatcactttggagctttaaggtttaatgactgtcctgatgggtttcagacttgcatggggtctgtatctactttgttttggccaatttctcccttttggattgggagaatttccccaatttctgtacttccattgtgtctaggaagtaactaaattgcttttgattctacaggctcatttttgaaatgtgagacggacatgagattccagaagtggaatgatatggtttggttctgtgtccccacccaaatctcattttgagttgtagtttccaatgttgagggaagaaactggtgggaggtgattggatcatgggggtgtatttctcccttgccgttctcatgatagtgagtgagttctcacaatatctggttgtttaaaagtgtgtggcatttccccctttgctctctctcctgctccacmatggtaaggcatgctttttttctcctttcaccatgttgtaagtctcctgaggcttctcagctatgctt

SEQ ID NO: 355937 - DNA, 501 bp, Homo sapiens
cttaaacagatacctgtacacscaggttcatagcagcaccattcaaaatagccaaaaagtaaaagcaacctaagtgtccatcaatggataagtggataatcaaaatgtaataaatacatacaatgaaatattatgcagccttaagtaggaaataaattttgacatatgctacatcatggattaatcttgaagacattatgctacgtgatataagccagtcagaaaagggcaaatactgtatgaagttaattttaaaacagtctaaaaaatatgtcagaaagcattcttgccgatatccttgttcctttcattagaattttatctttctcaaaacatgaaatttactcttgactcatacttttttttccaatcccctctattgtagtgaaatagaataaccaaaagcagttattgtgttgtcctgggtttggcatcaaaaataactccagatgtgtatctgaaatgtcagactatcgggattgtgtaaaatctaattcttgc

SEQ ID NO: 355938 - DNA, 512 bp, Homo sapiens
gagaatacctcactaagaatgtgacatttgagtaaacacctgaagaagtgagggagacaggcatgtggttatctgtccttgaggctggcatacctgaagtgtttgggggaagagcaaggtgatgagggttgctggggcagagttaagaagattgtggtaggagatgaagtgagaaggcaattgaaggtcagattgtggaaggccttaaacacaatgataaagatttattcagcctargagtgacctgacatctgttaaaagaacacttttgcttctttgtgaaaaataatctgaagggaagcaaagactgaagtggagacagcagtggcaaggttattgcagtcatctaagtgaatgaggacagcggtatgggagaaggtaggaggaggggaggcactgagaagtatttctcatatattttgaaaacagaattgatgaatcaaatgtgagaagtgaaatgcatgttacagtttcttctgggtgatatactgttataattggaactgcggaag

SEQ ID NO: 355939 - DNA, 432 bp, Homo sapiens
gttttatgtttcaatagtttcgttttaattttaaaaattaagatgtaatttaaacactgtaaagttctccttttttagtgtatacttcctcaaagtttggcaaatatatacatttctgtaaccaccaccaccacaatgaagatatttagaaaagtgccgtcacccccaattctcctatttctttttggtcaaactatgcacgtcctgctccctccaacccccacagtccctggcaacaactgtataatttctgcccttatagcgtcacctttttcagactgtcatatagtatggaattatatagtatgttgcctcttgcatctggactttttcacttagyaaaatgcatagatatttttccatagtgccatgtataccagtggttctttcttttttgttaactagtacttaattatttagataccacaggtt

SEQ ID NO: 355940 - DNA, 646 bp, Homo sapiens
ctgttttttaagtatcaaactatttttggtgagaattccagtgagggtgggggtgaaaacaaagaacaaaaattattggctgtactttgcagtacgcactgatttcaggtcatttttccttccaaaacctttcttagaaacattcagatttttatttcattactgtatttttatcamtttccttattataaactcatgatatttagggaatagacacagacggaatgttataaaaatgttataagcacatgccatcatagttgtgtagtggcaacagctgatttataaaatttaaagattttaatttcaaaaatatctattaaggagttttatatttggaggacaatttttactttttaatggagcagaagccattttcatttatagtattaaatcccccacagaaacaaataagcaaggcagggcatctccagcacccatcctatcatccttatcctaactcaaagtcatttatgttctattccaaaacataatttatataaaaacatcccgaggaatacttacttttgaaaatcgtatttttccaataggttctcttcctaccaattgcttcaagtgtatatagtatggatatgaaaacagttagctctttgaaaaacataaatcccttatgcaatgtcatatc

SEQ ID NO: 355941 - DNA, 613 bp, Homo sapiens
ataatagtgtttcacctattatatccctaaaatatatttacaaagacagaagcagcaaaaaggaaagagtatatataaytttgttagaggaagaaaaatcattaagcaaagtgggataaatatagctgcagtgtatgctaggaaagacccctaataaaatcttcagatttatctccaatacaggaaatgagcttctgaaaaagtatctaaaatataaaacttacatacctattttcccactaacatcccctatattattaatgaagtatcctttgttacaggaaggagaaaaaaaaatttatttaacaaatatgactattttatccaggtataaagtgccctaaataccaatattgcaaaaacatccatttatcatttttcacgtctatgccttatgtgtgaaaacattacttagaagagtctcaagagatctgtcatcataaaaactaccttctactaagtttttgacttctttctgagtgaaaaggaatgaaattaatatttactatctactatgtgctacagacattattgcattcaaaccaaaaagatgagtttgaaacagcccctccctctgacaccatcaaaattcttttaaaaggaggacataact

SEQ ID NO: 355942 - DNA, 590 bp, Homo sapiens
cggagaacactctcattatttgtcatacaaataaatgaatgtcagaagaaatttcgtgacaactatatctaaaaaactatagaatatactataccatgtcagaagggaagaaagtggcaatgtttcactagattaagatgaagttcctttcactcttccttaattattatgaactagtaattaacaaattacgatttagccatataatttcatgtatcacgtattctatctactatcattaggcacaaaaaaaattaaagaaagctaagaagyaaactgaagaaaagataagtggatttaaaaagcatcaagtaaatcacttctctgcaatttccccagctttgtgaatctgtgaataactgagattttttcattatcaactttctataactattaaaattgtttcacacatgaatacggatgctccttaacctatgataggattacaccctgataaatccattatatgttgaaaatatcttaagtcaaaaatgcatctgataactctcaacctaccaaacatcatcgcttagcctaccctaccttaagcatgctcagaatacttacattagtctacacttgagcaaaag

SEQ ID NO: 355943 - DNA, 604 bp, Homo sapiens
aaggaaaatgctgaccactaaagagccaccattgggtcactaagagccaaaatggcaaaacagtctaacttctcaacataatttttagcctaatagaataaagaaaatatagtagatttgatatgtcaggacttcagccaggcctcctatgatagatrccgttttggacaaggtggagaaagatgaattggatgtacaattagataaatttgtcactactaaatttcagtgtaatagcatgctcattaacggatctagtcatttgagaaacactgtgccaggcactgtaccagatgttgaagacacaaacatgaaagtaacatgattcctgctggcatctgtataagcttaagctggcctggatgatggtgggtcatgtcatgaagtataatgctggacaggcagcagggagatcctgtgcctgagagcctcaagcatcaggtgggtggttgaagtctacatcttaaagacccaggtccaaccctgaaattttatgagtcttataagccgaaaaagacatttatctagatatcataagaagctaaacagttttagtaacataaatgatgccagcaaatagttgtagcagttgggaggatggtaa

SEQ ID NO: 355944 - DNA, 604 bp, Homo sapiens
aaggaaaatgctgaccactaaagagccaccattgggtcactaagagccaaaatggcaaaacagtctaacttctcaacataatttttagcctaatagaataaagaaaatatagtagatttgatatgtcaggacttcagccaggcctcctatgatagataccgttttggacaaggtggagaaagatgaattggatgtacaattagataaatttgtcactactaaatttcagtgtaatagcatgctcattaacggatctagtcatttgagaaacactgtgccaggcactgtaccagatgttgaagacacaaacatgaaagtaacatgattcctgctggcatctgtataagcttaagctggcctggatgatggtgggtcatgtcatgaagtataatgctggacaggcagcagggrgatcctgtgcctgagagcctcaagcatcaggtgggtggttgaagtctacatcttaaagacccaggtccaaccctgaaattttatgagtcttataagccgaaaaagacatttatctagatatcataagaagctaaacagttttagtaacataaatgatgccagcaaatagttgtagcagttgggaggatggtaa

SEQ ID NO: 355945 - DNA, 632 bp, Homo sapiens
aagtcccttaaaactctccataaacatcctttttaatggctacaaaatattccgttgaatggctataccaaagtgtactcaattttgttctaatatggaacatttagaagtcccagaaagggtaaagcgggacaatataggagggtgtagtcaatctacctgatgaacagtggtggcaggtgagggaatcaaggagggcttcatagaagaggtgacccttgcgttggggctcaacagataagtaggagttcacaagttgggtgggatttgggatacgtcggaggaacagggttatttaggtctataacacagtgtgacatgtcagcagggggatatattggagaatagtgagcagaggttggacacaggaagcagacaggccagaggagaacacaggaccctgtttagggagacatgaaggagttaggcttcagtttgcatgcaataggaagctgaagaatgattcaatttgtacatcagtcaaaatgtctctagcagcagtgtggaggatggatyggtggagacaaggctaggggccaggagacttattaggaggccaccataatagtccaggaaaaagatggtgcaggcctgaaatcaggcagtacagtgaggataaggaagcacagtca

SEQ ID NO: 355946 - DNA, 610 bp, Homo sapiens
gatgcataacagattacccttaagacttagtggctgagaataacaaacattatctscagattccagagtggcttagctgggtgtttctggctcaaggactttcaagagtttgcagttaagatgttgatcagggcttcattatctgaaggcttagctaaggctgaaggatctgctttaaagcttacacatgtggatgttagcgggtcttattttttagtcacatgggcctctccacagggctgctcacaatatggcagctagctttccccagagtcagtgacagcaaagagagagagagagcatcagtgtgtgcgcaaccaagatggaagccctaaactaatcttggaagtgacataccctcctttctcacagcattacaccaaccctagcatgacgtaggaggggattacacaagggtgtgaataccaagaggcagggatcagtgggacatcttagagactgattaccatactcaggcaacgtctaggggtgagaggagcagccacacttctatgtttgcatcttaatttacatgaatggcaccccctgatactttgcagtgtacaaaatacacgatcatacatagtggtccaggtagcagttcctgaac

SEQ ID NO: 355947 - DNA, 458 bp, Homo sapiens
gcaatgcctgttttgccactctgactctccctactagatgccgggagttggatggcaacatcagtttctatcgtcttcacaaacaagtatacacacaggtcctgctctgcagggtagatccaagtggcacagctggtaaagaacaagctctttatggactgaattgtgccagcccctcccaaaaaagttgaagtcctaatccccttcccaaatctgyaagttaatcagagtcgaccctaaaccagtatgactgatatccttgtaagaggaggaaaatttgggcatacacatataggggcgaacaccatgtaaagacacagacacatgagaaaaaatgctgtgtaaatacaaaggcagagattgcagtgatgcagatacaagccaaggaatggccaacggctgctggcaaacaccagaccagttaggtaagattcttccctaaaggtttctgaaggaga

SEQ ID NO: 355948 - DNA, 521 bp, Homo sapiens
tattttgttctagtagaccttgttttcctttggcttagtcagtctacagggttggaaagaaccttctcaggacccttggtgagagatgttggagggatggtgagtggttattccaaggtactagagtattcagtttccctttcatgggggtgtattgctgatctctgttgaaggagctgtttgaaagtcagagagccctgaactttaaactttgagacctgtatactagaccatgstagggtggggaagagggttcagtttgttttgccatcacaacacaattaccggggactcagctggctgacccttctgtttgccagaccacaacacaaatgacctgcttagaggtgacctggaaaatggggggtggggttaggatggatgagaaaggtggggaatagagaaaatatgacatttaggtgaaagaaggaagtcgatgtaggtgggaaggagatgttcaggtacagattgtagttccacgcagatgaggaagatctaattcagtcctcagtgtctgattg

SEQ ID NO: 355949 - DNA, 578 bp, Homo sapiens
tacaatggcatttttttatattacagaaacattcccatgtattttaagtagttatatctaaaacaaacatgaaatctttaaaaattcttcctcactaacgtaagtgttacctctgctaytgactgaatatttgtctccctaaaattcatatattgcaactcaagtccccagtgttacagaatttggaggtgaggccatttggaagtaactgaggttatattaggtcatgagggtgggtccctgacgatgggattagtgctattataaaagaagagacacaaggtctttctttctccagcaagtgaggatacaatgagaagactgtctgcaaactaggaacagtgctctcaccagacaccaggtctgccagcactttgatcttggacttcccaatctcctgagttgtgagaaataaatgctgtttaagccacccagacttattctgttacagcagcccaaactaagatattctctaagaaaattctgaatgtgaaacacgagagaaggcaacattcatggaaaaaagcagaatcagtaaaaacagaagtgagtaagaaacatagaggctagtctccagt

SEQ ID NO: 355950 - DNA, 447 bp, Homo sapiens
tctacacaaatacggattgagatatacccttaaaggcatctcattaggtccctaaagtatgtagacattctgaagaatgtagacagttctaaatgaacatttatttagaaacatagcccaaaaagcaaactgacaacaaaaatgcaaaaatcaaattttacactgtcttaaaatatactaaaaaattttatttgtttgcaataaagcttagttgattaattktaaatcaacgagcataataatcaccgtaaagaaatttggatacatgaaagaatacagtttcaggatatcttaaaagataaaaggggtatgggaattaaaatattacatgttggagagtaatatgacacttcctatctctaaagtgcttagttaataaatctgaaataataactagatataaagctgggcaaactcaataataaaatgttctgttgctattataaa

SEQ ID NO: 355951 - DNA, 620 bp, Homo sapiens
tgagatcccgaatcatttgattctatcagtcatgatgcttggatttaacttaatatcagctttccatcctgtatgggaatgctctaatacaaaacagaagttaaaatgacccatgaatggtgtggcagaaatttccagctttagaaattttaattagtgctgtcagtggttcagtgaagtcgtagtgttccttccacaggttgcatgcactggtagtctcatcctttagatgcrtcctcaaaaccctggcagaaattgcaactttattgtttgttggatgtgattctttatacagtattagtatttcaaactaatataccaaagggaaatgttattaaaatgtaacgttttaatgaaataaattgttaagagtgaagatatttttaacataatgttctttgtctttattttaaagaattcagaaggaacttgcagaaatcacattggaccctcctcccaactgtaggtaagtactcatggttttttatttacttgtatcttttgcagaaggtgcatttgaactgttggttttatatgcagctgttgttgtagtctgattaattagtaaaaacatcattgttgtttgaacttaagtgactgtggaagacaatggtttttgt

SEQ ID NO: 355952 - DNA, 608 bp, Homo sapiens
gctccaaacttttgtcaattgttcctatatgaaacttgccttggtttattcaatctgaggataccttctttttgttgctgacaacctgactgatatccctccaatacatgcataatttttaatgctatagatatagttatatctatatcattatattagatatatacatatgtgtgtatatatatacatatatatatacacacayatatatatatatgttctagttgccatccacatgtgagatactagtaaaactcaatttttcttagtttttggaggggatgaagtttattttcgtccttttttaaaatatattttgggttcacaggtacacatgcaggtttattatataggtaaattgcatgtcatggagatttggtgtgcagataatttcatcacccagataataaacattgtacctgacagagagttttttgattctttccctcatcccgcctgccaccctcaagcaagccccagtttctgttgttcccttctttgtgtccatgtgaactcaatatttagctcccacttaagcatcttccttctatagcctagttgatcatttcgtattctcatactttggaaaccactgatttagaaatgaa

SEQ ID NO: 355953 - DNA, 629 bp, Homo sapiens
agatatagttatatctatatcattatattagatatatacatatgtgtgtatatatatacatatatatatacacacacatatatatatatgttctagttgccatccacatgtgagatactagtaaaactcaatttttcttagtttttggaggggatgaagtttattttcgtccttttttaaaatatattttgggttcacaggtacacatgcaggtttattatataggtaaattgcatgtcatggagatttggtgtgcagataatttcatcacccagataataaacaytgtacctgacagagagttttttgattctttccctcatcccgcctgccaccctcaagcaagccccagtttctgttgttcccttctttgtgtccatgtgaactcaatatttagctcccacttaagcatcttccttctatagcctagttgatcatttcgtattctcatactttggaaaccactgatttagaaatgaattatccaagtcttcctatcaggttttatagaataaggctctgttcagtgtggttttgaaggcacaagagcaggtactggtttctgcaggatttatgtacttacagaaaaaactacacatgtggagtgtgcatactactattgacttacc

SEQ ID NO: 355954 - DNA, 629 bp, Homo sapiens
agatatagttatatctatatcattatattagatatatacatatgtgtgtatatatatacatatatatatacacacacatatatatatatgttctagttgccatccacatgtgagatactagtaaaactcaatttttcttagtttttggaggggatgaagtttattttcgtccttttttaaaatatattttgggttcacaggtacacatgcaggtttattatataggtaaattgcatgtcatggagatttggtgtgcagataatttcatcacccagataataaacattgtacctgacagagagttttttgattctttccctcatcccgcctgccaccctcaagcaagccccagtttctgttgttcccttckttgtgtccatgtgaactcaatatttagctcccacttaagcatcttccttctatagcctagttgatcatttcgtattctcatactttggaaaccactgatttagaaatgaattatccaagtcttcctatcaggttttatagaataaggctctgttcagtgtggttttgaaggcacaagagcaggtactggtttctgcaggatttatgtacttacagaaaaaactacacatgtggagtgtgcatactactattgacttacc

SEQ ID NO: 355955 - DNA, 578 bp, Homo sapiens
tttgtatgatttacagggactctgaactttgactctctgctgtatgatatatggctggcttgaagctctggggtcaagggttacaagtaatgaatttatggctagattctgcctcctctcactttaaaaagagatggtatatttgaaacattaagttataaataattttcttccagaaatgatttaagagaagatacactagattgatattttccaaacccaatcaaactatttttatatatttgccatggcctcaggagtgattgaagggaggacttasggtgaagaatagaccaaagctacaaccactggtactctgttttggatccggggaaagaaacgacagaaggaggtaaaatttttaactttccagggcctaggtacatggttaggaaatattgtcaatctttaaaagtattagaagacagtgataggcagaaatatacagaatacgactgtaagagaaaatatttaaaagaaactgctgtcttggtgattgtaatcatcatgacctatgagaagtgaaactatgctacttcacctaaaatcattctatggtagacataaatatccatgag

SEQ ID NO: 355956 - DNA, 578 bp, Homo sapiens
tttgtatgatttacagggactctgaactttgactctctgctgtatgatatatggctggcttgaagctctggggtcaagggttacaagtaatgaatttatggctagattctgcctcctctcactttaaaaagagatggtatatttgaaacattaagttataaataattttcttccagaaatgatttaagagaagatacactagattgatattttccaaacccaatcaaactatttttatatatttgccatggcctcaggagtgattgaagggaggacttagggtgaagaatagaccaaagctacaaccactggtactctgttttggatccggggaaagaaacgacagaaggaggtaaaatttttaactttccagggcctaggtacatggttaggaaatattgtcaatctttaaaagtattagaagacagtgataggcagaaatatacagaatacgactgtaagagaaaatatttaaaagaaactgctgtcttggtgattgtaatcatcatgacctatgaraagtgaaactatgctacttcacctaaaatcattctatggtagacataaatatccatgag

SEQ ID NO: 355957 - DNA, 601 bp, Homo sapiens
ttattctgtggaccatgatgctcagatgcccacctctttcctttcttcctaaggtcttgatcagctcactcatttcttccttgaaaaaaaacaaaacaaaacagatgattatcagtggttcccattggtccttggttagaatgccttaaccactcacttgcccctataaatataataatgacaattggattgtttttactatgtgccagctgctgtgctaggcaccaggcatatattatttttatctaatccttactctaatctcatgagacagtagcattcactttacagatgaatttgagtctcagagggtaccccagctaataggaggaaagccaggatttgaactcaattctgttgtagagtctgtgctcttcctaacaatttaccctgcctctgacagccatccttggcaaaggtgtcacccgcctcaacacagagttccataaaactgcatgtcactttgttaagcctcttgaaagtcycctcattagaaatgtattaaatatataattggcattctttactaaaatgaattcacctcaaagcaggttaatgggacatagtataaattggttaaattaggttgctttctttctaa

SEQ ID NO: 355958 - DNA, 622 bp, Homo sapiens
gttaaggcataatactgtcattttgagcaacataaacaaaatctgagataattttaactacaaaatgtgtactgctcttgaactacaaaaaaaaaawaaaggaagttttttaggcagaaggaaaataattccagataaaaacattttttaaaaaacagaaaagtgagaaagaagcaatatagtctatatggtgaacaacacagaatttgaaatcctgatgttgatactttgatacttacaaaacattagtttccttatctgtaaaatgtagatgtttatgccttcatcatagcaatgttgcatagattcaatgaaataaagatcatttagcacaatgattggaacatactaagcactcaatgaatcatagctattactatgttattgatagctattaaatgtccaaatatattactgttaataactcttggtgaataatttgcacagaatgttatatatgtaaaaaagtgatgggctgatcaccattaagctttgtaatttttcttggaaaaaggtgggtagttaaatatgttagtattattggtgctttgcagggtgggaaactgagaagagatgagataccttgagacaggtcacagagaagagttcatagatgagaagg

SEQ ID NO: 355959 - DNA, 622 bp, Homo sapiens
gttaaggcataatactgtcattttgagcaacataaacaaaatctgagataattttaactacaaaatgtgtactgctcttgaactacaaaaaaaaaataaaggaagttttttaggcagaaggaaaataattccagataaaaacattttttaaaaaacagaaaagtgagaaagaagcaatatagtctatatggtgaacaacacagaatttgaaatcctgatgttgatactttgatacttacaaaacattagtttccttatctgtaaratgtagatgtttatgccttcatcatagcaatgttgcatagattcaatgaaataaagatcatttagcacaatgattggaacatactaagcactcaatgaatcatagctattactatgttattgatagctattaaatgtccaaatatattactgttaataactcttggtgaataatttgcacagaatgttatatatgtaaaaaagtgatgggctgatcaccattaagctttgtaatttttcttggaaaaaggtgggtagttaaatatgttagtattattggtgctttgcagggtgggaaactgagaagagatgagataccttgagacaggtcacagagaagagttcatagatgagaagg

SEQ ID NO: 355960 - DNA, 445 bp, Homo sapiens
gttctaggtattttgttcaccatttactaatgcagagaatcaagcaaaccatgcagatatgccaactgaaacatgccatctttccctgcattgctgtataatacatatgcctggattagtgggtttgttttttaattcatatgttttttattgtgcaatagtttaaacagaaaagttgcaagaactgtgcaaaagaacctccaaattccttcattcagattatcgtattgttaacctcattccacaagctctctcycgcttttttcctctccccctcacccctttactctctacatatgtatgtgtacagacctatatatttatatatatatatttatttattgatattaatccactttgtcagtgaacatttcaagcattttccctttcccttggctattacatgatactacaatgaccgtcattctacttgtcttttttcaaa

SEQ ID NO: 355961 - DNA, 517 bp, Homo sapiens
acttgtagttttcttttttatgccagtttcccctttaaaatgtccatgaggaaacttcaaaacttaatttgattaaatggcaacccttgagtacacatctttttaacattctgtgtgacaaaatggaagggaagtgtgaaacacttctgctgcataggaagatggttctctcaagaaaaaacacttgtgtgatggtttgagttgagagctgaaccaggtgcctgtttcatcaacaccatttttacttgaaagaatgactaattcagactttgctatttgaacaaactgmgtttgtgactttgaggaaaaaagactgacagtatttgttatccatacaaaatttctaagtttctcttgaatacgcagatatttagaatatctgcataaccctttgaaccaattcttttcaaatgactaattattgatgttacaaaattatgcatgggttaaagaacccctcaaaatacaagataggccaatttattttaatgcagcagagtattaaaatgtttactga

SEQ ID NO: 355962 - DNA, 596 bp, Homo sapiens
ctaccacaacctacaaacaactaacatttgggaaaaccactatgctaaggctatctataactaagacatttacacagagacttggccccttgaaatcacacagaagcaaagccaaatgaacctacccaacatgagcaatartcacactctcaaggaggaaagaagaaacccaccgaattaaaataaattttaaaatattaaatttatttttaaatttaagaatttaaatttaaatttaagaagaaaccagcacaagaatttcagcaccatgatgaaacagatggttgagacactcctaaaagaccacatgagctctctagcaatagctgccaaccaaaatgaaaactttgaggtgagagataaagaattaaagttatgaattttaaggaagttcagtgagatccaaaagaaagtggaaaaccaaacaaagaaaccagaaaaaaaactcaggagacgacagagaggaaagatatatattttaaaaaccaaacagaacttctggaaatgaaaaattcactaagggaattttaaaacacagttaaaagctttaataagagactagacctaagcagaagaaaggatttcagatcttgaag

SEQ ID NO: 355963 - DNA, 621 bp, Homo sapiens
aaggtctctaagtaaacaaataaacaaatacttagaaattgtgagtaagcatcaaaaagaaaacaataaaaaggaggtgagatagagaataaaatgaattatatactttatagatagggtcatggggcctttctaagaaggtaacattgaagctgagacctaaaggatgggaaggaacttgccatgtgatgagacgtgaagtggctaagctggtttcctaggcaaaggccttgaggccaaggagcctgaggcaaaaggaactggctgaagctcaatgrgagggagtgcaagagcccaggaggtagaggttgcagtgagccaagatcgtgccactaaactccagcctggttgacagagcaggactctgtctcaaaaaaaaaaagaaaaaacgaaaaaagtgagagagagagataagggtggctgtatcatcagacttcccagcacacaggacattgcaaggccatggggaggagttctgagccatggagagggtgggcgggaaaggcataggactggaagtaggaaggtaggtgagaagcttactaactgccctgcacaatctgtcctgtacaaattttaatgctgatttttccatgactgatggcagtttattctttctag

SEQ ID NO: 355964 - DNA, 472 bp, Homo sapiens
tggctgaaggaggacctgatgcttattaatacctctcctcagctaaaggtaaaaggwccaataaagctgagtgtattttggttccatgctataaaattaatctttacacatcacaataacctggacaagataactaatatcatatattggtactatgaagtttcaggccagctcagcattcagggactgcagtgttgtgtggataaagacaggaatttaacttaaatcaagctgctgtaaattcagatttggaactcaaatccacaaatctcttatgattcaccataataaacacacatttctagtgattacagaagttctagggactagggctccatgaataattaaaacctcatattgagatcaagacttcttgagtttttttcaaaattcttattttcttttttcatcacctcagaatgtgtactttcaaagaaaaaaagagcattgtattcactttataagtctttgc

SEQ ID NO: 355965 - DNA, 472 bp, Homo sapiens
tggctgaaggaggacctgatgcttattaatacctctcctcagctaaaggtaaaaggtccaataaagctgagtgtattttggttccatgctataaaattaatctttacacatcacaataacctggacaagataactaatatcatatattggtactatgaagtttcaggccagctcagcattcagggactgcagtgttgtgtggataaagacaggaatttaacttaaatcaagctgctgtaaattcagatttggaamtcaaatccacaaatctcttatgattcaccataataaacacacatttctagtgattacagaagttctagggactagggctccatgaataattaaaacctcatattgagatcaagacttcttgagtttttttcaaaattcttattttcttttttcatcacctcagaatgtgtactttcaaagaaaaaaagagcattgtattcactttataagtctttgc

SEQ ID NO: 355966 - DNA, 406 bp, Homo sapiens
cacctgaggagtatacattgcacctaatgtgyagtttttttttaaccctatccccacctctcaccctccctcttccgagtttctgaagtccattatatcactctgtatgcctttgcataccacagctaatctcctacttataagtgagaacatacagtttttggttttctattcctgtgttccttcacttaaaataatgaccgctagctccatctaaagttgctgccaaagacactatttcattccttttaatggctgagtagtactccatggtgcatatataccacattttctttatccactcattagtagatgagtacttacgttggttccacatctttgcaaatatgaattgtgctgctataaacatatgtgtgcaagtgtctttttcatataatgacttatt

SEQ ID NO: 355967 - DNA, 548 bp, Homo sapiens
aacctgaaagggattgttaatgtgtcaattaaaagaatcctgattacattctatgggcagtgactaagaattcctaaaagcatgattttattattattattttttaatcagtgacaggaggcaacattgttccatacrtggggacaacggaacatataagtggaaggttttaatcaacatgttgacctctttcccctttacaatgtaattttttccctaacggtaaaagacaatatgcttgaaaaatattatatcacttatcttccctttatattaaaaaagtcacagatggtgcttgaattaagaaagtgacatgtcatacatttacagcaactcatatgtgttggacaatcctcaatgcacacgccttcaccagttgtcacgccacgtactaagacagtgtatggtcctggagatatggttgcaggggcaataacagagaaatcactgggtcctgatgcattggttcgagtacgagcttgcacgactgattgcagagtgctcgcccatggatatatggtttaatagaaaagcatgtgttttgtatt

SEQ ID NO: 355968 - DNA, 548 bp, Homo sapiens
aacctgaaagggattgttaatgtgtcaattaaaagaatcctgattacattctatgggcagtgactaagaattcctaaaagcatgattttattattattattttttaatcagtgacaggaggcaacattgttccatacgtggggacaamggaacatataagtggaaggttttaatcaacatgttgacctctttcccctttacaatgtaattttttccctaacggtaaaagacaatatgcttgaaaaatattatatcacttatcttccctttatattaaaaaagtcacagatggtgcttgaattaagaaagtgacatgtcatacatttacagcaactcatatgtgttggacaatcctcaatgcacacgccttcaccagttgtcacgccacgtactaagacagtgtatggtcctggagatatggttgcaggggcaataacagagaaatcactgggtcctgatgcattggttcgagtacgagcttgcacgactgattgcagagtgctcgcccatggatatatggtttaatagaaaagcatgtgttttgtatt

SEQ ID NO: 355969 - DNA, 627 bp, Homo sapiens
gtccagttcttagtcttccttgctagactaggacaataagcattatgtcttattcatctttattttccaagtrtctatcaaattccctggcatctagtgggttgtcagtattgtttatggaacacatgaataagtgaaaaaatggatgcagaggagaagtcgatcaaagaactgggagtagccagcaaagctgtactacaacattggctttgaggtagattttggaagataaggaagattttgataaaagaaaaagtgggagttaaggcagtgcataggatagacagaggaacagtataaacagaagcttggtgaggtggaagtggtttatcagaccagtgtactgttctatgacaaaggcctgtggttgtgttgaccaaagctaaggtcaaggacagaactaataatagttgtcccaataattgaggcaaatcccctaaacaacttggtatggagaaaaacaacttgatgagtgcttgaattgttttgaataataaacacatatcatttattgagtacttattccatgtccattatttcacagatattagttcatcctcacagcattatatatctgcttattttacactaaagttcagtgtagatgactttcccacatagctcata

SEQ ID NO: 355970 - DNA, 627 bp, Homo sapiens
gtccagttcttagtcttccttgctagactaggacaataagcattatgtcttattcatctttattttccaagtatctatcaaattccctggcatctagtgggttgtcagtattgtttatggaacacatgaataagtgaaaaaatggatgcagaggagaagtcgatcaaagaactgggagtagccagcaaagctgtactacaacattggctttgaggtagattttggaagataaggaagattttgataaaagaaaaagtgggagttaaggcagtgcataggatagacagaggaacagtataaacagaagcttggtgaggtggaagtggtttatcagaccagtgtactgttctatgacaaaggcctgtggttgtgttgaccaaagctaaggtcaaggacagaactaataatagttgtcccaataaktgaggcaaatcccctaaacaacttggtatggagaaaaacaacttgatgagtgcttgaattgttttgaataataaacacatatcatttattgagtacttattccatgtccattatttcacagatattagttcatcctcacagcattatatatctgcttattttacactaaagttcagtgtagatgactttcccacatagctcata

SEQ ID NO: 355971 - DNA, 627 bp, Homo sapiens
gtccagttcttagtcttccttgctagactaggacaataagcattatgtcttattcatctttattttccaagtatctatcaaattccctggcatctagtgggttgtcagtattgtttatggaacacatgaataagtgaaaaaatggatgcagaggagaagtcgatcaaagaactgggagtagccagcaaagctgtactacaacattggctttgaggtagattttggaagataaggaagattttgataaaagaaaaagtgggagttaaggcagtgcataggatagacagaggaacagtataaacagaagcttggtgaggtggaagtggtttatcagaccagtgtactgttctatgacaaaggcctgtggttgtgttgaccaaagctaaggtcaaggacagaactaataatagttgtcccaataattgaggcaaatcccctaaacaacttggtatggagaaaaacaacttgatgagtgcttgaattgttttgaataataaacacatatcatttattgagtacttattccatgtccattatttcacagatattagttcatcctcacagcattatrtatctgcttattttacactaaagttcagtgtagatgactttcccacatagctcata

SEQ ID NO: 355972 - DNA, 578 bp, Homo sapiens
taatgcgtaatttatttctggattggaacttttaagaagaggataggcttttatccacaggtaggggaagaggattctggagctctaaggatttgtggatctcaaggtgggagaaagctgacttctatttttttgtttgtttgtttgttttgttttttgagacagagtctcgctctgtcrcccaggctggagtgcagtggtgcaatctcagctcactgcaagctccgccctcccgggttcacgccattctcctgcctcagcctcttgagtagctgggactacaggcgtgtgtctaatttaattgtgctaagacgtgggggatttggggcttcggcagctggcattttcctaaccaaactgagatcctatttgaacatttcctttcgcttctaagttacccaaatattgccagcaatgtttccaaagtatgtttcaagtacctagacctatttttcctgagtcagagattactagctctctaccaaaaatcagaccccttttttgcacacagagctacttgaaaacctccttagtgtttatttttgtttgttctctgcccactacccccataattagaa

SEQ ID NO: 355973 - DNA, 445 bp, Homo sapiens
tgcctgttgtcccctgctgagaggtgtctcctagtcaggaggcataggggtcaggaacccacttgaggaggcagtctgtcccttagcagaactcgagcactgtactgggtgatctgctgctctcttcagagccagcaggtgggaatgtttaagtctgccgaagctgcgtccacatctgcccctgcccctaggtgctctgttccagggaaatgggagttttatctataagcccctgactggggctgctccctttctttcagagatgccctgtccrgagaggaggaatctagaaaggcaatctggccacagcgactttgctacactgcagtaggttctgcacccagttcgaacttcccagcagctatgtttacactataagtggaaaaccacctactcaagcctctgtagtggcagtcgctcctcccccccaccaagctcaagcatc

SEQ ID NO: 355974 - DNA, 608 bp, Homo sapiens
tattatcttctatgaattatactttgatgctgtatctaagaactctttgcctaacccaagatcatgaagattttccactatgtcttcattataagttttatagttttatttcatacatttaagtttatgatccagtttgagttgattttttggtatggtacattgaacttatgattctaaattcatctttttgcatgtagatatccaattatttcacagtcatttgttgaaagactatcctttcctccactaacttggcctgactcctttgtcacaaatcaattwaccattaatgtaacagtttatttctagactgtcaaatctgttctatagatctataggtctatactcatgccaataccacactattttggttactatacagtaaactttgaaattgggaagtgtaaaatcttccaactttgttttttttccaaattattttggcttttctgggtctttgtacttcaaataaattttagaatcaacttgtcaatttctgtaaaaagacctgataagattttgatagccactgcactgaatttatagatcaatgaaagaagaattaccttattaacaatattgagttttcctatccataaacatag

SEQ ID NO: 355975 - DNA, 523 bp, Homo sapiens
aaagtatttcacaatcaaatcatattttgacatttagagtagcccaattaaacagtaactattgttttcttttttatgatttttgtcttccagtttctaataattttatttattcctttctaggtattcagtgacatctttctaaattgtttaaaatgagaagcattgcacactgagagtcaggatccaagtgtctttgactgagccaactcagctctgctattaacttatggtgtgatcgcaggcaagtcacttatttttcctgatatttaaaacaaagaaattgaacaaggtagtctgtaaggcatcataccactctaatagcctgggtatccctggtggaactgcagcatgctgcctctctctggggtcaggattcagccatagcycctgctgtcagtgaggtcttctccactcttagatagattctgctcttcggaaagatttttacccaactatttttgtcctattcattaattaacaatataaatatatacttttaaattaacaactcctccaaaaa

SEQ ID NO: 355976 - DNA, 565 bp, Homo sapiens
gcagtccattacacagtggaaatataacagttaaagaaaagtgataaataccctgctctcaaaaaaaaaagatgatcattcatttttccaatgaaaagataccaatctggggagtaaattgaatrtatatataaacttttgggctaatagagaagaaagccagttgtctattcatggtatttatgcatttatgataacatttgcagtccatcatataaataatgctaatgtggaaataatattttattcactctcacatttcataaagcaatattggtcatgctctttagaaacatatttgccattggtgtctttgccatcatcagagccactttaatagttgttatcacagtttgccagagcatgtaattttttctctcatctaaattgtttgatttacgtactttttgaagtgcatgtatattatatgctccccctggaaattctgtactaagccacagtttcataaacatgatctctgcatgcaaggaagtaatttactgtgcgcgtgtgtgtgtgcatgtgtgtgtgtttgtgtgtgtgtgtgtttagcagttcttaaaaa

SEQ ID NO: 355977 - DNA, 621 bp, Homo sapiens
agattatatcatcttttgtggaaacatgaatggagctggagrctattatcctctgcaaatgaacacaggaacagaaaaccaaatactacatgttctcacttataagtcaaagctaaatggtgggaactcatgaatacaaagaatggaacaagagacactagggtctacttgagagtggatggtgggaaaaaggaaaggagcagaaaaaataactattgggtactaggcttaataccttggtgattaaataatctgtataacaaacccctatgacatgagtttacctgtataacaaaccttcatctatataaaataaaacaagtgaaggttttattttatttattttattttttattttatttattcctaaaataaaagtaaacaattttatatggataaattataaaggcttacaaatacactcaaacatacatatgtttgtgtgtgtatacatatatatatgcatatgtatatttatgtatatatgtttttaatagctctaattaattacaattcaaagtggtaatcaataattgcaatgcaagtttgctccaaagtacacctgtgaagatgaaaggaaaaactccatgaataactcaagctccttattgaaccagtgtg

SEQ ID NO: 355978 - DNA, 621 bp, Homo sapiens
agattatatcatcttttgtggaaacatgaatggagctggagactattatcctctgcaaatgaacacaggaacagaaaaccaaatactacatgttctcacttataagtcaaagctaaatggtgggaactcatgaatacaaagaatggaacaagagacactagggtctacttgagagtggatggtgggaaaaaggaaaggagcagaaaaaataactattgggtactaggcttaataccttggtgattaaataatctgtataacaaacccctatgacatgagtttacctgtataacaaaccttcatctatataaaataaaacaagtgaaggttttattttatttattttattttttattttatttattcctaaaataaaagtaaasaattttatatggataaattataaaggcttacaaatacactcaaacatacatatgtttgtgtgtgtatacatatatatatgcatatgtatatttatgtatatatgtttttaatagctctaattaattacaattcaaagtggtaatcaataattgcaatgcaagtttgctccaaagtacacctgtgaagatgaaaggaaaaactccatgaataactcaagctccttattgaaccagtgtg

SEQ ID NO: 355979 - DNA, 621 bp, Homo sapiens
catacaccatggaatactatgcagccataaaaaagaatgagattatatcatcttttgtggaaacatgaatggagctggagactattatcctctgcaaatgaacacaggaacagaaaaccaaatactacatgttctcacttataagtcaaagctaaatggtgggaactcatgaatacaaagaatggaacaagagacactagggtctacttgagagtggatggtgggaaaaaggaaaggagcagaaaaaataactattgggtactaggcttaataccttggtgattaaataatctgtataacaaacccctatgacatgagtttacctgtataacaaaccttcatctatataaaataaaacaagtgaaggttttattttatttattttattttttattttatttattcctaaaataaaagtaaacaattttatatggataaaytataaaggcttacaaatacactcaaacatacatatgtttgtgtgtgtatacatatatatatgcatatgtatatttatgtatatatgtttttaatagctctaattaattacaattcaaagtggtaatcaataattgcaatgcaagtttgctccaaagtacacctgtgaagatgaaaggaaaa

SEQ ID NO: 355980 - DNA, 595 bp, Homo sapiens
ttcatcaacagttagtattttccatttttccctatttattttttaatattaactattctagtggaagtgtggttgtatcttattgtggatgggacattttccatttgaagatttccatttccttcagttctacacacttttcttgtattatatctttggcaatatccttccctgtcttgtcgctattactcttgtccaggattccttttattcaatgccgggaccactggatttgtttcttctcttacrttcttctctatctttttatatctaagttctgtgcaatttctttgactttacctttagcccatgtattttttccctttaattttacatgtagtattttttaacccccaagaagtcttgttatcttacaatttctttttttccaacgccctattctggttttttgaaggcaagttgtcctcaaatttttgtcaagatgtgaattggaatctgtttcctgattagagcaatctatttctccttgagtctttatttctcaattatttatcttcgtcttcctccatcaagctttcttcatatttcctgtattatcttttcacattaaggaattaggcaaaaggaggcttcc

SEQ ID NO: 355981 - DNA, 573 bp, Homo sapiens
ttggaatctgtttcctgattagagcaatctatttctccttgagtctttatttctcaattatttatcttcgtcttcctccatcaagctttcttcatatttcctgtattatcttttcacattaaggaattaggcaaaaggaggcttcctggaagttccatgtaaaaatgaacaaggcgggccgggcgcagtggctcacatttgtaatcccagagcactttgggaggctgaggttggtggatcacctgagatcagaagttcaagaccagcctggccaacgtggtgaaatgccatctctactaaaaatamaaaaaaaaaaaaaaaaaaattatctgggcctggtggcagatgcctgtaatcccagctacttgggaggctgaggcaggagaattgcttgaacctgggaggcagaggttgcagtcagctgagattgcaccactgcacaaggcaaacagaacaacagaccttgctttaatttgtctcctttcctgttcatttgtacatatatataaaaaaaggcaagagctctggtttaaatcattgaacatccagctgcaaagggggaaatgctgcagt

SEQ ID NO: 355982 - DNA, 672 bp, Homo sapiens
caattttcttgtcattaaaatgagaaagatagtccctgacttgatggggctgtcctgaggtaaaatgggtgtaaagtagtcagagaagtgcctagcacttaataggtagctccatacatgttagctgtatttattattaattacaacctaatagtgactgtatcagtcggagtttaccaaagaagcagcacctctaggatagatggatggatagagataataaaggaacgtgttacagggaactggccttatataattgtgaagctggttaagcagtgtctaaaggctgtctccacatctgctggtgaagcctgaagtccagagcgggggaattctggagaggaagatcatgaatttgcyggtccccacaagtatgaaatggagccccacaaaaatctactgaagcctgcgtccattcttgttgcctctgactttggtagtggaaagggtgtcctgcaaaagctgggaccatttatcacagagctaaacgtacacctgatctgggaattagacaagctgaaggagtgatctaagagaaggcagagaaattgcagacctatagctgctgcttcatgccaataagtgagtcagcagatcagtaacaaaaactatgagctacaaaatggttactgcttctgttccaaaatcttcccagaatcttccttgtagccc

SEQ ID NO: 355983 - DNA, 480 bp, Homo sapiens
tttttgggatgccgacaagctcctaactttgttggtttgcctgcatgcagtttgcttttctgtgagaaggaatgacagtcactcatagggaaccctggctattttttttcacttgtccaaacatgaagcacacttgcttctccaggtgtggcattgcagaaagcctgggggatgctgtaggtcttgatggttttggttggtgtgtgagtttcctatggctgctgtaaccaattacagcaaatgtagtggcttacagtaacacatytattgttttcttacagttctggaggttagaagctgaaatgggctgatatcaagatctcagcacaaccatgctacctttgaaaccactagcaggagtgtccaatcttttggcttccctggaccacattagaagaagaattgttttgggccacatataagatacactaacaccaatgatagctgatgaactaaaaaaaaaaaaaaaattcgaaacat

SEQ ID NO: 355984 - DNA, 480 bp, Homo sapiens
tttttgggatgccgacaagctcctaactttgttggtttgcctgcatgcagtttgcttttctgtgagaaggaatgacagtcactcatagggaaccctggctattttttttcacttgtccaaacatgaagcacacttgcttctccaggtgtggcattgcagaaagcctgggggatgctgtaggtcttgatggttttggttggtgtgtgagtttcctatggctgctgtaaccaattacagcaaatgtagtggcttacagtaacacatctattkttttcttacagttctggaggttagaagctgaaatgggctgatatcaagatctcagcacaaccatgctacctttgaaaccactagcaggagtgtccaatcttttggcttccctggaccacattagaagaagaattgttttgggccacatataagatacactaacaccaatgatagctgatgaactaaaaaaaaaaaaaaaattcgaaacat

SEQ ID NO: 355985 - DNA, 574 bp, Homo sapiens
ctctctccccgtgctggagttgggggtggggtgacacaagtccccctgtggccaccaccacttgaattgtgccgagtcagacctraagccagcacagcactggatcttgcccaagacctgctgtaaccactccctgactacagcctatgttcactccaggccctagggctctacaatcagcaggtggtgaggccagccatgcctgtgtccttccctttagggcagtgagttaccccaggtcccaagtgggtcaagagatgccatccgggagccaaggactggagtaaaaaaccttagaaatctacctggtgccctatgctactatgactaagctggaactgaaaccacgagacaaagagtttcccattcttctctctcctttccacaggcagaggagctttccccatggccaccaccatcacaggtgcacaaggattaccgtcgggctacctctggtgttcacttcaggcccaaggactcttcagcttgtggtaaaggctgctagtcctgggactcaccattcaggacagtgggctcccttctggaacagggcaggtccagaaatgacttccat

SEQ ID NO: 355986 - DNA, 574 bp, Homo sapiens
ctctctccccgtgctggagttgggggtggggtgacacaagtccccctgtggccaccaccacttgaattgtgccgagtcagacctaaagccagcacagcactggatcttgcccaagacctgctgtaaccactccctgactacagcctatgttcactccaggccctagggctctacaatcagcaggtggtgaggccagccatgcctgtgtccttccctttagggcagtgasttaccccaggtcccaagtgggtcaagagatgccatccgggagccaaggactggagtaaaaaaccttagaaatctacctggtgccctatgctactatgactaagctggaactgaaaccacgagacaaagagtttcccattcttctctctcctttccacaggcagaggagctttccccatggccaccaccatcacaggtgcacaaggattaccgtcgggctacctctggtgttcacttcaggcccaaggactcttcagcttgtggtaaaggctgctagtcctgggactcaccattcaggacagtgggctcccttctggaacagggcaggtccagaaatgacttccat

SEQ ID NO: 355987 - DNA, 531 bp, Homo sapiens
caatcagtgcaggcttctatttggctatcctgctctgtccctcttttagagctttgattagtattactaaatttctgattttatctttgggaaaataatatgtayactatgagttggatggaatattccatgtgtcgctgtatgcaaattatcaaaaagcactacagaagatattcaaaagataatgattactggcattaatttctatgggtaagtttcccataaagtaatgccttgacttaagtcacagacttgatatataggacactctaggtcacatgaatagagttgtttagtaaagtagatttgacatcatgtcttgttctcaggtaattccttcaggctaagaattggcctcccatacagtcctattatcaaaggcaaattccactgaattactctagtaatacctcaagtcatgagcctcttttaatgaattatatttattgaatcaattttcccatcaacagtgagctctggagccagggacatgccatggctttattataaagttcttctttgtggttagac

SEQ ID NO: 355988 - DNA, 564 bp, Homo sapiens
tacatcagggtaaatggggtatccatcacctcaagaatttatcctttgtgttatgaacaatctaattatactcttttagttattttaaaatgtacawttaaattattattggtcatagtctccctgttctgctctcaaataataagtcttattcattttttctattattttacccattagccatcccaacttcccccatatcccttcactgcccttcccagcctctagcaaccatccttctaccctctatcttcatgagttcaattattttaattttaagctcccacaaataagtgagaacacgtgaaaattgtctttctgtgcctggcttatttcacttaacataatgacctccagttctatccatgtcactgcaaatgacagattctcattcttttttatggctgaatagtactctgttgtgtataagtatcatattttctttacccatttatctattgatggacaatcttggctatcgtaaatggtgctgcaataaacataagagtgaaggtatctctttgagagactgatttcctttcttttgggtatatacctagcatg

SEQ ID NO: 355989 - DNA, 564 bp, Homo sapiens
tacatcagggtaaatggggtatccatcacctcaagaatttatcctttgtgttatgaacaatctaattatactcttttagttattttaaaatgtacaattaaattattattggtcatagtctccctgttstgctctcaaataataagtcttattcattttttctattattttacccattagccatcccaacttcccccatatcccttcactgcccttcccagcctctagcaaccatccttctaccctctatcttcatgagttcaattattttaattttaagctcccacaaataagtgagaacacgtgaaaattgtctttctgtgcctggcttatttcacttaacataatgacctccagttctatccatgtcactgcaaatgacagattctcattcttttttatggctgaatagtactctgttgtgtataagtatcatattttctttacccatttatctattgatggacaatcttggctatcgtaaatggtgctgcaataaacataagagtgaaggtatctctttgagagactgatttcctttcttttgggtatatacctagcatg

SEQ ID NO: 355990 - DNA, 451 bp, Homo sapiens
ttacaattacttcataaatattaactttgtttacaagggtatgggtcacctagtagctattttgaatgaattgtgttacttattttaatacacaggaaaataaaattactcacacccggagaataaagaaactgaggctgagggaagtgaagcaatgtgcccaagatatattgtcattgtttgacagagcagcatgttgaatcaatgtccttttgccttcaaaaccccttttctgtctctccaaaataaacagttaatatctaacacactgaataattttttaaaatatggatacatgaaaaatccaggtggctaaaatattaagttttacatatcggcagtattcctctgaaatatgctctgaaaaggtaagaggtraaagtctcatcaaattgcagaaaaaataggatcagctgtaaggtactctacaggtacttgctctaagctaagg

SEQ ID NO: 355991 - DNA, 481 bp, Homo sapiens
tggtgtgtgctattgatgctactcttctattccccttgagaaaccaagcaaagacagtacagtactagaaatgagctacctcacatagtgaagtatacattgcagaacctgaaaatggagctctctagccataccaggattaacgagacacagttgtttctcctttgtgtggactacctgctgcatttcctttcccagaaaccaaagccttcatttcccaaaatactgtagacagaaatcagtaactagatgaaatgaggggagtargcaaacagggaaaagtataaagatctacatttggattccccaaaccacctgcacaagttgaggcagagcttgacaataaaggctcctggaaaagacttaagggatttggttgactccacatgggtcagcagcatgatggggctgccaagaccagtgaaggcaactggaggctgtgttagactcagtataattggtctagacagagggaggagac

SEQ ID NO: 355992 - DNA, 503 bp, Homo sapiens
ctcttcttagtaacaactggtaatgctgctgtggcaactgtgatgttaaatgatcgtggctgattatttttgccaaataccttgtgggtagtgcacagcaagctttaagttatgtcaaataaagactaactctgaaaatggagtttttcagcaagctctagacccatcaaatggagctgatcctttggggaaggacttttcataggtccaaatccgttttgccccctccagtggcatgcaggcatgtcgctgccttcacagctactgctgtgggaagtctctggctttagtgactactttggagctggggagactgatgagattagggyacatgaaaaggctacaaggctctgtgcttactgagattcagccgtgtttcttgaataaatattgctttgattgttataatcttacgttctgaaaaggcagcttttggcagtttttgctagtgttctcttcactttttaaagacgtgaattttcagaggtcctttgtctaccatt

SEQ ID NO: 355993 - DNA, 503 bp, Homo sapiens
ctcttcttagtaacaactggtaatgctgctgtggcaactgtgatgttaaatgatcgtggctgattatttttgccaaataccttgtgggtagtgcacagcaagctttaagttatgtcaaataaagactaactctgaaaatggagtttttcagcaagctctagacccatcaaatggagctgatcctttggggaaggacttttcataggtccaaatccgttttgccccctccagtggcatgcaggcatgtcgctgccttcacagctactgctgtgggaagtctctggctttagtgactactttggagctggggagactgatgagattagggtacatgaaaaggctacaaggctctgtgcttactgagattcagccgtgtttcytgaataaatattgctttgattgttataatcttacgttctgaaaaggcagcttttggcagtttttgctagtgttctcttcactttttaaagacgtgaattttcagaggtcctttgtctaccatt

SEQ ID NO: 355994 - DNA, 569 bp, Homo sapiens
acaactggtaatgctgctgtggcaactgtgatgttaaatgatcgtggctgattatttttgccaaataccttgtgggtagtgcacagcaagctttaagttatgtcaaataaagactaactctgaaaatggagtttttcagcaagctctagacccatcaaatggagctgatcctttggggaaggacttttcataggtccaaatccgttttgccccctccagtggcatgcaggcatgtcgctgccttcacagctactgctgtgggaagtctctggctttagtgactactttggagctggggagactgatgagattagggtacatgaaaaggctacaaggctctgtgcttactgagattcagccgtgtttcttgaataaatattgctttgattgttataatcttacgttctgaaaaggcagcttttggcagtttttgctagtgttctcttcactttttaaagaygtgaattttcagaggtcctttgtctaccattctgaaatctgagcccttcttttactggatttccattctggagagttgggcagttcaagaatgggactgaagccatgcc

SEQ ID NO: 355995 - DNA, 615 bp, Homo sapiens
attgttccactgatcatttttcaactttatgatgggtttgtcagggtattaaatgtgcttttgacttatgatggatttattgcaatgtaactcgatcataagtcgaggaacatctgtataaattataagacacttttcccctgtaaaataaatctcatatccattaacaatcatctcccactttctcctsccactcatccttaggtaaccactaatctattttctgtctctattgatttgccaattctggaataatagatgccacagaatttgccattctgtggaattcaattccacagaaatggaataatataatattcgagtcttttgtgactgcttttacttagcataatctttccaaggttcattcatttcccaacatgttttaccaaataatttcttcttatggccaaataatatcccactaaatagatacgccacattttataagttcattcatcaactgatgaacatttgcattgttcacactctttgattattatgaataattctcctatgaacagtgtgtacaagtttttgtggatatctgttttccattctcttgaatatatacataggagaaaattgctgggtcatatgataactctatgttaa

SEQ ID NO: 355996 - DNA, 520 bp, Homo sapiens
ttatttggcatcttgtggtcatagaccaaactggcagtcaaagctgtttacattcctaccatctctgtatattgcagatgcacagaaatcgtgtaacaaacccttcaaccatgaaccccaaacatctgtgttttgctttctgcccaatagaggatggacatcctgacctaacaactttccaccattagagaaataaaggttctcacccaggctttcccctaacttctccagcctctttgtagcaggacgagctgcagacaaaactcctcagacaccggattaaagaaggaagaggtttttattcggccgggagcgtcggcagactcgcgtcttaagagccgagctctccaaaaaagaaattcttggcctttttaaaggctttcaactttaaggggtccacgtgaaagggtcgtgatacatcaagcaagcatgagaaatacractgggggctacatgcatcagctaacagaacaaaaagttttacaatgcttttttcatacagtgtctggaatttacagat

SEQ ID NO: 355997 - DNA, 561 bp, Homo sapiens
ggaattctgcccagcgtgccagaatttagagttgagcttctattttagcaggtgaaaagaaaaaccaggaatcagggccaaagacatcatggcggggattaagtatggaagtcgttaccttacttatcctcatctaggactgatacgaggtaggaagagctgatcaaatttcagaaggcagcctagtaaagagagcctgacagtttcctcattcattgttccmgaactgagcctgcaggttgaatccaggaaaaggaccctggcatttgaaagcaaccagaactgactacagtgagccactgtttcagtgtcaagtagattcagcctcatgcttttaagggaagtggggtgagttgggcagattgcttgaggcctgtggcgacatagtgggatcctgtccctacaaaaaattttaaaaagttgccaggtgtagtggctcacacctgtaatcctagtgctttgggaggccaaggcagtaagactgcttgaggccaggaatttgagacgaacctcaacaacacaacaagaccctcatctctacaaaccaaaaataaatttgcc

SEQ ID NO: 355998 - DNA, 559 bp, Homo sapiens
ctgcaaaaatataccattttcgatagcctgctgattataattaagaaatgtaagtctcttgccatttactggaggtcctggtgggagaagtcagatctttgaatcaaagtttgccagaaatagagccttttaacacttatctttgcaaaagtgaggcctagagaggaaaagtgacttcccttaaaaggatacagcagtaggtggaggagttggggttggaatycaatctcttaactgcctgagtatctctgcagaaaagatggggtcaggccagccatgggctgtaatcccggcactttgggaggccaagatgggagaattacttgagcccaggagcttgagaccagcctgggcaacacagtgagaccccattctgaaaaaaaaaatttaaaaaaagatagggtctaccatatcacaatgcattccatcaggaactctataaattcaccaagggagaaagctgaaacaagggcatgaagtccattttcaagggtcccacaatgggttactcctatccacagtcctaggttttattgtctttgcttcaagatgaaatggt

SEQ ID NO: 355999 - DNA, 543 bp, Homo sapiens
aagcaagaacatgcagtatttaattttctgtttctgagttagtttacttaggataatagcctccagatacaaccatgtttttgtaaagaatatgatttcattcttttttatggctgcatagtatcccatggtaagtgtgagtgtgtgtgtgtgtgtgtgtgtgtgtaataccacaytttctttatgcaatcaacctcaacctcacttttaataaaaataaagaatgttttattttcctctgagtttaccaaaataaaataaattctgcaaatacaatgaaaagtagctgtcagcactgagctttgcactggggagctttgctttgcaccctctctaggatagagaggaggagtgtggtaagtttgggaggagggatccatcctgtctcaggggtagaagatactcagtctcagctgattgttgggtttgtctcagttttgggaaacctttcagttttcccaaagtatctgcaaaatctgtagtgtggatttacgtaatattttaaattaataaataattgatgtaatcttttaaatctgtagt

SEQ ID NO: 356000 - DNA, 543 bp, Homo sapiens
aagcaagaacatgcagtatttaattttctgtttctgagttagtttacttaggataatagcctccagatacaaccatgtttttgtaaagaatatgatttcattcttttttatggctgcatagtatcccatggtaagtgtgagtgtgtgtgtgtgtgtgtgtgtgtgtaataccacactttctttatgcaatcaacctcaacctcacttttaataaaaataaagaatgttttattttcctctgagtttaccaaaataaaataaattctgcaaatrcaatgaaaagtagctgtcagcactgagctttgcactggggagctttgctttgcaccctctctaggatagagaggaggagtgtggtaagtttgggaggagggatccatcctgtctcaggggtagaagatactcagtctcagctgattgttgggtttgtctcagttttgggaaacctttcagttttcccaaagtatctgcaaaatctgtagtgtggatttacgtaatattttaaattaataaataattgatgtaatcttttaaatctgtagt

SEQ ID NO: 356001 - DNA, 577 bp, Homo sapiens
gctgattgttgggtttgtctcagttttgggaaacctttcagttttcccaaagtatctgcaaaatctgtagtgtggatttacgtaatattttaaattaataaataattgatgtaatcttttaaatctgtagtttggatttaatccatcaatctgtaggttgattataatgtctcctgtttttcaaaggtttagtactgaacccaggtctagggtccacactgtatggctgaatgaaaggcatttaaacttcctctcctagaggaaacactctgtcatggtgctggtagggctccctggcaagcagacactgagatggagataagcatgtaagaagttgactaggaaatgctcttgttgatayaggagttaagaagaaattatgtaggcagggtaaggaagtccttggtaaggtttcccttttaatgaaaagcaccctcaaaatcattttcttttctaaaaagagcagcctgtaaaattgagctgcagacacagaaaggcaagctagaagcttgcaagagtgaatcccagcagttatgccaataggaaaggggctacctgggaaccaggcatgttcaaa

SEQ ID NO: 356002 - DNA, 621 bp, Homo sapiens
atgctccattaattctcgtttatggraccttaatcccaatcatgacaggggtgcctttatacctaaccacctcttacagctccgcctcttaataccatcacagtggccattaaggtttaacaactaaattttggagggtacgcgttcaagccatggtagttcagatgcctttatcagactgaggaggttccctttcattcccaagttgctgagagttcttatctgcaatggatgtgttatcaacaaagcctgtcccccagaagacggggtctttccctgtttgatgtcatgaagccaatatatggaaatgaagtaagcatcaagggttgcaggttttattcaatggctgtggaattgaggagtgtggctcacaaatcaacttctcggtttgtgacaaccaagaagctgtagatataaggcatctttaatgaaagggttggacataaaaagcaaggggaagattagtcatgtattttctgggaatggatggagaacttggaattggagtgctgccttcctttttatctttttatgatttcttctaatcattgttatggtgactgtcatggcactggagtgagtgccattaagcatggaaatcttatagtgaagttagaaatt

SEQ ID NO: 356003 - DNA, 621 bp, Homo sapiens
atgctccattaattctcgtttatgggaccttaatcccaatcatgacaggggtgcctttatacctaaccacctcttacagctccrcctcttaataccatcacagtggccattaaggtttaacaactaaattttggagggtacgcgttcaagccatggtagttcagatgcctttatcagactgaggaggttccctttcattcccaagttgctgagagttcttatctgcaatggatgtgttatcaacaaagcctgtcccccagaagacggggtctttccctgtttgatgtcatgaagccaatatatggaaatgaagtaagcatcaagggttgcaggttttattcaatggctgtggaattgaggagtgtggctcacaaatcaacttctcggtttgtgacaaccaagaagctgtagatataaggcatctttaatgaaagggttggacataaaaagcaaggggaagattagtcatgtattttctgggaatggatggagaacttggaattggagtgctgccttcctttttatctttttatgatttcttctaatcattgttatggtgactgtcatggcactggagtgagtgccattaagcatggaaatcttatagtgaagttagaaatt

SEQ ID NO: 356004 - DNA, 621 bp, Homo sapiens
atgctccattaattctcgtttatgggaccttaatcccaatcatgacaggggtgcctttatacctaaccacctcttacagctccgcctcttaataccatcacagtggccattaaggtttaacaactaaattttggagggtacgcgttcaagccatggtagttcagatgcctttatcagactgaggaggttccctttcattcccaagttgctgagagttcttatctgcaatggatgtgttatcaacaaagcctgtcccccagaagacggggtctttccctgtttgatgtcaygaagccaatatatggaaatgaagtaagcatcaagggttgcaggttttattcaatggctgtggaattgaggagtgtggctcacaaatcaacttctcggtttgtgacaaccaagaagctgtagatataaggcatctttaatgaaagggttggacataaaaagcaaggggaagattagtcatgtattttctgggaatggatggagaacttggaattggagtgctgccttcctttttatctttttatgatttcttctaatcattgttatggtgactgtcatggcactggagtgagtgccattaagcatggaaatcttatagtgaagttagaaatt

SEQ ID NO: 356005 - DNA, 644 bp, Homo sapiens
gccaagtttcctaaatcaagcaagactaatagttggtgctcctctgggcctaaaaaccttaaatctcacaactttaccctcttgctcctgtgatgatattctctgggggtgaggtgagtcctgagctaggggcagggctgggtagctttgtatgcacctgctgtccacccttcctggtggtctcttactctcttgcactgctagaaagaagggcatggaaagcatcctwcatcttttccatgaacagaagcaaaagcccctccttcccttcctgcccctgccacactagcacacatgttgggagtaggagacaagacatttttctcactgtgtcattgcacaggaagagggttctcagaggtgctaatatattccatctaactggcactctaatgagcccagtagggaagagtatgtgctagccccggctcagcaggttcccttcatagggtcgtttgatgcttcagacttttaagagtccctgaggtcccagatgagcccaggctgcttcccaaggcgagggctgcatttctgggctgaatacccatttgctcatgcgggtaaagaggaattgcaagacaccgtgctcacttctactcagacagagacgaatgcatatcttcaaggcatttattgccagcagt

SEQ ID NO: 356006 - DNA, 644 bp, Homo sapiens
gccaagtttcctaaatcaagcaagactaatagttggtgctcctctgggcctaaaaaccttaaatctcacaactttaccctcttgctcctgtgatgatattctctgggggtgaggtgagtcctgagctaggggcagggctgggtagctttgtatgcacctgctgtccacccttcctggtggtctcttactctcttgcactgctagaaagaagggcatggaaagcatccttcatcttttccatgaacagaagcaaaagcccctccttcccttcctgcccctgccacactagcacacatgttgggagtaggagacaagacatttttctcactgtgtcattgcacaggaagagggttctcagaggtgctaatatattccatctaactggcactctaatgagcccagtagggaagagtatgtgctagccccggctcagcaggttcccttcatagggtcgtttgatgcttcagacttttaagagtccctgaggtcccagatgagcccaggctgcttcccaaggcgagggctgcatttctgggctgaatacccatttgytcatgcgggtaaagaggaattgcaagacaccgtgctcacttctactcagacagagacgaatgcatatcttcaaggcatttattgccagcagt

SEQ ID NO: 356007 - DNA, 449 bp, Homo sapiens
cacaagtttgaatgggactgcttttgaagagcaattggtccacacttaaaaaaaaatggagtctggtgggatgcattgtgaagatgcttttggttgtttaggtcctcctgatccatctctactacctcaaccacatcatccagttgagtttccatgttaggaatggatccattgggatacaaggggagggacctcttgtatctccctttcctccaagaaatccctatgaagtcctgagattactttccataggggattttcctggtcctttcagcctgcattggcactgagggacatctstccatcacgggagtttccctgtgactcttgcacaagagctggattttactcccattaccaagaaatgaattccctagggctgagccagccttcaagagagcctccttctgaaggtctgaaccagaacaataatgtctctgtcattcttc

SEQ ID NO: 356008 - DNA, 586 bp, Homo sapiens
ggatggggtatataaatctctttggggagagatgaaggagtgcggtgttcccctctcctcacttaagccaggtgaaaaagttctcaatagaacttctgggaggtgtgccctgtgttggaggacacagaggctagtttctggtacacatctagaaatattaaatgtgaggggctggttataccttccccaggtcagagagttgggagtgcagcagcagcaggaataagaagtacttttagctgtaatgggacaagtgtggtccttggaagatagttggggctatgttgaatttaaagcactctgccccaaagttctgcctgtgccagtgagrtaaatcacaagccaagagcctatctttcactggaacaatgtagagggaggcccctaagtggggagttccccaaaaaatggactaaagagaaagggctagcatttaggtatctgacccttacagggagctctgaccccagattaatatcagtgaaatgactttttaatctatctctcttctcttctgctggcccccattctcagcagagaagtgagaaaggaagtaaaacaaaaataggaaaagctgtctttctgc

SEQ ID NO: 356009 - DNA, 476 bp, Homo sapiens
ttgagctagcaccatggggaggtgacatggaatagaaaactgaggaatccagctggcagtgaaaaccaaagccccagatatatgacaccagtccagccagtccagccagtccatccagcccctacagttgtttcagccatcccaactgaggtcccaaacatcatagacagagacaaacaatccctgccatgccttgtttgaattcccaaccaaaagaatcatgagcaaatacaataattgcagttttaagctttggaatagtttgttatgaagcaatagaaaattgaaatttggggtagtttcacagtgatagaagactaatgtttgggtggcttattgtgcaacacyagataccggaaataggaagaaacccccctgcagggataaaatttcaagcaaaatcctgtgaaggttatctccagcctgatcccattgggaaaatctgaattatgtctcaggattatcctgatattagg

SEQ ID NO: 356010 - DNA, 585 bp, Homo sapiens
ggatcatctttatgtgctcattcattaagagctaatctatcccacttgctgatatatacacacacacacacacacacacacacatacacacacacacacaatttcaactcctgctgtgcactacaagcactgcctttgggggttatgcagggtgaggtgacaacttttggcagtgccaaaaatgcttaactgctgaggttaagctagaagctctgggtgaatgttgcctcaaaatggctgctggcacccaagccaaattagccaaggaatcaattaccctcaggtggctgccacagagatatcaccaccaaagctgctgagagaaaaacctctggtcaagccagacttctgatgatacaaaggaacagaatacacatstatctcctgggtcattgtttcccttcctcaattttcagcctgcgggacacaggcagtttcagctggccccaagttagcagcccttccagcacctgggcatcatttcctctattcagataccttatctggaaataatgaaagtttaatacgaggcaatcagaccccagggatttccaaatgatacctgatggaaagaggtcttctggg

SEQ ID NO: 356011 - DNA, 561 bp, Homo sapiens
tctgaaatagaatttctcagataattgctggaaattggccaatgcctttgttgcactgagctccacatagcagattatatgctctcggacttaaaccagatccatgaaagggatctcaaggaggaaccttcagaactggtactctgtcttctgacatgcagaacaagacgagagaggattggatgcttccttgggattgggtgctgaagaaaatgaaatcaaagcaaagatttccttctggaaacaakttcaaagagtagtccatttctttctccagctgaatcttttctttggtaatttcacagttttcttcatgtaaatattcatgtctttcttgatttttcctgcacaaaaacatgtctgcctcttacagtaggccaggacctgattaaaacagtatcccagaaaagctattagagcttatgcttccaaaccaagacccaaaacatctttgtgtagtgccaaagttgaaaatgttgtgaagtggtatgcttgaaagattttttaacaaaattataccacccaagattggtgagaggacctggaaaaatgtactcccat

SEQ ID NO: 356012 - DNA, 572 bp, Homo sapiens
tgaaacatgacgtttgagaaaatcaatgtacatttgtctttaaatttcagagtcatattgactgttgataacatctgctgttagttttctttttctaccaatctagaaggaaagtgttcaaatacttttgtcaaaagattgacaagaagttcctccttcttgtttcatttataaagctgaagttttgtatctcattatcttttaaagactgtatcaaaaaagtggagcactattcttgactgtgggaagtagttatcrtgattttggcaggagtttgtgactatctattttacagaattcaaatcagctcacttctgtgatgacccatctaataaactttgggtttttccatttaaactttcttggactcatgatagttctcaacatatttctccacttatctgtcttgttgtcttcctaatggaatcaggtgggtggcttgctgctgagctttgatgattgtgatgcaccgtgcctggtgggagcttctcagatgcaaaggtggggagctgacaacagtgagaactgctgtgggcagccgtatgagctgccatgtgttttaattaatagac

SEQ ID NO: 356013 - DNA, 476 bp, Homo sapiens
catctttgtggcttggctttgagaaaatttcccactatacttcttggcttctctatcaggatttttctaggtttccttgtcaataaactcaagctaaygaaaatgcaaatctcatgttttatgggaagaatttctctaagactacatgggtgcttgtttatttgaccgttctgtcttgtatgtacacctgctgtacaaatgcttgctcaatacttgctgaggttagaaatcagtgttagaggaagtggtaatatgggctcaggagcttaaatttgaaaaagcacatttggcctcccgcatttagatctttacagaatgtaatgccagacagattcatctttcccattgcacagatgaagctaattacttgagacagcagggttgcagtagagaaagagtttaataatcacatggccagccaagttgaaggatgggagttattaatcaaatcagcctccctgagaattcaaaggcta

SEQ ID NO: 356014 - DNA, 568 bp, Homo sapiens
agccaagttgaaggatgggagttattaatcaaatcagcctccctgagaattcaaaggctagagtttttcaaggataatttagtgggcaggagggtagagaatgtgtaatgctgattggttgggttgggaatgaaatcacaggaggttgaagctgtcttcttgggtcacttcctgggtaggagtcacaagaccagttgaacctgtttcttggtatgggttacatgtttccagctagtctaccaaaatgcaagctttgaaagatacctcaaacaccagttaaggttttacaatagcggtgtcatatatagtagcaactggggaggttacaaatcttgtgacctctggccacatgactcctgaacctatttctagccttgcagccaatttattagttttacaaggcagtttcagtccctgaataaagagggggttcattttgggaaggggctgttatcatcttcattttaaagttcaactataaactacattcytctcacagttagcttggcctatgcccgggaatgagcaaagacagttagctttgttgttttgcaagggcagtttcaaa

SEQ ID NO: 356015 - DNA, 568 bp, Homo sapiens
agccaagttgaaggatgggagttattaatcaaatcagcctccctgagaattcaaaggctagagtttttcaaggataatttagtgggcaggagggtagagaatgtgtaatgctgattggttgggttgggaatgaaatcacaggaggttgaagctgtcttcttgggtcacttcctgggtaggagtcacaagaccagttgaacctgtttcttggtatgggttacatgtttccagctagtctaccaaaatgcaagctttgaaagatacctcaaacaccagttaaggttttacaatagcggtgtcatatatagtagcaactggggaggttacaaatcttgtgacctctggccacatgactcctgaacctatttctagccttgcagccaatttattagttttacaaggcagtttcagtccctgaataaagagggggttcattttgggaaggggctgttatcatcttcattttaaagttcaactataaactacattcttctcayagttagcttggcctatgcccgggaatgagcaaagacagttagctttgttgttttgcaagggcagtttcaaa

SEQ ID NO: 356016 - DNA, 486 bp, Homo sapiens
aaggcctgcatgtgaggaggtacccttgagagatgtgtaccacagcagtggctactgcttgaagatgtccatgattttgggagcagtacccaactgatgttgaagatgtccatgatattgggaacagtacccaactgagtttaaagaggacagttgtccagttgtcctgcttgtagccacccagcatcactggaacaccttccttttttctaccttggaattttccatcatttaaamtccacctcctgaaggtagaaggcagagctcaccttcctggtctctccaacagctggtgctcaggcctctgagctaggctttgggtgatatgggtttcttctgtttgtccctccagatccactctccaccattctctacctttcctgtcctccaggaggctgacttggatggactacatcaccaaggtttccttgtctcttgcttctggttgggtttggccaatggcagcaatggcaggcagttggagag

SEQ ID NO: 356017 - DNA, 486 bp, Homo sapiens
aaggcctgcatgtgaggaggtacccttgagagatgtgtaccacagcagtggctactgcttgaagatgtccatgattttgggagcagtacccaactgatgttgaagatgtccatgatattgggaacagtacccaactgagtttaaagaggacagttgtccagttgtcctgcttgtagccacccagcatcactggaacaccttccttttttctaccttggaattttccatcatttaaaatccacctcctgaaggtagaaggcagagctcaccttcctggtctctccaacagctggtgctcaggcctctgagctaggctttgggtgatatgggtttcttctgtttgtccctccagatccactctccaccattctctacctttcctgtcctccaggaggctgacttggatggmctacatcaccaaggtttccttgtctcttgcttctggttgggtttggccaatggcagcaatggcaggcagttggagag

SEQ ID NO: 356018 - DNA, 595 bp, Homo sapiens
gaaatgaggaatgcctttaagggactcatcagtaaattggacatggccgaggacagaatcagtgggcttaaagatgtgttcatagaaacggggtgaactgaaaggcaaagagaaataagaatgaaaaactggaacagaatatccaagaaatctaggacaattacaaaaggtataatatacatgtagtgggaataccagaggcaaaaaagtgaaaggaacagaagaaatacttggaataataatgtctgagaattttccaaaattaatgacatccaacaaaccacagatccaggaaggttagagaacatcaagtaggatacatagtaaaacaaaaacaaaacaaaaatcctgacaccaaagcacatyatattcaaactacagaaaatcaaagacacaaatcttcaaagaagccaggggaagaaaaccaccttacctataaataatgaggataagaattacactagacttctcttcagaaatgatgcaagcaagaagaatgtaaagtacaagatttaaagtgtcaaaagaaaaaagctatccacttagaattatgtgtctagaaaaattatcccttaaaagtgaaaatgaaataaga

SEQ ID NO: 356019 - DNA, 554 bp, Homo sapiens
ctggtcctaattcttgtccttcataataaaactacagttataaatgcagctttcctgagttctaagaatcattctaacgaatgaattatcaaatctgagggggctgtgggaactcccaaatttgtagcaatttgtcaaaaatgtgggttacctattgattcctgaacttgtggctggcgtctgcagtgaggtaagtcttgttagggactgttcccttaacctgtggagtgggctaactctgggtagttagcatcagaattgaattacagcattacaatgtttgacaaccagctctccaggagggaggggggaagccctaagccctagtttgtggtgtttgcatattttcatgttatgaatgctcccactatggccaatagcaagttaccaatgtgatgtcattgatcatggagttgggaagagatgcagagaaatcagctgcttgtaagcctgygtgagttaactgtagcatacacacaccattgcttataccttttgaccaagcaacaccacttaacaaaattcatccaacaaatatgctggcacaatttgcc

SEQ ID NO: 356020 - DNA, 567 bp, Homo sapiens
gggctggtctcagtgcaacagagtagagcagagattaagatatttcacctctgaggctgggtcrtaaaaggcaccaaagcttccactctgtttttttggatcactctctctgggacaagccagcctccatggcataaggacactcaaacacccttgggagaagaccatgcgggaaggaagtcagacttcccaccaagagtactaatttgtcaaacatgtgaatgagcaagcttgcaagtggaacctccagccccagtaaaaccttcggatatctgactgcagctccagttgaagtttgaactccaacctcactggaagcccttaaccagaaccactctgctgaactgattccaaattcttggccccagaaaaggtgagataataagtatttgttgttattttaagccactaaattttggagcaatttgttatgcagcaagagagaagtaatgcataaagtgacattgagagacccaaaggaaataagcaagtaaactctgcatgtatctgggaatgaagactttcaggtagaaggaaagtgttaaggccacacaattcgagcacatg

SEQ ID NO: 356021 - DNA, 587 bp, Homo sapiens
tacagcattactcgggtagttataccttttacagacaatagtggctccgtccaagccaagcacaagctcacgtgagtgatcacctaatgcgcctcacggggcatggttatgtaatgtgtggggttgtaagcctgtgctccaaacctgctgagtcatgctgtgctggaaggccgcctcggcctactccaggctaaagtgctgccatctcctttacagggagtataatgagcaagtggggagaaagcataaaatggtgatgaagasacaagagggtgatgaaggctggtaacccctggaatataatttggattttcttctagtacaataagaaaccactggagcagtggctgtcttccttggctgcactggaatcacctggaacttttgaaaaatatgcttgtgtctcaagcatagaaattctgaaatgatatggcatatggctagagcattaggaattttttttttactccccaggagagaatttttacgggcagctaaggttgagaaccactgtaagggaagattttaaacagggagtgacatcatttgattttgaaagttctgttacactaaccctatactcatta

SEQ ID NO: 356022 - DNA, 567 bp, Homo sapiens
gggatgatggaaatgttctaaaactggattatggtgatggttgtacaactcagtaaatttattaaaaatcgttgagttgtaaatttaacaggtgaatatgacagtctgaaaactacacctcagcaaagttgtttatgaaaaataggtaaggaagagagagagaaaaaatattatggcttccagagcctctggaggtatataggttcagctgttaggaggatttggtgggaaagttttaaaagcataattgtaaagtaacttggaggtgcctagtccgtgcaacctaaaagaacctaactaagcactattgttaccagcgatgaatccgcatctgtacgggtctgcagcaacctcactttttgcctcttcagaggaaagaattcaagtgaggggcataaggccgaaggagagaccgaggcaagttttagaacaggagtgaaagcttattagaaagctttagagcggaacaaaaggaagataattatacttggaagagggctaagyaggtgacttgaaagacaagtgtgtggtgtgaccttttgacctgaggttttatacttggcatat

SEQ ID NO: 356023 - DNA, 551 bp, Homo sapiens
gaacaagagccttgcagttctagtgacaaggcttaaagaaatgatggctcaagatggagctgggaatgctagacagggaacatgtgatggaaaaaggcagctgcagtttggactaactcagaagcaaatgtgcagtgcatatagacagagataatccttaaaatagggttgtcagatttagcaaataaaaatacagaatcccattaaatttgaatttcagataagcaataaataatttttagtataagtaggtctcatgcattatttgggatgtactaaaaacttttgctgtttatctgaaattgaaatttaactgacatcttttattttatttggcaatcttacaagaaagaccaacaactggattacaatgttgatactgaatcaaaaggatcaaaagtaaaataagaaacataagaatacacatcttagggagktttgaataaagagtgatgtgtgtgtgtgtgtgtgtgtgtgtgtgtacaaaaatgatcaaagagaatcaaaactgaaaggacaatatatatactttttgacctgagcctaaagta

SEQ ID NO: 356024 - DNA, 564 bp, Homo sapiens
tgattttctgggagagtcccaatttcaaatattttgtcaccatggcaatcctgaactgagccttgaaagataagtaggatttaaatattctgccaagcaagacaaccaaacaacaggtaacgaggaatgggaaagggagcaacaaaaaagcaatctcattttccttttttcttgttttgctcaagaaatgctatatgaaagcaaccagcacaaagtaggccatggaaaatgtttataaacattttaaggcccaccacaggccttaaaatttccactattagagagtcttccctttggttaagttagcrtggcagacatgaacatgaaccactcagatccttctccaagaaaggactctccgcctgacttcaaggagtgtgagtagctggcagcctcagctttcaatgtctttagagttttcctccactttcaggccaaggtcatgctcttgaaaggggagcccagccaatgactgaggaaggcagtggtacagagcctcttcatttccacacaacatgcggctcctataatgggcaatctgtgctctggagttcccacattgag

SEQ ID NO: 356025 - DNA, 591 bp, Homo sapiens
agcctaaaaactctgcaaggacagggcccatgtcttagtcaagttatacctctagtttagcactacactcagtccatagaaggcaatccatttgttcatccagcacatgtttgttgagtgactactatttgacaggcactgtagacacctcagtgaacaaaacacacaaagccttcactttcttggcactggaagggacaaatgcatttacggcacttcacggattcccctgacagaagtccttgtctatgctaagtcctacacaggtacagcccattgaagaggtgagtaagattctcaactacttaacgtggaggctatggaacacactgcttcttttcttagtatccatcacacttctaaacagttgccactgacacttctggagaagtccaacctgttccatgcacatagactcacccattcaatgacacaatttattccaaagaaggcctggtagacgtcttgaaagtctaatatcgggagctctgtcatgcttcttgagaaaggtgatgcttctcagaagggygcatccttccccatgagtcacctgggtacatatccagcccagggctcccagcagctacacca

SEQ ID NO: 356026 - DNA, 459 bp, Homo sapiens
catttacagacagaagacccaagtaagctacagaaacagcttgattggttacatctgcaattgactgatgctctgctacagtgattggctgagactgctttatgttaccgaagtgtaaacctaaattagactttcaggtagttcctgtactaaattaggttgcggttctttacatagagactcaaagtccagagccatcctcaggccagatttaatttaatttaacagtggttaacctttgttctcactggtagagagggtaggtgggataccatttgtctttggaaatctgtgtcctgcttttrgacaaatagagggagggcaaagagctttccttcatctgagtattttttaactgtcttcagctaaaacatccttcatcttaggaggtgacctattctggtctcccacaaggagaaaggcaaaacagagcaatcaatcatctggggtcccagttgt

SEQ ID NO: 356027 - DNA, 570 bp, Homo sapiens
gaagtcggttgatgcttttggcctgcagcctccttaaggttaatagtccacataatttcctcaggggccctggctggcctgttgtgggtgtacccatsaagtatcttgatttgctataataggagccaccttggcttcctgtggagataagccctgcccctcgttcccactttaagcttgaaaagtcccttatccaactttggaatgggaactagaaagactaagcagtgtctctcaggggttccttctggggtcactcagaagaggagaaccaagcagtcttggcggagagacacctgaagttggtcactcggcacattaccaggggctcagcaatgaccagcctgcaaccatcctgcctttccccacgggtctgggctccagccatggagggtggactggagactcctttgcctttcaacactgtctggcctgtctcgggtccggcacgtcttttctctactgattttgtggctgtggttaacttagctaacctttcagtgaaataatgtctagtggcattcctttacattttccatgtgctgttttttccataactccattttcttc

SEQ ID NO: 356028 - DNA, 570 bp, Homo sapiens
gaagtcggttgatgcttttggcctgcagcctccttaaggttaatagtccacataatttcctcaggggccctggctggcctgttgtgggtgtacccatcaagtatcttgatttgctatrataggagccaccttggcttcctgtggagataagccctgcccctcgttcccactttaagcttgaaaagtcccttatccaactttggaatgggaactagaaagactaagcagtgtctctcaggggttccttctggggtcactcagaagaggagaaccaagcagtcttggcggagagacacctgaagttggtcactcggcacattaccaggggctcagcaatgaccagcctgcaaccatcctgcctttccccacgggtctgggctccagccatggagggtggactggagactcctttgcctttcaacactgtctggcctgtctcgggtccggcacgtcttttctctactgattttgtggctgtggttaacttagctaacctttcagtgaaataatgtctagtggcattcctttacattttccatgtgctgttttttccataactccattttcttc

SEQ ID NO: 356029 - DNA, 570 bp, Homo sapiens
gaagtcggttgatgcttttggcctgcagcctccttaaggttaatagtccacataatttcctcaggggccctggctggcctgttgtgggtgtacccatcaagtatcttgatttgctataataggagccaccttggcttcctgtggagataagccctgcccctcgttcccactttaagcttgaaaagtcccttatccaactttggaatgggaactagaaagactaagcagtgtctctcaggggttccttctggggtcactcagaagaggagaaccaagcagtcttggcggagagacacctgaagttggtcactcggcacattaccaggggctcagcaatgaccagcctgcaaccatcctgcctttccccasgggtctgggctccagccatggagggtggactggagactcctttgcctttcaacactgtctggcctgtctcgggtccggcacgtcttttctctactgattttgtggctgtggttaacttagctaacctttcagtgaaataatgtctagtggcattcctttacattttccatgtgctgttttttccataactccattttcttc

SEQ ID NO: 356030 - DNA, 597 bp, Homo sapiens
agagggcaaggagtaagtacaaaggagtgtaggggaatttatcttaaacaggcttgtttacttatgttgaccaggaactgacctttgatcatccacacacctgactttctctggaaggagaacaataaatgttaattacctacaggttgtgttggctccaggtttttggcattgtgcctgagctgaataaaagcaagcagctccagcttctccaggctgctgtctggccgttagagccagccagtcacctagctgcttttatactgcatacctgtgtctgagtactcatttcatccattggccaaggcctgtgggacagacctggcaagagcccagccaagatgaaccaacttgcctacacaaccacccccgtgagtgaatgataaaatattgaagttttgtgattgtttgttctgcagcaagagccaaccgatgcactgaactatgtagttaagggtcaggatagaggttgcttttgggagatgaggcatgaagwgggttctgaggtgctgctgagttctgtttcttaacctgggtgctaattacacagttgtattcagtttgtgaaaattgacttgtatgtttatgacctgtaca

SEQ ID NO: 356031 - DNA, 577 bp, Homo sapiens
ttgagtcagtggtaacgtcccctttgtcatttctgattgtgtttatatcttctctctttttgtctttattagtctagctagcagtctatcttattatttcmttcaaagaacaaactcatggatttgctgatcttttctatgttttttgcatcttaatttcctacgcttcaactgtgattttgattatttcttgtcttctactagctttggggttggtttgctcttgtttctctaattgtgatgttagagtgttaattcgagatctttctaactttttgatgtgggcatttagtgctataaactttcctcttaatactgctttagctgtgtcccagagattctggtatgttgtatctttgttctcaccagtttcaaagaatttcttgatttctgccttaatttcattattttcccagaagtgattgaggccgacactcaagctttgtagtctgtcattcctgctctacaatgaatcaatcactgaatcagtctgggtagagtggatcacatccgtgatcccagcactttgggatggccaaggtgggaggatcacttgtggtcaggagtttgagaccag

SEQ ID NO: 356032 - DNA, 608 bp, Homo sapiens
gttgccctgagagtgaagaggaaaagaaaggattagaaacctatttaatgaaataatagaataaaacttcccaagtatagcaagagatttcaacatgcagttacaggaggctcaacaatttctaggcagatagaagcaacaagatattctccatggcacattatactcagactgtttataaagttatctataaagagcaaatcctataaacagcaggggaaaatcagttagtcactgataaaggaagcccatcagactaacagcagatttctcagcagaaatcttacacatcagaagggaatgggaagatatatttaaagtgccagaagaaaaaaaagttcatcagaaatactatatccagtgaaattacccttcttaaatgaaggagaataaagtatttctcagaaaagcaaatactgagagaatytgttaccactagaccggccccacaagaactgctcgagagagtactgagcctggaagcaaaaagatgtcatttgccatcatgaaaacacaagaaattataaaactcactgggaaagcaatcaaacaaaggaagaagagaaaggactaaaacggtaccactacagaaatctgtcaaatcacaa

SEQ ID NO: 356033 - DNA, 597 bp, Homo sapiens
actgtacataatttcataacaaatgaatatttatattactatagtcaacttacataaatgcctgccaattttcatagtcatgcaaaaatactttttatacccaatgctaaatttattgaggcataacttaaatatagtgtatacacagattctaagtatgaaaaytgatcaattttggcaaatgaatatacccatgttacccattctctggcaagatgaagactacttctgtcatcccagagagtttccttgtgcccttcccaatcaagtctcccccacccggaaacaaatgctaatcttatttctatcataatagttttgtctcgtgtagaattttatataaatacgattttatatactattttttttctggagcctttttctcagaataatgttgagactcatgatgttatatatatcagtagtttatttgttattactaagtagtgttctataatatgaatatactgctaattacctgttttcctgttaatgggcatctgaactttttcatattttggctattttaaataaatcttctgtaaagatttgtatatgaggctttcttttgtcaacataggttctcatttatcttaa

SEQ ID NO: 356034 - DNA, 557 bp, Homo sapiens
gacactgtgtttaaaatgtttgccctcctctctaagcaatttagtctatgaaattgaggacaagcccatgatgtggtttgtttgtttatttgtttttgctgttgtcactgggatttccttgttcacatacatgcataaaaaastattttctatgatgttaataaattgagaaaatgagattttaattttttcttttcttcaatagtttctcctgttaactaactgaataaatggagaaagtgacaaagatcttacatttgttgattatcagctatgtaccaagagttgttctaggtatttacttgcaacttttcttcattcatttaatcttttcaataaagctacaagctacctctacagatgagaaaaataggtattagagagttcaacttactagctcaagattgcagagccagtaaaagacagagcaaagttgatatgaaagggctgtccatttcctagtggaaagtgtgctcttggccaacatttccagaatgggtacagatagtactcctgcttgactacccaggtcccttcttttataggcattaccctac

SEQ ID NO: 356035 - DNA, 576 bp, Homo sapiens
tagtcattactattattacccacatttcacaggtgaggaaggaggcactgtgatggtaggcaatttcttatgtcatccagctaaaacatggtagaccctgaactcacacccagtagcctgtcctcctaaccaccaaaaccctccattaaatgacactggtccataccattttcataaaggaaagatcctcactcccttaatccttactttttggggacccctactccaaccactactataataaaacacacmcaaaaaaatctatttcagcttagatcattctatttctatttcaaagtagaaatgtttctacaaagataattgagtttctctaccttgatctcatgctggtacttcttgttctctccaactcctaaattagcattactcaggtctgttttgagggaagttctatgattatgttttctgaggtcaaataagcttgaaaaatggtggattaaacagctaaacatctcttcactataagactctcacttctcagggtctttatttattggtatgcattatacaacttcaagggtgggccaggatataatacgcagtgttttgcaaacc

SEQ ID NO: 356036 - DNA, 522 bp, Homo sapiens
atatacaggctttcatctccacctcatctcaactcactccctctcacaaactctgtcccttcggcaaactacaatagaagacatcatccataatgggagcaggagggtattttttattctgtatggattcattttataattttcaggtcaaatttagtgccaggaaaaagtcatcactccagatgagcttcctctcagcagataataggaaccaagtcatctgcttgggtttcctttttctgccttccttatgagactcctatttaaataaataaagctttcctcaaagcttgsgttcctgctcagctgtaagatctgactcattccaagtttctggggcttctatctctccctcttctaacagtttattttcctttaaattgtcctttcaacataagccttaatagttggggtttcaaaccctttagaggaaattaattaattggttaattaattaatgaaattattcaacaaatggaggctcaggacctgtaatgcaacaggcttcatataccatgagga

SEQ ID NO: 356037 - DNA, 564 bp, Homo sapiens
ggactactgtaatctttgttaaaattaagattcatgcttattttagttttgctattagtgtggctttttaaaatttcttttttcttgaaccatgtattacttggaaaaaaaacataataaaaatattctgctatttcaagacatccttctagataggataatgaattttccatagataaagaatattctacctgcaccagtcctgtgagtttttagtgatactttttcttttgacttgatcaatggactgagagattgcatgaatcagtcaaaacaatttaaatgaatctacgaagagacagtaacaggattctaccatgtcaggataagactccagcctaggcctgctcactccttctgggtgttgcttcaatgcaagtttttgtttgttggttttgttttgttttttaaagaaygggttggaggagtggggtgggagataatacacactaagaagaaaaacaaactctcccaacaacaacaagaaaattcttactctatagtttacaatactattggaaacagaaatatcatttagctgtagccagaatcactcaaacaggc

SEQ ID NO: 356038 - DNA, 564 bp, Homo sapiens
ggactactgtaatctttgttaaaattaagattcatgcttattttagttttgctattagtgtggctttttaaaatttcttttttcttgaaccatgtattacttggaaaaaaaacataataaaaatattctgctatttcaagacatccttctagataggataatgaattttccatagataaagaatattctacctgcaccagtcctgtgagtttttagtgatactttttcttttgacttgatcaatggactgagagattgcatgaatcagtcaaaacaatttaaatgaatctacgaagagacagtaacaggattctaccatgtcaggataagactccagcctaggcctgctcactccttctgggtgttgcttcaatgcaagtttttgtttgttggttttgttttgttttttaaagaacgggttggaggagtggggtgggagataatmcacactaagaagaaaaacaaactctcccaacaacaacaagaaaattcttactctatagtttacaatactattggaaacagaaatatcatttagctgtagccagaatcactcaaacaggc

SEQ ID NO: 356039 - DNA, 550 bp, Homo sapiens
ggaggcactaaaacaagagcccattatgtgttttaaaatgatattagtaataatgtaggggtttatttggacaaatgagttcacaaaattgtgytgcctgtaatgttgattcttgactgagggataaaactcacttcccaggcccctttctgtaagccagttcccaccatccccttgaacctcagctgctccaccagagtcaaagcaactcagaaggaggctgagacccccatgcctcattgctaatcgatgggcatggtggatgggcatgagggtggggttcaggaccttacctagcatctgtcttcccagaatgttgctctgccctttctggggataagaggtcttagtttctttatctctataatgggaattataatccattccctgaagattatggaagattataggaggtaaaggctataaagtcaccttgtaaacctaaaatcctatctgagatcgaggatttagatggcaagtaccattttgtcttcatttcttggtgaagaaggatccatgaggcctcctttattcactcaacagatattta

SEQ ID NO: 356040 - DNA, 538 bp, Homo sapiens
tatttacatagcatttatattatattaggtattataagtaacctagagataatttaaagtatacaggagaatgtatgtaggttagatgcaaacactatgccattttatatcagagacttgagcatccaaggattttggcatccatcagggtcctggaacgaatgtgccacagataccaagagaygactgtagtttttcttctttcatcactttttcttctttattcattcattcaccattaagtgagcaatctgtatgtgccagatactatctaagcacagacatgttctatctctacctatgatgggtttagaatccagaagaggtaaaagagagaaatggctattgctcacactgctagatactctgtgatggaagtacgttcggattgttgtaggaaggaggcagttaactccactagggaaaggaaatagaagaaattcatgagacaaacaactgtcacctatttgtaaaacctccatcctgccctgtttccagacttggctgtcaaaaagaactgttggaaaatatgtagaaa

SEQ ID NO: 356041 - DNA, 542 bp, Homo sapiens
attctattcctaggtatttggcctagaaaaacttcacacatttttacagaaagataagtcaaagttttcatggcaaaattgtttataatacacaaaaaatgaagacaggagaatgggtacattaattgtgaaatggtcatacaatagcatacttactgcacagcaactaaaataacttcttagatcaacatgcaattcctaaattaacaaggttaataccaaaaacacaacattgagcaaaaatagcaagatgtatgacaggtacagtaagttcccatttatacacaattttaaaataggcaaagcactatttttagtagcactcagtgcatttatgcacagagagcaaaaatataaaaacatgcatgggaatgaaaagacatcacatttaaaggacagattatctctggagaagaaaagagacaggatttaggaggggtayactgggagcttttgttgtatctataatgttttatttcttttaaaaatctgaaacaaataaaaaatatttgtatctgaaatgggttttgtcacttttgtct

SEQ ID NO: 356042 - DNA, 542 bp, Homo sapiens
attctattcctaggtatttggcctagaaaaacttcacacatttttacagaaagataagtcaaagttttcatggcaaaattgtttataatacacaaaaaatgaagacaggagaatgggtacattaattgtgaaatggtcatacaatagcatacttactgcacagcaactaaaataacttcttagatcaacatgcaattcctaaattaacaaggttaataccaaaaacacaacattgagcaaaaatagcaagatgtatgacaggtacagtaagttcccatttatacacaattttaaaataggcaaagcactatttttagtagcactcagtgcatttatgcacagagagcaaaaatataaaaacatgcatgggaatgaaaagacatcacatttaaaggacagattatctctggagaagaaaagagacaggatttaggaggggtacactggragcttttgttgtatctataatgttttatttcttttaaaaatctgaaacaaataaaaaatatttgtatctgaaatgggttttgtcacttttgtct

SEQ ID NO: 356043 - DNA, 623 bp, Homo sapiens
aagcttttttccatttaaacatttttaagttaaaaattaagacacaaacacacacattagcctaggcctacacagggtcaggatcatcaatatcactgtcttccacctccacatcttgtcccctggaagctcttcaaggggcaataacaggcatggagctgtcatctgctatgataacaatgccttcttctgaaatacctcctgaaggacctgccttcaggtccttcaggaggctgttttacagataatgttttattttagaagcaaaagcagtacactctaaaataataataataaaaagtatagtaaatacgtaraccactaacatagttgtttattactattatcaagtatacttactattatcacaaatatacttactattatcattatacaattaggtatactgcatataactggaggtgccatagttttacaggactggcagggcaggtttgtttacaccagcatcaccacaaacacatgagtaatacactgtactacaacattacaataactacagcctctctaggagtttttcagctccattataaccctattggaccaccatttatatgcagttctaacgctgactgaaagatgattatgcagtgcctgactgt

SEQ ID NO: 356044 - DNA, 561 bp, Homo sapiens
ctgaatgttgatagccaagacaatggggaaaatgtctccagggcaattcagagatcttcatggcagcccctcccatcacaggcccagaggcctagaagggaaaactggttttgtgggccaggggtccctcctgcactccctgttctgtgcagcctcaggacatggcaccttgagtctcagccactccagttccagccatggctaaaaggggccaaagtacagctcaggcattgcttcagagggtgggagccccaagccttggcagcttccacctggtgttgggcctgcgagtgcacataagacaaaagttgagcttcagaagcctttgcctagatwtcagaggatctatggaaatgtctggatgtccaggaagacgtctgctgcaggagtggagtcctcatggagaacctctactagggcaggcagagggggaaaatggagttggagcccccacacagagtccccactgggaaactgcctagtagagctgtgagaagagggccaccagcctctagatcccagaatggtagatccactggtagcttgcactgtgcacctgga

SEQ ID NO: 356045 - DNA, 561 bp, Homo sapiens
ctgaatgttgatagccaagacaatggggaaaatgtctccagggcaattcagagatcttcatggcagcccctcccatcacaggcccagaggcctagaagggaaaactggttttgtgggccaggggtccctcctgcactccctgttctgtgcagcctcaggacatggcaccttgagtctcagccactccagttccagccatggctaaaaggggccaaagtacagctcaggcattgcttcagagggtgggagccccaagccttggcagcttccacctggtgttgggcctgcgagtgcacataagacaaaagttgagcttcagaagcctttgcctagatatcagaggatctatggaaatgtctggatgtccaggaagacgtctgctgcaggagtggagtcctcatggagaacctctactagggcaggcagagggggaaaatggagttggagcccccacacagagtccccactgggaaactgcctagtagagctgwgagaagagggccaccagcctctagatcccagaatggtagatccactggtagcttgcactgtgcacctgga

SEQ ID NO: 356046 - DNA, 575 bp, Homo sapiens
gtaagtccattaaacctctttttcttcccagtctcgggtgtgtctttatcagcagcatgaaaatggactaatagagtgatttaatgagtttcaccagcatgggtttctttagcctcggtttctttgtctgcagtatatgggctaatggtacacaccttgaggttgttgagggagaagagacgggctcaagtgctgcctttgtcttaccaaccttgtgaagcctccttgagcagccatgtcttcatttgtaagatgagaataagagcacctgttttatgggctttttgtaaggattgcgtgtgctcatgtaagaaaaaccccttgcaccctgcatagtaccttgcagagcaaatggtggtgataatgacaatagaaggagctctctttattgagtgcttactgtgtgccaggcactgtgctgggcactggactacaacagaggggaaagataggcatcgttcctgacctcactgcgcttaacaaagagaaagctctaagaraaagttttcaaagcattacccttctctgtatatttaagaggaaagctttaatgttataggatgccttctaaatat

SEQ ID NO: 356047 - DNA, 498 bp, Homo sapiens
actgtgcttgctgatgtgggggttcagagattatgagacatgtgaaacactagaatggaatctccatgaaggcagcgatttgcctattttgttttctgatgaaactgtggtatatgtaacagtgtctggcacatagtggatgcgaaatagatatttgttgaacaagtgagtatgtctctgcccataacagcttacaacctagtttgcttgcattaattaatcaactaattattaattaatgaatgattttattcctttattctacttrtatgagcatccagaagtcctcaattttattaggatatctttaattctttttattatttaaaaaggtaaacatgtgatgtgtttgttgtagaaaatgagaaaagagcaaagatgtaaaaagaaaaataattgagacaataattattttaatttaagcttatatcattagaaactttttccatgtaaatacctgattttaaaaaatgagtttaattctcttgcaagttgatt

SEQ ID NO: 356048 - DNA, 562 bp, Homo sapiens
aatgtcctctggacagttcatctgttcctcttctccaaaaccacaagcctttacaccacttatggcattacattacattatttagattacatgtgtgtttccccctcctgcctagcagttcattaaaggctgaagtgtgtctgttcatctccagaactcaacamtggttctggacacatagttaagtaaagaaatgatgcgtgccttctaccgctatgtaattccccaatgcacataagagattcagggctagacaacttggaagccatcaacaaaaaagaggaaagagaatgccttagaatgttcccaaaaatatcttttgcctcctctggctgtttcccaagaagcaacattcctcccccaaatcaacccaaaggctttgtgaccaaatccattcatttgccgataatttcccaacacacctgtaaaatgaacatatgcactaaattctcaaaatgggtttctcgtttcttatttgaatacatttttcctgagcaggacaatgtttttccttcccctacacaaacacctggcctttaaactccattgaacctgggcaagc

SEQ ID NO: 356049 - DNA, 631 bp, Homo sapiens
acttcaagaactgtaaagtagcatgcaaataaacaaatatagaagtttttttaaccaacctccacataactaactcactagatcgggcagggctctccattccctctatagagcaccccacctagtgtccaaggatgctccgtggatgctcctggacaagccatgcactattcccacctcttgagttctattctgacaagattcagtagggtttgatcccaaagcttgttatacagtttcagctatataattttttggaaattgtgtactttacagaatttaaattaataaaacaagagtataagacgagttgttgcttctgtgaaaattaagcccaattctttggaaagtgaaataaaaataacctcctcccctcccccaaccaaataattaccactgtgttaactctaagacaaggataaacacatgggggggcattatacgtatctaaaagaattccccatttacagtgctttacttgtgtctttcagcttctayccactttagagaaaacaaagctggataccacagaaaatgtattacaggttaggtgtggttgtgaaagaagacagcaccctccaaacatcagacccagctcaaaggaaaagctacatgattaaatgaatgtaca

SEQ ID NO: 356050 - DNA, 572 bp, Homo sapiens
catttactgagagaaaagtactcaagtctccaactgtgattgttcattttctattctcccttttgtcaatttttgctttttaagctctatttttaggaacatacatataaacacacgaaaatttaggatttttatgtgatcttaatgaattgatttttaactctttgtcttctttctttttgtgtttttaacagtgtctctttttaattttattttaaaaattctaagttgacacataatagttgtacaatttatggagtacatagtgatgatgtgatacatgtaatgtactgttctctctgatgatattagagctaygatagttttttaaatgattactgtttgtatggtacatctttttttatgcttttgctttcagcctatgtctttatatttcatctgtatgatctcttgaatgctgcacatagaacctgtacttcccctcccaataaccttggactctgctcccattgaaagaacccttccacgaagctcacaacaagaccccatcaaatttgaaagctatacctgcagtccatccagttacttagattcctcatgccaagagaccc

SEQ ID NO: 356051 - DNA, 572 bp, Homo sapiens
catttactgagagaaaagtactcaagtctccaactgtgattgttcattttctattctcccttttgtcaatttttgctttttaagctctatttttaggaacatacatataaacacacgaaaatttaggatttttatgtgatcttaatgaattgatttttaactctttgtcttctttctttttgtgtttttaacagtgtctctttttaattttattttaaaaattctaagttgacacataatagttgtacaatttatggagtacatagtgatgatgtgatacatgtaatgtactgttctctctgatgatattagagctatgatagttttttaaatgattactgtttgtatggtacatctttttttatgcttttgctttcagcctatgtctttatatttcatctrtatgatctcttgaatgctgcacatagaacctgtacttcccctcccaataaccttggactctgctcccattgaaagaacccttccacgaagctcacaacaagaccccatcaaatttgaaagctatacctgcagtccatccagttacttagattcctcatgccaagagaccc

SEQ ID NO: 356052 - DNA, 424 bp, Homo sapiens
aaaagccatacccagaaaccaccactggtcccccaaagccccagacactgccatatccccctgtttgttcaacagaacaatattcacccctctgtggccccaacttagataaaaccatgaaggaaaaaagaaatgctagccttctggctttcttcttccccaaatcccttctcatccactgcttccagactgtacccgtccattcccatctacgtgcctggtttccctaggagccccaagcaaaaccagcatctttcactggcaactatgctaacatttctaaatctttggtcaccattgaaacataaggatctgtctcattactcagcatactattcaaatacagctcttgaaataatartaataatgatagctattatgtttttttctatatgccaatacacttttaaagtgttttccatgt

SEQ ID NO: 356053 - DNA, 632 bp, Homo sapiens
taaaacccgtttagcacatcttatgtcttgagtttcccacatctgagctttgcatctgtggcgacttatttgcctgagaaaccatttttctcctgtctgctaatttgaatagtatgaggacggcctcttcctccaaggagcctcttcagattgccccagggctcaatggtttccttttattttgaattttctaacttacctatggatcrcacacctggcttctgtgaataattggggttttagtctaaataattcctctgcaaggaagcttcccttgactaatctatctaggacaagttgtctcccaacctatttgctaccacgttatcctgtttcaaccacagcacctgctacactctaacacttccatgttcacagttatctccccagttcacctccctgctggagaatgtcacctctaagaggaaggggaaattgtgttagtgatgttgtctgcatatgtagtaaaaattgatactcagtacatatttactgaaaaaagtaaatgaacaataacacttagtggctgtatctccttaggcaccatttttatcactttgtgtacacttactaatttaatattcacaaaaaccctatgatgtatattgtactatggacatcatttacagctg

SEQ ID NO: 356054 - DNA, 583 bp, Homo sapiens
tatcctgtttcaaccacagcacctgctacactctaacacttccatgttcacagttatctccccagttcacctccctgctggagaatgtcacctctaagaggaaggggaaattgtgttagtgatgttgtctgcatatgtagtaaaaattgatactcagtacatatttactgaaaaaagtaaatgaacaataacacttagtggctgtatctccttaggcaccatttttatcactttgtgtacacttactaatttaatattcacaaaaaccctatgatgtatattgtactatgracatcatttacagctgtgataactaaattgcacagccacagtcatccaaacccaaagaaacccaatgagaagcctgactccagagcacagaagctgcatttattttaagttatcttttacccaaagcctcagataagtcttaaaatattgacatatactctctcttaactctagagtaagttgtctgaagataggaaactgagtcttataattattttttgtctcctatggtgtttagaatagtcttggaaatggacaagatttaacagtaagtgtgatgtcacaaatttaa

SEQ ID NO: 356055 - DNA, 590 bp, Homo sapiens
ttccatgttcacagttatctccccagttcacctccctgctggagaatgtcacctctaagaggaaggggaaattgtgttagtgatgttgtctgcatatgtagtaaaaattgatactcagtacatatttactgaaaaaagtaaatgaacaataacacttagtggctgtatctccttaggcaccatttttatcactttgtgtacacttactaatttaatattcacaaaaaccctatgatgtatattgtactatggacatcatttacagctgtgataactaaattgcacagccacagtcatccaaacccaaagaaacccaatgagaagcctgactccagagcacagaagctgcatwtattttaagttatcttttacccaaagcctcagataagtcttaaaatattgacatatactctctcttaactctagagtaagttgtctgaagataggaaactgagtcttataattattttttgtctcctatggtgtttagaatagtcttggaaatggacaagatttaacagtaagtgtgatgtcacaaatttaacctagcaacaccccacagagctatccaaatgggatataactacatt

SEQ ID NO: 356056 - DNA, 524 bp, Homo sapiens
tagcaacaccccacagagctatccaaatgggatataactacattaagaaaaggaaaaaaattttcaaatcttagagataggaaagaaatggaaagagacactatgttttctcctaatgaggcctttcccctctttccaaatatacaggcatcctcaggaattaaaacaaggaaacattaatgttttacatcttttataaaacatgaatttatatgtcattaaccttgaagtactgatgtcgtgggaagtggggagtaactgatggtttatgtcagtgttatgacatcttttccaggaatatcataagatcagttttcttaaataatttagatgtttccgtttacatctccaaccaggaaaaactgtaactctgatgaacgattttctttaccagaccagacacttcatttcctgccatgamaaatttgaattagcatccaaactgtccctagaggcaaaaaatacatatagtaaggcaccaaatcaatgccattttgaaatgtgattgtaacatgttagaaaaa

SEQ ID NO: 356057 - DNA, 508 bp, Homo sapiens
tgaaaattatttctacacaataacatgaacatggatgtttaagcagctttacttgtaattgctgaaacttagaagcaaccaagatgctcctcagtatgtgaataaacaaactgtggtacactgagacaatgaaatattatttagcactaaaacaaaatgaggcatcaagccatgaaagacatggaggaaccttaactgcatctcactaagtgaagagaaacaatcagaaacagctacatactgtgtgattccaagtataagacatctgaaaagggtaaaactatgtagacagtaaaaagataagtggttgtcaagggttggggggagtggaagagggagggatgaataggcagagtgcagaggatttttagggcagtgaaaatactccgtatagtactataataatggtagatacttgccattacacatttgtccaaattcatagaatgtacaataccgagagtgarccttaatgtaaattataaactttgggtgattaagatgtgtc

SEQ ID NO: 356058 - DNA, 527 bp, Homo sapiens
ttaggtacatttactttcatctacttctcctttatcacaagaaaatttgttaatcaggcatttacccattggagaatattggtaagcatctggttggcatagaaaaagtctattgttggaagtctgtagtttcttggtttgcattttaagtggttctcatgaacgtttacttatatttgctataaatccttccttattaactacatcatgttagccatccagtggtaatcaatttctatcactctaagccctgaatctagatccatgaattaccattttactycctcagcactgatgaagtccactagtttccacatcatttaagcatcaagatgataaagtctatttataagcattgagtccaagaatgaatattatgtaaatgtagagaatcattattctatcctaaactgaggagcatcccagatcaatgctatgatacattgttgaatttattgttctagtcctaatggcacacacattatattgtcaatttcaagttactgggcaacttgtgccaaaatgcc

SEQ ID NO: 356059 - DNA, 538 bp, Homo sapiens
ggaaaaaaaatcctttgtgagaaggtaaaaggaggggcaaaatagcttgtytaagaattcttcagcttttgtaatttttattgatttcatctcaaagaacaataggcaaaaatccattgaagatagacgttagcacttggggagaagaaaaaaagggtggatcaatcaaaatctgcagcttgccaaatatttgaaagatatagagacagccaggagggagaacaacagtctggggtggtccaagggaataaaataaatacttaatgggatgaagtaagaagcaaaagaaaattcaaactgataatcaagtaatgttttctggcagtcacagattattcattcctaagcaatgttagacttcccatggagatgtttttctttagagttttattctcagtcattaaaagagaaacaaagctccctaaactgtgatgtgaatgaaacatcaatgtttgtgaagattgttggatcagctaaatgtagtgaggcattttgggggcaagaatcccaatgaagtaatagccttcaaacctagagt

SEQ ID NO: 356060 - DNA, 538 bp, Homo sapiens
ggaaaaaaaatcctttgtgagaaggtaaaaggaggggcaaaatagcttgtttaagaattcttcagcttttrtaatttttattgatttcatctcaaagaacaataggcaaaaatccattgaagatagacgttagcacttggggagaagaaaaaaagggtggatcaatcaaaatctgcagcttgccaaatatttgaaagatatagagacagccaggagggagaacaacagtctggggtggtccaagggaataaaataaatacttaatgggatgaagtaagaagcaaaagaaaattcaaactgataatcaagtaatgttttctggcagtcacagattattcattcctaagcaatgttagacttcccatggagatgtttttctttagagttttattctcagtcattaaaagagaaacaaagctccctaaactgtgatgtgaatgaaacatcaatgtttgtgaagattgttggatcagctaaatgtagtgaggcattttgggggcaagaatcccaatgaagtaatagccttcaaacctagagt

SEQ ID NO: 356061 - DNA, 513 bp, Homo sapiens
tggtcctaaagcctgtacttattccacagtactattggaaaacagaggagtgccaaacaagtgactgtaagtatagagcacttttcagttttcagttatgtttcatttctataaacagaaataaattgtaaaaattcctgttacaactttggttatttgtattttggttttacaagcaaggtttaaaagcttaccaaagtcttcttattkcttaagatctatttcaaatgctgcttagtctgtgaagcctttattaaactcctagtcagtgctagttacttcttacatgagttaatgggacttctggcatttttaaacatatagtagtctttgtgtttttccgtgcctctcttttcttttagacaaggctattcaataaagtatcatgtggctatttgaatgacttaaattaaattaaaaatgtggtaccttagtaacacaaagtcacatttcaagagttcaacagccacatgtggctgttggttatgtagacacaggacactttcatcatta

SEQ ID NO: 356062 - DNA, 513 bp, Homo sapiens
tggtcctaaagcctgtacttattccacagtactattggaaaacagaggagtgccaaacaagtgactgtaagtatagagcacttttcagttttcagttatgtttcatttctataaacagaaataaattgtaaaaattcctgttacaactttggttatttgtattttggttttacaagcaaggtttaaaagcttaccaaagtcttcttatttcttaagatcyatttcaaatgctgcttagtctgtgaagcctttattaaactcctagtcagtgctagttacttcttacatgagttaatgggacttctggcatttttaaacatatagtagtctttgtgtttttccgtgcctctcttttcttttagacaaggctattcaataaagtatcatgtggctatttgaatgacttaaattaaattaaaaatgtggtaccttagtaacacaaagtcacatttcaagagttcaacagccacatgtggctgttggttatgtagacacaggacactttcatcatta

SEQ ID NO: 356063 - DNA, 598 bp, Homo sapiens
cttttgtccttcacccctgtcctaccctttccctccaagtccccaaagtccatagtatcatttttatgccttcacatcttcatagcttatctcctacttatgaatgcaaacatatgatatttgatttttccattcctgagttacttcacttagaataatagtctttgatcccatccaggttgctgcgaatgccattacttcattcttttttatggctaagtagtattccatcatttatataaacacagattctttatctgctcattgattaatgggcatttgggctygttccatatttttgcaattgcgaatttggccactatcacttttgtccacatttcattggctaaagctggtcacattgccaagcccaaggggaaatgggagaacatgcccacctttagcatgacggatatcaaatcatatgacaaaggacacagggaaatagatacatctaccacaaggaacaacaccattttgtctctgacagaggacattcaatgggagcttctcttattcttgttgtttaactgttccaaacttctaagccctgaaatttctagcctgtcagtcaagttaagtgaaagaaaagtctcct

SEQ ID NO: 356064 - DNA, 614 bp, Homo sapiens
ttcaatttgcacttccttgaagattaatagaattgagcagctttttaygtgctaattggcaatttgtacatcatctttgatgaactgtctgctcaattctttgtctatttacttatttatttattatttttattattattgagatgtaagaatctaccatatattctagattttagtattttgtcggatagcacaaatattttctcccagtttgtagcttatcattatatttttaaccacgtattttactttttaatatataatttaaaatttgccctttaaatcataatttaaattaaaatttataatttaaagtgtaatcatttttaagtgtacaattcagagacattaattacattcacagtgttgagcaaccatcagaactatgtattcccaaaacatttttatcactccaaacagaaactctataaactttaagcaataactctacattcttcctgcctcccagcacctggcaccctttaatctattttctgtcccaatggattgtctattctagatatttcacgtcagtgcaatgatacaatatttgtgctttgatgtctggtttcttttgcttagcataatgtttttaaagtttattcatgttgtag

SEQ ID NO: 356065 - DNA, 614 bp, Homo sapiens
ttcaatttgcacttccttgaagattaatagaattgagcagctttttacgtgctaattggcaatttgtacatcatctttgatgaactgtctgctcaattctttgtctatttacttatttatttattatttttattattattgagatgtaagaatctaccatatattctagattttagtattttgtcggatagcacaaatattttctcccagtttgtagcttatcattatatttttaaccacgtattttactttttaatatataatttaaaatttgccctttaaatcataatttaaattaaaatttataatttaaagtgtaatcatttttaagtgtacaattcagagacattaattacattcacagtgttgagcaaccatcagaactatgtattcccaaaacatttttatcactccaaacagaaactctataaacwttaagcaataactctacattcttcctgcctcccagcacctggcaccctttaatctattttctgtcccaatggattgtctattctagatatttcacgtcagtgcaatgatacaatatttgtgctttgatgtctggtttcttttgcttagcataatgtttttaaagtttattcatgttgtag

SEQ ID NO: 356066 - DNA, 614 bp, Homo sapiens
ttcaatttgcacttccttgaagattaatagaattgagcagctttttacgtgctaattggcaatttgtacatcatctttgatgaactgtctgctcaattctttgtctatttacttatttatttattatttttattattattgagatgtaagaatctaccatatattctagattttagtattttgtcggatagcacaaatattttctcccagtttgtagcttatcattatatttttaaccacgtattttactttttaatatataatttaaaatttgccctttaaatcataatttaaattaaaatttataatttaaagtgtaatcatttttaagtgtacaattcagagacattaattacattcacagtgttgagcaaccatcagaactatgtattcccaaaacatttttatcactccaaacagaaactctataaactttaagcaataactctacattcttcctgcctcccagcacctggcaccctttaatctattttctgtcccaatggattgtctattctagatatttcaygtcagtgcaatgatacaatatttgtgctttgatgtctggtttcttttgcttagcataatgtttttaaagtttattcatgttgtag

SEQ ID NO: 356067 - DNA, 579 bp, Homo sapiens
atcttttatgccccagctactattctaggcactggtgatttcacagttaacaggatggttaaagtccctgattgtatagatgtatctattctagtgtttgtgtcggcaggaggagagtagaaacaataaatgtgttagtaaataacaggcagacctggcatattataaacaggaaattagaattttaatatttatgttcatgaatcacatagaaacatgcacctgtgcttgaaatatatgttatcacacagctaggaggaacataaagatatatgacataaattactgccctcatttcattagaaggaaatttgagacagagatggtgattgtgaattgtataaagtcaatctaaagtagagaaattggcaattactattaagtcaaatcaayacttaatttcaaattaaagggtagtttatttctaacggtctaaaacttgggcaaacccctccagttacacaactacttaaactatagaaaaattctagtcatatgtattaacattgttcctttctagtgtgtaatcctttgattaccattactcctgcatccatatttttaaagacttcatgcttg

SEQ ID NO: 356068 - DNA, 579 bp, Homo sapiens
atcttttatgccccagctactattctaggcactggtgatttcacagttaacaggatggttaaagtccctgattgtatagatgtatctattctagtgtttgtgtcggcaggaggagagtagaaacaataaatgtgttagtaaataacaggcagacctggcatattataaacaggaaattagaattttaatatttatgttcatgaatcacatagaaacatgcacctgtgcttgaaatatatgttatcacacagctaggaggaacataaagatatatgacataaattactgccctcatttcattagaaggaaatttgagacagagatggtgattgtgaattgtataaagtcaatctaaagtagagaaattggcaattactattaagtcaaatcaatacttaatttcaaattaaagggtagtttatttctaacggtctaaaacttgggcaaacccctccagttacacaactacttaaactatagaaaaattctagtcatatgtattaacattgttcctttctagtgtgtaatcctttgattaccattactcytgcatccatatttttaaagacttcatgcttg

SEQ ID NO: 356069 - DNA, 592 bp, Homo sapiens
gggacatatttaagagcatctatgtgacagtgtcagtgtttttgatacttgacagatgatgctttcatggcagatacactgctaaagacacatataagacagacttcaggcatcttcatgctttttctcccacttgaaaaacacatttcagtatgcaagctagccacaatgatgttggaagaataaccctatgtctgctctaattatttactttaaataaatcatttgcaaatttcactcttttaattctactactaataaatagcctccaatatattccacaattgacaacaatgtactgctatgtcattaacrcacaaattacctagagatgaacgtgaggtctgcatatttttcagacaatgcttggcaaatgtaatttatttcacctttttaaagatagatattgggtgaagactaaactacctggcagagacctagaatgcagctgttctaaattgcaaattaaatctaaataatatgttttaagtgcagccaagctgggtggaagattttttatgtggtgaaaattgaggacttaataagtatgtgtcctggaagagacggcctttccacttccacttgccaagtc

SEQ ID NO: 356070 - DNA, 674 bp, Homo sapiens
ggctgtgtagtagttctatttttgtggctggtgtatatgtacattttacttatctagtccactactgatgggtatcttggttggtttcatgtctttcctattgcaaatgttgctgcratgaacatgcaagtgcatgtgtctttttggtagaaccatttattttattttagttgctgtgtgaaatggtaattctgttttaagttctttaagaaatctcaaaactgctttctagagttgttgaactaatttacattcccaccagcagtatgtaagcattctggtttctccacagcttcaccaacatctgttgtttcttgactttttattaatagccattctgactggtgtgagatggtatctcactgtggttttgatttgcatttctctgatgattagtgatgacgagcattttctcatgtttgttggccatatgtatgccttggtttgagaagtatctgtttatgtcctttccccattttttaatgacattatttgttttttgcttgcggaattgctaaagttacagattctggatattagaactttgttggttgcagtttccaaatattttctctcattctgtaggctgtctgtttactctgttgatagtttcttttgctgtgcaggagcgctttaatttaattaggtcccacttgtcaatttttgtttttgtt

SEQ ID NO: 356071 - DNA, 674 bp, Homo sapiens
ggctgtgtagtagttctatttttgtggctggtgtatatgtacattttacttatctagtccactactgatgggtatcttggttggtttcatgtctttcctattgcaaatgttgctgcaatgaacatgcaagtgcatgtgtctttttggtagaaccatttattttattttagttgctgtgtgaaatggtaattctgttttaagttctttaagaaatctcaaaactgctttctagagttgttgaactaatttacattcccaccagcagtatgtaagcattctggtttctccacagcttcaccaacatctgttgtttcttgactttttattaatagccattctgactggtgtgagatggtatctcactgtggttttgatttgcatttctctgatgattagtgatgacgagcattttctcatgtttgttggccatatgtatgccttggtttgagaagtatctgtttatgtcctttccccattttttaatgacattatttgttttttgcttgcggaattgctaaagttacagattctggatattagaactttgttggttgcagtttccaaatattttctctcattctgyaggctgtctgtttactctgttgatagtttcttttgctgtgcaggagcgctttaatttaattaggtcccacttgtcaatttttgtttttgtt

SEQ ID NO: 356072 - DNA, 606 bp, Homo sapiens
ggcctgggagaggaggtcagctgtagatagactccttcatttatatctcccttgagcccaggatggtgttcattcaggctctgaatgctgttacagtataattaagaggatagcttaggatgctctgctttctaaatcaaactagaaatctccccttctttttatctctgtattattcttccttacttatgccaagycggggacatcagagaattcttttttaaaatgtgctttgttctgtaacaacaaagacagaacagccactgagagaaagaaacagagctgagttcctcctggtccctcccactccaggtgcaatgagacagctctgggctacccaggccttcctgtctcccattgtttctggccgcctgcatgattttaccttcctgacacactctttgactttttatgaaatgatgaggaattagcttaagtctcagtcagatgtaaaaacaatatctgtcactaagtctctctgctatgtctgaataggaagaaatacctaatattttcagacagggaaaagggaaaaatagatgaacaggatggacaaataaactttgtagtttaagtaaattcaaatccacttgacatttctcatat

SEQ ID NO: 356073 - DNA, 606 bp, Homo sapiens
ggcctgggagaggaggtcagctgtagatagactccttcatttatatctcccttgagcccaggatggtgttcattcaggctctgaatgctgttacagtataattaagaggatagcttaggatgctctgctttctaaatcaaactagaaatctccccttctttttatctctgtattattcttccttacttatgccaagtcggggacatcagagaattcttttttaaaatgtgctttgttctgtaacaacaaagacagaacagccactgagagaaagaaacagagctgagttcctcctggtccctcccactccaggtgcaatgagacagctctgggctacccaggccttcctgtctcccattgtttctggccgcctgcatgattttaccttcctgacacactctttgactttttatgaaatgatgaggaattagcttaagtctcagtcagatgtaaaaacaatatctgtcactaagtctctctgctatgtctgaataggaagaaatacctaatattttcagacagsgaaaagggaaaaatagatgaacaggatggacaaataaactttgtagtttaagtaaattcaaatccacttgacatttctcatat

SEQ ID NO: 356074 - DNA, 600 bp, Homo sapiens
attcccaaccgtgatgttctcattagtaaagtgaaaaggtggaacgagaaaattggtgaggtccttttgagttctaaatagaatttcttgttgacactttttccaacacaatttttcaattatttcaggaagacaaattttacatatatatatatatttggggaagaaaaaagatatatatcttttatatatacatayggattataaaaatatgcatatttatatataaaatatatggaatatatatatatatcttttatgtatatagggaagccacttttgaagcctggttctaaaacaataacacagtaattcttatgttggagttaacttcattccagccattttgaatctactttcagtcatctgggtacatttctttgggcctatctggcttgtagcaactacgtcacccacctcttctgtgaagctttctttaatctctctaatcctagctcagggcttcctccttgattttcctatagctctttgagctgcttcatcagcagtctcaccatcatcaccattaccatttggacaacaacaatcattcctgggaatctgtccactctatactaggtgctgttgtaagagccaatg

SEQ ID NO: 356075 - DNA, 576 bp, Homo sapiens
tgggtaatggaccaggtaattttccggcttcatgtattgttgataaacctgcatttatttctaagtcttttgagggatcattttggtttttgaattttctaatgggaaatcacatcctccaaacaccacttgatttttctaatatgaatcagtcacaccatagtgatgttctggttcctgttgctgtatgaattcttackccaaaatttagcagcttaaagcaatcatttaattttgctgacagatttctgggtcaggaattctagaaggacttgactgataatttttacttggcatctcctgtgaagttgtagtcagatgtcagttggggctggtgtcatctgaagtctttttttgttttgttttttgagtcagggtcttgttctgtcacccaggctggagcacagtggtacaaacagcgctcactgcaaccttgacttcctggactaaaatgattctctcacctctgctgcccctgtagctgggaccacaggcattagccaccacatctggctaagtttttattttctgtagagacagggtctcaccatcttgcccaggctggtctcaaactcc

SEQ ID NO: 356076 - DNA, 339 bp, Homo sapiens
ctggtggattctttctttgcattgtaccttagacggggctctggcccttgatacccaacctttttttctggtacaggatctgaagcttttttaagttaaagtgtaaatgattagtaatctacaagtacttctgggtaacagcattagcttaaggctttaatttctgccaacagtaatggtaaaattataggtattgcccaaggaatatgaagcaaaaccgttgttctttccattggtataaaaaatagacatggtattttgatgaactgattttrttttattttttgaggagggttacactgtcatttgttgaacttgttgtctctcctcaatgctctg

SEQ ID NO: 356077 - DNA, 363 bp, Homo sapiens
tttataactactaaattatactgttaatttttttgatataaattgcatcatggtaggtaattaaggagtacttattatgagatatgaaccaagggttaaatgttcccagcataccaatatttggttattgctgggtctttggaccaytgaacacaatcttttaagctgtttttttcacataagtgatgttcaagtgaattcagcttgtattcttaaagctataagcagattttattacatctaaaggtagtatggaggattggcatgatcacagagtttcaaagtagaacttggtacttgcttttgtagttttatttcctcatttatcaaataagggggttagactgaataatccctggttac

SEQ ID NO: 356078 - DNA, 363 bp, Homo sapiens
tttataactactaaattatactgttaatttttttgatataaattgcatcatggtaggtaattaaggagtacttattatgagatatgaaccaagggttaaatgttcccagcataccaatatttggttattgctgggtctttggaccattgaacacaatcttttaagctgttttwttcacataagtgatgttcaagtgaattcagcttgtattcttaaagctataagcagattttattacatctaaaggtagtatggaggattggcatgatcacagagtttcaaagtagaacttggtacttgcttttgtagttttatttcctcatttatcaaataagggggttagactgaataatccctggttac

SEQ ID NO: 356079 - DNA, 579 bp, Homo sapiens
ggagttcaagaccaccgtgaccaacatggtgaaaccctgtctctgctaaaactacaaaaattagcctggcatggaggygggcgcctgtggtcccagctactcgggaggctgaggcaggagaatcgctttaactgaggagcggagattgcagtgagccgagatggtgccattgcactccagcctgggcaatagagtgagactgcctcaaaaacaaacaaaaaagtaagaaaaaataactatagttttaaaatatgacatttattttttacttaggtaaaagcaggtaattgaattataagaagtatagccctaactgttcaacaccaatttctaaaattctattggttttccacatattgttttaaatccccaattttacattaattccatagaatctattttgcttttgaagaagaaatggaaagaagaaagggggaaaaacagaaaggagcctcttgttgacaatatatttactagactgtatgttaggtagtttacttttattttattctctttagaactcttcataatatatatctgcagaaacaagctagttttagcgcagttagatcacttgct

SEQ ID NO: 356080 - DNA, 579 bp, Homo sapiens
ggagttcaagaccaccgtgaccaacatggtgaaaccctgtctctgctaaaactacaaaaattagcctggcatggaggcgggcgcctgtggtcccagctactcgggaggctgaggcaggagaatcgctttaactgaggagcggagattgcagtgagccgagatggtgccattgcactccagcctgggcaatagagtgagactgcctcaaaaacaaacaaaaaagtaagaaaaaataactatagttttaaaatatgacatttattttttacttaggtaaaagcaggtaattgaattataagaagtatagccctaactgttcaacaccaatttctaaaattctattggttttccacawattgttttaaatccccaattttacattaattccatagaatctattttgcttttgaagaagaaatggaaagaagaaagggggaaaaacagaaaggagcctcttgttgacaatatatttactagactgtatgttaggtagtttacttttattttattctctttagaactcttcataatatatatctgcagaaacaagctagttttagcgcagttagatcacttgct

SEQ ID NO: 356081 - DNA, 585 bp, Homo sapiens
aatttcacatctagcactctgttggtgatttactctgccatctatttgagtccttattcatgtgtgtaccaagaggtcatcatcaatacatagacacacatatgagaggaaggaagatagaatgctgtgttatttaaaactaaccatccccattgcagagagaaatcatcagggacccactgagaatattgtggyggcttcttcaatggactgcttgttgatgtgatgtttcctaatgttttcagcaatcactccatggtttatcaccctgatgtgaagatgggtttgagtgtttgaagtgtgagagaagtttctcaagcagatagagtgaactaattttcagccattaataacgtgtctatttctattttctttctggcatctccaggactacattaaaggctcactgacctgttacatttaatttgagaaaaaacaaatccacttttgaaatcatggaaaccagaaacattagaaagaacagaactctattttcacccctagaactgaaaatagtggttatggtttgaaatgctttacaatgggaacataatatgattgttattagaatagaaatgtctccag

SEQ ID NO: 356082 - DNA, 563 bp, Homo sapiens
attttcacccctagaactgaaaatagtggttatggtttgaaatgctttacaatgggaacataatatgattgttattagaatagaaatgtctccagagttttgaaatacatattgtttttatttactcttaaagcaatgccattctgacatattttaaaattaagttttaatatcttaaaaatattttaaaatattttaaaaataagttttgtaattcaggtgttgcattttcattctcacaaatgcctttggttatgagctttccaaaagggagtgcaaaaaaggtgaaaagggaagggagccccttggcccagcactaccgtggctrctttagcttcctccatcaggatctgtgtttgtgtacctagcagttcacttcttctcaaacatatcattatcctgtgcttatccatttccatttattggaaataatgtttgtttaaagggaatattaaaatttgttactgggtgcattgacttaatttgatatttattgaatgcccactatctgcctattgctgttattaaaaagaaagacaggtttttgcttttgtatagcttac

SEQ ID NO: 356083 - DNA, 568 bp, Homo sapiens
gtcctggatccctgtgctgtgtgtggcctaggcacttggtgccctgtgtcccagccactccagccatggctgaaagtggccaacatagagcttgggccatcagttcagagagtgcaagccttaagccttggtggcttccatgtcatgttgagcctgccagtgcatggaagtcaagatttggggtttgggaacctctgcctggatttcagaggatgtagggaaacacctggatttccaggcagaagtttgctacaggggcagggctctcatggagaacccctgctaggacagtgcagaagggaaatgtggagtkggcacccccacacagactcctcactgaggcactgcctagtggagctgtgagaagagggccaccattctccagactccagaatggtagatccaccaacagcttgcactgtgcacctggtaatgctgcagatgctcaataccagcccatgaaggcagctggaagggaggctgtaccctgcaaagccacagggatggatctgcccaagactacggggacctacctgttgtatcagcatgacctggatgtgagacatgg

SEQ ID NO: 356084 - DNA, 633 bp, Homo sapiens
gtaacaaactgaaatcaagtctttagaaggcaccatggaagaattgcatgtaggtaaatatataggaatattttgtatatgtaagataaatatgcatataaactatatatgtaaaaatttatatatgaaaaataaaaccccaatctaaaaccccaatctataaggaaaaagattgctgacctcaactagatcagcagcagcagcaccaccatcatctacatgtaaaacccataataggaaaaatgcaaaagacaaatgacaaatgaagagaacatacttggaaggactgatatttttaacattgctcttttaaaaaaacattccaataacctagtaggaaaacaatmagcaaaagacataaaaggatggttcacagaaaaaatatataaatggctcaaatatatgagaagatgctcaacttcactcataataagagaaatacaaaccaaactatacaaagataccaattttgcatagtggtttggcatgcatattgctgttggcaagggttgagggagcaggcactctcagacgttttggataagaatgtaaattgctgtaatctctttgtggcagtgcagggtgttaaaagaaaaacttcagctgaattaaatttaaaggagtttaattgaa

SEQ ID NO: 356085 - DNA, 586 bp, Homo sapiens
tgtgtgtttcacaggaggtgcagggaaaacgttcactgtgtcccaaccatcttttatctgcacattcagacttggatgtaaacaaaaaggagagggtgatattaggagagcttgtagctagatacagagcaatgcgataaagggagattaaaagagtgtttttaaaggcttaaaacatcaaagataagcatctgacaaagagcattcaaggcaaagaacaatagattagagaggtagctttgataaattttcatgctgtggaaacaagaaaaaagaaataaaacatctagaaggagcccaaagacctctttgcctatgcactattaataactaaagagaaataaaaaacaactaytcttgacaaatataatgatgacagctttgatgtttctgtgctagtcaaggatgaatgaagaatacgtagcttctaaatacaaatatatgtgtaagttgcgataaaattacattatgcagggccttatcactatctctagatctaagtggagtctagtttagatgttaataaataattctggatggatttcaggatccctctgagggctacttgtggtttagtcattaatat

SEQ ID NO: 356086 - DNA, 597 bp, Homo sapiens
atgccagtgatacaggagctagatagaaattatttaggcagatagggtaaartcctcagcaaagcttcccttttaataaaaagcagcccctccattatttgttttctaacaaagagcagcctgaaaaactgagctgcagacatagacaagcaagctagaagcttgctcgggtgaatgcccgcagctgtgccaatagaaaagggccacctggaggctcgacatgggggttccaccttcccttttctttgtcaccacgtgtacagtaaggaacaggcaacatggtgctggtcaggtagagaacccatctgcataataaaagattaaagtggaggtggccagattttcgtgcactatgcaaatagcacaactggtctgatcaatcttctgtgccctatgtaaatcaaacgccgcctcctcaagcttatctacaaaacctcttactgttcactgtggaagcggcaacccattttcgctgggacccccctctctgcagcagagagagcttttctttctttcacctgttagacttcctctctgaatctcatcctggtgtatctgcgtcctagttttccatgcccgtgggacaataaacctcag

SEQ ID NO: 356087 - DNA, 574 bp, Homo sapiens
aaagacctctttgcctatgcactattaataactaaagagaaataaaaaacaactattcttgacaaatataatgatgacagctttgatgtttctgtgctagtcaaggatgaatgaagaatacgtagcttctaaatacaaatatatgtgtaagttgcgataaaattacattatgcagggccttatcactatctctagatctaagtggagtctagtttagatgttaataaataattctggatggatttcaggatccctctgagggctacttgtggtttagtcattaatatcatgcagacgtgttcccaagtaattaaaagcctttgagatgtctagtctgaacaaatctaccaaactctgaatcagttgaattttcaccttccacctyttagcgtgttcagccaatagagaacctctagctcttgctgaaccacagaaagcacataaaaaaacaaactcttcttcacctcctcccttgtgatagcagtaatatttttttttaatccagagcctgtggagccttattatctggggggaaatgtaatgaaagaagggaaaagacgtgccacatggcccc

SEQ ID NO: 356088 - DNA, 528 bp, Homo sapiens
gacatattttcaaccagaataaaattgagacctttatgtttagcatcttttaagcttgtaagacaccttgataggatataagtctcttcattatgcaaatgataaaacmaaggcctgagaagttaaatcatcttgcccaaggtcagatagctattgagtaatagagagtggcattcaggctttttttttttttttcattcaatgcaaagttgttcaggacctactaagtgctaagaagagaagcactacattaggagtaagaaacacacccatgagaaagatagaggtaccctcatggagattttgttacagtgagggaaaaaggtaaataaggattaaaatgttggcaaattgtgatgtcattaaatacagaataaaaggaagcctccaaagaaggtggtcaggaaagctttgctgcagagggcacatacagcctgagtcctcaaggacagccagtcagctacaggatgcactggggagcagcagagtggagctggtacttaggggaggggtggtccaagcccaagt

SEQ ID NO: 356089 - DNA, 608 bp, Homo sapiens
acaatctgaagcattcatttctctcagcttattctaaccaactcactcaccttctaccaccattttaaatgttgctatatcttctccccacatttaattatttttagtctaaggaaaagaggtgtcacttaccctttttccaatttgtttctctaagggatgcacatagccatgtggctttcctggagccttgttactctggctgattttcatcttctatatctccatcctctccttcctcttgattcctttcttgcagtgcacaacatgcacatgtttctcagaccttaacacagctctcaracaggcaactccttccagctccaatccttgaaaactataatctgtattttatcttcccattttcatttttcattcactccatggaccctgtgaactgttttaacctctttcattccactgaacagaagaggtagtggaatggagataacatgttttgaagtcaaacaaatggattagagacccaagtccatctttacttgtgtgactttcgggaagatacttgacttcctaaaattgagtttatagatctataaaataaagacagtgatattaataccagtctcacaggttataggaaatattaa

SEQ ID NO: 356090 - DNA, 566 bp, Homo sapiens
ctttacttgtgtgactttcgggaagatacttgacttcctaaaattgagtttatagatctataaaataaagacagtgatattaataccagtctcayaggttataggaaatattaaaagaaagaatccatacaaagaacagcacagcatagaaactcatcgagaattacacgaatgttagccattatttaaactgtactagcaaaattcactaaatgttcaactaattgttaaatccaatggaatgctttcagacctagtctctacagcttccttttgctatctgatgttattgaacatcttaaacttccctaagccttgaccaccataacaccactttatcctgattctcattctacaccctgactattctttcttggtatgctgcattgatacttctacctctacttcctcttgtttccttggactacttccattatcattctagacctcccttctggtcattcacagggcctcagttgccatctatatgtgaatgactctcaaacctcactttcaccagccagtttctctgtgagctctagatgtatacacgcattcaactgtct

SEQ ID NO: 356091 - DNA, 566 bp, Homo sapiens
ctttacttgtgtgactttcgggaagatacttgacttcctaaaattgagtttatagatctataaaataaagacagtgatattaataccagtctcacaggttataggaaatattaaaagaaagaatccatacaaagaacagcacagcatagaaactcatcgagaattacaygaatgttagccattatttaaactgtactagcaaaattcactaaatgttcaactaattgttaaatccaatggaatgctttcagacctagtctctacagcttccttttgctatctgatgttattgaacatcttaaacttccctaagccttgaccaccataacaccactttatcctgattctcattctacaccctgactattctttcttggtatgctgcattgatacttctacctctacttcctcttgtttccttggactacttccattatcattctagacctcccttctggtcattcacagggcctcagttgccatctatatgtgaatgactctcaaacctcactttcaccagccagtttctctgtgagctctagatgtatacacgcattcaactgtct

SEQ ID NO: 356092 - DNA, 648 bp, Homo sapiens
atctcctgtttcgtttcttagtgaggttatttggattttctctcttcttttcttggttaatcttgccaaaggtctatcaattttatttaactttttgaagaaccagctttttgtttcatttattttttgtaattttttttgtttcaatcttatttagttctgctctgatcttggttatttcctttcttctgctgggtttgggtttggtttgctcttgtttctctagtttcttgaggtgtgaycttagagtgtcagtttgtgcactttcagtcttttttgatgtgggggtttagggctatgaatgttcctcttagtaccacctttgctgtatcccagaggttttgaaaagttgtgtcattattgtcattcagtttgaataatttttaaattttcatcttgattttgtttttgacccaatgctcattcaggagcaggttatttaatttccatgtatttacagagttttgaaggttccttttggagttgagtttcagttttattctactgtggtctgatagagtactcgatataatttcaattttcttaaatttattgaggttcgtttcatggtctatcatatggtctattttggagaaagttccatgtgctcttggatagaatgtgtattctgtggttgttggatgaaat

SEQ ID NO: 356093 - DNA, 648 bp, Homo sapiens
atctcctgtttcgtttcttagtgaggttatttggattttctctcttcttttcttggttaatcttgccaaaggtctatcaattttatttaactttttgaagaaccagctttttgtttcatttattttttgtaattttttttgtttcaatcttatttagttctgctctgatcttggttatttcctttcttctgctgggtttgggtttggtttgctcttgtttctctagtttcttgaggtgtgatcttagagtgtcagtttgtgcactttcagtcttttttgatgtgggggtttagggctatgaatgttcctcttagtaccacctttgctgtatcccagaggttttgaaaagttgtgtcattattgtcattcagtttgaataatttttaaattttcatcttgattttgtttttgacccaatgctcattcaggagcaggttatttaatttccatgtatttacagagttttgaaggttccttttggagttgagtttcagttttattctactgtggtctgatagagtactsgatataatttcaattttcttaaatttattgaggttcgtttcatggtctatcatatggtctattttggagaaagttccatgtgctcttggatagaatgtgtattctgtggttgttggatgaaat

SEQ ID NO: 356094 - DNA, 439 bp, Homo sapiens
gtcccatggggtattcccttgatgtagtactctccccctttccctgtggatgtggcctcctgtggccaaactgcagtgattgttatctcacttctaggtctagccacccagcgagtctacccagctttgggctgatactgagggttgtctgcacagagtcctgtgatgtgaactgtctatgggtctcagccatggataccagtgcctgttccagtggaggtggtggggtgggtacaatggactctgtgaaggttcctagctttggtggtttaatgctctgtttttgtgccggttggcctcctgccaggaggtggcactttccagagagcatgagctgtggtactatggggaggaataagtggtgggyggggcctaggactcccaagattatatgccatttgtcttccactaccaggatgagtagggaaggaccctcagg

SEQ ID NO: 356095 - DNA, 439 bp, Homo sapiens
gtcccatggggtattcccttgatgtagtactctccccctttccctgtggatgtggcctcctgtggccaaactgcagtgattgttatctcacttctaggtctagccacccagcgagtctacccagctttgggctgatactgagggttgtctgcacagagtcctgtgatgtgaactgtctatgggtctcagccatggataccagtgcctgttccagtggaggtggtggggtgggtacaatggactctgtgaaggttcctagctttggtggtttaatgctctgtttttgtgccggttggcctcctgccaggaggtggcactttccagagagcatgagctgtggtactatggggaggaataagtggtgggtggggcctaggactcccaagattatatgccrtttgtcttccactaccaggatgagtagggaaggaccctcagg

SEQ ID NO: 356096 - DNA, 587 bp, Homo sapiens
gttccaacgttgttgcaataaaattaacatgttttgctctaactttaaaatcctcatcttttattaaaattatgattcaattattcattaattataatatgcttaacatttcaataattaactagcgttaacagtaagagaaaatttttaatttattttcaccctttaaaatatttcattgttcttgccattttcatctacttcctaatgtcccaggactacaaaacatcagaaattatttgagtttcaaggtaaagattccctcttctttcttttarctagtccctgaagaacaataagaattgtgtttctattcattctctctgtctctgtctctctttgtttttctctcactctttctttctccatctctctttctctccaaagagtatttagggcttgggaagattcaacacattaaatatattaaataatatgaaaatacccaacactagttaaaaaaaaaaaacgcatgtacatttccctaacagctttgatatgcataaatagcaaattcatacatacagagacatactgaaacagtttatgtcatcaagtaatgctacctcaacaactggaaaaagttc

SEQ ID NO: 356097 - DNA, 628 bp, Homo sapiens
aaggagtggtgaaaaggaaatggcagaaccaaacttgattttataaaagtagaaaaagagcacaaattgtttaacgtatttttaaaagttatttatttttagcaaaagctgtaatgctgctttatgtgcaagagatatttcagttatcaaattatgttcygtgataccacctggggcactctttataggtatcctcagaactaggtacatgttatattatgtcccaaatgttcaaaatcaaacaagatagtcattttcaatatgtctaggacctacttcaattataacacaagaactacattcaaatttagttttccaaattcaaatgcaagtttatgactttattttgttcttttaaaaaaaaggctatatttgtttatttttgatgtttgcacatccatgcttattgcagcattattcacaataaccaagagatggaagcaatacaaatgtctatcaacagatgaacagaccaagaaaatgtgatacactcacacgacgggacaccattctgtcttaaaaaggtaggagatcctgtcctacgctgcaacatggatgaaccttgaggacgctagaccaagtgaattaagccaatcgcaaaaagacaaatactgggctgggcacagtg

SEQ ID NO: 356098 - DNA, 597 bp, Homo sapiens
atgccagtgatacaggagctagatagaaattatttaggcagatagggtaaagtcctcagcaaagcttcccttttaataaaaagcagcccctccattatttgttttctaacaaagagcagcctgaaaaactgagctgcagacatagacaagcaagctagaagcttgctcgggtgaatgcccgcagctgtgccaatagaaaagggccacctggaggctcgacatggsggttccaccttcccttttctttgtcaccacgtgtacagtaaggaacaggcaacatggtgctggtcaggtagagaacccatctgcataataaaagattaaagtggaggtggccagattttcgtgcactatgcaaatagcacaactggtctgatcaatcttctgtgccctatgtaaatcaaacgccgcctcctcaagcttatctacaaaacctcttactgttcactgtggaagcggcaacccattttcgctgggacccccctctctgcagcagagagagcttttctttctttcacctgttagacttcctctctgaatctcatcctggtgtatctgcgtcctagttttccatgcccgtgggacaataaacctcag

SEQ ID NO: 356099 - DNA, 562 bp, Homo sapiens
gaaaataactacctgcataaatgtatatgattgggcaacttgtaatatgtgtttcacaaagtagaaatgaaatcactgcatcatttcaaatatttgaacaacatatgttgatgtgtaaagtgtggtagaaaaatgggcyatttttacagaagtccaaaaatgttgcagtgattatatgtgttgctagtttccatttattttataatattatatggtaagttttggtcttcacataaacttttttccttgttcattttgagggagaaagagcaagtgcaaggaattcccatttttagcaccatgactaactaattcaaagcagcttaaaatgctggaaaatatataagacatctttttaaatacatatttgatgaataaggcctaaaggaaagaaagcatatctcagaagtcaaataaagatattaaaaaccacattataaagaggaacttgataattttgctggaataggggtgaaagcaaagcaaactcaggaacaaagggacttgggttttagtcgccaatcctgtcaagagaaaaggtcttgagactggtcaaagtaaa

SEQ ID NO: 356100 - DNA, 562 bp, Homo sapiens
gaaaataactacctgcataaatgtatatgattgggcaacttgtaatatgtgtttcacaaagtagaaatgaaatcactgcatcatttcaaatatttgaacaacatatgttgatgtgtaaagtgtggtagaaaaatgggctatttttacagaagtccaaaaatgttgcagtgattatatgtgttgctagtttccatttattttataatattatatggtaagttttggtcttcacataaacttttttccttgttcattttgagggagaaagagcaagtgcaaggaattcccatttttagcaccatgactaactaattcaaagcagcttaaaatgctggaaaatatataagacatctttttaaatacatatttgaygaataaggcctaaaggaaagaaagcatatctcagaagtcaaataaagatattaaaaaccacattataaagaggaacttgataattttgctggaataggggtgaaagcaaagcaaactcaggaacaaagggacttgggttttagtcgccaatcctgtcaagagaaaaggtcttgagactggtcaaagtaaa

SEQ ID NO: 356101 - DNA, 591 bp, Homo sapiens
tctgaccaattgaactgtaatgctacacctattatgaggagatcaccctttagtagaggaatttccaatagtggctactactcacatttcctggagggtaatgacatacatttatgtgggtaaaggcatgcattttaatctgggtggccaatattattaagtgctctctttctgactatgattgattgaattgtaataaaatcttgattgcattattcaatactgcaattatttttttagttgctagtaacgcttgtactgaccacagggaaatttctagggttctgaacaaataaaaataacttttayttgtgcagtaatttctcttggacaaaatgctttctcttatgttatctcatttaattacagggactgtgatatgaggtacatactattatttccattgcatacttaagaaaatgttcagaaaatttgagtggcttattcctctgcctcctaaatccattctcttttcagtctcatgtgttacctctgccttgtgctaatagtgggttatcatcagctcaccattagaggctgctagcaagcaaacctctggttcataaaactgaaaccctattttgaggttaa

SEQ ID NO: 356102 - DNA, 569 bp, Homo sapiens
tgcattattcaatactgcaattatttttttagttgctagtaacgcttgtactgaccacagggaaatttctagggttctgaacaaataaaaataacttttatttgtgcagtaatttctcttggacaaaatgctttctcttatgttatctcatttaattacagggactgtgatatgaggtacatactattatttccattgcatacttaagaaaatgttcagaamatttgagtggcttattcctctgcctcctaaatccattctcttttcagtctcatgtgttacctctgccttgtgctaatagtgggttatcatcagctcaccattagaggctgctagcaagcaaacctctggttcataaaactgaaaccctattttgaggttaagtttactctttacttccttggactgattgattttttagaagtaaatcagacttgttactttatttggcagaaaagtatttttaaaaaacttaagaaaatgtgcaaatttggtcactaactctatcataaggaaagtcaatgaaaaccccaaggcatttctaatgttttcactgcagaaaaggtcac

SEQ ID NO: 356103 - DNA, 569 bp, Homo sapiens
tgcattattcaatactgcaattatttttttagttgctagtaacgcttgtactgaccacagggaaatttctagggttctgaacaaataaaaataacttttatttgtgcagtaatttctcttggacaaaatgctttctcttatgttatctcatttaattacagggactgtgatatgaggtacatactattatttccattgcatacttaagaaaatgttcagaaaatttgagtggcttattcctctgcctcctaaatccattctcttttcagtctcatgtgttacctctgscttgtgctaatagtgggttatcatcagctcaccattagaggctgctagcaagcaaacctctggttcataaaactgaaaccctattttgaggttaagtttactctttacttccttggactgattgattttttagaagtaaatcagacttgttactttatttggcagaaaagtatttttaaaaaacttaagaaaatgtgcaaatttggtcactaactctatcataaggaaagtcaatgaaaaccccaaggcatttctaatgttttcactgcagaaaaggtcac

SEQ ID NO: 356104 - DNA, 630 bp, Homo sapiens
gttgtaatacctctaaagtatagccagaaagtgggaaaacaggagtcaagcccagatattcttaaaagtttagcttatttctattttaccaacctgaccttcattcaatttgccctttctaacttgaaaggaagtgtatcccttgttttctcatgttatttactgaatagagcattataataccaatcagaatctttccagagaggttctgccagagaacacaggtggagatcagcttactcacaagagctggctgctgggtgtcgctgtaacctctgtcccactcctcatggaagccaaatgtcagaggtgggttctgaggtcagtctagtagggggaacttgcttcttcaaactcagtgcttggggtgagtcgagaaactgctctcattgccctcactcaccttgtaactagatacgtgaaaggaggagagagaggttcaagcctccacttagagccacagtggacaaactgctwtgaagcaccatgcattgaggttcctgcccagagttcctgctagacttaaaaccatgccagagcaagtgatactttgaccttacttgtacttaggaaatagggtgtttgagttggaaggaatacacagtgttttcgtaccttgcttgactgtca

SEQ ID NO: 356105 - DNA, 559 bp, Homo sapiens
aactgctttgaagcaccatgcattgaggttcctgcccagagttcctgctagacttaaaaccatgccagagcaagtgatactttgaccttacttgtacttaggaaatagggtgtttgagttggaaggaatacacagtgttttcgtaccttgcttgactgtcaggccttcctccccaagctcccaaagaaggattataaaagttgctaacgggtttgaaagtagaacatatgggattccagmattacaaaggaccttgtgaatttctaacttccttgttttatgagggaactgaatcccagaaaaagtgacataatgtaaggtttgagcccttagcatggccaaggtcttcatctgcctgcaagacaagacccagcgaagtcttggcccactctcctcctagtcttctttcacctgccctgcctctgactccctgccccctgtctgtttgctgaactcgccttgcatgttcatatctgtctataacactcttgccccagatacttgttggtgaactcacttagcccagtttttagatgaaatatcgccccccccttttttt

SEQ ID NO: 356106 - DNA, 457 bp, Homo sapiens
cccccccttttttttttgcaatgctttcttagactggccctctaaaatagcatcttcatccttctctgtccccttattctgatttcattttctttatagcacttgtccactttcatttgtcttttcctatgagccccaagaaggcaggttttttgttttgttttgttttaatgtggtatccttaagcaagtgtgtcatccaataaataataactgaaagaataagtgggtgagtgaatacccatttgttctgttttgctcactatgttctacttgaaggataaatatagaactgtatttattcttcaggtattgccttctccagaattctctattgtcatttggctaaaggctcctcattctgggtttccacatcactctctmtcttagcacttagcaaaatatgttgtgtcaccctttaccatacatcttgactcaggcttctttggacgcagtcc

SEQ ID NO: 356107 - DNA, 604 bp, Homo sapiens
gctgttaaatctaaagccgttattaggtttttatacttagatttactctagatgggactcacctacctttctttgtctcagttgaaatttgtgctaatctttaaatgaatgtttacatttacagccaaattgctctgttataacatataactgcattataacctgtaaccttacacatttaaagaatatggcactagttattcccatcacaaatatgggcattttgagaagacccagtggcactatgaaaatgttttgaaggagtaaagaaaaacaaaaactaaacaatttatttttacggactaagccatctcaaattttggaacaagataaatacatcaattgactttaaagtactaggttataatcaaaagtcatttgcctttcattttccagtataaagaccttytggatacatagtacctttatacgtcagaaaatcttgaccctttttttttttttttgatttgtgtgttttaatgttattactcaatacaaatttgtggccacaaaactcttatgaactaacacagataaaacagtttagcatatttttgatggtttagtaataggtgattaataaaatagttttataagttgaacc

SEQ ID NO: 356108 - DNA, 601 bp, Homo sapiens
tatcccagaattactttttttcttagcttttattcctctgagactgacattataatagatgtttcactttaattttctcatctgacctgtaccattgtgctgtcctttaagattcttattcccattttacagataaggaaacgaaaactgagaaagtaaataattttcacagagaatctcatattaagtagtgaggccatgatttgagccagtctgactccaaagtccaccattttcactacactgtgttctatttgttcaaaagcaaacagatcaaatccagtctggagctttctgaagaccttagggcatggggtcttttttttttaaataaaatagargaacatttcttcaacctaactatatccctcacttctcctaaagagagattttaaagagtgaaaccctccacagtgcatattataacaaaagataaggtcatctttctcaatattttctcagagctctagaatttaagagtattcctctagtgctagtagtacattccttcatatttcttgaagtgcctttgaacttaaatggtattaacattctagcaatttcaagggatctattatcatcatggtgggagacatttcct

SEQ ID NO: 356109 - DNA, 366 bp, Homo sapiens
acaaatcccgaaaaccacagagctggcgacggtgtgggtaggctggaatacttacccgttactggtgcatgtgtggggatggttacaccactttggaaagctttttgacagtttcttatatggctgaacatacatttaccctaagatccagcaattcttctaggtctataacaatgataaataggcccaccaaatacttgtccaaraatgtacgttcatagcaactttatttgtagtagccaaaaactaggaacaaccccaacgcccatcaacaacagaattgatcaacaaactgtagtatatccgttcaatgaaattctactcagaaagaaggggaggaaagcaggagaaaaagaaagaacaaat

SEQ ID NO: 356110 - DNA, 555 bp, Homo sapiens
gagtaaggatgtgagcccaagcccagcccgttctcccactaataccacccctgctccctgccccgctcctggccaccattgctgtcacctcccaaaggtgccacctgtgcctgcccaaggccttgagatgcaaacaggaaaagcctcagtagctccagaggtgaagcacaggtcagggattctcaacacagaaaaggctatgttctgcgcggccaaggtgcagaaacacagcccccgcgcagcaccaggtgcttggaggagatgtgctgkcctacagaacaatgggtcaggtgaatattgggtgttacagcttccacagggctgtgtgagcttcgctccccctccagactgggagctctagcacaccacgcccatgcctggggtgcacaccgtccccagcaagtgtccttggattgaatggctgtagtagagttcctctgttgccctgttgatggcatttgacaataagcagtgtgctggactgtcccactcactctcaggcggaccactagttgagccccccagaacaggcagcttcccaccctgtcctacagc

SEQ ID NO: 356111 - DNA, 558 bp, Homo sapiens
cacaccacgcccatgcctggggtgcacaccgtccccagcaagtgtccttggattgaatggctgtagtagagttcctctgttgccctgttgatggcatttgacaataagcagtgtgctggactgtcccactcactctcaggcggaccactagttgagccccccagaacaggcagcttcccaccctgtcctacagctgaactggaggagggttcctagagggactgctgggacactggaggcccctggggaggaaggagtttcaaaagggagccagtggctggcccaggtgcagcagggacacggttgagggaacacagaccacacgtttgttgttcttgttgggacgggccacctgtcccagcgagacggtggactggctccatgcctcaccctgagccccagccagcaagcatcctgaaccarcaagacacctccaatatctccttcctctgggtgggtcccagtgggacgtaggaccctggctccttggacccctcctaccccaaatccattgagaggtcatggccccacccccagacacccaaagagccactcttg

SEQ ID NO: 356112 - DNA, 587 bp, Homo sapiens
tccacacctcttctgtggtgaggatgtcacctccactgccagtcaatatggcacccaaacaaggcttgcaggcttgggaggcacacagcctagatgtgagtcccagcttcgtcacctcccctctgcaggcctgcctggacctcggctcctccactcccatcctgtggatgctgcctgctctccggtgcacctcgagggtcacttgagaccaggcactttgttgagaaccgcgtctgctgcacttgtactgatattgtttggytgtgtccccacccaaatctcatcttgaattgtagctcccataattcccacgtcttgttggagggatctgatggaagataattgaaccataggggcggtttcccccatgctgttctcatggcagtgagtaagtctcacaagatctcatggttttataagggtggtggtcttggttcttattctctcttgtctgctgccatgtaagatgtgcctttcaccttccaccatgattgtgaggcctccccagccatgtggaagtgtgagtccattaaacctctttttctttataaattaccagtctcaggtataactttatcagcagaatg

SEQ ID NO: 356113 - DNA, 587 bp, Homo sapiens
tccacacctcttctgtggtgaggatgtcacctccactgccagtcaatatggcacccaaacaaggcttgcaggcttgggaggcacacagcctagatgtgagtcccagcttcgtcacctcccctctgcaggcctgcctggacctcggctcctccactcccatcctgtggatgctgcctgctctccggtgcacctcgagggtcacttgagaccaggcactttgttgagaaccgcgtctgctgcacttgtactgatattgtttggctgtgtccccacccaaatctcatcttgaattgtagctcccataattcccacgtcttgttggagggatctgatggaagataattgaaccataggggcrgtttcccccatgctgttctcatggcagtgagtaagtctcacaagatctcatggttttataagggtggtggtcttggttcttattctctcttgtctgctgccatgtaagatgtgcctttcaccttccaccatgattgtgaggcctccccagccatgtggaagtgtgagtccattaaacctctttttctttataaattaccagtctcaggtataactttatcagcagaatg

SEQ ID NO: 356114 - DNA, 528 bp, Homo sapiens
attccaaaataaacaaaaactgtgaatttgctgctagcatacctttcctataagatatattaatgaagtctttcaggctgaaatgagacacttactcaaatccacacacaaaagtataaagaacaccaataaagrtaactacaaaagtaaatataaagacaatataaataaatttttgtttgtacctctttttcttctcctatcagaattaaaagacaactatataaaaaaatttcaaagctttgttaactgccttataatgtataaaggtatcatttttatgacaataataacaaaaagaaacagggagaaaacagagctatattttttacataacgggaattaagtcagtattaatccgagctaagttattttgagttaacatgttaattgttatcccaatggtaaccactaagaggattatataccatgaacaagttgggtttattccaggaatacaaggttgatttaacatgtgaatgcaatgtattattaatgtaatacaacatattaatagagttaaggaaa

SEQ ID NO: 356115 - DNA, 435 bp, Homo sapiens
caatgtactcatttccagaatatataaagaacccctaaacatgagcaagaaaaaggcaattttatagaaaattgacaaaagctttgaagaggcacttcaacatgaggcagacacacatggcaaataaatataatacagttgatcatattcattagtcaggaaaatataaattaaaccacactgagatacagctatgtccccaccagaatgacaaaaataaagtaacataaaattaaacagaatagcccagatgtttgtgaatgacatgatttggttgtgtccccacccaaatcttatcttgaattgtagttcccagaatccccatgtgacatgagagggacccagtaggaggtcaytgaatcataggggcagttacctccatgctgttctcatgatggtgagtgagttctcaaaagatctgatggttttataagg

SEQ ID NO: 356116 - DNA, 550 bp, Homo sapiens
agaaagcccccttccctcactctgcagaacagttgcatccatgtgaccctgagacagaagccctctgctcattatcaaagatgtgacagctgccacttggtcactttagaatcaacagtcctaggccccttattgacagctcccggctcccccagctggactggccagggggattgcctctcttacaaatcccctccaggatgcagcraatagaaaacttgcatttagaaaaaggatggaccaggattctgggtgtgaggggcattatccattgtacaagagggtttccggtatgtcccatcctaaatatctagcttcttttaatgcccttacaatagattcattgtaaggatttgagcgttttagggagtaggtctaaactgaagtctgctgccctgttgttggagtcccggcgtatctggaggtgagaagggcactgccctctgagcaaatgcccagtgaaattgcagaaggaggtgggtgtggggtggggaggaaggaaaagtcatgcgggccacttgtcccatcgggcggcttcacaaggtcatca

SEQ ID NO: 356117 - DNA, 543 bp, Homo sapiens
tgtttctttattgtgataaaaaattattcaaaacattgttcatgcagctgcacaataatccatcatgtcaatgagccacaatcaatgtctcctctaattattaggtttttccacttgttccttattttaagtaatgatgctattaatggatttgcacacaaatgtttatttgcatctatgatcatttcagcagaacagattctcagacaggagatygatgagtgatggacattgcatgactatgctcagatcagctatcactcagtggaaagtctgtggattcgcactacagccagcaaggcacagcagggccagtcctgctgagacaagggacattcatttctaaagtcagagcaaagggaaataaatttcacttagcgaatttcacaatcactcctgaaacattcattaacatctggaaatgttacagtgagccacaatggcctccagccctggcatcgtgacctctcaaggtcacgggaagagactcatcctcctctcctcccatctccctttatagctgaggcctcaacagctcccacc

SEQ ID NO: 356118 - DNA, 653 bp, Homo sapiens
tgtatccagccttatgaatggccccaaagcaatcttgctttcttgattcctgtgtgcagatgattcactgatgctcactcttggcatggattctattaacttccatcagcagcgtcccaagtagactgcagatcctttggtgcccgggatttctgtcttatccttcttaggagctgctacagctccaagtgtaacatctgatgcacaaagtgtgcataaatatttgttggttggtttagatctgaaataggagtttggagaaaggagcagcctgcattaggtgaaatagtctaaaatttcaactccttcatatgatgcagtaatctgtgagatgtccaagcatcttgtgggggacatttctagaatgttctagaatttcctagaatattacacacccacagagtaatgagcagagcagatcagatcatcagatctaatcagagaggggatatgatgatcctggcagtagactgacatatgctacctctcattcaccacaaagggacacaccctgctacttggcccacacagcatctgtttttccccctttctcactcacaaaaccatggttcgtttrtagtgacatgtgcccaactaaaatgacagctctcccagattcccttgagaataatgatggccagataacccaagta

SEQ ID NO: 356119 - DNA, 542 bp, Homo sapiens
ctggctcatgcctgaaatctcagcactttgggaggccaaggagggaggagctcatccaaggtcacacagcttcaaagtgatgacatatggatttgcttctgggtctgtgtcwgtctcctgcggcggctgtcaaaaattgccatggactgggtggcttcaaacagcagaaacttactttctcacagctctggtggatacgagtctgaaatcacggcgttggcaggatgatgttctcgctcgtggctccggggaagaattcttcctggcctctttcagtggctggtggcttccagcagttcttgttccttggcttccagcggcatcgctcccatctctgcctcggttgtgatgtgaccgtctcctccctgtgtgtgtctgtgttttcaccggtcagtggatccagagcccatcctaatctagtatgacctcattttaatgagattacatctgcaaaaccctccttccatataaggtcacattctcaggggctggggttggaacttccatagctcttttcggggaacacgacttaacccacacca

SEQ ID NO: 356120 - DNA, 542 bp, Homo sapiens
ctggctcatgcctgaaatctcagcactttgggaggccaaggagggaggagctcatccaaggtcacacagcttcaaagtgatgacatatggatttgcttctgggtctgtgtctgtctcctgcggcggctgtcaaaaattgccatggactgggtggcttcaaacagcagaaacttactttctcacagctctggtggatacgagtctgaaatcacggcgttggcaggatgatgttctcgctcgtggctccggggaagaattcttcctggcctstttcagtggctggtggcttccagcagttcttgttccttggcttccagcggcatcgctcccatctctgcctcggttgtgatgtgaccgtctcctccctgtgtgtgtctgtgttttcaccggtcagtggatccagagcccatcctaatctagtatgacctcattttaatgagattacatctgcaaaaccctccttccatataaggtcacattctcaggggctggggttggaacttccatagctcttttcggggaacacgacttaacccacacca

SEQ ID NO: 356121 - DNA, 542 bp, Homo sapiens
ctggctcatgcctgaaatctcagcactttgggaggccaaggagggaggagctcatccaaggtcacacagcttcaaagtgatgacatatggatttgcttctgggtctgtgtctgtctcctgcggcggctgtcaaaaattgccatggactgggtggcttcaaacagcagaaacttactttctcacagctctggtggatacgagtctgaaatcacggcgttggcaggatgatgttctcgctcgtggctccggggaagaattcttcctggcctctttcagtggctggtggcttccagcagttcttgttccttggcttccagcggcatcgctcccatctctgcctcggttgtgatgtgaccgtctcctccctgtgtgtgtctgtgttttcaccggtcagtggatccagagcccatcctaatctagtatgacctcattttaatgagattacatctgcaaaaccctccttccatataaggtcacattctcaggggctggggttggaacttccatagctcttttyggggaacacgacttaacccacacca

SEQ ID NO: 356122 - DNA, 522 bp, Homo sapiens
ggaagggatgtgtgtgtgtatgtgtagctcttcccttcctctcccataccatgggggctggcctggagagtgtgccttggtcttccttcccactgtgctactgtgctgtgggagctgatttggggagggggttgcagtcgccttcagagctggcagcttgttggggtgtctgtacaattcgrgagccccattgaggccacacagctggcttggtgggtctcctagcttttatcagggatacctacctgactcctgtctttctcaattgatcttctttcaaatgttgggtcagggaaaagggattgtattggcctcttaaaacctcaacatgaaaaaaaccaaaaactcaaatgtaaattatctgtttggagtacacagagggaaatcttgtttctgacccagaacctttgtctgagcccagaggtccctgagaaggtggggctggtgcagggtgatgctggttggttggttgagggggtagagcttcttggggtagagctttttttggggttgaggttattt

SEQ ID NO: 356123 - DNA, 599 bp, Homo sapiens
ctttgggccaagtgaaaccccctccctcggaggccccccttctgggactacaccttccacctgaatcttgtgccagcaacagaacttcttcctgcctttccagggggcagtaactaggtttgcatctgatggtggtcagtaaaagagataaaggaygcagggtcactgtttggaaaacaacccatggaaggaccccccacccaaccccattgattcacctacctctccagccacccaccctccttccctcataataatctcctcccagatgaaggagctttcagagagccaaaagggaaggtggaagacacagtctcttttggtggacacggggaagcaagatgaaaaaaaccacaggacctagtaaggtaccgtcaagatccacccagccacctcccctcccaccagaagtgattgaagcccctcttcctggctcttagagaaccgcaggggacccggagcagacagcaggcctttctgatgcttaaagttttagcatttaggacaatgccctgtgcttatcctctgtacacccctagcttcctggccatctttggagttcattcattcattcattcactcactcattcaacaaatct

SEQ ID NO: 356124 - DNA, 419 bp, Homo sapiens
cgtggtactgtttttagaggagcctagtcaacctgccctgggaggagacccagagctgctcccactagcccccctggctccctacccaggaagaggcatttgctgatgtctctgctcctctgggtgatgtcctggctcaggagctggtatctgccagttgtcacctgattctctgaaggctgagtaaggctggttttgcagttctcttttgtgttgtaattggttttctttttatcagttgtggaaatgtgtcttcatattctttgaaggaattgctacggattgcttgtgaaatcctgaaacattttcccttgactcctaggtctaagggggtgccctgaccagcatggatgcctctgyacttgtagcagggcagggcagggacactggcccccagtctgcacatgggctcccagggg

SEQ ID NO: 356125 - DNA, 548 bp, Homo sapiens
gtaaaattcctctctttttaccctctctctttatttctcaactggccaacacttatggaaaatagaaagaacctacattgaaatattggggatgggttcccccaatagttagagktcaccttgcagaagccaggacaaaagccagacctctgaagaagtgggggcatagtcttcgttacacagttatcacaatttgcaaccctattgcaacaaaataaatatttgccatataaacgtctgcatccagaagtgaaagcccctttgtaggaatgtttaaatttagtaagagctagatttgagttgcttcagaggagttcccactcaaactaatgtactgtaaaatacatcaaagtctagcatattttctgtgcatccaaggtgatgagtaagacaaacctgtgacagtaaagttattgaacatttataaagatgtggatgtaaatgacgtcatgttgatgccagagaatgactctgcctgaaacaatttccatcaataaagagctctcagtagcatgacttgatgattcattggacagttactcagcacc

SEQ ID NO: 356126 - DNA, 548 bp, Homo sapiens
gtaaaattcctctctttttaccctctctctttatttctcaactggccaacacttatggaaaatagaaagaacctacattgaaatattggggatgggttcccccaatagttagagttcaccttgcagaagccaggacaaaagccagacctctgaagaagtgggggcatagtcttcgttacacagttatcacaayttgcaaccctattgcaacaaaataaatatttgccatataaacgtctgcatccagaagtgaaagcccctttgtaggaatgtttaaatttagtaagagctagatttgagttgcttcagaggagttcccactcaaactaatgtactgtaaaatacatcaaagtctagcatattttctgtgcatccaaggtgatgagtaagacaaacctgtgacagtaaagttattgaacatttataaagatgtggatgtaaatgacgtcatgttgatgccagagaatgactctgcctgaaacaatttccatcaataaagagctctcagtagcatgacttgatgattcattggacagttactcagcacc

SEQ ID NO: 356127 - DNA, 548 bp, Homo sapiens
gtaaaattcctctctttttaccctctctctttatttctcaactggccaacacttatggaaaatagaaagaacctacattgaaatattggggatgggttcccccaatagttagagttcaccttgcagaagccaggacaaaagccagacctctgaagaagtgggggcatagtcttcgttacacagttatcacaatttgcaaccctattgcaacaaaataaatatttgccatataaacgtctgcatccagaagtgaaagcccctttgtaggaatgtttaaatttagtaagagctagatttgagttgyttcagaggagttcccactcaaactaatgtactgtaaaatacatcaaagtctagcatattttctgtgcatccaaggtgatgagtaagacaaacctgtgacagtaaagttattgaacatttataaagatgtggatgtaaatgacgtcatgttgatgccagagaatgactctgcctgaaacaatttccatcaataaagagctctcagtagcatgacttgatgattcattggacagttactcagcacc

SEQ ID NO: 356128 - DNA, 570 bp, Homo sapiens
gtaaaattcctctctttttaccctctctctttatttctcaactggccaacacttatggaaaatagaaagaacctacattgaaatattggggatgggttcccccaatagttagagttcaccttgcagaagccaggacaaaagccagacctctgaagaagtgggggcatagtcttcgttacacagttatcacaatttgcaaccctattgcaacaaaataaatatttgccatataaacgtctgcatccagaagtgaaagcccctttgtaggaatgtttaaatttagtaagagctagatttgagttgcttcagaggagttcccactcaaactaatgtactgtaaaatacatcaaagtctagcatattttctgtgcatccaaggtgatgagtaagacaaacctgtgacagtaaagttattgaacatttataaagatgtggatgtaaatgacgtcatgttgatgccagagaatgactctgcctgaaacaatttccatcaataaagagctctcagtagcatgacttgatgattcattggrcagttactcagcaccaactatttgcaagatagtgatg

SEQ ID NO: 356129 - DNA, 480 bp, Homo sapiens
gcatgagaacagattaatacagtgggtttgcccagagcctcaagttcttctgcacctgctctgcaattctcagtataccatattgattcctggaacccctgtctatccatccaacttctgaatctaacaaccctctgaatgatgtgacaaatatgtgcacctgccttggttccccatttgtgactcttcctgccataggtagctcagggaaaccctttccaacatcacccccagccccaggctgctcatgttgcctgctctctcagcccraactctgctgagcatgtctcagtcctaactatgaaatcccctctccataataccccaagagcttgtaaaaatttcctaaaaaaagacagacacagtggtgtgcacctatagtcccagctactcaggaggctgaggcaggaggatcacttgagtccaggagtataaagatgtaatatgctgtgattgcacctatgaatagccacagcactc

SEQ ID NO: 356130 - DNA, 549 bp, Homo sapiens
tgaattccataactgtacagaatgtagggatgggttaaggtaagagagtgaaggattttatcaagtaacacagcccaaagagcttctcaatgtaaataaaatgaaaaaatgataaacaagtaaataaacagctctcttatgatctaccctgggtttgactcccattcaagcacttgattgctatttgcattatctctgctattatatgtgaaaaatgggatgctgtgttggctaaagaagggttatatccaaataaattctctttagaaaagatggctcagataaaactcaataaaaatggccatttgagaggcattctttgtgctttttaacctgcattgtgccagtcaaggattactttgcaggtaataccaatgaattatatttaatcccccgattcattccttggatggtcggaaattattcccttatctttattatttctctccacatasccaatcattctcttatcttaagtatctcaggcttggttccattatgctatggtatgcacatagatttaacaccaggagatgttttccttgaatg

SEQ ID NO: 356131 - DNA, 564 bp, Homo sapiens
tttggggtatgaatgatcccatcacccaggtagtgagcatagtacccaataggtagtttttcagccattgcccatctcccatagtagtccccagtgtctgttctcgtcttcatgtcmatgggattcaccattcttgatatcatttgtgattcatgggaggaggtcaagatagtaacattaacagtttggaagaagttgattctaaccctcatgaatgactgggaagtttcaagacttcagtggaggaagtgactgcagaggtgatggaaatggtaagaaaactagaattagaagtggaacctgaagatgtgactgaattgctacaatctcacaataaaatttgaacagacaagaaattggttcttatggttgagcaaagaaagtggtttttcaagatggaaacttctcctggtgaagatgctgtgaacattgttgaaatgaaaacaaatgatttagaatattacataaatttagttgataaagtagcagcagaatttgagaggattgactcgaattttcaaagaagttctactgtgggtaaaatgctatcaaacagcatcacat

SEQ ID NO: 356132 - DNA, 557 bp, Homo sapiens
aaaactgtggtttaaatgggcaccaagagctaatatttccttctctttacaggattgcaaagagaattgggcaatttttaaaactctttatttgaaaataacttcaaaattacagaaaacttgcaagaataaaatatttaccctttacctagatttcacctactgttaacattctgccacatttgctttagaaggtggtcacccacttgttttatatattatacatacattttttggaactatttgaaattaagatggatacttgtggtcttttacccataaacatttcagtgtgtatttcctaagaataagtatgttctgtcatgtaaccacaatagagtcawtcttcagaaagtttcaactcaggaaatttaatattaataaatacatttatctactctcccacctatattccaattatttcaattgacccagtaatgttcaatagagatctattctaggatcatgcattgcatttattcatctcatttatttagtttcctctaatctagaacaatttcttggctcttctttgactttgatgatattgatgtttt

SEQ ID NO: 356133 - DNA, 560 bp, Homo sapiens
aacaaatgatttagaatattacataaatttagttgataaagtagcagcagaatttgagaggattgactcgaattttcaaagaagttctactgtgggtaaaatgctatcaaacagcatcacatgctacagagaaatctttcatgtaaaggagggtcaatcaacgtggyaaacttcattgtttcaaaaaattgccacagccaccccaaccttcagaaaccaccaccctgatcagtcaagcagccatcaatatcgaggcaagaccctccaccagcaaaaggatctgaatgctcagatgatcattagcattttttagcaataaagtatttcctaattaaggtatgtatattttttagacataatgctattgcttacttaatagactacagtatagtgtattacttttatatgcactgggaaacaaaagagtttgtgtgacctgctttattgtaacacttacttcattgaggtggtctggaactgaacccataatatctctgaggcatgcctgtagtatactattttaaatatattcccaacagatgcttttttattaaggcata

SEQ ID NO: 356134 - DNA, 501 bp, Homo sapiens
cctctcctgggctcaagtgatcctcccgcctcagcctttcaagtagctagaaccacaggtgcgtgccaccatgcccaaccattttttttttttttgtatgttttgtagagatagggtttcaccrtgttgcccaggctggtcttgaactcctggactcaagtgatctgcctggcttggcctcccaaagttctgggattacaggcgtgagccactgtgcctcgcctgaaatgcaatttttaaaacatgcttttggattatgggctctcaagctacctattttgctaattgtgattttctactagaaggctactggttcccataggactaagaaaataaaaagggcttccacagaggtggtggaagaaaatattctgctgtttctaaattagacatagaagagattatcctctaaggaaagaagagggtttggaaggactaatgtgcatttggtgattctatagctatcgatcaacattgtggagcacaagactctgatctggt

SEQ ID NO: 356135 - DNA, 553 bp, Homo sapiens
taattttagaaagatgcagagagaaataaaggcaaagcaatacccagggatgataggtgccaggtcatctctagcttagcaaaggacttcatacgaatggatgttgatagtaacattcaattaactcatcccacatggcaaactttcagttatgtatcctggaatttcttctgcttctctgcccttaaatctcttccataaagtagtggtttctaaacaattcttctcagtccagatctttctcctgagttcaataatcctgcatctattgcccactggattctccacctggatactttacaggtatctccaamttaccatgttcaacaagccttaccactttagcccagcactgatacccctcctgtgcttccaatctaggtgagtgccaccatcatccaatcaggggagcctgcgccagggagtcatccccgatccctcctcacatctaatccctcacaatttcagtctgttctatctcctgaacagctctccattccatctgctcatccccatctccagcaccagcccatgtcttttagctcaatcattt

SEQ ID NO: 356136 - DNA, 553 bp, Homo sapiens
taattttagaaagatgcagagagaaataaaggcaaagcaatacccagggatgataggtgccaggtcatctctagcttagcaaaggacttcatacgaatggatgttgatagtaacattcaattaactcatcccacatggcaaactttcagttatgtatcctggaatttcttctgcttctctgcccttaaatctcttccataaagtagtggtttctaaacaattcttctcagtccagatctttctcctgagttcaataatcctgcatctattgcccactggattctccacctggatactttacaggtatctccaaattaccatgttcaacaagccttaccactttagcccagcactgatacccctcctgtgcttccaatckaggtgagtgccaccatcatccaatcaggggagcctgcgccagggagtcatccccgatccctcctcacatctaatccctcacaatttcagtctgttctatctcctgaacagctctccattccatctgctcatccccatctccagcaccagcccatgtcttttagctcaatcattt

SEQ ID NO: 356137 - DNA, 572 bp, Homo sapiens
atgcagctgcttgatcttagactttccagcctccaggaccatgagccaaataaagtcctattttttataaactacccagtttgtggtattctgttatagcagcaggaagcagactaagacagccccaaggctccatcagggaaaaattcctggcactttccaggtgctcacacctccctgtccctttccagcctcctatctccagctctatccttccactcctacctcctgcccaggggactgacaacccattcggtagagcatatcctctctaattccttttcataacacgtgttaacacatcagggcatttgctccctcatttagatccctttattacagtataaaatctgtaaagggaggaaatgtattctattatatccttatatacccttatattatattccctatgcccagctcagtacttaacacatagtaagtgtttaataaaagttagatgagtaartagttaacgaattaatgcaagatacacacaaaagagtattgcaggaagcattcaacaatccagcggacatttattcagtgagttagtgtgtaccacatggtaatgt

SEQ ID NO: 356138 - DNA, 582 bp, Homo sapiens
ttccttccctctggtttcatacctgggtggcctgctcagcttctgtgatgacaatcatggatacaaagctgatgagccttgccatagatgaaactagattcaaatacagatgatagaaaggtacatacatagataggatggatagacacagatatgcggatagatgcaaatacaggtggagatggagatataaatgattaggctgccaggctgggtagttggttttttcctagcttggagataaaaatttaccctggctttcttttattttttgagacagagtctcgctccatcacctaggctggagtgcagtggtgcaatcttggctcactgcaaccttcacctcccaggttcragcgattctctggtctcagcctcccaagtagctgggattacaggtgcctgccaccaagcctggctaatttttgtatttttagtaaagatggggtttcaccattttgcccgggctggtcttgaactcctgacctcaggtggtccacccgccttggtctcccaaagcgctgggattacaggtgtgagccactgcagccagccccctggttttccaatacactaattaaa

SEQ ID NO: 356139 - DNA, 590 bp, Homo sapiens
tccttctgcagcagcagatgcatctgccaatgacttcaacctacctccaagtgctcctacagctgtggtgaacattgccttgccatgttcaactgctattgccctgtccccacccctgctattgctctgcccctacctccaggatttgagacacacatgttccactcaataggaccaccttcccctttcaagaggactccaggatccatccactgtctttctcaggaccctcagagatggagctcatgccagaaaacacagcaggccctagcacattatcacacccctggctgtatgaaagaaaggacacttaaatatcccaatcaatgaatcttggaataagtattttttttcttcctttgtggtttccatggtatctgaatgtgttcagatgtgggcaggtgagmaacaatggccatgcttttctacacatattcaaaggattgatggacctcagataagctgccattaaaacatctggctactaatatcacatgacaagtaaaatctaatgcctgtcttcttcatttctgtgaatgacaagaagctgggtgaattgcaatatacagcagaattaccaacccaatcat

SEQ ID NO: 356140 - DNA, 599 bp, Homo sapiens
ggccatgcttttctacacatattcaaaggattgatggacctcagataagctgccattaaaacatctggctactaatatcacatgacaagtaaaatctaatgcctgtcttcttcatttctgtgaatgacaagaagctgggtgaattgcaatatacarcagaattaccaacccaatcatatgttcactttgtctctgtttatggggggaaaaatgacctgcaggaaaaaaaccttttgaacacatttatgtccactgggtatattgtattttataatctccaaaaggttactagtactaatttttgtagtggtgtaagtgtgatttaactgttttaaattcacattatcagaaagacaaatagaacccagtaatcatcgcagcccagatcttttctttcctctttttttctcatttattaccaaagaaatttaatagttcactatctaaaaaagacgaaaatgaaatgtctttgtattccattcaaaaaaagaggaacatactagctaaaatgcttctaactttattttttttttctaattttattattctcttcacatgtttatttttcttttgggggagacagaagaaactcaatgtct

SEQ ID NO: 356141 - DNA, 523 bp, Homo sapiens
tgtagcaaccctgcattcggcaaatttattggtgccatttttctgacagcacgtgattgccatgtctctgtgtaacattttgataattctcgcaatatttcaaactttttattattattatatctgttatggtaatctatgatcagtgattaatgatgctattttaattgtttggtggcaccacaaaccacacccatgtaagacgcaaacataatcaataagtgcygtgtgctttgactgctccactcaccagcctttctatcattttgctttctctttttgggccccctattctccataaaacaaaaatattgagattaagccaattaataaccccaaaatgacctctagctgtttgagtaataggaagagttgcaggtctctcacttttaaaacaaaagctagaaatgattaagcttagtaaagaaagccatgtcaacagccaagatgggctgaaagctacatctcttgagccaaacagttagctaagttgtgaatgcaaaggcagaaacttcagggaaat

SEQ ID NO: 356142 - DNA, 571 bp, Homo sapiens
taaggactagatttagaagtggaatctgaagatacgactgctataatctcatgataaaatttgaatggataaggagttgtttcttacgagggaccaaaaaagtggtttcttgagatagaatctactcctggtacagatactgtgaacgttgttgaaaggacaacaagggatttagaatattacataaacttagtgtatcaagcagcagcaaggctttaaaggattgacttcaattttgaaagtagttttatagtgggtaaaatgctgccaaacagcatcaagktttaaagagaagtcttttgtgaaaggaagagtcaattggtgtggcaaacttcatcatcgttcttattttcagaaattgccatatccacccaaatcttcagcaaccagtcagcagccatccacttggaggcaagacactttactagcaacaagatgataacatactgaaggtatagaagattgttagcatttttagcaacaaagtatttttaattaaggtacgtacattcttttttagacataatgttattacacacttaacagagcagggtccccaacccttgggcag

SEQ ID NO: 356143 - DNA, 571 bp, Homo sapiens
taaggactagatttagaagtggaatctgaagatacgactgctataatctcatgataaaatttgaatggataaggagttgtttcttacgagggaccaaaaaagtggtttcttgagatagaatctactcctggtacagatactgtgaacgttgttgaaaggacaacaagggatttagaatattacataaacttagtgtatcaagcagcagcaaggctttaaaggattgacttcaattttgaaagtagttttatagtgggtaaaatgctgccaaacagcatcaagttttaaagagaagtcttttgtgaaaggaagagtcaattggtgtggcaaacttcatcatcgttcttattttcagaaattgccatatccacccaaatcttcagcaaccagtcagcagccatccacttggaggcaagacactttactagcaacaagatgataacataytgaaggtatagaagattgttagcatttttagcaacaaagtatttttaattaaggtacgtacattcttttttagacataatgttattacacacttaacagagcagggtccccaacccttgggcag

SEQ ID NO: 356144 - DNA, 582 bp, Homo sapiens
aatgctgtcattttgtcaagtacctaatcttatgagagtctataaaatgtgaagttaactgtagtgggttatatgagaaatttttttagacttctttaaaacaaaaacaaataaacaagaacaaaagaaaaataaacaacaaargctttcgtcacaattaatatctctcagaatcactactgatttttttattgttgttgttttgacattcgtgggttctatactgccttagtttcttggttttgattctctctctctgaatccaggactttggtcagtgaacacttcctcatctcatctggggatggagagtttacatcattcagcatatcttcttctcgctttttaggtaaatatctcatttttcccctttttagtgggaggcaatcacttccattcctcagaaggtgtgctgttgaggactgaatattggtctgtctatcctccccctccaaatttatatgttgatatcctgatccccaaccattgggaggaaattaggtcatgaggttggagcctgtgttagttcatttgaatactgttataaagaatgacctaagacttggtaatatatgaagaaag

SEQ ID NO: 356145 - DNA, 582 bp, Homo sapiens
aatgctgtcattttgtcaagtacctaatcttatgagagtctataaaatgtgaagttaactgtagtgggttatatgagaaatttttttagacttctttaaaacaaaaacaaataaacaagaacaaaagaaaaataaacaacaaaagctttcgtcacaattaatatctctcagaawcactactgatttttttattgttgttgttttgacattcgtgggttctatactgccttagtttcttggttttgattctctctctctgaatccaggactttggtcagtgaacacttcctcatctcatctggggatggagagtttacatcattcagcatatcttcttctcgctttttaggtaaatatctcatttttcccctttttagtgggaggcaatcacttccattcctcagaaggtgtgctgttgaggactgaatattggtctgtctatcctccccctccaaatttatatgttgatatcctgatccccaaccattgggaggaaattaggtcatgaggttggagcctgtgttagttcatttgaatactgttataaagaatgacctaagacttggtaatatatgaagaaag

SEQ ID NO: 356146 - DNA, 639 bp, Homo sapiens
ctttcaattaagctcagtcatagataataattaagtattggggctataaactatgccaactggagcagtgtatttccctttggctgcaagtaaaaacatgttctaagatttattcttcaatgtaatgttatgaagaattttttgtctcctccatcactgaagctcttaagttgataaacatcactagatttggccagattcaggctctgatagaacaaatgcagaaatgagacactggttacctgaattgtgattttggctgtatgttatttcattttgcatttttgaaaaagtcagaaaaactcttttaggtatctaagcattatctataactatgtcaaaataaaagtatctacccatttccattcattagtttaaacrcatatctaagtaatgttgttcattgattatgataatttaaagcattgattttagattgtattttagtcattgtagtgacatctttatactttgaatgtcagtttcaaagccaaaaatgtatcaaataatattttaatgttctagttactgtcactctgagagccaactgatactcctaagaatgttgcattgttatgtatgaaatactacaaaactattctttagaacttcgaaatagtcttctttttattgatagaa

SEQ ID NO: 356147 - DNA, 531 bp, Homo sapiens
caataacaggttctttaaatcaaagcattttctagacatatagtggaataataattcataaggttgccagttaccatgttcattttatttgatataatttattaatacccaaagctagccagcacactgctattaagcagagcacagggaatgttaaataacagaaagtaatagaaattttatcacgtagaaaaataatctgataaattactataaataaatacaaaatagaaaaagataagaaaaaactgcatttgcaatttaaagctrtcgggcaggtgtgtaatgtcacatgcttgcagaatcctatttataaatgcacattttaataccaactcattggccctattcattaagaggaaaagtgctgattagaaacaattttcattttttccatgcaccccaagagttctttctaaaaaaagtctttctaattagtttagactcatttttaatgaattcataaatttttatgaattcataaatattgtttctgagattgttgcttaagcagtatatacacatgtgtat

SEQ ID NO: 356148 - DNA, 569 bp, Homo sapiens
atcatcatttcacatccatccttgctatatctcacactcaagccacatccctatactattctcttcaaagcaacaatcttccgccttacagcccctgcccacctagccctagcacgccgcccctgcctcctccaccacccaaagtgtcctcatgcactcctgtactatgcattgccatttatttcataatcagcatcgtcctcccattccacacagccccctcactccctcctccaaaaaagagggtctggagaaaagtgaacccagattccttagccatccggcatccaaacccagtgatttgcataataacagcgttttgtgcggtttccctccactgctgcggtcgcagaggttcttacatttcacgtgaaaggataatattaattacggaaagaagcggcagagagaggatggagaggtaggaaatctaagtgaaaatwtcttagcagtaaagtaactgctagggagcatatatttctttggttaaaaaaaaaaagaaacgacacagactgaataataaaaagtcaatgtgttgataaagtgggtttgggtcttttaattttttt

SEQ ID NO: 356149 - DNA, 605 bp, Homo sapiens
tgacacactgacctcagtcccactgtgaatcctaaagtggccctggaaattggctctatcaatcacttctcaactgcagtatgaaagcaggcctgctcactcggaaaactrctgggagacaccctattaatggcctcagagacaggcctaaagatttcggtctcagctgtggcctcatataaactcgtgcctcagttccagctcattttagccatcaacttgaaaagtacagccagcccaaggattcatccagtgatataacaggagcccttccagagacctggtgaaaaccacatccatcatgcatgtggtaacagacctgccatttgcaaaccctgaaatgagacttaattatagcacagatccatagaccaaaggactggagaaagtccagtctacccagggaccagataggacccacatgcaatagagcccctggtaacagacctgctcactgcattctccattgcagatgcagcatcagccatgagacccagatgcaatcccacttaactgctatcccacaggcaatcccatcagcccagagaccaaacagattattttcccttgctgaaaccagtctgtaaacaatgaaagaagggttt

SEQ ID NO: 356150 - DNA, 584 bp, Homo sapiens
ctaataaatacacagtggaagaaaaataacacaaaattgtctgaaaactacagaggtctctattgctcttactttgtttttaattgcaaacagaacaggaataaacaaatgcaaatttggacattagaacatgtccaactatagaaacatgaaataaataaatgaactccgtacaaaaaacaggctgaaaatggtttacatgataaatgatatgctaaagaaataaggacaaaaatcattctgtagctgtgtattagtgagagttaattttctctgtaagatcagaggaagaaaacagtggatcttcaaagttaacatcccttcttttttaattttctctttagattatcctcgatacttggataatgtccatatatggtgagtttgttaaataatatgctttcctcatctctggaaaaactacataatgaatctttattctgatactgctgtcattaggtgtattatctttcttgtgcttaacctatagatgmacacttttccaccccttttgttttgttttcttgtggattctcctttacatatattttgaataggtaatgcagtcataaatatggtgaatg

SEQ ID NO: 356151 - DNA, 586 bp, Homo sapiens
gaggtctgcctaatttgcaaatacttgccaataaagtctaatgtgtaaccctttctgtgttaccagattgaaagatactaatttaaatatacaggctcatagttgtaaatatttatgaaaaaatcctaggaaaagtgtgtcagaggaactgatagtactttcatacaaggaaaaataaaggttgtataatgtaacgtgaaagatgttggctttcctgaacctgctatggtaatagctgaaattaatttctcaaaactgcaaaatttggtagagctttttggaggttaagaatgtccctatgagaacaagaggaaattaaaaaatataagaaagatratcaagggtagagaatcccttctcacctttccagatgtcacaaagtggtggttcatgtttaaaaaatgatataaagaaaattccccagggaaggaagcaagccaacagatttaaagagcaaaatagctgcagaaatgtttaaaggagtacacagacagaaaaccatggtgaagacttggaagtagaaatctatacagaaataacaggtctgtaaagatagtcagagtgatgagagaagagaggatgccag

SEQ ID NO: 356152 - DNA, 638 bp, Homo sapiens
ttaatttacaaatgagggtaagtaacttgcctgaggtaacaaagctgatagtctctgagtcaagcctggtttcaacctggtcctctgacgttagagctttgacctccacattcgatcgtctctccagtccttatgtaacagatgacgatgagtgcttgctctgtgccggatgccaccttacagctataagtagtgggatccaggctgtgaatctcaaacttaactacattctgtttctgtctctctctgagttaccttctgaaggtgacaaaaaacgagactattggaccactcagactcattggggccctaggctgattctggagccaccctaagattctccccttgagcaccttctgcttcacggaagagagctctccataagcttaccctgctgcgagtcagcccagactttgagtcaaattcaggttagaatctcagctccattctttactggatcagtgtaattttggctaaacttctctccaaagtaactgctttcagctctgctcccttggctgtaaaaacacagagtcacagtccycaatcttgcagtgttgctgtgggtccacagtccaggttgagaaggggcatttgagaaatgcgggtccccttaccctccctctctgagttagttc

SEQ ID NO: 356153 - DNA, 643 bp, Homo sapiens
cataatgattaaggtattctctacatttactactttataaattgcttttctttacttactatattaccaatatcttgagtgcatattatgcagcatagatgtgttatgatttatttaggcaattacaacatttatgttgtttacaaatttttattataagcaatcccatgatcaataatctttctacttacatctatggcacttgtaagatgatttacttagggtaaattactagaagtagaataactggtatatttttaaattttctgatgcgtctagtcagactgccscaaaattcacttcagttaaataaaatgtgtgttacacatttaaaaacaatttgataatcaaaactggtatcttactgtttatgtctgcgctcctctgattgctgatgaggttgaatatcttctcaagtttagcggccatctgtgtgtgtgtgtgtgtgtgtgtgtgtgtgtgtgtgtatgtatttggtgaactgcctatgtacgctgcacgtattttactgaaatactgtatgtttcatattgatttgtaggtgctctttaaatgatattgataccctctgcttatcatatattctgtaaatatatacaaaaataatctacaaaaaaactttgcttcagtcctttgtcttatt

SEQ ID NO: 356154 - DNA, 531 bp, Homo sapiens
tgcaacagttgtcctgtgaactccaacttggaagaacaagcattcaaagtacatattctgactttacaggtgatataatagtaaagaagtatctggcaatgattgataaagtaacttccttacatgatgtttcatgccygtaataatcaaaaatgaattgtcttgttttgatagcacatttcatatctgaataggcttggaagtgataaaaggaaaatattaaatgtacctctttttgaaagctatttgtagaagtcataaatcaaagataatataaaataaccttgagatttattacttattgctcatgttctctggatcaacaaatcaaacaattatgttgaagctgtagaaaaaatgaacactcatatactggtagctggcttataaatgtgttctcattgtttggagtgtcatttgacaacatatatcaaaatgttacaattgcataacctttgagcaaaagaaagtctaggaaactatcctacagacattgttcaataagtaggcaaggatatacataaggatgct

SEQ ID NO: 356155 - DNA, 574 bp, Homo sapiens
cccttatgctctcaaatctcttagcattcaccaattcagacaccgtacattttatcatttgtagagaattattctctggatctctttctaggtggaggaaaacttcctaccttgtgctatagatttagagaggttatctaagtatataactgcttctcagattgtcatctaatcttctttactttgccctgataccttttaatttccactggagtgaaacatggtactccaaattcttgggcatttttaagaattctgtcatttgaattgttttgttgtcatctttctccatagacrtattaaatccagctttttgggggtttgcaagtcagatatcagacattcatatattttcatactttcatagatttaaagttttcctgaagttttcatggatttaatgggcattttcaatgacagaatcagatacattatttaatctgctactttccctggggataaaaacacaatttttcaatgtgcaaacatgtcacattttatccagccattccattgtttattcaacaatataatatcagatcttatattgttattattaataatgaggattgta

SEQ ID NO: 356156 - DNA, 574 bp, Homo sapiens
cccttatgctctcaaatctcttagcattcaccaattcagacaccgtacattttatcatttgtagagaattattctctggatctctttctaggtggaggaaaacttcctaccttgtgctatagatttagagaggttatctaagtatataactgcttctcagattgtcatctaatcttctttactttgccctgataccttttaatttccactggagtgaaacatggtactccaaattcttgggcatttttaagaattctgtcatttgaattgttttgttgtcatctttctccatagacatattaaatccagctttttgggggtttgcaagtcagatatcagacattcatatattttcatactttcatagatttaaagttttcctgaagttttcatggatttartgggcattttcaatgacagaatcagatacattatttaatctgctactttccctggggataaaaacacaatttttcaatgtgcaaacatgtcacattttatccagccattccattgtttattcaacaatataatatcagatcttatattgttattattaataatgaggattgta

SEQ ID NO: 356157 - DNA, 629 bp, Homo sapiens
gtttaaggaatttgaggaaaaaaaggaagaaaattaggtcacaaccacaagtaaaacatgaattaaagctataatgtagtaggataatttttctmctttccttattacaaatccattatttttgattaatgactttttaagaatgtctctttacttttggccacagattgaggtcagtggtatgaggaataacaagcaaaacacagaattatgtttacaagtagaaatctagtaactgtagacttgtaaagcacatattttacattgtgtcacagagttctgtttcaattttgttaattatataaggaaaataaaataggttcccataaacataaactggaagtaaacattgtctctggttgtactaagttcacagtgtcttttattctaagaattatcaaaggctcatagctgcaagatgttaagaaattgtatactttatatcagtagaccataggtagaacatcacactgctagggttccacagtccacttcccggggaatacaataaacagtggtggcaacatgcagccagtcaggtggggaagatagtaatgtgctagaatgaagtccagttttaaaaaaagattcagatgattgcactatccaaaaaactggtaagtctgtga

SEQ ID NO: 356158 - DNA, 629 bp, Homo sapiens
gtttaaggaatttgaggaaaaaaaggaagaaaattaggtcacaaccacaagtaaaacatgaattaaagctataatgtagtaggataatttttctcctttccttattacaaatccattatttttgattaatgactttttaagaatgtctctttacttttggccacagattgaggtcagtggtatgaggaataacaagcaaaacacagaattatgtttacaagtagaaatctagtaactgtagacttgtaaagcacatattttacattgtgtcacagagttctgtttcaattttgttaattatataaggaaaataaaataggttcccataaacataaactggaagtaaacattgtctctggttgtactaagttcacagtgtcttttattctaagaattatcaaaggctcatagctgcaagatgttaagaaattgtatactttatatcagtagaccataggtagaacatcacactgctagggttccacagtccacttcccrgggaatacaataaacagtggtggcaacatgcagccagtcaggtggggaagatagtaatgtgctagaatgaagtccagttttaaaaaaagattcagatgattgcactatccaaaaaactggtaagtctgtga

SEQ ID NO: 356159 - DNA, 556 bp, Homo sapiens
ttacacatacacacacaaatacactcacatattaaaatgatcatgtatacttctttattagattttttttcatgacagcagttttattcaatacccagtggtgtgttgttgactacaaatgttcttatgatttctatgtaggtaatatatcattgtatagcttgtataccattttgattcaagcataaaaggtragtttttaaaaatattttcctactatcacttattttattgtattatattattataagatcataattattggaatttttctatttagtctgaaaacaaaagcattgttttttgctctattgtttttcaaactctacttccttctggaatcttctaatgaaggtaaaagtatatcaccaatatgattattgttattgttatttattcctacaattgtagatatatgtacaattttatctttctgtctattaggaaatttctttagtcttgattttaaataaattcattatattaggtttccaaggttttacattttcatcagttttccctggtatattgtgagtccctcaagtcttaaccatgt

SEQ ID NO: 356160 - DNA, 620 bp, Homo sapiens
taggcatgtctttgacatttttaactagagattatttttattctaaaattgtttttccctttaggaaaatatttttctcttcctcttattcaagtagatatgcttttatgtgcccaaattcaaaggatggtgtatcacaaataatagaaagaaagtgtctttctttgacttttatgattagaaaacctaagccattacagcaattgagagatcaaagtcctgaaagacacatcataagtataagcaggcttttcccatttttctaactagaaagaataatttctactttgggcgttttgagggattggtagaagggaaagttgtgaatattttaaaattgaactcaatactctgtatcccacagtaggtctgcaattaggcagacactctaattagcttgacaaccagctctgaatacagaaaggttacatgacaaattttccaagtagagactaaggaaagttgggataaacaaaattgaaataatgtctgggtgtacaggmaggaaaggcctcaaaaagcatcatagcctggtgagttttatgtttaactttcttggggcctgcagtgggaccattctagcatattccaacatagcatcaacatagaagaaatagttt

SEQ ID NO: 356161 - DNA, 533 bp, Homo sapiens
gataatctgtgaaaatattcctttagtgttgtttatttaaaaccattgtctgccattttagagaaaatagtaatagtaataataatattaactaacaattatagaggatttaatatgtttcaagcactgttccaagtgacaccttatttaatcactaaaaccatcctgcgatgctgacagtattgttttacctggttcacagaatgggaaccaagatccagaggtatttaatagtctgactagagtcaaggaggtagtgactagagaagttagctttcaaaaatagctatttagttgccagagcttttgttcttaatcagttggatgagacrtactatttattatccaatttaaagatgcagctaatcataaattcaaatttcatgaggaaaaatgtgtatttgttagtgatcactaagcaaatgtatattcatgattcaaaataaaaatgattctggttccttttcagagcattacggtcttagatctatgagagatggatttatgttaaatattctatttctctacttagg

SEQ ID NO: 356162 - DNA, 602 bp, Homo sapiens
gtattggtgctttttagggcatcccatttacaatrtaaactttgaattcttttgaaaagcatcatggaatttggagaataaaggaacctgatccttagctatctgattttgagtccatttgctaattcatgttgggtctacactgcagcaggacacaacaatcaacagtgtattcagttgttttttaaaccagtactgttgaaagataaatcaaccttgagaactttaatagtaatgacaggcaggcatgatggtgaaaacctaaggagtacttagagataccaacttacctgatgaaaactgtttgtctgtctcaataaacccttgaaattataatctatccatctgaattatacttactcgtatctctgtatgtctactctaccacactgtcctacaatcttttcgtacaaatatccttttagtgtcagtttagggaattttctatgtgaactactaaatctaaacaggtatgcaaagagttgtaaattttttaagtttggtaagataatgctaactctcataaacatggttaactaaatcaatgaaaacaactagagatatgtattaaaataattttaaaaagtaataaataattagaa

SEQ ID NO: 356163 - DNA, 533 bp, Homo sapiens
ctatgttgcccagcttgatcacaaactttgaatcttaattgatctttctgccttggcctccaaagtgctgggattataagtgtgaaccaacatgttcagcctggagaggttttctatacccctgagccttgtaagagagaaaatatcttagaagatatgggatgtgaaaaaakaatacatcttaaattgtcatatatacatgcctactacagggatatcatttgggataagagggaagaggggattctcagtacagtggaatgaatagtctcatcatcagtattaataagaatatctcagttaagatctaacaattttaagaagactaacaaacaagtttattttgtattcatgtagtggtccaggcatgtttgcctgcgtgtgtgtgtgtgtgtgtgtgtgtgtgtgtgtgtgtgtgtgtgtgtgtgttcattctccagtggctggcttttttccaggaagtgattgaaggacacttctctccttggttctgcccatgcctatcatcatctgccttaagttagaagacagta

SEQ ID NO: 356164 - DNA, 562 bp, Homo sapiens
ggatggttcaacagaacaacaaatgatctgcatcaaattaactgaatcagggatgaaaaccatatgatcatttcaatagatgctgaaaaggcattttataaaatttggcattccttcgtaataaaaactctcaacaagcctggcaatgaaggaatgcttcacaatacaataaagccatgtatgacaaagttgcaggtaacattatactgaatgagaaaaaagttgaaagctgtttctctaagatttggaaaatgagaaggatgatcattttcaacagtttttttaaacatactactggaagttctagccagagcaatcaggcaagagaaagaaataaagggcatccaaatcagaaagcagaatgtcaaayagttcctttttttttttttttttgagatggagtctcgctctgttgtccaggctggagtgcagtggtgcgatctcagctcactgcaagctctgcctcccggttcacgccattctcctgcctcagcctcctgagtagctgggactaccggcgcctgccaccatgtccggctaattttttgtatttttagtagag

SEQ ID NO: 356165 - DNA, 593 bp, Homo sapiens
agactttcctctgaaaaaaatgtttacaaacctcaaaaataaaagtaatcttgttcaatgtcaggcactattttacagagatatgctttgatccaagatttccgggtgtgctgaatatactttccttcatatacatttctaataagctttatttttataaaaaacatttccctgcaacactaaaattctgaatgcttgcacaatcagaacaattatttgtattaaaacagaaaattgcttgaataaaataaaaacagttaacaactaatcaaccaacaataaatatttactaaatatctagttattttagatgtttaatttggaaaaatayttcttttcttttttatgaagatagataataatattaatcatttctaaaatgtttcctgtgagtgtgcatatgcttagcactttataattagtttttcctgtactttcaaacacttggatctcttgaaagatataatctgtactggcagctaaagtcttttatttattgaacagtagggaagagtgacatagacagagtcttctgccaatgtattttactgctgatattaaaaactgtgtatagatagaaaagaattccaaca

SEQ ID NO: 356166 - DNA, 593 bp, Homo sapiens
agactttcctctgaaaaaaatgtttacaaacctcaaaaataaaagtaatcttgttcaatgtcaggcactattttacagagatatgctttgatccaagatttccgggtgtgctgaatatactttccttcatatacatttctaataagctttatttttataaaaaacatttccctgcaacactaaaattctgaatgcttgcacaatcagaacaattatttgtattaaaacagaaaattgcttgaataaaataaaaacagttaacaactaatcaaccaacaataaatatttactaaatatctagttattttagatgtttaatttggaaaaatatttcttttcttttttatgaagatagataataatattaatcatttctaaaatgtttcctgtgagtgtgcatatgcttagcactttataattagtttttccygtactttcaaacacttggatctcttgaaagatataatctgtactggcagctaaagtcttttatttattgaacagtagggaagagtgacatagacagagtcttctgccaatgtattttactgctgatattaaaaactgtgtatagatagaaaagaattccaaca

SEQ ID NO: 356167 - DNA, 552 bp, Homo sapiens
tgtaaaacaggtggaaggtaagagccaatagggaggaagtgcacacaatgggacaaagacatgctgaggggagagaaacatgcccaaaacaggagtgaagtttgttcatctgggctcacagagtgggtgtttgcatttatggatgtgggcttttgcttatatggtgcctgtagtttgattttcaggctgttgttggtttggaggagttctaatgaggacccgccctaactgcctgcctaactggtttctttcttcttcctctctcattagcattttctttatttaaatctttgaaaaatttgttgccaacaaaattaccatatattttaataaaataatcagtatgcaatgatttgtctgtttgttattatgtttgtattgcttgatatgtctaggatttaaaatttcaattttctttaacagtgtgaaaatggactaatgcactcaatctcaccaacaaaagacaaactgaaattatgtgccccctgctgtgatgcagtagaatgtacaygaaatcacatatgtaatattcttaataaaaatgtttgatct

SEQ ID NO: 356168 - DNA, 563 bp, Homo sapiens
tctgtttgttattatgtttgtattgcttgatatgtctaggatttaaaatttcaattttctttaacagtgtgaaaatggactaatgcactcaatctcaccaacaaaagacaaactgaaattatgtgccccctgctgtgatgcagtagaatgtacacgaaatcacatatgtaatattcttaataaaaatgtttgatctgaacatatcttaaaaartaaatgagataaaatttcaattttcatacttaactctttttttaatggcactacaagaaactcagcttctaatttttattttgtttaagataaaagccatattatttaagttagctcagaagtaagaactacgttaagaatgttactgattcctgaataatggcaacctctcttgtgaactgggggatatggttacttttgagacttacccttttccattaataaacatatcaaacagaatctgcttagtctgtgtatgcctagttccctattttttcttcagatgttatttttggtcttttatgtacttttagagaaaagaacagttatattctaaaatctggacccac

SEQ ID NO: 356169 - DNA, 563 bp, Homo sapiens
tctgtttgttattatgtttgtattgcttgatatgtctaggatttaaaatttcaattttctttaacagtgtgaaaatggactaatgcactcaatctcaccaacaaaagacaaactgaaattatgtgccccctgctgtgatgcagtagaatgtacacgaaatcacatatgtaatattcttaataaaaatgtttgatctgaacatatcttaaaaagtaaatgagataamatttcaattttcatacttaactctttttttaatggcactacaagaaactcagcttctaatttttattttgtttaagataaaagccatattatttaagttagctcagaagtaagaactacgttaagaatgttactgattcctgaataatggcaacctctcttgtgaactgggggatatggttacttttgagacttacccttttccattaataaacatatcaaacagaatctgcttagtctgtgtatgcctagttccctattttttcttcagatgttatttttggtcttttatgtacttttagagaaaagaacagttatattctaaaatctggacccac

SEQ ID NO: 356170 - DNA, 595 bp, Homo sapiens
tgtatatttatatatcatatataacacattatataaaatatatttatatatacctaaattatataatataatataaatatatatatataaatatataaaattagccaggtgtggtagtgcacacctatgtcctagctgcttaggaagctgaggtgggagcctcccttgagctccggagttcgaggctgcagtgagccacagttggatcacttcacttcaaccttggtgacagagcaggactctgtctcaaaaagaaaaacaaaaaaaaactgttaaaatatgaacactagaaacttcaccttattaacatttaaatatgagttatgtatttcaattacaatagtatctaactgaaattagaaaacctcagattctcactggaagaagataaaacattaaattagctatggtaccaaatgaagcctgaaagccgaatgacattaatttcagcacactgtatactaaatgtctatacttcactagaaaagcaaataaattgacccacatatagcaaatatgaataaaaattaatttatattcaaaaacaatcaaccaycatatgaacatgtcaataatatgtaacagttgaactgca

SEQ ID NO: 356171 - DNA, 598 bp, Homo sapiens
tgtcaactgaaatgtcttagaaaataaatagctcartatgttagtataaacaatgatgtccctatataaaatataatgaaaataaccttaatcctttaagaaattgggtgattttaactttggggagatacatatagaagatattcatggacatttttggcattttggaaatcagagaagctaacaaaatatactatggtcatgtcaaaataattcaggggttcccactaatcaacgatttgataatttaagcatcaataaaggataataaccacagtggactgaaatatataaaattcatttagtacctttttaataatgaacctaatttagggggagaagggcaaaaatctttgagaaaactagggaatgaagtcaattaaaagaactgataaagtgacaaaatcaaatagctgttttgccttcttcattaacattgtttcttggggtaaccaaatatttattattggaagcttctttttgtagaaatatttcaactaattcatagaaaaaataaataaaatatccctcaacttgcaacccataataattaatgaatccaggcaataaatatcacaaattgctaacattacagaaa

SEQ ID NO: 356172 - DNA, 594 bp, Homo sapiens
ttatggagaagttcaacaataggattaaaaaaatttactaaccaacttttaataatgaatagaacaagaagaacaaggcakaagttaaataagaaaatttatagaagacttaatactatgaaccaactagacttaacaaacatatgtataacatgccactaaacaacatcagaaaacatgttcttctcaagtgcacatggagcatttaacagattagaccacatgctaggctattaaacaagtctcaaagaatttaaaatgattgaaatcatacaaagctctccagacataatgatatagacttagaaatcaacaatataaagagatttggaaaattgacaaatacatgaaaattaatcatcctgcttctaaataataggttaaagaagaaaccaaatgggaaaatagaaaatgaaaatgaagatacacataccaaaaattatgggatgcagctaaagcattccttagagtctaatttgtagttgtaaacacctaaattttaaatctatgacaaatcccaagtcaacctaacctacaactttaacacactggaaagagaagagcaaactaacacaaagcaaacaaaagaaaaca

SEQ ID NO: 356173 - DNA, 400 bp, Homo sapiens
gcctacctactttgtgttcatttatgggaaatctttaatatttttaaatcttgaatgcttaaaatcttttctactttattttttaacttaaaattttagcaaagtggagtatggaaagaaagctttttttttttttttttcaataaattgcatgaraaaagctgtatcttacatttggtcttttttgttgttttcctaatctttcctatcagtgtttttccctgtttaatttggagaaaacttttctcaaattagtctttatttcactcatttgagatttttactattttattcatttgagttttctacaacctcaatttgtttgtcctgcctccaatgggaaatatgtgtatgccattttatttagttagtttcttacaattacttatctgatgttatt

SEQ ID NO: 356174 - DNA, 422 bp, Homo sapiens
aaccacttggctgaaccctgaagtatacatgggcaacccactaagaagtccagtaggaaaacagcagctgagaggctggaggagctgagcaggtatttcagctgctgcccactacagggcagtccatctggagtttcagacttgctaagttagaggtctgggtttaaacatttcaggctttccactgaaataccaaaagggtcatggtctaggagtaaagaccatatgctagggctaayggattttccctaaggctatgcgaaaatcagaaagatagcaaacattaaaaaaaagaataatcaggtctccacaagctcacatttaaccaactgctagaacgaaactttttttttttttttgagacggagtctcgctctgtcgcccaggctggagtgcagttggcgcgatctcagctcactgca

SEQ ID NO: 356175 - DNA, 573 bp, Homo sapiens
cacattttacaaaaacaacttagcaattttgattcaaaattcagatgctttatttttcttgtaattttcctgcacacacacacacatacacagccatcaaactaatacttcacacacacacacgcacactgccatcacactaatacracacacacacacacacgcacactgccatcaaactaatacttcatatccactgtaagcttatctttaattttggggctgaattttggggctggaagtactaatgaggaagggactgttcccaccctctggcaaggccaccattctggaacctgatgacaaatgcatgacagatgctgaatatcctcctgtcttgattgcctaaagacttgcttttcactatcagcatgttttcatatctggttttcagaacataaatgtattcacaattcaacattttagtttattcatttaaagcattaaaaatgtttctcagagtatgcatggtcgagaagggcatattattaaagcaaaaatcatccactccattcccttgtcctacccatagtcccagagaccaccacctttcagcgtttctgcattttgtgt

SEQ ID NO: 356176 - DNA, 573 bp, Homo sapiens
cacattttacaaaaacaacttagcaattttgattcaaaattcagatgctttatttttcttgtaattttcctgcacacacacacacatacacagccatcaaactaatacttcacacacacacacgcacactgccatcacactaatacaacacacacacacacacgcacactgccatcaaactaatacttcatatccactgtaagcttatctttaattttggggctgaattttggggctggaagtactaatgaggaagggactgttcccaccctctggcaaggccaccattctggaacctgatgacaaatgcatgacagatkctgaatatcctcctgtcttgattgcctaaagacttgcttttcactatcagcatgttttcatatctggttttcagaacataaatgtattcacaattcaacattttagtttattcatttaaagcattaaaaatgtttctcagagtatgcatggtcgagaagggcatattattaaagcaaaaatcatccactccattcccttgtcctacccatagtcccagagaccaccacctttcagcgtttctgcattttgtgt

SEQ ID NO: 356177 - DNA, 573 bp, Homo sapiens
cacattttacaaaaacaacttagcaattttgattcaaaattcagatgctttatttttcttgtaattttcctgcacacacacacacatacacagccatcaaactaatacttcacacacacacacgcacactgccatcacactaatacaacacacacacacacacgcacactgccatcaaactaatacttcatatccactgtaagcttatctttaattttggggctgaattttggggctggaagtactaatgaggaagggactgttcccaccctctggcaaggccaccattctggaacctgatgacaaatgcatgacagatgytgaatatcctcctgtcttgattgcctaaagacttgcttttcactatcagcatgttttcatatctggttttcagaacataaatgtattcacaattcaacattttagtttattcatttaaagcattaaaaatgtttctcagagtatgcatggtcgagaagggcatattattaaagcaaaaatcatccactccattcccttgtcctacccatagtcccagagaccaccacctttcagcgtttctgcattttgtgt

SEQ ID NO: 356178 - DNA, 508 bp, Homo sapiens
aaactaaatacagaggaaaataatagagaagttaaaatggcagacttaacccctaatgtatcaataattacattaaatattaaccatctaaatatagtaactaaaagagattggcaagtgaatctaaaaacatggcccacgtttgacagcagaccggggggctacagttagcaacaatatgttaaatatttcagtgtagaagagaggacttgaaatgttaccaacacatagacatgataaayacccaagatgacggataccccaaatgccttgacttgatcattctgcattccatgcatgtagaaaacattcacaggtacctcttaaatatgtgaaatgtcatttatcaataaaagaaaaaagaggcaatttctactgtattgtactcttcaaattaataaaaatttttataaaagaaaaataaattttaaaaaatggcccaaatatatgttatctacaggagactcaattcaaatataacaatataggcaagttgaaagtaaaagga

SEQ ID NO: 356179 - DNA, 278 bp, Homo sapiens
aagccatattgatctatagacacaatagttccaagttacttaaatatcaagctaagcaactgaacagatttttatctcacattaaactttctaggccctcttaatggtcccccagaaaaagcagtcatcayctcccatctacccggaaaaggccagagactatcctgaaatgtaccaagttttcagctgaaatggggggtgaggaagatcaaagatttactgggggctgctttccagcttgggacatgagagcaaactctacactgtcaacatgttta

SEQ ID NO: 356180 - DNA, 180 bp, Homo sapiens
cacctcccatcttccggaacccatccctgccacctcacccaaccccaccctccttccctctttcactctgggagtttttgcagttcatctgctcagccaaagagaagtaactgctaatgttaagccgaaatttgggtcrggccaggaggcacctttaaaataaaaaatttactcgggtac

SEQ ID NO: 356181 - DNA, 478 bp, Homo sapiens
acaaaaataaattccagaggctgaggcaggcagttcatttgaggtcaggagttcgagaccagcctgaccaacacggtgaaaccccgtctctactaaaaatacaaaaaaattagctgggcttggtggtgcatgcctatagcccagctacttgggaggctgaggccggagaatcacttgaactcaggaggcggatattgcagggagccgagattgcacctcccagcctgggtgacagagtaagactttgtctcaatcaatcaatttcagatgaattagagagttcaataaatcaaactacagaaatattagaagaaaacatagaatatttgcatattcttagcagggttttgcaaatctttctttattagacattaagcccagawgcctaaaagaaaatactgacagtttttactaaaaaattatttaattgtgtatcaaaagacatcataaagttaaaatcaagagagacactgagtga

SEQ ID NO: 356182 - DNA, 545 bp, Homo sapiens
aatgtgcctgtgcaagcctgggaaaagcgttactgaattaaacgggatgattacaaccgtaatggccgcaattccagaaactgcctaatttcgcataattttgtattgttttcaaatcctgaaaatcttgacacgaaaggcctcttaaaatcagaacaccatcctttcaagaaaagttctaccgagcacccccacgagttgacattgcggtcattcttagctccagaagttgtgtgtgtgccgcggaaggcagattcacactggtccacactgtactttgaaataaggggtaagaagagrcggctccggcacgtcgcggctgtgctctgctctgccctcaacttcctatgggcccgcgggctccggcgtatcgtccctctccgccgcacttcgttcccagccctcgcctcccgatcccgctgcagaaacaccccctccccggagaagccgcgcgtacggcgctgcaggtcctccccggcgctccggtcggccgggtctgggccgccacccgcccggctcgcggcccccggctcctccccaggccc

SEQ ID NO: 356183 - DNA, 545 bp, Homo sapiens
aatgtgcctgtgcaagcctgggaaaagcgttactgaattaaacgggatgattacaaccgtaatggccgcaattccagaaactgcctaatttcgcataattttgtattgttttcaaatcctgaaaatcttgacacgaaaggcctcttaaaatcagaacaccatcctttcaagaaaagttctaccgagcacccccacgagttgacattgcggtcattcttagctccagaagttgtgtgtgtgccgcggaaggcagattcacactggtccacactgtactttgaaataaggggtaagaagaggcggctccggcacgtcgcggctgtgctctgctctgccctcaacttcctatgggcccgcgggctccggcgtatcgtccctctccgccgcacttcgttcccagccctcgcctcccgatcccgcygcagaaacaccccctccccggagaagccgcgcgtacggcgctgcaggtcctccccggcgctccggtcggccgggtctgggccgccacccgcccggctcgcggcccccggctcctccccaggccc

SEQ ID NO: 356184 - DNA, 500 bp, Homo sapiens
atccagaggcctgactgtctccctgtgatgctgtacttcagtggtcacgctcctgatccgctttcatgttccaccctgtacacctggctccaccttttagatagcagtagcagaattagtgaaagtactaaaagtctttgaaatgcatagaagaaataatggcgtacgtgtcctctctctctctccgccttggctgccaaacagggaagggcccctctggtggacacgtgactcgcatgaccttacctatcattgtagatggctcacactccttaccctgcccacttgtcttgtatccaataaataacagcatagctaggcattcggggtcactaccggtctcygcgccttggtggtagtggccccccccgggcccagctgtcctttcttctgtctctttgtgttgtgtctttatttctacatactctcatctccacacacgaggagaaaaaacccacagaccttgtagggctgggcctatactatatgactgtgttttt

SEQ ID NO: 356185 - DNA, 565 bp, Homo sapiens
gctattgtgactagtgctgcagtaaatatgggagatatctctttgacccactgctttcctttcctttggataaatacccagtagtgggattgctcaatcatatgctagttctatttttagtttttttgagcaacctccatattgttttctgtaatggctgcactaatttacattcccaccaacagtacataagagttcttctttcttcacatcctcaccagtatttgttatttttttgtctttttgattatagcagttttaactgggttgaaatgagataatatctcattttgttttgatttgcatttccctgatgatgttactgagacacccagtctasatcctgctgctcactgcacagtaagccaatcactgagacaatgagtgttgccaggaaagaaggctttatttgggtgctacagctgaagagatgggtcgtcagtctcaaatccatctccctgatgggctaaaattaggggtttatatagcagagaagaaatctatgtgcaggaaaataggaactaaggaggggtaaggaagcaattctgatgaatgaggggtgtgg

SEQ ID NO: 356186 - DNA, 565 bp, Homo sapiens
gctattgtgactagtgctgcagtaaatatgggagatatctctttgacccactgctttcctttcctttggataaatacccagtagtgggattgctcaatcatatgctagttctatttttagtttttttgagcaacctccatattgttttctgtaatggctgcactaatttacattcccaccaacagtacataagagttcttctttcttcacatcctcaccagtatttgttatttttttgtctttttgattatagcagttttaactgggttgaaatgagataatatctcattttgttttgatttgcatttccctgatgatgttactgagacacccagtctagatcctgctgctcactgcacagtaagccaatcactgagacaatgagtgttgccaggaaagaaggctttatttgggtgctacagctgaagagatgggtcgtcagtctcaaatccatctccctgatgggctaaaattaggggtttatatagcagagaagaaatctatgtgcaggaaaataggaactaaggaggggtaaggaagcaattmtgatgaatgaggggtgtgg

SEQ ID NO: 356187 - DNA, 578 bp, Homo sapiens
gactatgccaacactaaactgtcaccaatcttggctggtagcaacatctctacttctgttggagaacgttcttgtggcatcgttacttcaattgttttaaatcaggcagagtctcttctagtatttacaaatatcacagcgtgcatgtggctcctttccctgtattttcctaagtggtcaaaagggggagtgtaaccttcgagtttggatgtggaagttacaagaagacttacgcacctaggccaacactgctattctccagaagataactcagatgctcaaacatggccttctgattttgccggctaattcgacagaaatagcaaaggaaacggcagcagctagcaaccatctttggaaatgcaatctgtagggagaagtagaaagtgtcagacaaaagaatctatcatgaggcctttctgaaaactctgacctcagagtcttaagtgggtaaagtgtgaacacttggaaaaatgaactttctccttccattttttttctcaagacttattcataggagttatagttcctgaaatatctttcctccaagagaaayagatgtcaaacaagaatcccaa

SEQ ID NO: 356188 - DNA, 562 bp, Homo sapiens
tcatgcccttacaggcatcatgcagtaaatatttgctgacctgtgggctggatattagaattctatctgttccatggaattmgaagaggcatataattgtaatgcaaatttataaaatagaaaaatgtctccaagaggggcaattaacaaatttctcttctgtaatcttatgcttgctatcatctaaatcgggagttgacaaattatggcccatgggacaatcagaccagctacctatttttgtaaatagattgttattgtaacagagtcaagctcattggttttcatattgcctatggctggctttgctctgtaatcacagagttgtagctgtgacagagacatatggctcacaaagcctaaggcatttactctgtggccccttacagaaaaagtctactgacccctgggctaaatgaatggctcttgtctgttttcaactcggatgtgaattagggttcctgctgttcctaacactgcagttaaccttagtcttctccttctgttgtgtcacagaaccctcttggccctggggtgccacattgctcatgttaacccagct

SEQ ID NO: 356189 - DNA, 562 bp, Homo sapiens
tcatgcccttacaggcatcatgcagtaaatatttgctgacctgtgggctggatattagaattctatctgttccatggaattcgaagaggcatataattgtaatgcaaatttataaaatagaaaaatgtctccaagaggggcaattaacaaatttctcttctgtaatcttatgcttgctatcatctaaatcgggagttgacaaattatggcccatgggacaatcagaccagctacctatttttgtaaatagattgttattgtaacagagtcaagctcattggttttcatattgcctatggctggctttgctctgtaatcacagagttgtagctgtgacagagacatatggctcacaaagcctaaggcatttactctgtggccccttacagaaaaagtctactgacccctgggctaaatgartggctcttgtctgttttcaactcggatgtgaattagggttcctgctgttcctaacactgcagttaaccttagtcttctccttctgttgtgtcacagaaccctcttggccctggggtgccacattgctcatgttaacccagct

SEQ ID NO: 356190 - DNA, 640 bp, Homo sapiens
gggtttatacctttgctcctctgttcatgggctctgtgatgttgaataaatgattttacctctttgagcctgaatttcttcatcagtaaaatgaggacaatattagctacctcataggattattgtgagggaaaactgagaagtggtctctaaaggatctactatgaagcaatccctcagtcagtggtagcttgtatggtgatgatgatgacgatcatcatgaacagaatgccatattggatagtagtcgacctatggtcagtcttagatgttctcatcaaattcttttgagtagtgctacctaattattgaaggtctaygttctctctttcccttccacaccctctgttcgcctttcttctcacaatagctgactcggctgtggagaaggtcagcatagacaagatccgatttttccgggtagagcgatcttatgcagtgagatctggaaagtggtattttgagtttgaagtggtgactggaggagacatgcgagtcggctgggcgaggccaggctgtcgacctgatgtcgagctgggggccgatgaccaagcctttgtgtttgaaggcaacagggtgagtttatatatctagcaaacacccatcctcagaccaagttttccttctccaaacatttttc

SEQ ID NO: 356191 - DNA, 420 bp, Homo sapiens
tgacacaacccgttctttctttctttcttcctggcacataaaatcaacaacaggaggccacatggagaccaccactgcccatggtacataggaaagataagagagcttggttcaaaatgacttgggaaaaacgatgatccagttaagaatattcgtaagatataaataaatatcaactggaaaggcaaaaccagtaagagaaaaagtgaaattctttatctgtcccttagttaaaattgatctcargccctgggaaaatttaactactacccaaaacaatgcagtgagcctaaagaatgacttggtgagattttctgccacaaaaacaaaaagatgggtaactatgtgagatgatgaatatgttatcttgctgcactgtagcagcctttttactatctctatgtatttcataacatcacg

SEQ ID NO: 356192 - DNA, 620 bp, Homo sapiens
aattgggaagttctcaacaaataattttaagatttagtcattatttcctgaggttcactaaattagtaatactgcaggctaatgactcaattttgttttaatttcattgttcaaattcttaatacacatagattgtgtcctattacataacacttaatgtaggcgcattcacaagggacaattgtgattctaactctatatcattattattgagtaccttaaaataggaaactgggaggtttagtatgatttctataattaattttaaaacagcattttataaaatgcttttcagataaagtgtctgctcttattgggaaggaaaaaaaccttagcacctctttacttaaagaggctttattttscagtttcacgattaggatatttccacgatcacaattatgcagccaacactgagaatatcttgtaaggctgccctaccagaacgttccagtgaaaggaagtgaggcccactggaaagtatcctgttgtgaaagttttgccaaatcataacttttctccgtttacctcatccccctccacacatacactcagtccatgagcaattccgaacaagcctaattccacaacaaaactggaagtggctgcttggatcacct

SEQ ID NO: 356193 - DNA, 544 bp, Homo sapiens
aacatttctcaggggatttgggggtggaggagatagaatcatgaaaaagtactagaagaataatactttactttctgcctcaaagcctggctttgtgagtgcatctttctggaaatagctggttgggccccagctgctgaagcaagcgtgccaagtggtgatgattccactttctcccaggaagaggaggaggtgcagagagggtcatgcactgcaggaggtgctggagagacaaggtggcggcctctgtgccaacaggctgctccccgcccccaggaagggtttggtccatctgttcttagtcaatgaacatttcagatgggaggtggctactctgtctgctgtctaccttaccccctctctccaaccacaggccagagaactggctgcsaagaggcttttcagcctgaaggctgtaacctgaggctgatttaagaatcaggggttttatccatgtacatcatagcaggatgtttttaatttgctatagttaggtaaactggtgaccctgaaaaactgttggatgccctaagtacggcatgcc

SEQ ID NO: 356194 - DNA, 631 bp, Homo sapiens
gacctttctgtatctgtttctttagctgcaaaatgtggataatttttgcatctccctcccagggttcctgcaaggatcccatttagattgctttgtgtgatgcctatcacagagtaagcattctgtaagtactaagcgagctactattacttttattgttggagatatttgcaattgcttcatgacaggctctgtgaccttctatcagtgacccgatgagtggagttcacacatgttttctggcatctctttctcccagccaagactggggttgcccacccaacactgtcctcgtggatatagctgctcatggttccasatcttgggaaggacaaggtttactcacacacttcctttccccattctgcctccataccttctgctgtctcttgggctaccatttagatccactgccagtctaaaagcagcttgacaacatttgtaaagccttcaagagtagttcctgacaaaacagcatacctgtgcatttggcacagtgcaaataatcttttccagtcaatccaaaagactttctcattttacatctagcaaagggatgatgagtatgtaccatcctttagtattctaagcaatcctctgatcaatcatttcagactcatttcagaagtca

SEQ ID NO: 356195 - DNA, 558 bp, Homo sapiens
aacatgtacaagtattattcatccacttaaaataaataaataaaaagaagtcagaaatcccccccccaaaaaaaagaacaatattgagttggtcagatcaaatctcttttcagtgtctcagttataattttgcaacggcagttttataactttaaataatgactgtcacagtttttgtgaataatctaggtaaacaaaacaattaggtaaatgtaatggcacaaatatttgtagacaaactggtcataatttagaatataaagctatrttaaatcaaataatagatatttcactatttgggtattttccaataaatacatattgtaggaaaacattattgttaaagaaaaaaaaagtgtgtccttaaaaaaaagtgaacaagttttgtctaattcaaaacttaaaggttatgtatgcaacaaggtgaaaggaaccaggaataaaaaagacgtaaagaaagttataaaaataaagaggctttttttttttgaggtgaaaaacttaaagagaaataattttatataagaaagaatcttgtatggtaaatttagtcctaaa

SEQ ID NO: 356196 - DNA, 558 bp, Homo sapiens
aacatgtacaagtattattcatccacttaaaataaataaataaaaagaagtcagaaatcccccccccaaaaaaaagaacaatattgagttggtcagatcaaatctcttttcagtgtctcagttataattttgcaacggcagttttataactttaaataatgactgtcacagtttttgtgaataatctaggtaaacaaaacaattaggtaaatgtaatggcacaaatatttgtagacaaactggtcataatttagaatataaagctatattaaatcaaataatagatatttcactatttgggtattttccaataaatacatattgtaggaaaacattattgttaaagaaaaaaaaagtgtgtccttaaaaaaaagtgaacaagttttgtctaattcaaaacttaaaggttatgtatrcaacaaggtgaaaggaaccaggaataaaaaagacgtaaagaaagttataaaaataaagaggctttttttttttgaggtgaaaaacttaaagagaaataattttatataagaaagaatcttgtatggtaaatttagtcctaaa

SEQ ID NO: 356197 - DNA, 613 bp, Homo sapiens
cagtttactataaattctaaaggtcattcaagtaatttggaaaatattctgagtttctcccaaataagaatttttctaggaactaccctagaaattatttttattttaggtctactcatgtatcaaacaaattgtaagctcacacaataaagtctatttggcttttcccccttttttttggcacactggataggttatataagtgaaggcttaagaaaaactagtgcctctgcagcctggcacatacayggtaatatcatgattgaaattcaagggaagtagctggctaatagcttaattagttttattaggaaaatttcttttgattctgtttttttctcaatgttttcataagttagcctgaaatgtaatctagcccatgagaccgaggcactgaagaaaaaagaggcttaggaagacgtgtgtaggtggatgatccttgggggaacctctcttggccggtctgttaaagcacctgtcatttctacactgcgagaaaagcatcaaaacccttcagcttccccttgaggggcgtatacctgccatgtttactcatctcggaggaagcaaactgctaagccctgcagcatggtcacttcccaatgatgaccac

SEQ ID NO: 356198 - DNA, 554 bp, Homo sapiens
ccttcatggtgccagttgggtttgttttttttccctcctaaaaacaaaatatgtatttttatgcctgagagacctaaatagcatccatttggagagtgagtcagcagcctcctctgacgggttgcccccacgtgcttaactcaatccaaggacatacttaggaagagggagggtgaatgagtttcacaaaaacctgctttcagtctggtgtgaagtggtkctgactcacccagaaacagctctggatatagtacctatttttctcttaaatatcaagtaagttcaagttccattcagatgcacaaaacagccatgcttgcttcctacctccccacccccccggccccctgcaaaaaaaggggatttagagacaatagcagtacaagaggatcttcaaccacttttctagctaatttgaaatactatgccacccagtaaaaatctgtgctagctgttcttagcgcatgggagggagatggtaaatggaatttcagtagcctttaagtcatagagaatgcccctgaggccaaagtctggttagatcagaagactga

SEQ ID NO: 356199 - DNA, 557 bp, Homo sapiens
gtttacatcccacaccactaactttggaaatgcccaagggacaagccctgtgcccaggcatggcaggcccagaagtacaaccatggcctgttggcactaaatcatcacatctccgagtctggaaaaggcttgtggcttgtctgtggtcacacacagctggagatggaaccagaatgaggtcctgggtgtcttaagccccaagctgatattttcctcatggtcaggccccactcccagtgactcagatgctcaattctgacataagacagcgtcttctgtgtcttttaaaccagcttctcaggtattctcaatgtggtagaatccaggcatctgyatttttcaaacaggtttcccaggtaattctaacgtttcccaaaacttgggaatcacagccaatgtcatgctctcacagctgaaatttactgaaaatgtatatttgatacacatgtggcactgaagctttaaaatgtaatctggtttgaacgtgccagccattgctaatgtaaccaggtttggtggacagggaaggttggcttccaatttcccagcttccaaat

SEQ ID NO: 356200 - DNA, 472 bp, Homo sapiens
tgttcaagtaggctgggtgtggtagctcaaacctgtaatcccagcacttcgggaggycgagatgggaggatcagttgaggccaggagttcaagaccagcctagccaacgaggtgaaaacctgtaatcccagcactttgggaggccgaggtgggaggatcagttgaagccaggagttcaagaccagcctagccaacggggtgaaatcctatctctactgaaaatacaaaaattatctgggcagtggcgtgcgcctgtagtcccagttacttgggggctgcagtgaaaggatcacttgaacccaggaggcagaggttgcagtgagccgagatcgtgccattgtactccagcctgggtgacagagtaaaactctgtctcaaaaaaaagttgaagtaactacagtgatattttccagaagttaaactaatgaaaaaaaattgtttttaatggtaaaataaatcttaaaagtgagac

SEQ ID NO: 356201 - DNA, 605 bp, Homo sapiens
tctttctgtataatctgcaaaaggatatttggagaactttgaggactatggtgttaaagtaaatatyttcactaacaactagaaagaatctttctcggaaacttctttgtgatgtatgctttcatctcacacagttgaatctttcttttcattgagcggtttggaaatgaaggggtgggttgcccctccacacttgtgcgtgtttctcattaagtggaatgtgagacttggaaaagaaataaacacagagacaaagtgtagagaaagaaattaggttgcccaggggaccagcgttcagcatatggaggatcctgccagcctctgagttcccttagtatttattgatcattcttgggtgtttctcagagagggaaatgtgtcagtgtcttaggacaatagtggagggaaggtcaatagataaacacgtgaacaaaggtctctccatcatagacaaggtaaagagttaagtgctgtgctttagatacacatacacataaacatctcaatgccttacagatcagtattgcagccaacatgtcccacctcaagtccgaaggtgacacagcacacatttaaccctgagttgacacagcacacgtttcagg

SEQ ID NO: 356202 - DNA, 634 bp, Homo sapiens
ttggaaaagaaataaacacagagacaaagtgtagagaaagaaattaggttgcccaggggaccagcgttcagcatatggaggatcctgccagcctctgagttcccttagtatttattgatcattcttgrgtgtttctcagagagggaaatgtgtcagtgtcttaggacaatagtggagggaaggtcaatagataaacacgtgaacaaaggtctctccatcatagacaaggtaaagagttaagtgctgtgctttagatacacatacacataaacatctcaatgccttacagatcagtattgcagccaacatgtcccacctcaagtccgaaggtgacacagcacacatttaaccctgagttgacacagcacacgtttcagggagcacaaggttttgtggggggcggtaagattacagattaacagcatctcaaggcagaagaaattttcttagtacaggacaaaatggaatcccctatgtctacttctttctacacagacacagtaacaatctgatctctctttcatttcccaacaggaaacactctttttgtagaatctgcagagggatattcctgagtggtttgaggcctgttgtgaaaaagaaatatcttcacataaaaactacacagaagcat

SEQ ID NO: 356203 - DNA, 415 bp, Homo sapiens
cagccaacatgtcccacctcaagtccgaaggtgacacagcacacatttaaccctgagttgacacagcacacgtttcagggagcacaaggttttgtggggggcggtaagattacagattaacagcatctcaaggcagaagaaattttcttagtacaggacaaaatggaatcccctatgtctacttctttctacacagacacagtaacaatctgatctctctttcatttcccaacaggaaacactctttttgtagaatctgcagagggatattcctgagtggtttgaggcctgttgtgaaaaagaaatatcttcacataaaaactacacagaagcatgctgagaaayttctttgtgatgtgtgcattcatttcacacagttgaacctttcttttgattgaacagtttcgaaacactc

SEQ ID NO: 356204 - DNA, 415 bp, Homo sapiens
cagccaacatgtcccacctcaagtccgaaggtgacacagcacacatttaaccctgagttgacacagcacacgtttcagggagcacaaggttttgtggggggcggtaagattacagattaacagcatctcaaggcagaagaaattttcttagtacaggacaaaatggaatcccctatgtctacttctttctacacagacacagtaacaatctgatctctctttcatttcccaacaggaaacactctttttgtagaatctgcagagggatattcctgagtggtttgaggcctgttgtgaaaaagaaatatcttcacataaaaactacacagaagcatgctgagaaattwctttgtgatgtgtgcattcatttcacacagttgaacctttcttttgattgaacagtttcgaaacactc

SEQ ID NO: 356205 - DNA, 609 bp, Homo sapiens
tatatttttctgcatctatcagtatatggctcagagaaggtactcaataaatattgttgaatttaaatgagagaagcaaggaggcttaattattcatcaaagcaagcaatgatcaccaacattattatcatcattatcatcatcaccttcaaacattcaacatgaacaaaatatgttagctaaacaaatgacaagacatactatttacatctacagtacttgtaatcaatatgaatattgtttccatatagccgtggttaataagtaattcagcattgtaaatttgcataatagcaatgtgttatgtgacaagggcggaattataaatatttttataattatatttacaacaaatatatgtcctaatgtttcatgggcaacaccagttttaaaaacrgacattcacccattgcatccagcaacctcatagcacataagatacaggactttaatggtattgataattcagttctgaacataggtggggtcaagacaggtgttcataacattattttatatatatgttgcatgtctgaaataatttatattgaaaaaggaaacatacaatttcatataacattttccaacaacaatttccggtctttctat

SEQ ID NO: 356206 - DNA, 603 bp, Homo sapiens
ctgtcattttcccaattgtcaggaatgttggctgcttgtggcgtagagcgacatctttcgctctggaaattgtcaatcaataaagaaggttgtctcttgtaacgttatacacccttatcccaccaccgtccttcgggaggtagcttacaaccagtggttgaatgttgaaagagtgcaaaggcttggatcccttgccttactggggataaatctgaaaaacagtctgtttcagagctgctcatccaatcgtctgaaatacgtgctgcaaccrcaacacagttcagcctttccctctgcccagtcctccttccctcacctcttcctgatgtgattccatataacagtctctgttgaacctcctgcatttaacaatgatatatattcaatccagaatgtgtaggaccatttgttcggtacctcatttactatattctacagcaactatggtattttcttcagattataagcatatattaactagtattataaaaccactttgaagacattttctaaaaatgacttaaggactctttatggtccctgtttaattaacattgataacatactttatagaaaagattacttggggagaaataaaaacaa

SEQ ID NO: 356207 - DNA, 593 bp, Homo sapiens
tgacatttagtaaaagctaagactacagaagcagtaaaaatatcagtagttgtcaggggattggggaaaggtgtagagatgaaaatggggaactcagggcattttagggaaattaaactgtcttatatgatactataatgatagaaacatgtcattacatatttgtaaaaatcctcagaactgtacaacacagagtgaaccctgatgaaaactatggactttggtaagtaataacctattaatattggttcatcaatggtaacaaatttactgcactaatgcaaaaatgttaataataggggaaactgtgtgcagcaaggagaggaactatatgggaactctcagttctttctctgcaatttctttgtaaacttaaaactgttctaaaaaataaagcctatcaaaaagaaatgtttccttctcaaagtggtgtggtgtataacagacttctgtagctgttttaagatacaataataatgataagagcacatgttttgaataaacttgctatacatcaggcatttctctaaataatttacataaatttacacatttartttttataagaaccctattattcacacgttgcagat

SEQ ID NO: 356208 - DNA, 525 bp, Homo sapiens
tatttggcattctgcaagtaggcaatagaatcatttaaaagcacgtaagaaggaactggcacacacaatagtatattttacagaattcctacrtcagcattatggaatatggcttgccttgtgaaaagaccagaaatatagatttcaatcaagaggctatggaataattcagtcatgagatgatgaggtccagggtaaggagttagcttcagggaaggggaagatggtccagagaaaggaaacattataaagcaggacataagagcaagaagagctgagtcaaaaaaggtccttcccttatcctttcagcttttccttagtctgtacctacagtatatgagttatacatttcagttcagtcgatatgatctttagcaagaaagagctgttagcatacaagcagagaacaggttaaactaacacacaaaattattcctgtcctaaaaccactacttagaatcagaaaacttaattcctgctgtctaagtagggagtgcttttgcattttatttttagagcatggta

SEQ ID NO: 356209 - DNA, 510 bp, Homo sapiens
ggagttcttgataactttggcaggagcactttccctggcctaatgggagtagaatcccttttttgaagtagatttagaaagtagctagattgagaggtgagtaaatcaagacaagtgtagtttactcctttttaaaacataagtttgacactgagaagttgagagataaagaaatgtagtaggagggagattcagagcacagtggaacttctggaaaaggaaatatcattctcagaaaaaaaattagaatatttaaactttgagagtgagggcaagaggaggtgaggtttgkgaatacgtttcctgagaaggtgacagaattgtatccagagcacaaggaggcacaggtgacagagttggcccttgagagaaatgtttcttccattagagccagagataggaaaagagtaggtgcaaaagtgggaacatttgatgaagtttaaaaaaattaaattgtttgctgtgataatgtctattgtctctgtaaggtaccagacaggggtaggatta

SEQ ID NO: 356210 - DNA, 613 bp, Homo sapiens
taagcctttttaaggaaggaaattctgccatatgcaacaatattaatgaacctagaggacattatactaagtgaactaggccagtcataggaaatattgtataatcccacctatataagctatctaaaatagtcaaaatcatcgaagcaggraacagaatggtggttgtgaggggatgagaggaggaggaagtgagttgttcaactagtataaagtatcagttatgtaagatcactaaattatagagattttctgtagagcatcatgcctatagttaacaatattgctttatacacttaaaaatttgttagggtagatctccagctaagtgttcttaccagacaaacaaacaacaaaataaacaggatgaagagggaggaattttggaaatgactgatatgttttgatttttttttaccttgattgtaatgatgatttatagttgtatatgtatgttcaaacccatcaaattgcatagatgtctgtagtgttttgtataacaaacatctataaagatgtttataaaaaaattttaaaaagcaagtaaaaaaatcaaaagaccctacagaatgcactgtaacaagtaataattaacacctactttctagaaaaa

SEQ ID NO: 356211 - DNA, 596 bp, Homo sapiens
taaaataaatgttgagtgataagtagatttttaaacataacgaaaattaaaatttaattccttaaaaagtttatgtgtggtggatkcaagatgactgaataggaacagcattggtctgcagctcccagcaagactgacacaaaagatgggtgatttctttatttccaaccgaggtacctgtttcatctcattgggactggttggagagtgagtgcagcccacggagggtgagttgaagcagggtggggtgtcgcctcacctgggaagcgcaaggggtcggggaattttccccctacccaagggaagccgtcaaggtctgagcctgaggaattcccgcacagataaagcgcttgtccctcggtcttcgcaacccacaaaccaggagatcccctcttgtgcctaccccaccagggcccagggtttcaagtacaaaactgggtggcaaattgggcagacactgaactagctgcaggagctcttttttttccataccccagtggtgcctggaatgccagtgagacagaactgttcactcccctggaaaggggtgctgaagcaagggagcgaagtggtctggcttggtgggtcccaccccc

SEQ ID NO: 356212 - DNA, 628 bp, Homo sapiens
atggcattagaaaagaatgaatatatctttagaaaaaatggcagatatttggtactagacacaatagcatttgaagcataaattgattattacccattaaatagaaaatgtcagtactattcttctttattaagccattggtgaaaaaaatgcctacatgatccacaaatatactcattcattataagcaggcatctctattagctttaggcactacattattaaaattataacttcactaagcagtcaactaacttttaatctctgtttttatgtggtggtaaaattctactgcctgaaaataacaatgttataaagaacttttctataaatttacaaactgggagaaaatctaaataactttctgaaataatcagatttcatttgagcctaaagtgaattgaaatagtaatggaaatgagctataattttcttcgtatagtatgttattcctctagtgagawctgattaaaaatatgccagtgttcaggcacattttattattcaccatattgatgaattcaggttatcccaatgtgagctgaaataatatattctaagaggacatattatccttcacggaaatatgcataataaagagaaatttaggaatctatggcttatggtg

SEQ ID NO: 356213 - DNA, 594 bp, Homo sapiens
tttaaaaccatctaaggagaccatgttcttttcttttgctcatatttgcatgtgtttacaaaattactgttattaaacaaaggtgcaagtgtgcaaagaaatggaaggttctgaagatgacagtaaagacacactgtcctaaacttgctctccttatcacctcactgtacagctaatgatttctaaattatctcaaaatgtagtcgtaatgcttgaatggacaacaaaaaacaacagataaaaaacctgtgtgctatggaaatatgtacttagacacataaaatatatctatatagggttcatttaaaggttgtaaagaaggacaagcattcacaaaacttcaaggcatcatgacctctaactttcttcactaatgtgttgatgtctgtcactgcttaacaagcaaaatggcatcagaaagagggtgaacaaataaaggtatatttagggctaatgatgaattcraggtaaagcacatcaatgtttccaccaaggtttttgcttccagtgtggtagggcaaaaagatgtgaactgaattattggtactctcaaattaaatgtattcattttattaattcatttagcaacagaca

SEQ ID NO: 356214 - DNA, 531 bp, Homo sapiens
gaactttgtatatttttcaaagtagaatattaatattcttttcttgcagaaataaaaatagaaagccatagaaaattaaacaaaatgtgcttatgacctcataaatccttttgaatttactcctcatttctaagtgatatgtttgtcaatctttctttcaaaattcaatcagagagagatggcaagaagaacatggagaatgttctttgtctgtcaataagtggtaaaactaggtgttgtttttagttctgatgcctctcactctttttgctaactactatgaaatattgtggcttgtggctaaatgttatctctacaaggttcttcaattacaataactccatttccacagtctaggggaaaactgaaacaagacaacaacaaagtactcctccccctggttcatcagttttctctgtagccactagtcgagtcttttatctaagcatgtctgacttaygcctctcgtcctttacccctcttgcctgtgccattgatagaaaagagcacttttcatgattttctagggac

SEQ ID NO: 356215 - DNA, 627 bp, Homo sapiens
tgtcttttgtaagaagacttgtgattgaatttagggcccaaaatttagggcagataatctagaatgacctctgcattttaagatcttcaaattaattacatttgcgataaccatttttccaaataagataatactcacaggtttcagggagtagyacatgagcatatcttcttaggtgccaccattctacccactagtatgtttaagaaacttactgatcaatagagaataaactacctgaacaggtagttgatattcagactgataagtaccgttataagggcagaaaaagaagatataacatcaaactgttgtatctaatgcaaacatgggagattaggaaagtttcccagagaccgcttgacgaaaagtagaaattaaccaggcaaaactgcagagaaaatgtcttcaaattccagggggaaaaagtatgatactcccaggaaactaaaagaagctcaaaatggttgaggcttagggagtcttggcagtgaaatagtgatcaattggatgtgggtgcatatcaagaagactcggggtaagctgtatcaaagaaaacaagcttttatctgaagctgtaagagtccaataaagagatttaagactggagtagcctgctcagttaag

SEQ ID NO: 356216 - DNA, 627 bp, Homo sapiens
tgtcttttgtaagaagacttgtgattgaatttagggcccaaaatttagggcagataatctagaatgacctctgcattttaagatcttcaaattaattacatttgcgataaccatttttccaaataagataatactcacaggtttcagggagtagtacatgagcatatcttcttaggtgccaccattctacccactagtatgtttaagaaacttactgatcaatagagaataaactacctgaacaggtagttgatattcagactgataagtaccgttataagggcagaaaaagaagatataacatcaaactgttgtatctaatgcaaacatgggagattaggaaagtttcccagagaccgcttgacgaaaagtagaaattaaccaggcaaaactgcagagaaaatgtcttcaaattccagggggaaaaagtatgatactcccaggaaactaaaagaagctcaaaatggttgaggcttagggagtcttggcagtgaaatagtgatcaatyggatgtgggtgcatatcaagaagactcggggtaagctgtatcaaagaaaacaagcttttatctgaagctgtaagagtccaataaagagatttaagactggagtagcctgctcagttaag

SEQ ID NO: 356217 - DNA, 579 bp, Homo sapiens
ctaatttctaacaagtaatacgactaatgatatgcggctttgaaacaactaactagagattgctgatgatattggcgaaaggggttaatgcagattagcaggagtcagattcagcctgaggtgggtagaaacggaaagtcaggaatggctcccctaccccctccaatagggggagaaacctcagcatgtttaaatattattgtgagggatgttttgagaggaaaaggctgaaaataaatgaatgagaagaaaaacaaaatatgtggacgttcctaaagaaagttgtgattcatagtctggatagaggttccatatttatcttaaagctagagatgtttttccatagtaacaggaggcaagtagagaattgggaaaacacccatgcaaatggcagtgctttctggttttatgacatgagtcgtggttctccccaaatgaaaatcctatactcacagtgaaagatgaaggaaggctacctaccaagcataataaaagaggtggtggcacgggagatttgaagagagaaagaagattggaaaaagcagtttccraaaacgacgaagagagctgaataggaaa

SEQ ID NO: 356218 - DNA, 609 bp, Homo sapiens
tatatttttctgcatctatcartatatggctcagagaaggtactcaataaatattgttgaatttaaatgagagaagcaaggaggcttaattattcatcaaagcaagcaatgatcaccaacattattatcatcattatcatcatcaccttcaaacattcaacatgaacaaaatatgttagctaaacaaatgacaagacatactatttacatctacagtacttgtaatcaatatgaatattgtttccatatagccgtggttaataagtaattcagcattgtaaatttgcataatagcaatgtgttatgtgacaagggcggaattataaatatttttataattatatttacaacaaatatatgtcctaatgtttcatgggcaacaccagttttaaaaacggacattcacccattgcatccagcaacctcatagcacataagatacaggactttaatggtattgataattcagttctgaacataggtggggtcaagacaggtgttcataacattattttatatatatgttgcatgtctgaaataatttatattgaaaaaggaaacatacaatttcatataacattttccaacaacaatttccggtctttctat

SEQ ID NO: 356219 - DNA, 585 bp, Homo sapiens
ggattgctaggctactgagagaccaattaaggtaagtaaccaggaatttgaaatgagactgcatgattttattctgtgttgttccttcagttgcattaggcaattcaagtgacttccaaggcggtaggtcggacttagccagggtggggtgtttctaggccaatattaaaaagggtgagagaagcaaggggtttgattgtgtatgcaaaggagtgaccaaaatagactgaaaactggactaaaagtaagaaaagaaaatgagggtatgcatgggatgagacaaagaaaattcaataggaatgattttactataaatcctaatagcagtttggagttgtgttcaaaacatataaagtggtagactgggaacacaatgcttggaactgtgycagatgaggtttttggtaatgacattaggatataatgttgggagcaaattagggagttagtgagttgtcaggaggaaaattaaggacattgagaaactcaaagccgccttggctagtagatagattatcaaattttcatcaagagttattattggagccatgttaaagggaatcaacctaagtgttcatcgatgta

SEQ ID NO: 356220 - DNA, 585 bp, Homo sapiens
ggattgctaggctactgagagaccaattaaggtaagtaaccaggaatttgaaatgagactgcatgattttattctgtgttgttccttcagttgcattaggcaattcaagtgacttccaaggcggtaggtcggacttagccagggtggggtgtttctaggccaatattaaaaagggtgagagaagcaaggggtttgattgtgtatgcaaaggagtgaccaaaatagactgaaaactggactaaaagtaagaaaagaaaatgagggtatgcatgggatgagacaaagaaaattcaataggaatgattttactataaatcctaatagcagtttggagttgtgttcaaaacatataaagtggtagactgggaacacaatgcttggaactgtgccagatgaggtttttggtaatgacattaggatataatgttgggagcaaattagggagttagtgagttgtcaggaggaaaattaaggacattgagaaactcaaagccgccttggctagtagatagattatcaaattttcatcaagagttatkattggagccatgttaaagggaatcaacctaagtgttcatcgatgta

SEQ ID NO: 356221 - DNA, 615 bp, Homo sapiens
tcttttttttttgagactgagttttgctctcattgcccaggctagagtgcattggtgcaatctcggctcactgcaacctctgcctcccgagttcaggtgattctcctgcctcagcctcccaagtagctggggttacaagtgtctgccaccatgcccagttaattattgtattttaagtagagacggggtttcaccatgttggccaggttggtcttgaactcctgacctcaggtgatcacccctcctcagcctcccaaagtgctgcgattacagacgtgaggcaccgcacccagccaaaattaacatttttagggaatgaaagattgagaatcaatgactgcagtacagagggacggcagatgatagggtttgagggcatgaacttcagagctgacagttttaggaaggagtgggagtggcctgtaaagtgcagtgagaagccaggargacacagtccatgaacagttactaatcatgctgagttcctccaccgaaaagttctagtgggagagcaatgaactcaaaggagagccagggaattgttagagcaagaaggtgaaggagctgtacccagaaagaatgcagagtgtaggggatttggctgaggaggagtca

SEQ ID NO: 356222 - DNA, 620 bp, Homo sapiens
ataatgttaactatgtagtaaaaataaaaaaggaagtcctgttcacaatcacatgtgtgattaattgtcatgtccctgcaggcactttcattctgaaacattttctcattctttttctgatttctatcatcctgataatttataagttacaagttaggtattttgtagaatatctctgatttggcttaatgatgttttctcacaagtgcattgaggttattcatcattatcaggaatatcacagaagaggtgctgttttctttcatcccatcttactaggtggtacatgatttggtttgtcccattattggttatattaactttgatcacctaagatggtttctgtgaggattttcatttgtgaattaactctttgaaataatgtcaatatttgttctcatttaaaattgaagctttcaatttacttattaagcataaatatggattcatggatttctattttattcaaagaattaagacatattattctcattctttgctttgatacagaaattgtcccagrtttctctagttctttaagacatactccatttttttgttgtttttttgacatgcgcctgtgttttgagcacatttttattttctatctcaacatgtgt

SEQ ID NO: 356223 - DNA, 591 bp, Homo sapiens
aggcaggtcatgtcatccttcgactcaaaactcaccagtggctcccatcttagagcaaacaccaattttcttccaatggcctgtaaggatctacaagatgtggtcctagttatttctccaacctcatctcttaccactcctgtgccccgatcacctactatgctccagctacacaagcttccttgctgttccacatgctgatccctctacctgaaatgatcttcccccacataccacatggtatgttcccttgcctctttctgatctttgctccatgtcactttctaayaggtgtggtcttctctgagcactcaacttaaaattacaatcttcccatcctacttactggctaccctatcaccctaaactgttttaatacatttaggttttttttattctatctccccattttagaatgcaagctccgagagggtggagactttttgggtctgatttgttaactactgtacttagaactggatctggcacaaagtaggtgatcaataagtgtctgttaaatgaatgactaactgagcagttattgtagtgacatggagagatctctaagcatcgattactatgtgaaaaaaa

SEQ ID NO: 356224 - DNA, 640 bp, Homo sapiens
ggtcctgcactgacggcaacttgcgaagcataatgaattgcagattccttctggagatgcttcagctccttgatgtctcagatgtgtggccagcatggagcgctccttggcagcgaggatccttccgcctccagctggagaggaggtccagatgacagaaaccaagggtatcactcasatagagcatgggtttcccaagactctgtggagcaggctcacatacatgaatggggctttggggagcctaccctttcagcagatccaaaccacacagatcacagagatctatggaaaataatgtcttcctcatgagttgactcaatgttagcaatagtctttggtttggctcagtggcactctgggtggagaaatgatgcaaagagctttttctctaagaaaagggggcaacaaagttggcaaaggacatgctctgtaacctcaagaaaggccttcccaagatagcatttgctttctgttcagggaagcaccatgggctttggttctgtgactagtgtttccagttatatttcttacctattattatcaaaccataaaactaatatggatgcagctgtctataaatttgattcttccccaaaccctgagaggtaactgtcatatatcccattttacaaataag

SEQ ID NO: 356225 - DNA, 438 bp, Homo sapiens
caaatccaagtcaaaggactacccaaaataaactgtctgtactcttggaaagtattaagtcaaaaaagacaaagactgatgatgaactctttcaggtgaaaggagactatgcagacgtgacaactcaatgcaacatgtgatcctggattggaacgtggaccagaggaaaaaccttttgttttgctataaaagacatcattgggacactaagtaaaatttggataaatgttgtagattatagtactatatctatcttaatttcctcattagataactgtactgtaattacacaagtcagtatccttgtttttacgaaatacactcaagtatttacaggtaatggagcattgtctacaacttacttttaaacagttcagaaaaaataaccatatgcrtagagcgagaatgtaaaaccaatgtggtaaggggtaaaccctg

SEQ ID NO: 356226 - DNA, 383 bp, Homo sapiens
catttaataattattctttcattcaacaattatttgcaagctccgactatctaaggcaattatctctttaagatggttttgcatgtattcctactctgacaggaaataaacttagtagagttattttttctttttgtaaattcatagttccaccttgattattatgttaacattttagacatcaaaawagaaccatcaaaatatctacaaaaatgcttccaagggacttccacttacagaaggataaaatagaacttttttccttcctatttatcccattaaaggcaaccacaaatcccagatattatattggaaaaatgcttaagaggatctcgaaaagtagagtgaagaaggaagaccatacaaaaagctctgaatccaag

SEQ ID NO: 356227 - DNA, 494 bp, Homo sapiens
gaagctgtcatattaggggaaagtccacaaatggacagtatgtgtgttacacaaattcactcttagcatttrtagatacctaatgaatggaggctcacattcaaatgtctgaatatttaaaagttacaaatcatgctaaataattattaaataaaatccttctatcatctgcataatgtcctgcaaggtcaagctcaaaattagaattctcagattcctagaagtgtttttactgaaatgaaatgtcaatcctaggtggccagatcacttcctgaagcccatatcttattcattcttacccctgttaagtccagctttgtataagagaccccacaggaatgcatgtggacactctagcctacatgtccaagatctgaccacaaaccctatataaagtctaccttgggctagaggtacccattacagtagttatagctgctctcaggaagacacaatgagaaaagacacccttgcagacccttaaaaaagagttt

SEQ ID NO: 356228 - DNA, 494 bp, Homo sapiens
gaagctgtcatattaggggaaagtccacaaatggacagtatgtgtgttacacaaattcactcttagcatttgtagatacctaatgaatggaggctcacattcaaatgtctgaatatttaaaagttacaaatcatgctaaataattattaaataaaatccttctatcatctgcataatgtcctgcaaggtcaagctcaaaattagaattctcagattcctagaagtgtttttactgaaatgaaatgtcaatcctaggtggccagatcacttcctgaagcccatatcttattcattcttacccctgttaagtccagctttgtataagagaccccacaggaatgcatgtggacactctagcctacatgtccaagatctgaccacaaaccctatataaagtctaccttgggctagaggtacccattacagtagttatagctgctctcaggaagacacaatgagaaaagacamccttgcagacccttaaaaaagagttt

SEQ ID NO: 356229 - DNA, 501 bp, Homo sapiens
tgggcagggatttctgggtctgaatgaacactggggcatggtctagaatacagtaggggactatcgggaggaacatagctttagctccatgaagtccgtgttcacgaaaagaaactggccagggaaattcagttctgatccttttaaagggaggggcccagggaagggacatctcttcattttgtctwagtgcagtagtggtattctggtgaggatcagggctctagaatcagaagatctgggttcaaatcctagttctgtcatttaataattaagtaactctgtgcaagttgtttaaccactacaactcagttgcttcatcattcaaaagggaatcataatggcacctacttcacagtatttgtgtgaagatttagttgacatgcataaagcactttataaagtagctatcacaggatatgcactctataaatattggatatttgaaatagtagtagtggtgtggttggtagaaatcatcataataatgtgctagttctg

SEQ ID NO: 356230 - DNA, 501 bp, Homo sapiens
tgggcagggatttctgggtctgaatgaacactggggcatggtctagaatacagtaggggactatcgggaggaacatagctttagctccatgaagtccgtgttcacgaaaagaaactggccagggaaattcagttctgatccttttaaagggaggggcccagggaagggacatctcttcattttgtcttagtgcagtagtggtattctggtgaggatcagggctctagaatcagaagatctgggttcaaatcctagttctgtcatttaataattaagtaactctgtgcaagttgtttaaccactacaactcagttgcttcatcattcaaaagggaatcataatggcacctacttcayagtatttgtgtgaagatttagttgacatgcataaagcactttataaagtagctatcacaggatatgcactctataaatattggatatttgaaatagtagtagtggtgtggttggtagaaatcatcataataatgtgctagttctg

SEQ ID NO: 356231 - DNA, 591 bp, Homo sapiens
gccaaacagaaagatgcatatctaaatagaaacaggcaaaaggctctaacagcagagggaatctccattcaacatgaagttatacaagtagaagtgagagaatttctaaatttgtacctaataacaatactatggtctcaaaatagatgaaattaaaaatgacggaactaaaatgaaacattagacaatcccataatcacagtggaagattttaacacacctcactgagtacttaagatcaaccatcaaaatgrttgcagaaataaagaggaataggaagaataattataaagacatcatagagaatctcagcaaaattaaagctagttccaatcttcttgatgattttgtctgatcaaaggttgtacagaagtcccgcatataaaacctttacagagcatttgaagccaatgaataaacttgatccaattacatatatagagcactttactcaattatttctgcatacataggagaaattatacttgatattataaaatatttggaactgaatgtcaatgagtagtgtataattcaacatggaaggatgcatgacaacttaagctttaaatgcatatcttatatagcatt

SEQ ID NO: 356232 - DNA, 319 bp, Homo sapiens
cttacatgttccctgtgcagtatttccagggaagaagtgaggtactctcaagagacaacatttgtatgttattcatgctcagcatgtcatccagcagccaggacattgttggaacaagttggcaccttagtaggttttgtgcatatatagtgttcaattagcagaagaaattaattttgctagtcagaaataaatcctttatgcttggaattactgtgaataaagctggtgaactctaatgtaataytactttatagatcctactagttactttaggccttccaaacatactgtaatctaaattactgtcaagaaagtg

SEQ ID NO: 356233 - DNA, 566 bp, Homo sapiens
gactaacttggacaataggtcgtaaacactaaggaggctgcagtaggggaaggcaaaaattgatctacgggatttagggaaaaatctattaaattagaagaaaatagccagaggttgagtgaaacaccactagtgatgtgcattcatacatttcctagtgttctagggatggaaaagctactgagggtagttttgtagagcagtcagttgacaaggaaaatgagtatctgttcagtcttctttatttctttttagtttttgtggatacatagtaggtgtatatatttatggggtacatgaatgttttggtacaggcatgcaatgtgaaataagtatgaayattcttcatcaataacaccatgaagaatgggatagccatcccctgaagcatttatcctttgatttacaaataatacaattgcattaagttatttaaaaatataaaataaagttattattgactataatcaccctattgtactatcaagtagtaggtcttattcattctttatatttttgttgtaccaattaaccatctccaaatctcccccaacccccactactag

SEQ ID NO: 356234 - DNA, 628 bp, Homo sapiens
gttgaataatattccattgtttgtatatatcacattttctttattcatctgtccatatttgtttggatttttcccttaagttggctattgtgactagttctgcagtgaagttgggagtacagatatcttttttgagattcttatttcagttcatttgggtatatactcagaattaagattgctgtatcatatggtagttctatttctaatttttaaggaaacttcatactgttttccacagcggctgcattattttacattcccaccgacaatgtacaagggttccarttctttaacatccttgcctacacttctttttttttttataaaagacatcgtaatagctgtgagctaatatctcattgcagcttttactttcattttgctaatgattagtgatgttgagaatctttttataatacttattggccatttatatctcattcttaaatcaggctatttgttgttgttttgctatcgagttataggaattcataatatattttagatgttaactgcttatcaatatatagtttgcaaatatttcctcattccatagatttcctttttgttctgtggattgtttcctttactgtgcagagctttttagtttgatagagttccattt

SEQ ID NO: 356235 - DNA, 505 bp, Homo sapiens
ttttgcctgaatttacatatatgtaaggggctactgcttttcatttctttggagctctgcaatcaatgaagtaggtacaaagaatctgtgaagaaactgtgtgtcgtcagtaatatytaagcctgtggcaggaaggtaaagaacagtgggccagaatgagaaggaggtcatgggaagtgcaactaccttggagtttcgcttcttaaatcccaaatgccttagcctcatgtaaccagtatctactctcatctgtatttatgcagaaaatactgactaggcaattatcaaagacctcaaatctcgttcccttttcttctggataagtgtgggtgccctttggttcacaacagagaactgtagttactttatgaaagtttaaatatcggtcatctaatttagcctcttgtggaactatagatgtttttaaaatctattttttaggaaagatagtatggcaaagtttgcttaaggaaaaggcataaacttgaggctagcaggctacagg

SEQ ID NO: 356236 - DNA, 536 bp, Homo sapiens
cttctctccacttcagcctttcatttcctcttagatgctgtggcttgggaatatgattatcacttaactgaaatgtgtctctaaattacagataaattggctcttagtaaggccttaagggtctcctctgcgttgcaaagtgaataaactcagtgaagaccctttctgccattcagaagccttttctacattatactaaatttttcaccatattccggagaattggggttgtctcaaatttctgtacacmatctacatccactcacaagtctgtgttgacatttagccaccatctgctctgtacatgaactttgcttttttcatatactctgttaagatctgtatcggattttctatattagcattccaagtttttgtctgcacaccttatatgtactgttgctgggaattaaactcacttgaatattagttcaaaagccaacccagtcataagatatgactgaagcacaggaagcaagtcttggcagtaagtggttcttttcttgcctgctttggcaggtgctcagaaacccact

SEQ ID NO: 356237 - DNA, 516 bp, Homo sapiens
atagacagcggcccactcatgtgccatgtaggggtttgaattttattctaagtcctggagcagacacagtgctaagcagacttcaccatttcactctgctatctccccactgtgatcctatttagctttctgggggtgagagcaccttctgtgttttcctccctcccccagcaccctctgttccacaagtccggagcaaaatggatgcagaggaatgattctgcaaccacttccctgttcccatcttttcctcaggccataacaaccacctaaacaatatataaaaaggccttaattctggtacatattmaataaaacatgtgagattaggacaggcttcctaaggtatgtgttgaaagagatggaggatttggacttattgtgaggatagcacagagcattgcacctgctagttggcctttatagtaataggacagcttattgcgactttttctttctcacctgacatttaacagctaacatgttttaagtgcttactgtgtgcctagcagcatg

SEQ ID NO: 356238 - DNA, 484 bp, Homo sapiens
tgcaaccacttccctgttcccatcttttcctcaggccataacaaccacctaaacaatatataaaaaggccttaattctggtacatattaaataaaacatgtgagattaggacaggcttcctaaggtatgtgttgaaagagatggaggatttggacttattgtgaggatagcacagagcattgcacctgctagttggcctttatagtaataggacagcttattgygactttttctttctcacctgacatttaacagctaacatgttttaagtgcttactgtgtgcctagcagcatgccaagtgctttgccagagcctgggtaacagacgggtttgtgacatgtgtacccaaaattggataaattttttcctcaaaggtgacagatgctataacaaaaatacttgtcttaaaaccttagccattttctgttctaggaacagaatcagttttgaggctctttgtttgtttggttggtttaaacccta

SEQ ID NO: 356239 - DNA, 603 bp, Homo sapiens
ggatttgaaattgtgacgtcaagagagtygaattcacctctaagtacaaagggactgtgatatgtaaacctcagagtggtaggcagcataatctgtcaattgaattaagttgcagagaaggaacagatagaagaaaaaaaagaattaagcagatataaagtgagaagcagtggtggaaaacagaaaatctcaacaattatttagaacttggtttcagttcttttctcaggccagcttcactctttcaattcagtaaatatcactttttgcctaagagaatatgaattgatttctattattggcaatcagtaagccaactaaatcaagattgcgtttgaactctgttttggagaataggtattattgagatgaaacaatgagagaggaggaggctttgtcagctgaatcatcttgatcaaagagactcattatataaaatttatgtttgtttggtgtaatgccatggtaaaggaaagaagacagtaagaaaaacaaaatataaagatagtttgggctgagatcatgaaaggtctggaataacatggttaagcttttgattttataagaaaggattttgatataggaatgacgtaactgtgcttg

SEQ ID NO: 356240 - DNA, 606 bp, Homo sapiens
tggaattaacctaaacgttccatagatgactgcataaacaaaatgtaaaatatacatrcatacactggaatattattcaacttttaagagaaaagatatttggacctatgccgtaacatgatggaacttgaagacattatgctaagtgaaataagccagtaacacaaggaaatcattacattattccttttattggaagtacctagagtagtcaaatatgtgaagacagaaaacagaatggtggtagccagagacttagtaggggaaatggggagttagtttttaatgagttcagagtttcagttagggtacatgaaaaagttcaaatgtaattcagttgaaattaaataaaatttaaatattacttcttcagttatcttagccacatttcagttgcttagtatcctcatgtggctagtggctgccatcaatgtggaaagtggtaaaaccatcagatctcatgagacttattaactaccacaggaaccgtatgggggaaactgcccccacgatttaagttatctcccactgggtccctcacacaacacttgggaattatgggagtacaattcaagatgagatttgggtggggacacagccaaacca

SEQ ID NO: 356241 - DNA, 606 bp, Homo sapiens
tggaattaacctaaacgttccatagatgactgcataaacaaaatgtaaaatatacatacatacactggaatattattcaacttttaagagaaaagatatttggacctatgccgtaacatgatggaacttgaagacattatgctaagtgaaataagccagtaacacaaggaaatcattacattattccttttattggaagtacctagagtagtcaaatatgtgaagacagaaaacagaatggtggtagccagagacttagtaggggaaatggggagttagtttttaatgagttcagagtttcagttagggkacatgaaaaagttcaaatgtaattcagttgaaattaaataaaatttaaatattacttcttcagttatcttagccacatttcagttgcttagtatcctcatgtggctagtggctgccatcaatgtggaaagtggtaaaaccatcagatctcatgagacttattaactaccacaggaaccgtatgggggaaactgcccccacgatttaagttatctcccactgggtccctcacacaacacttgggaattatgggagtacaattcaagatgagatttgggtggggacacagccaaacca

SEQ ID NO: 356242 - DNA, 601 bp, Homo sapiens
tagttgacaaagcataggcaaggtttgagagaagtaactccaatagtcacataagttctgtgggcaaagtattatcaaacaacatcccatgctacagagaactgtttcatgaaagaaagagtcaattgatgtgccaaacttctttgttttcctattttgagaaacaggcacagccatcccaaccttcagccaccacaatcctgattagtcagcaagcatcaatattgaggcaagaccctccaccagcaaaaagattacaattgctggagaytcagatgcttgttagcatttttaagctataaagtatttttttcaccaaggtatgcacattattttttaatgcataatgtcagtggacacttaaaacactactatatagtctaaatataacttttatatgcactgagaaaccaaaacaaaattgtgtgattctctttattgctatatttgctttaatgctcaagcttggtaccaaacttgtaatatctctgaggtatgcctgtattaagtttatttcagcttgcatattttaagaagacagattggaaaatattttttaaaacatcagccaagtgatgaaagggctaaaatatgtgtatgt

SEQ ID NO: 356243 - DNA, 591 bp, Homo sapiens
gacttgctcctccttgcctttcaccatgattgtgaggcctttccagccacgtggaactgtaagtccattaagtctctttcttttgcaaatttcccartcttggtaatgtctttatcagcagcatgaaaatggactaatacactgtgagactgagaaaaagtcactggttctcttattccctattatctatgtttttaattgccagcctaaataaaaatggaacttaaacaataatctagaataaaggaataaaattctctgagaacaagcttttaaacacctctttttaatgaaggaaagttatcctattaattctggcaagaacttatacttgacaaaaatgtacatgcagggtggtttaggaagctccagtccatgctatggtttccttagcttctgtcatgcaattgagtttgtatgttggagattagttttttagggtatggtatggccctgagaattaggctggtgagattgcaagttaagaatgtttattttcccattctggttaatttattattatactttaagttctagggtacatgtgtacaatgtacaggttgttacataggtatacatgtgccatgttgg

SEQ ID NO: 356244 - DNA, 591 bp, Homo sapiens
gacttgctcctccttgcctttcaccatgattgtgaggcctttccagccacgtggaactgtaagtccattaagtctctttcttttgcaaatttcccaatcttggtaatgtctttatcagcagcatgaaaatggactaatacactgtgagactgagaaaaagtcactggttctcttattccctattatctatgtttttaattgccagcctaaataaaaatggaacttaaacaataatctagaataaaggaataaaattctctgagaacaagcttttaaacwcctctttttaatgaaggaaagttatcctattaattctggcaagaacttatacttgacaaaaatgtacatgcagggtggtttaggaagctccagtccatgctatggtttccttagcttctgtcatgcaattgagtttgtatgttggagattagttttttagggtatggtatggccctgagaattaggctggtgagattgcaagttaagaatgtttattttcccattctggttaatttattattatactttaagttctagggtacatgtgtacaatgtacaggttgttacataggtatacatgtgccatgttgg

SEQ ID NO: 356245 - DNA, 606 bp, Homo sapiens
aggagtggtagcaggttttagacctgaattcgagtcctgagatacttagactcataaacttccccctttatgcatctgttatgtgattagcattgtgctgagcaacccggggaacgcagaaggaagacacattattttcctcattttcctaagtttgaccaatatcaatttttgtgatgataagtcctcatgaagataaaactgtcaaactacattaatgtgttacattgagaaaagaaggagagaaaacaaaggatatttattgatctcttatttctcaaatgtaattttatatattgaatctctttttgtccttaaattaactctctgaaatggtttgtttcatttctgtcatttaaccaataaggtaactgagkctcagaggattatgtggcttgttcaaggttatattgtgtataaatgcagattatctgtgactttaaagctcttactccttcaccacttccaaaacagagcatctgattgacagaagttagatcagattagaatgatcatctctgaactttcagaatgaatgatatcacatatacttacatacattataaatggtaaaactagagcccaaacacagctctttcagtttca

SEQ ID NO: 356246 - DNA, 606 bp, Homo sapiens
aggagtggtagcaggttttagacctgaattcgagtcctgagatacttagactcataaacttccccctttatgcatctgttatgtgattagcattgtgctgagcaacccggggaacgcagaaggaagacacattattttcctcattttcctaagtttgaccaatatcaatttttgtgatgataagtcctcatgaagataaaactgtcaaactacattaatgtgttacattgagaaaagaaggagagaaaacaaaggatatttattgatctcttatttctcaaatgtaattttatatattgaatctctttttgtccttaaattaactctctgaaatggtttgtttcatttctgtcatttaaccaataaggtaactgaggctcagaggattatgtggcttgttcaaggttatattgtgtataaatgcagattatctgtgactttaaagctcttactccttcaccacttccaaaacagagcatctgattgacagaagttagatcagattagaaygatcatctctgaactttcagaatgaatgatatcacatatacttacatacattataaatggtaaaactagagcccaaacacagctctttcagtttca

SEQ ID NO: 356247 - DNA, 502 bp, Homo sapiens
atttaatatatttggaaccaaagtcttcatttggttgtgacgagtgggagaagatcaatgcctggtgctgtgtacatcagcatcttgtacaaatcttgtaggactgatgtttgctctgtgtatttgtttgtgctataatattatttagtatataattgctctgagaatagaattgtctcctataagcaagtgtttatagacacctaaacgatgagaatattccaagaacaggtcacccagaatattcccagaacataactcttcaggcaggccataggttttagaggaaagatcttaaaataaaatgggctcttaactggggatgtgactcagtctttgctgttactctaagaagatcaagacactcaggagataatttcttcactaaggcagccataaacttyaaggaaaccacatgtaagtgtaagatggtttaatgattttcatgtgtttatttatttttgtctttctctgccatccatttaaaaatttgtatcttgtg

SEQ ID NO: 356248 - DNA, 622 bp, Homo sapiens
ttttgctagccaaatatgtaaaaataagccatttcctttttccttttttcttttttcacagacagtgtcttgctctgttgcccagtcaggagaacaatggcgctatcatagcttattgtaatttcaaatccctggactcaaacaacaccccccgccacctgcctyagcttccaaagtagctgagactacaggcatgcaccactatgtctggctaattttttttttttattttcttattttttgaagaaataggccgcactatatttcccaagctgatctctaactcccgggctcaagggatcttcctgccttgaacttccaaagtactaggattacaggtgtgagacacggtccccagccaagcatttatttttaaagtaaattatgtctaaatgttagtacgaacatcttagttgtcagacttaccaaaaagtagcattttactgcacgtgtgacgctttctagtaatattcaaatatttgattctggtagtttttcatagatcatttgaggaaacaatatttatttaatgaaatccgtaaaccctaaaaccaacttcctttcatctgtaacaaacttaaagattatttgacatatataccacatatatgtgtatatatat

SEQ ID NO: 356249 - DNA, 622 bp, Homo sapiens
ttttgctagccaaatatgtaaaaataagccatttcctttttccttttttcttttttcacagacagtgtcttgctctgttgcccagtcaggagaacaatggcgctatcatagcttattgtaatttcaaatccctggactcaaacaacaccccccgccacctgccttagcttccaaagtagctgagactacaggcatgcaccactatgtctggctaattttttttttttattttcttattttttgaagaaataggccgcactatatttcccaagctgatctctaactcccgggctcaagggatcttcctgccttgaacttccaaagtactaggattacaggtgtgagacacggtccccagccaagcatttatttttaaagtaaattatgtctaaatgttagtacgaacatcttagttgtcagacttaccaaaaagtagcattttactgcacgtgtgacgctttctagtaatattcaaatatttgattctggtagtttttcatagatcatttgaggaaacaayatttatttaatgaaatccgtaaaccctaaaaccaacttcctttcatctgtaacaaacttaaagattatttgacatatataccacatatatgtgtatatatat

SEQ ID NO: 356250 - DNA, 601 bp, Homo sapiens
tgctatgttagtatagcttaacataatactcaggcaacctatcatgtgtcaggatagagtgaaaagaaatgaagtaagatggtccacaaactttctgaagcctcccacatataaataacttgatgaagtattggggkaaagagcaacagagtcagagttcgcaggttaaagcaattgcctttcctattttgcagccatatgtctgttacagtattgagctgtcacatattgagactgtcagtgtgacatcttcatcagtttcaaagtgactctggccccaaacatatctggcaattactggggcaccaccctcaccctatcctccatctccctggcatcttaagagaatgtgcttgccatgccagacacatctccagtgtgatttaacttttgtgggcatcagccaacactcagcacacataaaaaacccaatcagcttcatccccatttttaaccgtgataagagtccagaaaagagcttcaaataggcagaagagattccagctcatttctgagggtgaaagccaaaagcagctttctctctacagtggaagtgcacatcagacattcaggagatgaattaggaaagtcagaaaactcc

SEQ ID NO: 356251 - DNA, 552 bp, Homo sapiens
caatattaggtgatacattccctcttccttatggttagcaatttgaatctcatgatcctctattaaatttattatttgttgggacataatttgcaaagatttcatctttagtgtttctgttttagctttcgttataaattatgtgttcacattcacayggtgagaatatattcttgtggaaattatcatggtaaatgggcacaaaactatcaaattgaaaagaagctggaaaaatgtgcaggagatgattgcatttattgatactggagcttgagtcctgtgggggtgtcagtgcctgctggactctaagaatcaggaagagatcattgtgtgcttacttgccttcatacttgctctgtgacatattcagcagaagcagcaacaacatgtggcaaatgtctcaacgagatataggatttggcctctcattagaatggaactaaagccatcctcagaaggttagcaagaattttggacagaaatatatttataaccatgcattaataaggctgcacttttgtcacaggatccttagggttttgcttttccagc

SEQ ID NO: 356252 - DNA, 513 bp, Homo sapiens
ggtgcctttgcccgagttctgcttgggcctgctggkgttattctgcccacttggcccagcaggctgcactccactcatgctgctggcctagatcccatgcctgctgagggcaatccaggtgctgagtggcaagggttgtgtaagcgagcaagcatgaggtctagccactgcacactgccaggcacaccagctgctgtggtggggcaggcagctccaggtgctggcacaggttccagctctgtgtaaggctgtggctggatcagaggtaccaaaagcagcttccactgcaggcacctgtgtgtggacaaggagaatgcagtggcgctcagaagcttggaaacacaaggaactgcagagccccagagagggtgtcacagccctggctcagggagcccctagatcttttatccttcttgttgcctgcaatgtgatgagcaggggggtatgtttcagccctgtttgtgttacagctctttcagtcccaccatttggtacatcctgagtacttgtccc

SEQ ID NO: 356253 - DNA, 555 bp, Homo sapiens
caagggcaggtgttctaaattctacataaaggtttgaagccacatttgcctactatgggacaccaaattccttacccttcctataatataaaggacacatataagggagagttaatatgtgtcctgatctaatgtttactataagataacattctttattttaatgatgttttgcttcttagaaaatattgactctttgattcaggtatgtggacagactacagagattgggtgcaactaagatactgtcaacttgtacctacttccatgtggagagtctggctttgttgtttagtatatcttgcccttgttctttgcccttaatccaattatattgatattatagatataactggacaygaagataagtggaaggctccctatttccccttgtgagccccaaagatttgaggcaggtctcagttaatttagaaagtttattttgccaaggttgaggaccctcacctgtgacacagcctcagggagtcctgacaacatgtgcccaaggtggtcggggcacagtctgggtttatatattttaggaagacagaagac

SEQ ID NO: 356254 - DNA, 555 bp, Homo sapiens
caagggcaggtgttctaaattctacataaaggtttgaagccacatttgcctactatgggacaccaaattccttacccttcctataatataaaggacacatataagggagagttaatatgtgtcctgatctaatgtttactataagataacattctttattttaatgatgttttgcttcttagaaaatattgactctttgattcaggtatgtggacagactacagagattgggtgcaactaagatactgtcaacttgtacctacttccatgtggagagtctggctttgttgtttagtatatcttgcccttgttctttgcccttaatccaattatattgatattatagatataactggacacgaagmtaagtggaaggctccctatttccccttgtgagccccaaagatttgaggcaggtctcagttaatttagaaagtttattttgccaaggttgaggaccctcacctgtgacacagcctcagggagtcctgacaacatgtgcccaaggtggtcggggcacagtctgggtttatatattttaggaagacagaagac

SEQ ID NO: 356255 - DNA, 589 bp, Homo sapiens
tgttaaatgaaatctaaagcagaagtacttaaaatgaacaaaagcaggagattgtgccaaaataaaaatttaacattccttaaaatgtttatttttcatcatgaaattttaaatacaagctgcatttctacaatgctcaatttaccaaccactttaggagattctgtttaactggaagaagtttgacaaatttggtggccttgtggtatatggatattttaacaaaaagatcaacagatcatccaggtacctttgactctagagggatataacacttttaggtggaaacctacaatatacttggacatctgcataatgactaaaattagcataggtttacatagtacacaacttcattagaattttgatgccttggaaaggaacagaaggtttgtaaatttcctaagggaaagtctctcgagagygtgaaggccttaaacaaaatcagcccaatgtgagaggcatgttgtgaatggctgaaaggacataaatagagttcatcaagcaataaatgtattgcctttttcaaaaaaaaaaaaaaaagtgacccacttctgtaatacaagcactcttaccatactagggacac

SEQ ID NO: 356256 - DNA, 596 bp, Homo sapiens
tctatctcttcctccttctgccatgtaagacttgcctagcttcccctccaccttccacaatgatkgtaagtttcctgaggtctcccaagccatgaagaactgtgagtcaattaaacatcctttgtcttttccagtttcagataagtctttatagcagtgtgagaacagactaatacactctgccagagattttgagatctgccaaattttcagccacactcttcacgtgggaataataagaaatgattcttttcctcctgttgtgccagtggtgggatcttctacctgaatttgtgagcaaagtgcaaagctgtccaggacagtgggtttctgtagaggtcttcaaacttcagaggcaacagtacaatatagcaaagtagtttgcaaaacttttaccaccaagatctcttctagtattttccttctgttatgtgaacccaatattatttttcctactgaacagagcccatagacttaataatagcatgtttgccatatttttatttattaaccagataaattattcccttgttcttccaggttgatattaaacacatggttacctccttgagtttacttcaatcagccacaatggc

SEQ ID NO: 356257 - DNA, 619 bp, Homo sapiens
ttatttttatagttagcagtcataaggatgtgggtctaaaagattctggactataaactgctaagaggtagtttactccatgatatggtttggctctgtgtccctaccaaaatctcttattgaattgtaattcccaatgttgggggagggacctggtagaaggtgatttgatcatgggtgtggattttcccctttctgttctcatgacagtgagtgagttctcatgaaatctgatggtttaaaagtgtatggcgatttcctcttcgctctatctcttcctccttctgccatgtaagacttgcctagcttcccctccaccttccacaatgattgtaagtttcctgaggtctcccaagccatgmagaactgtgagtcaattaaacatcctttgtcttttccagtttcagataagtctttatagcagtgtgagaacagactaatacactctgccagagattttgagatctgccaaattttcagccacactcttcacgtgggaataataagaaatgattcttttcctcctgttgtgccagtggtgggatcttctacctgaatttgtgagcaaagtgcaaagctgtccaggacagtgggtttctgtagaggtcttcaaacttca

SEQ ID NO: 356258 - DNA, 596 bp, Homo sapiens
tctatctcttcctccttctgccatgtaagacttgcctagcttcccctccaccttccacaatgattgtaagtttcctgaggtctcccaagccatgaagaactgtgagtcaattaaacatcctttgtcttttccagtttcagataagtctttatagcagtgtgagaayagactaatacactctgccagagattttgagatctgccaaattttcagccacactcttcacgtgggaataataagaaatgattcttttcctcctgttgtgccagtggtgggatcttctacctgaatttgtgagcaaagtgcaaagctgtccaggacagtgggtttctgtagaggtcttcaaacttcagaggcaacagtacaatatagcaaagtagtttgcaaaacttttaccaccaagatctcttctagtattttccttctgttatgtgaacccaatattatttttcctactgaacagagcccatagacttaataatagcatgtttgccatatttttatttattaaccagataaattattcccttgttcttccaggttgatattaaacacatggttacctccttgagtttacttcaatcagccacaatggc

SEQ ID NO: 356259 - DNA, 596 bp, Homo sapiens
tctatctcttcctccttctgccatgtaagacttgcctagcttcccctccaccttccacaatgattgtaagtttcctgaggtctcccaagccatgaagaactgtgagtcaattaaacatcctttgtcttttccagtttcagataagtctttatagcagtgtgagaacagactaatacactctgccagagattttgagatctgccaaattttcagccacactcttcacgtgggaataataagaaatgattcttttcctcctgttgtgccagtggtgggatcttctacctgaatttgtgagcaaagtgcaaagctgtccaggacagtgggtttctgtagaggtcttcaaacttcagaggcaacagtacaatatagcaaagtrgtttgcaaaacttttaccaccaagatctcttctagtattttccttctgttatgtgaacccaatattatttttcctactgaacagagcccatagacttaataatagcatgtttgccatatttttatttattaaccagataaattattcccttgttcttccaggttgatattaaacacatggttacctccttgagtttacttcaatcagccacaatggc

SEQ ID NO: 356260 - DNA, 590 bp, Homo sapiens
gatttgggcagagacacagagtcaaaccatatcagagccctcggggcctcctgaaaatcttaaaagaagtttaagaatttttttctctcttttctcactgattctgatatgtggtccattctccttcctcactgtctcagataagtagaaagatgcagtagaaggtagaagcaattgttggagcatccagccctgctcctagctggaygtgagattttagggagctactctgtatcccatgaactcttgttttccatctattaaatgaagacattgggttgtgtgatcctgctatctcttccaattctttagtgctgttacattttttaaacactactttctctgagcctcatttttcttatctatagaaatgggaagaatgtctacctcataaggtgacttgaagaattagaagataataatcaagtatctcttcctatacaagtctatttccttcctgaatttagttagcaagagttcacagagcaagttgagataaagagtataacactgtttgaatctatttgagttcaatattttatatagcaagtgaatttggggtagtaagtattcattaaatgtttttagat

SEQ ID NO: 356261 - DNA, 590 bp, Homo sapiens
gatttgggcagagacacagagtcaaaccatatcagagccctcggggcctcctgaaaatcttaaaagaagtttaagaatttttttctctcttttctcactgattctgatatgtggtccattctccttcctcactgtctcagataagtagaaagatgcagtagaaggtagaagcaattgttggagcatccagccctgctcctagctggatgtgagattttagggagctactctgtatcccatgaactcttgttttccatctattaaatgaagacattgggttgtgtgatcctgctatctcttccwattctttagtgctgttacattttttaaacactactttctctgagcctcatttttcttatctatagaaatgggaagaatgtctacctcataaggtgacttgaagaattagaagataataatcaagtatctcttcctatacaagtctatttccttcctgaatttagttagcaagagttcacagagcaagttgagataaagagtataacactgtttgaatctatttgagttcaatattttatatagcaagtgaatttggggtagtaagtattcattaaatgtttttagat

SEQ ID NO: 356262 - DNA, 567 bp, Homo sapiens
agtagaaggtagaagcaattgttggagcatccagccctgctcctagctggatgtgagattttagggagctactctgtatcccatgaactcttgttttccatctattaaatgaagacattgggttgtgtgatcctgctatctcttccaattctttagtgctgttacattttttaaacactactttctctgagcctcatttttcttatctatagaaatgggaagaatgtctacctcataaggtgacttgaagaattagaagataataatcaagtatctcttcctatacaagtctatttccttcctgaatttagttagcaagagttcacagagcaagttgagataaagagtataacactgtttgaatctatttgagttcaatattttatatagcaagtgaatttggggtagtaagtattcattaaatgtttttagatcctagatatctatgaaaagcagcttacatgcaargcaaccctcactaaagatttattcttgtttccttgaccctgaggcttaagacaaccttgttcagcttgcagccgtggcatctagcatagtacctaacag

SEQ ID NO: 356263 - DNA, 477 bp, Homo sapiens
atataaactaaaaataaaaggatggaaaaagatattgcattccacaggaaaacaaaaaagcagtagtagctatacttatatcagaaaaattagattttaaggcaaaacctatacgaagagacaaagaagattattatatgctgataaagaggtcactttagcaagaggatatgacagttgtagatatacatgcacccaacactggagcacacagatgtgtacagcaaatattatcagagcaaaggaaacataaccccrgtacagtaatagttcgagacttcaacaccccactttcagcattggatagaacttctagagagaaaatccataaagacatatcagacttagtatgcactatagtccaaatagacctaatagatatttatagaacatttcaaccattggctgcagaaaacacattcatctcctcagcacatggatcattgtcaaggatgggccatatgtcaggccacaaaa

SEQ ID NO: 356264 - DNA, 655 bp, Homo sapiens
ccgatagtatttaactctgttatggtttgtgatataagcagaagcatcaaaacagctttacaaaattctctatgataacaccttggctcatttctctctctcaccaaatgaagacattaaatatcactttttttgtattgtggaaacttgtccttatctgatgatatatacatatacattaaattcttacaggaaaggtgacatggtttaataattagtcttgaaaactgcttctcaaacaagataccwctctgaaaataaaataaaataaaataaaaagactaatgagaaagattgctttcatgcactacctgtgtgttatccatggaaaatacagacagattttaagtgtctggggggaatgctatttgcttagaaaggtgtttttcaggcaaaaagtagatgttaaaatttaacactttacttcaaactctgtcatttatccatttggaaaattaacttgaaatataggttgccattttctatatacgtgataggttaacatttgcttctaacaaggtggcatcaaagtttagcaaactcagaatatgacaatgtaagtgtacataatataactgcaagaatacattaccaagtaattgaatgcaatttaaaatgtaaatggtgattttatttaggtgcagataaatgaaaa

SEQ ID NO: 356265 - DNA, 655 bp, Homo sapiens
ccgatagtatttaactctgttatggtttgtgatataagcagaagcatcaaaacagctttacaaaattctctatgataacaccttggctcatttctctctctcaccaaatgaagacattaaatatcactttttttgtattgtggaaacttgtccttatctgatgatatatacatatacattaaattcttacaggaaaggtgacatggtttaataattagtcttgaaaactgcttctcaaacaagatacctctctgaaaataaaataaaataaaataaaaagactaatgagaaagattgctttcatgcactacctgtgtgttatccatggaaaatacagacagattttargtgtctggggggaatgctatttgcttagaaaggtgtttttcaggcaaaaagtagatgttaaaatttaacactttacttcaaactctgtcatttatccatttggaaaattaacttgaaatataggttgccattttctatatacgtgataggttaacatttgcttctaacaaggtggcatcaaagtttagcaaactcagaatatgacaatgtaagtgtacataatataactgcaagaatacattaccaagtaattgaatgcaatttaaaatgtaaatggtgattttatttaggtgcagataaatgaaaa

SEQ ID NO: 356266 - DNA, 364 bp, Homo sapiens
atgatccctgaatattaaataaacttaaatgtgtgacataattaaattgggaggcattttacacaattaactcttcatcctccagaagaggattggatgatatctaagattgaaaaaatcaagaaacagaggtacactcacatgttttagatgtaggatgtgaaggccagaagaaaccgcaaragatccctaaggaccaagcaggacttgtgttccgcaactccaggggcattattcagattgagttctctgggagtggtgcccccagagttgtgaaacaggggacttagggtcagaagaccagaatggggacagtgaggtaggggaacactgtttttcattacacccttgtagtattatttga

SEQ ID NO: 356267 - DNA, 420 bp, Homo sapiens
caactaagttggtaaatccctattatgtactcctacaaaatcttcaacttaactttcataagagacaataatagtgcggtataattattatctaaactatatttaaataggataacatcaagtaactctcaaaagtaaagcagtaacatttaacacccattattttaagagacaattccaacaaaaacaaatagctcaagactgacagaggtaaatatatttaaaaattctaacaagttggattaagaaattttagcaaaattgrcaataaaaatcctaattgttatatgatatcatcaagtacagatacagctctcatatcggacacaattaggataacagtttaatcagaaaagttggttaaaataaaaaacaggaatcatttaaaaaaacagttaaatcctgtggcagacaatgttg

SEQ ID NO: 356268 - DNA, 556 bp, Homo sapiens
caatacaaatagatgataaatgtttgaaatgatggatatgctaattagcccaatctgattcctatatagtattgtatcaaaacatcactatgcatccaagaatgtgtgcaattattacttgtcaatyaaaaatacaattaaaaaaccatttagatacaacagtaaagaagacaaactcttcagcaatattctctagagaaagaaattaaaccttttccactgaatatgatgaggcacttaaacacacacatttggactttatttaatgtaggattaaataccaaccaatatgtttgaagcaatttactactaagagaataaagtctggagagagttctaaaaacaaaaacgagtatcttttctcctaaataaccatgcagaaaacgatgacacatgataaatttttgggatcaaggggaaggagcaaaggagtaggtggcctctgtatggtggcttttcttttactgggttttaagcagtaaccaaactaccaatatactatagaaaaggatgatgctttcatctttattccttaagtatgcaatgtttaataatg

SEQ ID NO: 356269 - DNA, 495 bp, Homo sapiens
cactcctttagttatttaaaatatataatacattatttttaactatacttgccctattgtgctactaacactagatcttgttcattctatctaactctatttttgaatgcattaaccagcaactccttatttaccctccaatactactcttcccaatctctggtagctatcattctactctatttccatgagttcaattttttttttttttttgcttttacatgcaatattggtgtttctgtgcytggcttatttcacttaagataatatcctccactttcatccatgttgttgcaaatgaaatgatttcattcttctttatggctgaataatattccattgtgtatttgtaccatattttctttgtccattcctctattgatggacgcttaggttgattccatatcttggctattgtgagtagtgctgcaataaacatgagagggcagatctctttgttatactaatttctttcttttgaatatacccagaagt

SEQ ID NO: 356270 - DNA, 495 bp, Homo sapiens
cactcctttagttatttaaaatatataatacattatttttaactatacttgccctattgtgctactaacactagatcttgttcattctatctaactctatttttgaatgcattaaccagcaactccttatttaccctccaatactactcttcccaatctctggtagctatcattctactctatttccatgagttcaattttttttttttttttgcttttacatgcaatattggtgtttctgtgcctggcttatttcacttaagataatatcctccactttcatccatgttgttgcaaatgaaatgatttcattcttctttatggctgaataatattccattgtgtatttgtaccatattttctttgtccattcctctattgatggacrcttaggttgattccatatcttggctattgtgagtagtgctgcaataaacatgagagggcagatctctttgttatactaatttctttcttttgaatatacccagaagt

SEQ ID NO: 356271 - DNA, 497 bp, Homo sapiens
attcaaatttttcatcatttttgattagattattatatttttttcctatacagttgtttgagctacttatatcttctgcttattagtcctttgtcagatgggttgtttgcaaatgttttctcccattctgtggtttgtctcttcacttcattgattttatccattgcttggtagaaacttttaaacttgatgtgaccgtatttgtccatttttggtttggttgcctgtgcttgtggggtattgctcaagaaatatttgcccagaccaatgacctggagatcttctccaatgttttcttgtaatagtttcatagtttgcrttcttagatttaagtctttagtccattttgatttgatttttgtatatggcaaaaggtaggggtctagtttccttcttctgcatgtggatatccagttttcccagcacaatttattgaagagactgtcttttccccagcttgtgttcttggcagctttttgaaaaatgagttcactgta

SEQ ID NO: 356272 - DNA, 596 bp, Homo sapiens
acacttgacttccagccatactgtcattaaatctctgaactctaatcaggccaaatgtatcatttcccaaacatatgcatacctatttttatcctccaattttgtgcaagtggcttcatttatataatttgctggttaatttaacctgtaaagtcatacatctcagcctatttaagcctttggagaacctatccatctttcacagccaaactcaatgctcacctttctgaagctctatctgtattagtctttccttcttctaaattaccaaaccattttyaaaatttaccacattctgcttcttgaaatccatattacattcaaatgttggtttatgataaaagtaactaatagcgtttttcataaaatagactctcaataaatttgtgtgaattaatgaattaattatgtggactagaaatggttcatgggctgtaagagaaactgtgcccaaccagaactttggtaagagaaagcctggtgattctaatgaaaatgcaactctcacgtctcattttttaaaacttcattgccaagggctagaaacttatgtgattatatttaaactttaattttaaaatgagattaattatgca

SEQ ID NO: 356273 - DNA, 485 bp, Homo sapiens
tagtgaccacagacctttagcaagacccagtcctgggctggttataagttgacccaacagggtcccagtcatggtggctataggtgtgcttktgacaccccttccccaaccccaggcagttcagcacagggacttcatttgtttgggggaaagtaagggaagagaacaggagtctctgcctgataatccagtgaattctctcagatcttatccaaaccaccaccaaagcggtaccactaggagtctctgtgactcttgtcacagaggcacctctgtgactcttgtagagtcacagcgttactgggcttgggtgccccctaatgtagatatggctgcactgaccaaaatcttagatcacaacactcaattccctttgaatacttggaaagccttcctaatatgggtgggtgcaaacaagtccaaactgcaaagattgtaataaacacctagctcttcaatgcctagacatcaattaatgtccacaa

SEQ ID NO: 356274 - DNA, 533 bp, Homo sapiens
ccagttttcggtttaaatcctgctgctgccaagtttgagtggaaaatcactccattgccagttggcgacttgcatgactcttggacaagaaagctatttaagcaactttgaaatctacttagattttcagagctgtgtgtgtggtgtaacaccagtgctcctgaaaacactgggaggcacgccatcctccctgacatactttcaaatatgacataagtttcacgtcatggataccggtataacccaagagcccaggggggagtcttaggctccctctggtgagctcctgccataaatctgaggactgttattattattattattattagcacacattaattgagcactaactctgtgctaagaattgtgctaagcctttagtgcrttttttgtttaatcctcagaacagctctctgagaggattactgttattatccctactttatggatgaggaaactatgatgtaagaagttatcactagcccaagatcacgtggtttgtcggagttgtgattaaaatatttgtgtgtttg

SEQ ID NO: 356275 - DNA, 582 bp, Homo sapiens
catagctactgaggactgtaaatgcsgttattctcacttgagatgtgctgtaagtgttaaatacaaactagatttcaaacattagaaccaaaaaaagtaaaatatcttaatactttcatttttgaaagtatttttaaatgctaatacgtttgataaattggtataaataaaatatattaaaattaattgtgcctttttacttttaagtgtctattagacaattttaaattatatatattgtttatattacatttctaataaacagctagaagtttattgcaaagttgcatcagtgaaatgaaaaaattgtgaactagcatagtaactgtacaaacaaagcaaaatagaaaaatatgctacaaaagaaattgaatagttcaacatataagaaaacagaaaataacttcaaggattttacattctgtgattagttttacaactggcagaaagaagttcatgttgtagaactttgttgagaaagttgaaaattgttgagaagaaaatattagaatatttcgttttagacatgctgagtcgaagatggtagtagaatatgcaaaaggaaacaagacaaatacaaaa

SEQ ID NO: 356276 - DNA, 582 bp, Homo sapiens
catagctactgaggactgtaaatgcggttattctcacttgagatgtgctgtaagtgttaaatacaaactagatttcaaacattagaaccaaaaaaagtaaaatatcttaatactttcatttttgaaagtatttttaaatgctaatacgtttgataaattggtataaataaaatatattaaaattaattgtgcctttttacttttaagtgtctattagacaattttaarttatatatattgtttatattacatttctaataaacagctagaagtttattgcaaagttgcatcagtgaaatgaaaaaattgtgaactagcatagtaactgtacaaacaaagcaaaatagaaaaatatgctacaaaagaaattgaatagttcaacatataagaaaacagaaaataacttcaaggattttacattctgtgattagttttacaactggcagaaagaagttcatgttgtagaactttgttgagaaagttgaaaattgttgagaagaaaatattagaatatttcgttttagacatgctgagtcgaagatggtagtagaatatgcaaaaggaaacaagacaaatacaaaa

SEQ ID NO: 356277 - DNA, 582 bp, Homo sapiens
catagctactgaggactgtaaatgcggttattctcacttgagatgtgctgtaagtgttaaatacaaactagatttcaaacattagaaccaaaaaaagtaaaatatcttaatactttcatttttgaaagtatttttaaatgctaatacgtttgataaattggtataaataaaatatattaaaattaattgtgcctttttacttttaagtgtctattagacaattttaaattatatatrttgtttatattacatttctaataaacagctagaagtttattgcaaagttgcatcagtgaaatgaaaaaattgtgaactagcatagtaactgtacaaacaaagcaaaatagaaaaatatgctacaaaagaaattgaatagttcaacatataagaaaacagaaaataacttcaaggattttacattctgtgattagttttacaactggcagaaagaagttcatgttgtagaactttgttgagaaagttgaaaattgttgagaagaaaatattagaatatttcgttttagacatgctgagtcgaagatggtagtagaatatgcaaaaggaaacaagacaaatacaaaa

SEQ ID NO: 356278 - DNA, 582 bp, Homo sapiens
catagctactgaggactgtaaatgcggttattctcacttgagatgtgctgtaagtgttaaatacaaactagatttcaaacattagaaccaaaaaaagtaaaatatcttaatactttcatttttgaaagtatttttaaatgctaatacgtttgataaattggtataaataaaatatattaaaattaattgtgcctttttacttttaagtgtctattagacaattttaaattatatatattgtttatattacatttctaataarcagctagaagtttattgcaaagttgcatcagtgaaatgaaaaaattgtgaactagcatagtaactgtacaaacaaagcaaaatagaaaaatatgctacaaaagaaattgaatagttcaacatataagaaaacagaaaataacttcaaggattttacattctgtgattagttttacaactggcagaaagaagttcatgttgtagaactttgttgagaaagttgaaaattgttgagaagaaaatattagaatatttcgttttagacatgctgagtcgaagatggtagtagaatatgcaaaaggaaacaagacaaatacaaaa

SEQ ID NO: 356279 - DNA, 512 bp, Homo sapiens
cattgggtaaatacagccatttcgaatggaaaaaattggcctaaacaaaggggctacaggccccaagcaagtctgaaatccagaggggcagtcaaatcttaaagctccaaaatgatctcctttgactctaggtctcacatccaggtcaccctgatgcaagaggtagccttccatggccttgggaagctctkcccctgtggctttgcaggttatagccccactcctggctgctttcataggctggcattgagtgtctgtggcttttccaggtgcatagtgcaagctattggtggatctaccattccggaatctggaggacagtggccctcttctcacagctccactaggcaatgccccactatggactctgtgtgggggctctggccccacatttcccttctacactgccctagcagaagttctccatgaggcctctgcccctgcagcaaacttctgcctgggcattcaggctttttcatacatgctatgaaatctaggtggagattcccaaa

SEQ ID NO: 356280 - DNA, 477 bp, Homo sapiens
tacttctaatgaatgctaaggagtttggactttggcctaagtaaagtgagaggcactaaagcattttaaggagaagaataacatggtcagattttcattttacaatatagcaaattgattggaactgggaaacctagagacagataatcaattagaatatttttttccataaaccaagagagagaagacagctgtctagcctamgttcatggcaatgaagataaaggaatatgtacattctggaaatgtttaggaggtcgaattagcaagactttgtgactaatgggaagtaaagtcaaagaagtggaagatgatagccagatgtctgatttggtgagaggaatgaatgccttcagcaaaacaggaagtggaggagtggagcaggttgggagttaaggaaagaaggttgaactccattatgattatgctgggtttttaatgcctaagaaacatcaaaaggaaagatctctcaggcaa

SEQ ID NO: 356281 - DNA, 543 bp, Homo sapiens
tcactaaccttttcttctgaaatgcctaacycattgttaatgttatctgtgataggttattttgtgtgtcaactttaggctatgcccagttgcttggtcagacagcaccttgaatgctcctgtgaaggtactttttaggtgtgttaacatttaaattggcagacattgagtaaagcagattatattccataacatgggtgggcctcatccaatccactgaaagcactaagagaaaagactgaggtcctccgtggagaaaggaattctatctacaggctgactttgtactcaagactgaaacactaactcctgctagaatttctagcctactggtctgccctgcaaatttcagacttgctagtctccacaattgcacgaaccaattccttaaaataaatatctccctcccctctatgtgtttgtgtatacctttcatctatatgtgtgtatatacacacacggggggagagatttattttatggaatcggtatacatacacacacacacataaatgtacatcacatctatgcatcctatatata

SEQ ID NO: 356282 - DNA, 543 bp, Homo sapiens
tcactaaccttttcttctgaaatgcctaacccattgttaatgttatctgtgataggttattttgtgtgtcaactttaggctatgcccagttgcttggtcagacagcaccttgaatgctcctgtgaaggtactttttaggtgtgttaacatttaaattggcagacattgagtaaagcagattatattccataacatgggtgggcctcatccaatccrctgaaagcactaagagaaaagactgaggtcctccgtggagaaaggaattctatctacaggctgactttgtactcaagactgaaacactaactcctgctagaatttctagcctactggtctgccctgcaaatttcagacttgctagtctccacaattgcacgaaccaattccttaaaataaatatctccctcccctctatgtgtttgtgtatacctttcatctatatgtgtgtatatacacacacggggggagagatttattttatggaatcggtatacatacacacacacacataaatgtacatcacatctatgcatcctatatata

SEQ ID NO: 356283 - DNA, 543 bp, Homo sapiens
tcactaaccttttcttctgaaatgcctaacccattgttaatgttatctgtgataggttattttgtgtgtcaactttaggctatgcccagttgcttggtcagacagcaccttgaatgctcctgtgaaggtactttttaggtgtgttaacatttaaattggcagacattgagtaaagcagattatattccataacatgggtgggcctcatccaatccactgaaagcactaagagaaaagactgaggtcctccgtggagaaaggaattctatctacaggctgactttgtactcaagactgaaacactaactcctgctagaatttctagcctactggtctgcyctgcaaatttcagacttgctagtctccacaattgcacgaaccaattccttaaaataaatatctccctcccctctatgtgtttgtgtatacctttcatctatatgtgtgtatatacacacacggggggagagatttattttatggaatcggtatacatacacacacacacataaatgtacatcacatctatgcatcctatatata

SEQ ID NO: 356284 - DNA, 543 bp, Homo sapiens
tcactaaccttttcttctgaaatgcctaacccattgttaatgttatctgtgataggttattttgtgtgtcaactttaggctatgcccagttgcttggtcagacagcaccttgaatgctcctgtgaaggtactttttaggtgtgttaacatttaaattggcagacattgagtaaagcagattatattccataacatgggtgggcctcatccaatccactgaaagcactaagagaaaagactgaggtcctccgtggagaaaggaattctatctacaggctgactttgtactcaagactgaaacactaactcctgctagaatttctagcctactggtctgccctgcaaatttcagacttgctagtcyccacaattgcacgaaccaattccttaaaataaatatctccctcccctctatgtgtttgtgtatacctttcatctatatgtgtgtatatacacacacggggggagagatttattttatggaatcggtatacatacacacacacacataaatgtacatcacatctatgcatcctatatata

SEQ ID NO: 356285 - DNA, 650 bp, Homo sapiens
gaaagaatctcagagtttgaagactggctttttgaaataagacagtcagacaaaacagaggaaaaaaatgaaaaggaatgaataaaacctctgagaaatacaggattatgtaaagagaccaaatctatgactcactggtgtccctgaaagagatggggagaatggaaccaacttagaaaacatatttcatgatatcatccatgagaacttcgccaacctagctagagagtccagcattcaaattcaggaaatagagaaaatcttagtatgatacgtcacaagaaaatcatccccaagacacataatcaccagattctccaagatcgaaatgaaagaaaaaatattaaaggcagctagaaagaaatgttaaaggcagccagatttataaggcaagtcaagtctctgacctttctctctagctgcatttaacatttttctttttcctacaaagggaagtctatcaaactaacagcaagacttctcagcagaaatcctacaagccagaagagactggsgtcaatattcaacattcctgaagaaaggaaatttcaacccagaattttatatccagccaaactaagcttcataagcaaaggagaaataatattctttttagactagcaaatgctgagggaattcattaccaacag

SEQ ID NO: 356286 - DNA, 578 bp, Homo sapiens
tttattaggttctatcatgttctgtgtgttatgtagggcatcatcttgtttgccaactccaaatccctagaatgccccagagaggaatctgccttccttgttagcgttgcacttgccttcattcactcctttagtcacatcggcaagtgaactaactcttcccattgaatggaggtgcagtacttatttgagttgaaatagttacctagcatttcccttcacttccacaaagtgtagtattttgtgtatattagaggagagcaatagcaaagtgtggtcatgtggctattcccatctttggtttcataacaaggtagatcattaactgatacagagtaaaaggtcagatattgatcctttaggattacaggtttacaacaaaggatggatggactaccacaaaagaaagagcctcagggagcagcagcatatggtggcttgttttgtaatcagaggcagtttacaatgtaggaagccataggactctattagtcactggtgaaagtttttttcagagcctgccataaagtcatttggacttgrtttataccctggaattgtagaaggagatatcctga

SEQ ID NO: 356287 - DNA, 588 bp, Homo sapiens
ttgtctccttctttctgtttcctctggtgtccctgcaatgactaagtcttctctgagcctctgtattgttgaacagctcttacctcctggcaaagaggccccctattcgagctttggcagtcattcaaatagtccactttggggatctagtaacacatttcttcccattggcctctatccctagagattacagtgactttttgctcttcctagtttctgggttgctyttcgggttatgttaaccatccctcatgttaaagtaatccttttatataagatgcagagtggtgtttgttttcctgaccagtccttgagtgataaaacaaggcatattaattaaaacttctttcacatcaaacaggtctgtttctctaacatcgtgagtccatagagagaacatgggcagctgagttgaaaatgaaaatgttaagaatactgaaatagtagatgaaacaaattggccccaactcagataacctaaatgagaaggtagatttagggatctcccctcagattccactgtgacacaaagctaggaaaggtatctggaatctctctactaccgaactatttgctcaaagatgaaat

SEQ ID NO: 356288 - DNA, 588 bp, Homo sapiens
ttgtctccttctttctgtttcctctggtgtccctgcaatgactaagtcttctctgagcctctgtattgttgaacagctcttacctcctggcaaagaggccccctattcgagctttggcagtcattcaaatagtccactttggggatctagtaacacatttcttcccattggcctctatccctagagattacagtgactttttgctcttcctagtttctgggttgctcttcgggttatgttaaccatccctcatgttaaagtaatccttttatataagatgcagagtggtgtttgttttcctgaccagtccttgagtgataaaacaaggcatattaattaaaacttctttcacatcaaacaggtctgtttctctaacatcgtgagtccayagagagaacatgggcagctgagttgaaaatgaaaatgttaagaatactgaaatagtagatgaaacaaattggccccaactcagataacctaaatgagaaggtagatttagggatctcccctcagattccactgtgacacaaagctaggaaaggtatctggaatctctctactaccgaactatttgctcaaagatgaaat

SEQ ID NO: 356289 - DNA, 535 bp, Homo sapiens
gaatctccctgtggactcattgccctgcttatttaaatagcagttaatttaaacacacacccaagtcaaaactgcattatttctaacacaccctctttctaataaactatgttctccaataacagaacccctgtctcgatatcatgtctgtatatttatataggcaccattcttttgctgttgagatttatcccccattagtgttaaaggcacaggaaatgccgaagactggcagtacaactttttgaccaaggccctaaaaggtagcagccaccatgttccccagagtccaaaaggaatagaaactagtggatttaagcaaagttgacaaaattttgatttgctgtgttgaggatccttagttgaaatgaacataattcacayttctaaaaacaaactacatttaatagcaatgattacaaacatatagagagaggaaaaatggatgtgggtgtctaggtcatttcatttgaattttgaactttttcttctcatcaagactctggttataagtgagaggaatcaaaccccaact

SEQ ID NO: 356290 - DNA, 618 bp, Homo sapiens
  misc_feature (1)...(618): n = A,T,C or G
tgaccaaaacttaggagatggaggcagtaagagagaccctaaaaaatccctagatagtttacaaactagataatcaattcttgactactcaggatttgactctaataaataycaatcacataatgaaattaagttaaacatgcaaaactcctctagggttgctcttttgaattgatttgacctttttgattagccagtatcactactactgtcattatcaggacatgggacaggaacatagctattattttcctacctttcagcttttcaatacaacaaatatatattggcaaccatttctatgattttaatttgggtactcattgtccccttattggggactcggggcaatataactgtggttttccacacaaaacaagggttaagtatgtgtttggcctcttttctttaggatcctagaagactacccttttatttttaaagttatctttttctgtcttgaactaaaaaacacagcaaagtaagtcacatcaactatttttcattacctttaccaattatttcattaaggaactttgagtcatttcaatcattaaacattataaaacaggttntctatagaaaagtataatgaattctaagaaaaaccattacctg

SEQ ID NO: 356291 - DNA, 399 bp, Homo sapiens
atcttgcacctccaggcactaaataaattccaagcctagctcattagtgccttctagccatgcttgctttcattggacactataagccaggcagtctcaaggcctctggccagccagagaatctctattctggcayttgagggccactcattctgggcatggaggaagtagagccaaggaactactggaattggtcagagcaagaactagagtatgcatccagtgtctaaatcagcttaggcaatctcacttgaacttccaagagaaggggatgcctggggaaagactcttgctatggtgtaaggaggtaggaggtcttttgaggtatgctcactcatgggagtcatccaaagcggaggctgctcacagtcacataacaaaaagcccacacgtttctgg

SEQ ID NO: 356292 - DNA, 625 bp, Homo sapiens
aatcctgctctacctgtactagcagtatgaaaaactgtagatgtgaattctcacccatttcaccctggccctttgctatggactaaattgtgtttcctcacaatgcatatgttgaatccctaacacctacaatctgactgcatctggagatgtggtctttaggaagcaattaagcttaaattaagtcataagggtgggagcctaatccaataggaycgtggccttccttatataaagtagaatgagagatttcttcctctttctcctcaccatgtgagaacacagcaagaaagtcatcatctgcaagctacaaagactgccctcagcagaactcaaacttgctggcaccctgatctcaaactaccagcctccagaactgtgagaaaacaaatttctgttgttaaaccacctagtctctggtatatcattatggcagcttgaactgactaatacatactccactcctcagtcccactcaattggagaaaaataattgaaatggtgagtagataatttgaacaagtcaagaaaatcccttcaggaacataaggtccctgaataccactgcatggcttccactaagtatcaagaaataccaaggcttgtcattaataaggtgacttaa

SEQ ID NO: 356293 - DNA, 587 bp, Homo sapiens
ctttgtggtctaaagaaattcagagacagtactctcgatttttttgagagaagattttcttctgatcacatagcaacaaactatggaaagagaagtcaggctggactgttaattatgtagcagtcagaactcatctctcagttcagtcaagattactgggaaaaccacaacagcctgacaaaattagggggatacttccaaaacctaggacataggaaaagccaattacaaactacagatatgcaaaatatggtataacttttggtttttaaaatgttyttttttgtacataattgggctcatcgagggcatagattttttttgttgttgttctgttttattcatgttgtactctcaaggcctgggatcatgcctggcacagggctcaataaatatgtcaaatgaataaataaatgtaaacacatttgtcagaataagcaccaaaatttatttctggcagataggattatgtgtgagttttttttttttctatcttctttgttttttctaatttctctaccatgatcatagattacttatataaaatacttgtaaaaggccatagagttttattttagagtaacata

SEQ ID NO: 356294 - DNA, 539 bp, Homo sapiens
tgaaggctctgtacctattttgaggggacacacacacacacacacactgaaccaaaccaacaarcgaaaggacatctgtgagtaagcaagagcctcagatgggggtggaaggcacatgctgcatatctagggattaacagtctctctcactagctcagctactgctcactactagtcagtgtgtctcatggtcttacttgcagatgtctttgccaaggtcttcatcaagggtaggagttgcctattggtctgcacatggcgatttgcaacagctctacacactctcaaggatgcagggagtcaatgtgagcctatataataattagggaaactgggtactctggaatcacccattctactggttttcagtcacatcaacttcattcttattgttcaggcccaaagttacataaaccattatatttataattatataatgtttttatgagttatattactcctcatgaatatattccagacctcctttacttttcaaaatataattacgtctttcaggtacagcaggtgtttatctttgc

SEQ ID NO: 356295 - DNA, 644 bp, Homo sapiens
atatttagcaccaatacaaaagatgttcaataccattagttatcaaggaaatgcaaattaaaatcatgagataccatcacacacccaatgggatgattaaaattaaaattatcaaaatatcaagtcatcttggtaaggatttggagcagctggaactggaagtataaaatggtacaatccacttggaaaacagtttggcagtttctcgtaaagttaaacatactaccattattaccatactacccaacattaccactcctagtcatgtatctaagagaaattaaaatatactttcagaaaagaagttgtattaatgttcttagcagctttattcataacggacaaaaatatagggtccaaatgacaatcaacaggagtggataaacaagttgtggtctatttgagcaatgaaatacaaattggcaataaaataggaataaactactaatacacacaagagcagggagaattctcaaaaacatacgctgagtgaaagaagacagacacaaaagagtacctactgtaagaatccattctatgaagttctggaatagttcaaactaatccatagtgatagaaattgaataaatgatgactacttggggtatggtrtaagtggggaactgaatttagtcgaccaaagg

SEQ ID NO: 356296 - DNA, 600 bp, Homo sapiens
ctccataaggatatgagtgctaacaggaagggaaaggtgctagaaaacaaaatgatcaacgtcctcttcaaaatatatgtatatgtgtgttgtgcctgtacttggaagtgttaagagtaactgtttacatggcagcattttagatattttgattctaatatatatttttgtatttatattttaactttttaacaaggattaatatttctatagtgatacatttaaaaagtaaattgctttctttacttgagactttcacccaagtcaagggaaagagaatgtatcacargaaatgattctgagtctcaaagacattagggagcatgtgtctcctggttgccaatattgtgaaaaggtattgttcaaattctgacagccctgttgagaataaagaagaatttcttacaattattgttatttttcaagagacagtagaattctcactgctttgcagaatataaaggagcatatgactctgtaaattcctcatcacaagttgcctggtgcctgtattctcctcttttgtgcagcataacaagggaagacagagttgcttgactcttaccatattattaactctaagtcacatctgaaatagga

SEQ ID NO: 356297 - DNA, 600 bp, Homo sapiens
ctccataaggatatgagtgctaacaggaagggaaaggtgctagaaaacaaaatgatcaacgtcctcttcaaaatatatgtatatgtgtgttgtgcctgtacttggaagtgttaagagtaactgtttacatggcagcattttagatattttgattctaatatatatttttgtatttatattttaactttttaacaaggattaatatttctatagtgatacatttaaaaagtaaattgctttctttacttgagactttcacccaagtcaagggaaagagaatgtatcacaagaaatgattctgagtctcaaagacattagggagcatgtgtctcctggttgccaatattgtgaaaaggtattgttcaaattctgacagccctgttgagaataaagaagaatttcttacaattattgttatttttcaagagacagtagaattytcactgctttgcagaatataaaggagcatatgactctgtaaattcctcatcacaagttgcctggtgcctgtattctcctcttttgtgcagcataacaagggaagacagagttgcttgactcttaccatattattaactctaagtcacatctgaaatagga

SEQ ID NO: 356298 - DNA, 600 bp, Homo sapiens
ctccataaggatatgagtgctaacaggaagggaaaggtgctagaaaacaaaatgatcaacgtcctcttcaaaatatatgtatatgtgtgttgtgcctgtacttggaagtgttaagagtaactgtttacatggcagcattttagatattttgattctaatatatatttttgtatttatattttaactttttaacaaggattaatatttctatagtgatacatttaaaaagtaaattgctttctttacttgagactttcacccaagtcaagggaaagagaatgtatcacaagaaatgattctgagtctcaaagacattagggagcatgtgtctcctggttgccaatattgtgaaaaggtattgttcaaattctgacagccctgttgagaataaagaagaatttcttacaattattgttatttttcaagagacagtagaattctcactgctttgcagaatataaaggagcatatgactctgtaaattcctcatcacaagttgcctggtgcctgtattctcctcttttgtgcagcrtaacaagggaagacagagttgcttgactcttaccatattattaactctaagtcacatctgaaatagga

SEQ ID NO: 356299 - DNA, 553 bp, Homo sapiens
tttttctgaccctgcaaggctggattaagagctcttcctatgtactctcataaaagcctgtgcacatctctatcattgtcctggccttcctgtctctttatctagactgtaacatgaaggtggagttttattcagttttatagcctcaatgttttgcacagtgcttggcatagtgcacatactcaatgaatgtgtgttgtatgaatgagtgaatgaatgaatttatgaatagaaggatgaatgaataaaatataatccagagtgcagagacaatgcacwgaatgggagaaaatatttgcaaactacctatgtgataagggattaataactggaatatataagaagctcaaacaaccctataggaaaaaagtctaataatccaaaaataaaatgggcaaaagatttgaatagacagttttcaaaagaagacatgcaagtggaaaacaggcatatgaaaaggtgctcaacatcactgatcatcagagaaatgcaaatcaaaactacaatgagatatcgtctcaccccagttaaaatatcttatatccaaaataca

SEQ ID NO: 356300 - DNA, 622 bp, Homo sapiens
tagaatgaataggttgatggagggcattctagacagagggacaacatctacagaaacatataagaaacaacatgtttgtagctaaagagtagggttgaagggatgggcttgagccacrtcatggaagacaccataagccatcacaaggagcccggacttaacatttgaaagtggtaggaaattgccaaaatgacatgaatttttataggttattctggcaattgccaacatgtgggcatagggtgtgtgaaggcatggaggaaaagccggaggtggaagatcaaccaggacactcttagaagttctggagggacatggtggaggtcttaactggaagaggggcaatttggagagaaaggaaaagatttgaaaatgactttggatgtaacgggactataaacaagaactggtgattgactggatatgcaaggtgaagaatagggagttaccaagaactcttgggtttctgacaaggatcttgcctcttgttgacacagcagaaaagatggttcaggtgagagtgagcagctgagtacttggaggttgtgttgtctatggctcagccatatgaacataaacaagggcataggttttaatttagttttgccttttccaagatgta

SEQ ID NO: 356301 - DNA, 622 bp, Homo sapiens
tagaatgaataggttgatggagggcattctagacagagggacaacatctacagaaacatataagaaacaacatgtttgtagctaaagagtagggttgaagggatgggcttgagccacatcatggaagacaccataagccatcacaaggagcccggacttaacatttgaaagtggtaggaaattgccaaaatgacatgaatttttataggttattctggcaattgccaacatgtgggcatagggtgtgtgaaggcatggaggaaaagcyggaggtggaagatcaaccaggacactcttagaagttctggagggacatggtggaggtcttaactggaagaggggcaatttggagagaaaggaaaagatttgaaaatgactttggatgtaacgggactataaacaagaactggtgattgactggatatgcaaggtgaagaatagggagttaccaagaactcttgggtttctgacaaggatcttgcctcttgttgacacagcagaaaagatggttcaggtgagagtgagcagctgagtacttggaggttgtgttgtctatggctcagccatatgaacataaacaagggcataggttttaatttagttttgccttttccaagatgta

SEQ ID NO: 356302 - DNA, 622 bp, Homo sapiens
gaaactgtttttctggtttgcctttttttttttttttttttttttttacagtgtttgagacatagaaacttacactgtgcacatctgatttcgtggttatttttcctgtggcattttaaattaagaattccttttctattgaaaaatgattaatgttcacctttcttttattttagttactttatgtttttatgttacatttaaattttaattaatctgttatatttagcatagtgtatgagattgagtctccattattttgtattatttaatttagttaatagtccttttctcctttggtctaaagtccacattaataataaataaagctttccatgtgatgactctccttctggactctgtgctatgttctactatctcttttatacacacaataagacaccactttaatcattgtagattcttaataaattttaatatctgatacagaaattttctctttgttactatgttttaatttttttcaaaattttgttgactagtgcatttactcttccagataaaatttggaaatttcattcctaatgttagcattataatttaggycttcattgcttttcacccttatgacctgaatccccacacagtccattctgtgacc

SEQ ID NO: 356303 - DNA, 425 bp, Homo sapiens
ccatgactacatcagattatgaccaacaaatttcaaagtatttgctgagaatgtggtgtgtgtgtgtgtgtgtgtgtgtgcgatgaggggatgagggactgagcaaagttcagtgataggctaacatgctaactaacattagggagtaatatggtttgraatgtgtatttccctactaaatggcactgcttttctagccttattaatcttgcagtcgaaattgaccactacctattcctggaaactgtcccaaactttctttcttcttagattttgattattcctgaaatgcctctttcattcctcagaaaaaaatccccaacataaaaggcccatttcaaatagcttcttttccaaggaggtttttctaatttttttcagacgtgacgttatctattccatcatcaaaccccactgtgatattt

SEQ ID NO: 356304 - DNA, 503 bp, Homo sapiens
gtgttaccattcttagacttgccactgattttaagaggtatcagatagatgttagagagccttcatatcatgaacccgctaaaaaaatatggaagttcgccttttcctttttctgtttctttcattcaagtgtcaccactggagaaagagccagtttagaaatgtagaaagagaattatttttttaaaaaagtatataaagctttggggtgcagatcaggagcaacttcttaggcaagggtggcttttaytggtataaagtcaactttcacctattgaattcttccttattaaattatgaatccccttttccaacacgctctagacctcagaccagtaaaattagtgggagtgtttaccctggtttaaacagatttttccccttttttgtggttgttttgggagttgagggcaggaggtgggaggagaaaacaaggaaatgccagcttgggaaataatcaccctttattagattaggtcaatgggaaaatacgcactgatgcc

SEQ ID NO: 356305 - DNA, 579 bp, Homo sapiens
ccacttgttccattacccaatctcataaaagggaacttcagctcgacctcttaaaaagtgaaaagagcaaaatcaattagttctatcaagacttaatggtcatgacagcaataaatccatgccagtgcctcctttcctaacctgaatcttttcacacacctgccagtwgattcctggttataagttgcttacagaaaatctttttttttctattagtaggcgtgtgtgcacacatgtgtgagtacactcatatcacagccatgactggaagcactaacagatcacaggcaacagataatgattatttattcctttgtgaaatatgctcgactttgcaaatttttattcgtgatcagaaagcaccctcgttttgaggattaaagggcataaaaatgaataatataaggaatggctgcagatgtgtctaacatttgttttgtaataaaataaagttggaccgtgcagtggtatgatttctccatggcacaatacgctcttttcttgtgtcagtttttgtttgggtttagtgagaaacatcacatcacaaagaaacaatgcaagaatcaagagttgctttgc

SEQ ID NO: 356306 - DNA, 579 bp, Homo sapiens
ccacttgttccattacccaatctcataaaagggaacttcagctcgacctcttaaaaagtgaaaagagcaaaatcaattagttctatcaagacttaatggtcatgacagcaataaatccatgccagtgcctcctttcctaacctgaatcttttcacacacctgccagttgattcctggttataagttgcttacagaaaatctttttttttctattagtaggcgtgtgtgcacacatgtgtgagtacactcatatcacagccatgactggaagcactaacagatcacaggcaacagataatgattatttattcctttgtgaaatatgctcgactttgcaaatttttattcgtgatcagaaagcaccctcgttttgaggattaaagggcataaaaatgaataatataaggaatggctgcagatgtgtctaayatttgttttgtaataaaataaagttggaccgtgcagtggtatgatttctccatggcacaatacgctcttttcttgtgtcagtttttgtttgggtttagtgagaaacatcacatcacaaagaaacaatgcaagaatcaagagttgctttgc

SEQ ID NO: 356307 - DNA, 585 bp, Homo sapiens
ggaaacatcactccaaattgttaataagagttacccttaggtactagagtttaacgtgatataatttcattttactttttagatttttctgtcatttgtacaaattgtataataattttatattttgtaatgagaaaataaatatttgagacaataaaataaaatcagtaatttaggcacaagtagaagaagtgcatctggtgaataagaccaaatcttagtttctaggactgggaaacaaggcatgcactacatttacagaaagattttcttgatgttgatctaagagtactgaaggaatataatattttcctagataaggactaakttctttccagagtgaggctgagctttctggttagattgagttgcttctaaaatatagagacgaggatgttggagcaggaaaccaggtagcttgctcccaaaaataagcttcaattgcctgggaaattccattatacaaataaggtctgttaaaagataaactgagacactatacaaattttagagtttatttgggcaaacagtggtacatacatttgggaaacaccaaattgaaggacgtcttgagctctactaaag

SEQ ID NO: 356308 - DNA, 625 bp, Homo sapiens
gtgtttttttctctgtgtttggattatttcatttatcttaatgtcctctaggttcatccacattgtcacaaatgaaaaaattttgttttttttttaaaaggctgaatagtattccattgttgagtgtgtgtgtgtgagtatatatatatgtatatatcacatttttaatccattcatttgtttgatggacatttagattgtatctatatcttggctattgtgaatagtagtgagattgcttggccatatggtatttctatttttcagatttttgaggaacttccatactatttttcaaagtggctatactaatttacaataccaccagtagtgyataagggcttcctcttatccacatgctcaccaacacttgttatctttcatcttctttataatagccaatctaagagtctgaggttttatctcattgtggttttattttgcaaaataaagccacaatgactttgatgactagagatgtagagctcttaaaaaatatgtctgttggccatttctgtgtcttcctttgaaaaatgtctactccagtcctttgcccatttttaattagggttatttgttttcttgtcacatacttcttcttcatcacttgagataatcatgtggt

SEQ ID NO: 356309 - DNA, 592 bp, Homo sapiens
gatctttcatattactgtgttgaaaataagcaaggtagaagtaaggagactattttagagagtcttgcaacagtcttgtaagggaaaatggtagctaaaaccaatgtgatagcagtggaggtggtaggaagttatttcacttttgatgtatttatttgagatatatatttagaatgtggagacaagcaatttttttgataaatcacaacagtatgaaataaacagaattttaaaagattcagaagtttttgttctgagcgactgaaataataaattgtcatctactggtgggaggagaccgcaaaagaagcagttttggagaataaagattcargtttgtccatgtggtttgagatgccttttaaacctctaagtagagtggttgaccagaccattggttttatgagtctagagttcagagggaggaatctaggtcagagatataactttggaagtattcaacatttgaaaatatttaaagctatgaaattgaatgagttcactaagagaataagtatattcaagataagggaaggcaccaagaattgatgcctgagtcatgctaacatttgtagatcaggtggatgaggaa

SEQ ID NO: 356310 - DNA, 563 bp, Homo sapiens
ttttttaaaagcttgactgttttagtttatggaaatacaccttaggtcaaaacaaggacctaggtctggggtgttgatgagttggcaataccaggagaaattgtacacaaacacaaattagtacataaacacaattcctacaataccaagagaaattgtacataaacacaaattagtacataaacacatttcccacaatgccaagagaaattgtacataaacacaagttgtacataaatacatttcccatttgccacaagaatactcgccggaggccttgcagctgcaacatttacctaaagataactcacggattatagtcctaatcttaccgtcaaagtttttccaattattaactactgatcactatatacatttctgttatattaggattagagacaagttctgtttagaaataactccaagaacggtttttacgttttattttcacwttgaaaatcagttagatttgcttcagcctcaaagcgtgtgttcatgtaaaattaaatgagcactggcagtagctgcactttttttttctttgtttttgagacagtctcatg

SEQ ID NO: 356311 - DNA, 556 bp, Homo sapiens
tgctaggttaaacttttacttgacaacaaggattcctgctgaagtctgaaccttactgtgtaaccctcagtttccactattaaagagtatcttttgacgtctgcttggaaaatgaatagtatactggtaactcagtctccagtcacctctgtgtctcttaagcaagagattctaaaagattgggaaaacatatcctccaacacctgcctttgcctaaccattatttttcaccagattacttcttaagagagggaggtgattctgaagaaggcttctatctcaaaaagcactgggcttccttattcatctgttcttgttgtttttgacggagttaaaaaagtttgtgtgcaatacaatatamatgatgtgaaggacactcttcagcttagtgaaacgctgttttcatttttttttttttttgtaggtcagaaaaaaacaacaaaatcagttcaagcatttttttttctttgtccttgccttgatgttatgagtattaaaaccaggaggattgctgccattgtgcagtttgcttagacaaacctggagatgcaaccca

SEQ ID NO: 356312 - DNA, 537 bp, Homo sapiens
gttatcccattcccttgatgaggctgtcttttaagctcaattgaaggtagtaacaacaatcctaactttatgaggattctctttatgtgagtagaaatgtgtagattctggaacagtgcctagcaggttgcagatacttactagaagttttctgagtgaatgaaaagtcraaaatgaatgtatccttccaagcattaatgtgctttgcatcaagcaacattagtgtaaaattctgctttttctcttttttcttttcaatgtaggaaaggtgatttctaatggatgccacacgttgtagatctctgacctctattttctcgctggtggtacatctactgcacttacacatatgttgttccttttcatttccagaagattcacttagttccttgatacagaatcagagcttaagactgtcatttcacaagagcattgagcacaatgaaactgtgaatctttgaagcttatgattatgcttcacatttttgtaaacttcaaataaccttggaaaaatttccagattgggtgtagagttat

SEQ ID NO: 356313 - DNA, 605 bp, Homo sapiens
tgtctttttcactacaccagttttcttagatgaatcccaatttcattgcattactgaatgagaaaatcatttcactgcatactctgctggtttgttccctttattctaggaagatagtgaaaaaaaggaggtgtgtacaataagccccgctggactgttagttctttgagtgcaaggtcagtgtcttatccacctctgttctctcagcatctgggtctgccacgtggaagaatctcaaagatgttggctaactgcagagaactacaagggttacatagcgaggacagacccatctgttggctatttaagaatttactacttttgaaatataaatagatatagaagagtcagtgctttggtgaccataaagacctccactgccactgtgtctcagccacaggcagccaagcttgtgcattgggcccccttccttatactccstgagttctcttataaggaaattgatttctgcggaaccttcccttgctgataacttcccttgctgagcaactgctcagagggagttgtgagcagtgaaggagactgggctctcagcagcctccagccaggccaggctgagccatcaggcttctggggatcccagt

SEQ ID NO: 356314 - DNA, 496 bp, Homo sapiens
ttccaacagacaggcccagatgctggccttgcattagtgtgcttttgatattaatgtttaatttatataaaaattctgaataaatcttatccctcagagtttgcccttacaatctcatgtgcccacctcttccacaataatccytgggcctagaggggttgaatagtgttaacatctggatctgtatttcactaaagcagtttattttgattgtcaccttctcctgggactgaagacgagacttcgactgatgtcaatgctcaagatttagcagaggtcagtacctttttcaatcccaggagtcaaagtcctgtaacttaacagcacaaggtttagttaataggatatttatacaacagaaagtcctatcatgctaacatgtcacaaattaaaacactgtgatttggtgtccagtagttattgcctgaagcacttcaaactattgtattaaagtgattaggttactccttgcatatatctaattgctaggattcta

SEQ ID NO: 356315 - DNA, 556 bp, Homo sapiens
ccctgagtgactaaaattagggatttttatagcaggggagaaatgtaactgtgtaggggaaaacaggaactcaggaggggtaagaaagaaatcttgatgaatgagggcttaatgtctcgtctggatgctgtgacttggtgagtttcattctttgatactttttgagaggtctacggttccttttttgaggaaggaactcagataaaacaaatgtaagtttcaagatttaaaactaaaagtgtcaatttctatgtttattttgaaaaactgtctatgtgactactgggtctgtttcagtgtcagcagggctgcattccttctggaggctctaggaaagaatccatctccttgctttttgcagcttctagaggccacctgcagtccttggctcatttccccaytcctctatcttcaaagccaacaaagttgggccaagttcttctcacactgctatctttctggttcactatcttctgcctccctcttcaatttacaaggactctagtgattacattcagctgtaacttcccctccatcttctgaaggttcacagaaa

SEQ ID NO: 356316 - DNA, 520 bp, Homo sapiens
ggctgtttcatccatggtgaaaatctgttgtttagtgtagccacctttataaattatctaagctagatcttctagataacttgcagcttctacatgagcacttgctgcttcactttgcactttttttttctttttgagacaaggtctggctgtcacccaggctggagtgcagtggtgtgatctctgctcactacaacctccaccccaagctcaagccatcctcccacctcagcctcccaagtagctaggactacaggtgcactctaccacacctggctaatgtttgtattttttgtagagatggggtttggccrtgtttcccaggctggtcttgaatttgctcaagtgatctgccttcttctcccttcagaatgctgggattacaggcatgagccaccatgcccagcccattttgcacttttatgttatgaagatggcttcttttcttaaacctcatgaatgaacctctgttagcttctgtagcttcctcacttctggcagccttcataaaattaaagag

SEQ ID NO: 356317 - DNA, 436 bp, Homo sapiens
tctaaatctgcagattccacttccttcaagtcctatgtccattcctccttttcttcctccactaattctacctttgtccaagctcctaccatcccttgtctagactggtacaacagtctccaaattgttcatggatcctccagctttggcttctatcaatctaccctccatgctgccactagactcatctttytaaaacttaaatgtgactgtcactcctccactgcccttaagacaaatttaaaccccttagcatgacatacacgcacagtattatctatttcaacctcttcagttcatctaccactttcttttttctttttttagacagggtctccctatgctgcccaggctagccttaaactcctggactcaaatgatcctcccatctcagcctcccaagtagtggggactacaggtatatgccactgttccc

SEQ ID NO: 356318 - DNA, 627 bp, Homo sapiens
tttttatatttgtaactgtggtaaaaaaaaaatctatatagcatcttgcatacattctcactagtacaggaataaaactgcagtttgttgaaggagagtgctctgtcttctattcacctgctcctcatttatcaatttttgtcatctgtctgttcaggagaaaggccaaaagtgactgctttaaaatgagaaaaatcttccaggacattatcatgaagaatatagttgtcttaacctttagtcctgtaagtactgagttggttacctacagtattgtgtacataataatagactctccagctgaccgtctccaactaaattcctgttttcagttctttacttcattaataaccaaaatgtcatctgttaccaacagtgttggtgtaytctcagaggtactgccctggctagatttccactgagcccttcagagacacttcacacatttgcggacagtgtggcatttggtaaagagacgccatgactatttccagagttatgagtttgcccttttgcctttttcatattttagtggaaagatcactgtccttcacaactccaatatttcatttttctataacttgttcacagaaacctttatttttttaaaaaatgtacagtagcaga

SEQ ID NO: 356319 - DNA, 595 bp, Homo sapiens
ttggtcttaaaaacttatgatgaagataaggtaatgtacttaaatattatatactactctttaaacagatagacagcagaaaaattactgtgttcactatcaaattaccctaaaacatagcaacttaaaacaacaracgttttttatctcacacagtttctgaattaggaagtaaggaatctggaagtagcttagctgtaattctaaattatttttggtaaaattatgccacttagaaagataagtctatagattagggttatagtggaataaacattagctcgttagcaggaaccctgcagaattatagtggggaactttttataagaatactgggatttgatatatttgataagaatagtgtatttgacagacatcttacaacaaaaagtgagcaaagtccaagtgtctgctttctttggggaggggaatgaagagtcttccaaaagaagtaactggagacgtcagggatagtctttttaataacttcagatagctttcaagagtagatactgaaacatacatgacccttaagctttcctcactttttgtgaacagccttaagccagaaatagggcttaacactgccttcccc

SEQ ID NO: 356320 - DNA, 631 bp, Homo sapiens
ataacaagagcaaacattcactgaaggcttaccatatgcaaggaactatcctaggagctttccatatattaactcattactcctcataacccaaggagacaggctctattataattctcattttacaggtgagggaactgaggcacatctgaagtcacactgctattctaattaaaaattaataatcaagacatacaaatggcaaacaggcatatgaaaaggtactcaatatcactgatcaycagagaaatgcaaatcaaaactacaatgagatatcatctcaccccagttaaaatggcttttattcaaaagacagacaataacaaatgctggcaaggatgtagagaaaagggaatccttgtacactcttggtgggagtgtaaattagtacaaccactagggagaacagtttggagaacagttttgagtaactaaactggagaacaatgtagttactcaaaaaactaaaaatttagctaccatccgattcagcaatcccactgctgggtatatacccaaaagaaaagaaatcagtatatcaaagaaacgtctgcactcctgtatttgttgcagcactgttttcaataggtaagatttggaagtgacctaagtgtccatcaacagatgaatg

SEQ ID NO: 356321 - DNA, 574 bp, Homo sapiens
taaaagcccatctcttcagtaaaatactaggcatgatcatgcgtaggcagttcagtaaagaattacaaataaaaacatgaaaaatatgtggtatctcactaaaaatcaaagaaatacagtcgttcattgtttaaggtgattttgtcctgtgaacatcatagagtgtacttacacaaacctagatagtatagcctactacacacccaggctatatgatatagcctattgctcctaggctacaaacctgtactatgagtgtactgaatactataggcagttgtagcagaatggtaagtttttgtgtatttaaacatagaaaaggtacagtaaaaatacagtattataatctcatgagaccacmgtcataaatgcagttcatcattgactgaaatgtcattattcagcacaggactgtactaatcagatcataactatgtaaggtgatggacgtgctaattagattgtggcagttatttcacaacgtacacatatatcaaaacatcacgttatataccttaaatatgtgcaatttttatttgtcaagtatatttcagtaaagctaaggggaaaaaag

SEQ ID NO: 356322 - DNA, 532 bp, Homo sapiens
ttagtttaggacctcagggtcataaacaaaactgccattcytgaactttctgtatactgagctctaatactattttcttgtggggttacatattctggacttagaaatctgtgctatgccctctttagtggttccttagggtagattgaaatagttaatcgtgctcactttttcctggtaaagtcaacgatatgctttgacagttatgctttagtgatttacctttttttcacaagttcatgattaggaccttctgaaccttaaatttccttgaaactctacttgtatcccatatgtagatgaccacttgttatattctaaaaatgagttgagctctcttagtcatttatgttcttacagttttaactcagaaaggacttaaagttagaaggaaagttacaattttctcaaaacagattgtgtgacttagatcaagatttattcaagagtaaataccccacttaggacagaggaaaagccattcaacggttttccaggccaaagctacacaccatgatatacacctgtagtc

SEQ ID NO: 356323 - DNA, 532 bp, Homo sapiens
ttagtttaggacctcagggtcataaacaaaactgccattcctgaactttctgtatactgagctctaatactattttcttgtggggttacatattctggacttagaaatctgtgctatgccctctttagtggttccttagggtagattgaaatagttaatcgtgctcactttttcctggtaaagtcaacgatatgctttgacagttatgctttagtgatttacctttttttcacaagttcatgattaggaccttctgaaccttaaatttccttgaaactctacttgtatcccatatgtagatgaccacttgttatattctaaaaatgagttgagctctcttagtcatttatgttcttacagttttaactcagaaaggacttaaagttagaaggaaagttacaattttctcraaacagattgtgtgacttagatcaagatttattcaagagtaaataccccacttaggacagaggaaaagccattcaacggttttccaggccaaagctacacaccatgatatacacctgtagtc

SEQ ID NO: 356324 - DNA, 532 bp, Homo sapiens
ttagtttaggacctcagggtcataaacaaaactgccattcctgaactttctgtatactgagctctaatactattttcttgtggggttacatattctggacttagaaatctgtgctatgccctctttagtggttccttagggtagattgaaatagttaatcgtgctcactttttcctggtaaagtcaacgatatgctttgacagttatgctttagtgatttacctttttttcacaagttcatgattaggaccttctgaaccttaaatttccttgaaactctacttgtatcccatatgtagatgaccacttgttatattctaaaaatgagttgagctctcttagtcatttatgttcttacagttttaactcagaaaggacttaaagttagaaggaaagttacaattttctcaaaacagattgtgtgacttagatcaagatttattcaagagtaaataccccacttaggacagaggaaaagccattcaacrgttttccaggccaaagctacacaccatgatatacacctgtagtc

SEQ ID NO: 356325 - DNA, 580 bp, Homo sapiens
taaataattgggtgtcactggtcaatttctgaagcatcatggtcagttttatattttagataaatcattctggtggcagtgtggaaggtggatggaagtgccaggcagagatacagagaccacataaaggacttctgggtttaggagagattatgggacctgagctcgggcaggacagtgatatggagaagggtgggctgtctagaagattaatagaaacagtggcacttaaaggcttcctgttcaagaggtgttaagtaggaagataattgatcttgagacttgtccaaaatcacacagcttctgactgggtctagaatctaccactctaccttcaatcctgtgcttttctccttgtgctatactgcctagcaaagtgcttgcacggccttgagtgctggggccctgagaagctgctcacagaagaccagtccagggacataccagtggatctgggaaggctacctagtacattgccggtggttcccttgttgagttctcctcattactccatttcaatatrtcatgtatcttttgctggacctctgactgatgtatcaatgttctcttaaatggaagt

SEQ ID NO: 356326 - DNA, 445 bp, Homo sapiens
agcatttcatcccaccttccttgctcatggctgggttgagggatagagtggcagtggcacctttgrgaccctgggcttcccatccttattcttgctcttcatgacttgggtaatgcttaatttcttgtcttgcatattctgaacaatgttgaagaaacctgtttctcctctccttttctccaatggctcagcaatcatttgggcctgacttttatatactcaagttattagaatctcttgagttgggagctaaatgttagggccccatttcttccaccttgatttgtggagtgcttctttttatgtctcccattctgagttaacatgctagttctacatgggataatcattgtccctttgctctaataatttattatcattctaagagttgtctagcagcatattcctgggccccagagggaacatatgagattgaatttagagt

SEQ ID NO: 356327 - DNA, 640 bp, Homo sapiens
tagttctacatgggataatcattgtccctttgctctaataatttattatcattctaagagttgtctagcagcatattcctgggccccagagggaacatatgagattgaatttagagtaggtgaatttagagtagacacatttagtctaaaatgctgagagggatgtcaacatcagggctaatgacacatgagctttttcttgccagagttgataggatgaagaaagtgatttgcagcacatgtgaatctgaaaaactaaattgaaagctggaagcctaaaattaaattgaatttaagctgtagcacttaagcacttaatctgtcttttctctamcccatgaaacacaaggaagtggttaagaacataagttctagaattatattgtccgtattcaaagtaagcctctggcatttggtagctatgtgacagagaaaaaagagaacagctcagagcagtctgaactgtaaggtatgcaaaatttatcaggcatagaaagacatgagtatgagacttcagtcatgcacccagcacccatgcccaggggcaattgtttaaagacattttgttcttcttttcttccctgtagtttcctgactagcaaactcaccagttattttcatgttcctgagatttttgatg

SEQ ID NO: 356328 - DNA, 640 bp, Homo sapiens
tagttctacatgggataatcattgtccctttgctctaataatttattatcattctaagagttgtctagcagcatattcctgggccccagagggaacatatgagattgaatttagagtaggtgaatttagagtagacacatttagtctaaaatgctgagagggatgtcaacatcagggctaatgacacatgagctttttcttgccagagttgataggatgaagaaagtgatttgcagcacatgtgaatctgaaaaactaaattgaaagctggaagcctaaaattaaattgaatttaagctgtagcacttaagcacttaatctgtcttttctctaccccatgaaacacaaggaagtggttaagaacataagttctagaattatattgtccgtattcaaagtaagcctctggcatttggtagctatgtgacagagaaaaaagagaacagctcagagcagtctgaactgtraggtatgcaaaatttatcaggcatagaaagacatgagtatgagacttcagtcatgcacccagcacccatgcccaggggcaattgtttaaagacattttgttcttcttttcttccctgtagtttcctgactagcaaactcaccagttattttcatgttcctgagatttttgatg

SEQ ID NO: 356329 - DNA, 611 bp, Homo sapiens
gacatgagtatgagacttcagtcatgcacccagcacccatgcccaggggcaattgtttaaagacattttgttcttcttttcttccctgtagtttcctgactagcaaactcaccagttattttcatgttcctgagatttttgatgcaaaggagaatgtatagccaatcaatagcttatgttactttaatgtacatttattaccaaaatgccaggggtttggtctagacgaaacctgctgctcactgcacagaatgccaatcactgagataagtattgccagggaagaaggctttaattgtgtgctatagctgtagagaatgagagagaaagtctcaaatccatcttcccractgattaaaattggggggtttatatagtgcggaagggaggcaaacaggaattaaggaggggtaaggaaatattcatgatggatgaggtgtctggcatctcattgtttggatgtgatgatatgatgaattgcagttccttgcttgaggtttggttttcctgaaaaagaaactcatgggacaaatataagtttcaagttttaagaccagggagggtcaatttctatgtattttatttttaaaaaacaacataaatattagttt

SEQ ID NO: 356330 - DNA, 611 bp, Homo sapiens
gacatgagtatgagacttcagtcatgcacccagcacccatgcccaggggcaattgtttaaagacattttgttcttcttttcttccctgtagtttcctgactagcaaactcaccagttattttcatgttcctgagatttttgatgcaaaggagaatgtatagccaatcaatagcttatgttactttaatgtacatttattaccaaaatgccaggggtttggtctagacgaaacctgctgctcactgcacagaatgccaatcactgagataagtattgccagggaagaaggctttaattgtgtgctatagctgtagagaatgagagagaaagtctcaaatccatcttcccaactgattaaaattggggggtttatatagtgcggaagggaggcaaacaggaattaaggaggggtaaggaaatattcatgatggatgaggtgtctggcatctcattgtttggatgtgatgatrtgatgaattgcagttccttgcttgaggtttggttttcctgaaaaagaaactcatgggacaaatataagtttcaagttttaagaccagggagggtcaatttctatgtattttatttttaaaaaacaacataaatattagttt

SEQ ID NO: 356331 - DNA, 564 bp, Homo sapiens
gatgatatgatgaattgcagttccttgcttgaggtttggttttcctgaaaaagaaactcatgggacaaatataagtttcaagttttaagaccagggagggtcaatttctatgtattttatttttaaaaaacaacataaatattagttttgtgggaaaaatgtgccagtttcaaattcctggtaaacaacttagaaactgcctcttctttttttccttcaaaaacccacttgtaactgctgtaaaatcagagcatatattaagggcarcttgaatctatcttcctgggttacagttcttgaagttggctcaaagagactctcaacttacattaattttgcctcagcattttcctttctgtcaacattatctggagaaaatggacaggactcacagtgacctcctccttaccacctggtgttccctctcaggctcagcactcagtatcagcatgaacctaacatgttcctctaactccagaggtttgactggatgcaaaaaggtgagtgctcctagatccagaccttccttttatatttagttgaggtctagattttatttaggtt

SEQ ID NO: 356332 - DNA, 631 bp, Homo sapiens
ttaattttgcctcagcattttcctttctgtcaacattatctggagaaaatggacaggactcacagtgacctcctccttaccacctggtgttccctctcaggctcagcactcagtatcagcatgaacctaacatgttcctctaactccagaggtttgactggatgcaaaaaggtgagtgctcctagatccagaccttccttttatatttagttgaggtctagattttatttaggttggttttcaaaccatttctttcccttaggagtgagggcttcagtctcagtctttggacaggagattcaggtaaagatctctgcagagaactgccttctctgcctctgcctcaggacaagaggtttggggtcacagttagacaaggaggtstgcagaggacttctactttctctgcctctgacttataaaagatttgggttatagtatcggcatctggcaccagtgattttacttcttttggtctaaaattacaaagcatgcttttaaacttgcagctgctttatattgtttgtaattcagactttatattttcatttttgaccaatttctgctagtttcagaccaaaagatgcataagggtgggttctgttgccattaagagaaaaggcaattgttc

SEQ ID NO: 356333 - DNA, 611 bp, Homo sapiens
tgaaaacaaaaattgacagatgggagctaattaaactaaaaagcttctgcatagcaaaagaaactattaacagagtaaacagacaactaacagaatgggagaaactatttgcaaactatgcattctgtaaagatttaatatccataagctataagaaacataagcaaataagtctattaaaaagtgggcaagagacacgaacagacacttctcaaaatgacatactagcggccaacaaatatatgaaaaaatgctccacrtcactaatcatcagagaaatgcaaatcaaaaccacagtgagataccatgccacaccagtcagaatggctattagtgaaaagtcaaaaaacaacagatgttggccaagctctggcaaaaagagaatgcttataaactgttggtgggaatgtaaattagttcagttcctgtggaaagcagtttggaggtttctcaaagaacttaaaacagaactaccatttgattcaggaatcccattactggatatatatccaaaagaaaatacatcattctgttaccagaagggggtcccagtccagaccccaaaagagggttcttggatctcatacaagaaagaaagaattcagggtgag

SEQ ID NO: 356334 - DNA, 519 bp, Homo sapiens
aacagacaactaacagaatgggagaaactatttgcaaactatgcattctgtaaagatttaatatccataagctataagaaacataagcaaataagtctattaaaaagtgggcaagagacacgaacagacacttctcaaaatgacatactagcggccaacaaatatatgaaaaaatgctccacatcactaatcatcagagaaatgcaaatcaaaaccacagtgagataccatgccacaccagtcagaatggctattagtgaaaagtcaaaaaacaacagatgttggccaagctctggcaaaaagagaatgcttataaactgttggtgggaatgtaaattagttcagttcctgtggaaagcagtttggaggtttctcaaagaacttaaaacagaactaccatttgattcaggaatcccattactggatatatatccaaaagaaaatacatcattctgttaccagaagggggtcccartccagaccccaaaagagggttcttggatctcatacaagaaagaa

SEQ ID NO: 356335 - DNA, 511 bp, Homo sapiens
catcagtatgctgaggaccattcataactccaagtgctaacaaaaagtgatatctggaagattagtatgtatttaatttaagaaaacattgagtaagcttatcctgtattccaacacaaagagtacaacagcaagacgttccacaacagtaaagcaaaataaccccatagcagctagcaacctgctatggggttgctagctgattccaatacatgcccagaattagaatattgatccagatttttatgttaccaatccctcttgtttattctgagtaacagccagagatcactgattggttcacaggaataagcagggttggtttaattgcagaagaaaactagaatcyaataccaagtatgatacagtttttgaaacaatttttttctctctagtctcccattttcactaaagacaaatcatggtaagaccaatttgatttattatagttcgcctgatcatttgtataaagtgcagcaagaataatttttttttttacataggctctttt

SEQ ID NO: 356336 - DNA, 546 bp, Homo sapiens
ttgggtaaatttctttcctcttgagactccaagataacttggggctcctggacctgtcagaaagtgacattctttacttactgcaggttagaaacctgcacagggactgcatagacaaggtatgaggccagttttcccaaggggctttcattggctttacaaatcaaatttgagtccttaaataaaagtatgccgttccagtcaaagctttgataaaataaccaatttactcaattgtgtcctrttacgaatgaaagcattcttattgcacttgtgtaaataactatatgccataagttaagaatatgcacaaatagtttccaaattttggagaaatcatatagagaggaacaaatatgcccctaattttgttcacaggagtatactttactcaattgttaaaagctgtaaatagctcagaagaacagtttaactctgaaaaacagaacaaaggatcagcaatgtttttaaacaaagtcaaaaagattatttcagtcttctattagttcagtccatgcagttaactcctgttttgctattcatgaa

SEQ ID NO: 356337 - DNA, 522 bp, Homo sapiens
gtaggagattcttataattttggaacacatacctataacatatttatacaaatacagcccaaagaaagccaaataccacttcatatttgacaatgcttcctatatgattttatactaaataaaccagatttcatctttacattagtgtgttattaatgtcaaatccaattyttagtaaaaccttatagacaaattgatccaattttaatatctgactgtatggtaagatttttattaactttttataaccctttacaatttttgtgaaagagatcagtgctctgagagaaaacctgttgtattttaattccaatgttcaatatatggaaaaactgaataatacctctctaactttagccaatgtgttcacacatagtttttttttaaccattttttttttttttacaaaccttccacaacttgcttaaaccttcagctatactttatctaacttaaaacaatcctttaaccttttaatctaggccaaaaaaaaaaaaaaaaaaaaaggcatggaagacattc

SEQ ID NO: 356338 - DNA, 522 bp, Homo sapiens
gtaggagattcttataattttggaacacatacctataacatatttatacaaatacagcccaaagaaagccaaataccacttcatatttgacaatgcttcctatatgattttatactaaataaaccagatttcatctttacattagtgtgttattaatgtcaaatccaattcttagtaaaaccttatagacaaattgatccaattttaatatctgactgtatggtaagatttttattaactttttataaccctttrcaatttttgtgaaagagatcagtgctctgagagaaaacctgttgtattttaattccaatgttcaatatatggaaaaactgaataatacctctctaactttagccaatgtgttcacacatagtttttttttaaccattttttttttttttacaaaccttccacaacttgcttaaaccttcagctatactttatctaacttaaaacaatcctttaaccttttaatctaggccaaaaaaaaaaaaaaaaaaaaaggcatggaagacattc

SEQ ID NO: 356339 - DNA, 329 bp, Homo sapiens
ccttcagctatactttatctaacttaaaacaatcctttaaccttttaatctaggccaaaaaaaaaaaaaaaaaaaaaggcatggaagacattcccatgccttcttataatcttttaccaaaaaacacatttctctttccttgcacaccttgcatgtaaaactgtctttgtttcccaaaaattacttaagtcacataaactaaaaggcattacagtttttacttttctgccaaatatttgatttgarcacttactaatttcgaaccaattaaagcttttatatatcccacacaaaacatatataaatacgcagaagatcctacagttaca

SEQ ID NO: 356340 - DNA, 510 bp, Homo sapiens
cagatttttaaatcagttgctttgtaaggcgttagatttaacttcataggacataacctaggagagactggctggatagtgttctgtgcataaggtaaggagttgaatgtcttaatgttcctgtggctcattgaaaaagtgttaaagtaagtgagataattactgtatttcagcaaatctaattgccatcaattgtaagggacaccattttatgtaccactaagacaagctgccaattacagaatgtatctattatgtgaagaaagaacgtgcatcttagaattgatgagatgtaggtcttggagacaactaaagaatactaaggggaggcatgacagttgtcatcaaacacaggaagaactggaatagggcaagtctcaaaccaataaggagaagttgaatgaaacagactttttctatattaagrtgctacacagtactagctgcttcatgaagtaaaggttcagtcaatgtgcaaacaaactgaatgactctcaattagttgacagg

SEQ ID NO: 356341 - DNA, 509 bp, Homo sapiens
tattgaacttacatgtagagttgttttgatgttaggagtaggaatgtgaaacattaataaagcacaacaaatagtaatcatatgtatgtgtgtattcaccagatttatttatgtgtatatttctacatttgaaagaggaaaaagacaatttttaagttttgacgtaaatgtttagtctgaaattgtaygttgcattagtgtgcaatctcctgggtacaagtactaagtagaataaaatcttgtttcttaaaatcccactaaatattataatccctgtgtatcaggggcattcatttactttttcctataacatccaatgttctagggcagaaaccatgttactacaatagtatttgttagcagaacaggaggaaagctgaatccatatataaatataaaacagcaaaagtgcttttatctcagttatttcctgggaatatttctgctgatcttaagatttcctcttcagtttgtatgtataaaaactgataatgtaatgggaattacat

SEQ ID NO: 356342 - DNA, 509 bp, Homo sapiens
tattgaacttacatgtagagttgttttgatgttaggagtaggaatgtgaaacattaataaagcacaacaaatagtaatcatatgtatgtgtgtattcaccagatttatttatgtgtatatttctacatttgaaagaggaaaaagacaatttttaagttttgacgtaaatgtttagtctgaaattgtacgttgcattagtgtgcaatctcctgggtacaagtactaagtagaataaaatcttgtttcttaaaatcccactaaatattataatccctgtgtatcaggggcattcatttactttttcctataacatccaatgttctagggcagaaaccatgttacwacaatagtatttgttagcagaacaggaggaaagctgaatccatatataaatataaaacagcaaaagtgcttttatctcagttatttcctgggaatatttctgctgatcttaagatttcctcttcagtttgtatgtataaaaactgataatgtaatgggaattacat

SEQ ID NO: 356343 - DNA, 471 bp, Homo sapiens
tcccttcccccctctcccctccaccccagcaacagcctttcacagggctggcaatcgatgcttcatttgactcacactcacatttagttcttgttcctccacagcctcctttctttttctaaccccacctatttccacccaagtagctcccagccccttccttttcctgctcaatacctgcccgggggcttgccccttccctggctcataccagccctgggagccagttctgtagtctcttctaattggagcttaacatttttgaaattgtcctcttggggtgtgtgctcttttgacagcattctytttggaaaccagctcttctttggagatgaagcgctcctagagaggcttcattggaaacatggtccttcttggggtggctgctaggggtgacctgggcagctggaaccaggaagataaagggaatggggggcagagtgagagcacatggtgagaagcagtcagcca

SEQ ID NO: 356344 - DNA, 640 bp, Homo sapiens
agccagtgggtagagcagagcaaggcaggcatctgcatgaacagggagtgggggattacgagaaagccagagaaaggtgttggaacagaagatgaggagggcatctaccaggagcacagtgggtgaaggggagcagtgacctggcatggggcatcagggcccgagtaggatgagaagggcacccatccggcctgatgtggggggttgcagctcaaacagagtgagggggtctaggtggtgcagggtgactgagcctgaacaatgtggtgttagaytggaattggaggtaatggtgagaacttatggtctttgatatataattcgatgtagaaatacatgtaggtgtaaatatgcatatataatttattcataggaatgcacatatataatttattcataggaatgcacatacatatataaatacatagatacatttcctagcttgaccactaggagacctagaagcagtaacatcctaagaacagtgagcatatatagagcctatatcttcttttccaaatacaattaagagaacagggatccttggagaaatggctaataccaggggtaggacagagaaagtacatgataaggctggaatgacttgttgtaccagaaagtaagaaaatgctcaaaaaat

SEQ ID NO: 356345 - DNA, 641 bp, Homo sapiens
ctctctgtcagccattgcggcattatccaagttgatcggtcaggaaatcctttcatagttctgagctcagttcttcctattaaaacaggttgactctaaaaatgtctaacatctactgtggacaagactctgtgtcagtggctgtgaccagttccatttcctctgtcactgatgaaggtggagatcactggtcctgctttgaaagacttgagtgtggagccttgacttccatttctctctgaactcttattagcgatattaaacttgcctttcttctactggtctcttgttgttgttacttctggtctttcatggttttccctgctgggatggcccacagccagagatcatagctagagctccttcctatctggatttgtcactagtgtttctgacatgggatttccccagrcaggctttatttaattcacaaagggccagagcaggctgggtggcaagggataaagcactgggactactagagaaaagaaggatttagaggaataaagaactgagactctgcgggatgtgtgttgattatgaaaaaagaaaaggtagctcaaggagaggaaaatttggacagtgggacactaagtaagggaagtaaagggaaaaacatacaataaacatcagatcttaga

SEQ ID NO: 356346 - DNA, 582 bp, Homo sapiens
ttctagaaaaaatatctaagaccgctgggtgcggtggctcacgcctgtaatcccagcactttgggagaccaaggagggtggatcacctgaggtcaggagttcaagaccagcctgaccaacatggtgaaaccccaactccactaaaaatacaaaattagcagggtgtggtggtgcatgcctgtaatcccagctaccaggcaggctgaggcaggagaatcgcttgaacccaggaggcagaggttgcagtgagccgagatcgcgccattgcactccagcctgggcaacaagagcaaaactccatctcaaaaaaacaaaaaaagaaaagaaaagaaaaaagaaaaaatatccaagaaaactgaccctggatgaggtgaactacaaacagataagttacgatacaggacatagaaaatatcagagctatcacaccaaaaagcaccacacccagagaattttacaagtgaattctctatccctttaaggaaccaaatttcactaaactgttccagaacacagggaggaggaacscttccaaatacatatcaaagtcagcagattatttatttaaaaacccaaaagact

SEQ ID NO: 356347 - DNA, 552 bp, Homo sapiens
acaacgcccccatccccctttttaataacagcccatttttacatagggggttgcctattctgcaattctgtaatagtgaatttttgcttattgtgtttctggataacaaggtgygcctgtgtttctttcttgcatatcggtttgcagaaagtaattgccctgcaattcttaatccaacctgttcacgcattcctttctgcattgttcttgttcgtcatgtctgagctgtcacctgagagctgatcttcctttgctaaaatccattcaagaagcatctttacccttcaagatgtctggtggaaagatacactgttttgactgatgtagcaaaacatttacagagcatctttttccaaagtattatactcttgtgttacttcccaagaaaaaatctgtttgtagaataaaatggtggaatttagatgaatgattgtctttttgggagagtgttagagggttgtcacttagtaaatataacctaaagaataataatgctaatatttgttcctttttcaccgaaaatcttattatgtgtgctagacactgtgctag

SEQ ID NO: 356348 - DNA, 605 bp, Homo sapiens
atgtccagtctgcatataggatctcatggggtaagagtgtgagctctgcattccagatctgtccctgaaagctgtgtgaccttgggcacaatatttaatctctctgaatttccaatgtcctcatctggaaaatggggaaagcgatttcttacattttcctccctcatggagttcttgtgaagatcaaacgtaatagtggtgtaaaatgcgagcycagtgctagtacatagtaaggcactccataaatactagccttgttgtttttattttcttccctaccactacctactctacattgatcacctctcacaggcttgccacgtcaatatctctgtaattatttatcaagtatctactatgtgttataaagctttaaaagtttacttgctccatgtctcctgaatcaggttgagcattgagtgctgggctttgcattggcacacacggccaagggaacaaatggaaccattctccctggagacttcatgctatgcaccaaaaaccacctggctgggatgggttggatatagctctcgaagagtcaagcaaactgtccagccaataaaaaatatatgcctgcaagttcaaaagccctccatccacag

SEQ ID NO: 356349 - DNA, 644 bp, Homo sapiens
aagggatggggtgagccatgcaaaacatgtggtggggctgtgttggccagcaccgagcacagttttgactccaggaggtgtggagacagccaggagaggcttggcagctgggagggagaacgagacagggagaggcagccaggcccttggagggggaacaaatccctctccccagctggtctcacgcttgggtgagacaactggagaaaatgtaaacatgctcattagcagttttccaatcagttgaaaaacaaatgggaagagaaaaatggcaggcgattgttccaaataccaactctctgccacatctcctcaggtgtttatcagagttgcccgctgtgctgtcctccctttcgtctggatcacaacacctttactagctttacayggaacacttggagctcaccctaactagggtcgatttagttctatgaggagtcacatactccactcaggatagaaggtctctgtggacacccccagagatgcacaaacaagacagggacatcatttgcaggtctccccacagcctcatccaagctgatattctctcagtacatgaacatgaaaactcatcaataacccctacctcttctcctgcgataacttacccccccaaagaagaggcaaagtggaaattttgt

SEQ ID NO: 356350 - DNA, 623 bp, Homo sapiens
gtggtccaatagtctcttcctgaaaaaaatgttggagaagaacacagggatgaatacaaaagggtatcacagggatggcaatcataggagcagttaatgagaagtaaccaaaatgtccatatattaggmtttggtttatcaaatcattaaatagctgttattcctataatgaaatattcagaagccagtcaaaagagtgatacgtatttgtattcaccagaaggaaagtgcatcacaacatataattaaatggaaataaaagcaggctgtgaaacaacatgttcatataaaatagtatataaaagtctacatttaaatatatatatgggtttgtatatatgtgtgtgtgtgtgtgtgtgtgtgtgtgtatatatatatatatatatatatatatatatatatatatatatatatgaaaagtacagaaagatgagcaccaaccatttataattattgctgggtatttggattttagggaattaattttctcctttattcctttctatattatttaaatattcaatcaggtacaagaaataataaaacaataaaaaaaaaaaggtttctctgctccctatacaaaaatgcagagatataaattacatctcatattagggggagat

SEQ ID NO: 356351 - DNA, 623 bp, Homo sapiens
gtggtccaatagtctcttcctgaaaaaaatgttggagaagaacacagggatgaatacaaaagggtatcacagggatggcaatcataggagcagttaatgagaagtaaccaaaatgtccatatattaggctttggtttatcaaatcattaaatagctgttattcctataatgaaatattcagaagccagtcaaaagagtgatacgtatttgtattcaccagaaggaaagtgcatcacaacatataattaaatggaaataaaagcaggctgtgaaacaacatgttcatataaaatagtatataaaagtctacatttaaatatatatatgggtttgtatatatgtgtgtgtgtgtgtgtgtgtgtgtgtgtrtatatatatatatatatatatatatatatatatatatatatatatgaaaagtacagaaagatgagcaccaaccatttataattattgctgggtatttggattttagggaattaattttctcctttattcctttctatattatttaaatattcaatcaggtacaagaaataataaaacaataaaaaaaaaaaggtttctctgctccctatacaaaaatgcagagatataaattacatctcatattagggggagat

SEQ ID NO: 356352 - DNA, 536 bp, Homo sapiens
cagggatgcctctctggggtccagggaagctttcatgcccgtaaagaccttggtgttgttggacatgaaaaccagcaggcacatatactaactttgtccctgaataagtatgtggtttctgtttggtttgttcgagaagctcttttttggatttgcacttcaacaccgtaagagatctgagaaacatcctaacatcctggcaaactgtcaggagaacaatcgtttgactggagaatgaggcctctcctttcccagaactatcctttgcattctcygagtttgagaataaatataataacaaccaaacaaccataaaagttagacccaagccttgacttcagatggctcaaggtgaggataataatctacaaatcaatccacagatcgtgcagaagggaggaaagatgttgtgctggttccctgatccctatctggggtcccagagttccatggaacattccagaagtaatttggctttgtgctcagtgcacagggactaatgtttttcaacaaaatttcataaggagatgtcggga

SEQ ID NO: 356353 - DNA, 536 bp, Homo sapiens
gtctgccttatcaccacagagaatttatgatggatttgtccaagaggagtcctgctcataaaagcctgcaaaacagatctattaaaacaaacctctaattatgaacagaacaagaatcccactgagataattttgcagctataatatcaasaaattcaataatcccaaagcccagtcacagaatcatccgacttgagaagatttgagtccgttaagggtgattactgggcacgcatgactgaccaccaaactaggtgagatgctgctgataaaagaaaaaagaacaggacaacagctttcaactcaagccatttaaaatatccaacaatggcttacaagataaaactgtttggcagcagaaagggggaacctattatcaagtatattttctggaccaaataccagaaatgtaagtaagatgacaggatgtgccagaggtcatgtaaatgtgggtgacctggtaaaggaatgtggaatgcctgacttccagccagcacttagctccttccactgtggaggaagtaaggaccaaggtc

SEQ ID NO: 356354 - DNA, 557 bp, Homo sapiens
actgcctacttctttccatgcccacctaagttttgaaaatctctctctgcctcttgttgtctctgtttactgatcacttgcacttcctgtagtaggattctgccccaaatctatgagtggcatgttttcagaatgtagcctgaaaaatttaacacgaacagttgacatttatttaaatatttacgaatgtcaagtccactgtaggagacggccatttcttaatgctctaaaatcttaaaactacccacaagtctaataattcaactcttgggcattaatcctaaagaaaataacataaaaaataaaagacytatgtactaagatgttcatcacagtgtgattataaaagtgaaaagctagaaacaaatcaaaatccccaaaacagaatggtaaaattaatgactgcaaaatgatggaaatcataaaccaagaaatatgttttcgaaggcttttaaggacatgggaaaatgcacaaaatattaaatgtttaaaaggctaaacaaactttattatgtagtatgtcatgtctttgttcaaatatatatgtagacaatgga

SEQ ID NO: 356355 - DNA, 557 bp, Homo sapiens
actgcctacttctttccatgcccacctaagttttgaaaatctctctctgcctcttgttgtctctgtttactgatcacttgcacttcctgtagtaggattctgccccaaatctatgagtggcatgttttcagaatgtagcctgaaaaatttaacacgaacagttgacatttatttaaatatttacgaatgtcaagtccactgtaggagacggccatttcttaatgctctaaaatcttaaaactacccacaagtctaataattcaactcttgggcattaatcctaaagaaaataacataaaaaataaaagacttatgtactaagaygttcatcacagtgtgattataaaagtgaaaagctagaaacaaatcaaaatccccaaaacagaatggtaaaattaatgactgcaaaatgatggaaatcataaaccaagaaatatgttttcgaaggcttttaaggacatgggaaaatgcacaaaatattaaatgtttaaaaggctaaacaaactttattatgtagtatgtcatgtctttgttcaaatatatatgtagacaatgga

SEQ ID NO: 356356 - DNA, 561 bp, Homo sapiens
atgcatgtttagggagatgaactaaaatatgtttaaaacagagctttcacccaaggaagacactcaagtgagagactcacacagttggccatcaggtcagcytgatgctctgggaagatgcccttctgatagggatttgaaaaatgcatgaaatcagagaaaatactttgcctccatattcactgagtgctattttttgttgcaagggcaaactgagtggattccctgagtactggggttgaggcaccagctgcctaggataaagaatgtttccaggctaagagagcagatgagtgtcttacccaattgcttggacattaagaggaaattgtttacagtaacactgagcagttcaggctttacctccataagaataacctgccagatctgagtatttctttttttattaaaaggggttctctagaatagactgtaaagacactttgcactgaagtcaaaaataaatagagatgtggctagattctaccggtgggacacaaacagcttaacccaaagtgggtctgctgtaaaaaccaatacatttgcattttagcaatttga

SEQ ID NO: 356357 - DNA, 561 bp, Homo sapiens
atgcatgtttagggagatgaactaaaatatgtttaaaacagagctttcacccaaggaagacactcaagtgagagactcacacagttggccatcaggtcagcttgatgctctgggaagatgcccttctgatagggatttgaaaaatgcatgaaatcagagaaaatactttgcctccatattcactgagtgctattttttgttgcaagggcaaactgagtggattccctgagtactggggttgaggcaccagctgcctaggataaagaatgtttccaggctaagagagcagatgagtgtcttacccaattgcttggacattaagaggaaattgtttacagtaacactgagcagttcaggctttacctccataagaataacctgccagatctgagtatttctttttttattaaaaggggttctctagaatagactgtaaagacactttgcactgaagtcaaaaataaatagagatgtggctagattctaccrgtgggacacaaacagcttaacccaaagtgggtctgctgtaaaaaccaatacatttgcattttagcaatttga

SEQ ID NO: 356358 - DNA, 477 bp, Homo sapiens
attataaggaaaaaatgagatgatgtttgtaaacttaggttaccataaagcatttggcatagagcctggaaagtggtaatcatgcattcattcatacaacaaatatttactgagcacctactatgtgcctggcaataactcagtcacttgtggtggtctgggaaggggagagattttctgtatacgttgagctcaaaaggctacctgggctaggcagtgtggctcacacccgtaatcccagcactttgggaggccraggtgggaagactgcttgagcccaggagtttgagacctgcctaggcaatgtagtgaaaccccatttctacaaaaaaatacaaaaatgagctaggaaaggtggggcatgcctgctgaggtgggaggatcacttgagttcaggaggtagtggccgaagtgagctgtgattataccactgtactctagcctgggtgacagtgagaccatgtcttgaaaaaagaa

SEQ ID NO: 356359 - DNA, 569 bp, Homo sapiens
ccaacgtcatgtgcttcagggcactaagagggcaaatgccagcatcatttggcatcctgctacaaatcagtaagtctgaagccaactgattttcccacatagaaaaggtccaaggccagaggaggagtgccaggaagagctattccccctattctaaatgtttctcttgaatcctgtccttctagagaattgataaaaaggcaatgaaggatgggagggaccattgtcccaggtcttggcagtggacatgtgtgaggcattgctcattactatgtgcctgatccaccaaaaaaaaaaaaaaaaaaaagaamcaggaaaaaaagaaaatacttcttttgagcactttagcctattatgattttttaaaaaacatacccacacaaatgaaatattactcaagtttttaagaggaggaggtactgatctttatttagtgctggggctttggaagcaaatgtacctgagtttgaatctcagggataaccttttgactgtggccctgggtaagttactcactgtctctgaaacttcaagttcctcataaataacctaagatggacaatcataac

SEQ ID NO: 356360 - DNA, 601 bp, Homo sapiens
aaagaacacagaacaccacatcatattagtgtataggcatggtaaattattgtcatttccggccaaggagagcttctctgttttgtgacattccccagctttaatgagcaactctgtaatatgtaagttgttctggaagacttaacatttacaaaaaacacagcacgatattacttagcataatgtaaatttggaattttaaagaaatctgagaactggaraaggatgtcccttccacactggtctctctatctcaaatttttaggtgaggaggtgagtattggcaatatgatttgatcagtgctaaatccaaatttatgtaataaatcattataataaaattatactaggtggacccctgtgaaactgccagtgtctgggtatgttcaacccataaaaatgacaatatcataagattcagcttaataacacagtgccttactttcttaatctactaaataattctaataataattatttcacaggattgctgtgagaaatcaatgagatactatatataaagagcttaacacagtgcttgacacatggtaagcattcagtaaattaatggagtaggaaaaggaggagttataaacctata

SEQ ID NO: 356361 - DNA, 380 bp, Homo sapiens
cctggaacaggaatcctgagggtgattacttgcctgatttcccatgctacctagtttatcttccctcttatcatgttcttcctgccacctgtgtttcccaggtcatatcaacttgggggttagagaagcctaattcattcaactaacaaatatttattgagtgcttactgtgtgccaggtcctgtaacrggcatcagtgataaaatggtgaacaaaactaggcaaaggtcttgctgcattcatggatttatgacttaaatggcagggaggtgctgataccagttggagaggtgctaattcactagtcatgcagataaaatgtaactttagtgttccagtggcataattagttagcatgcagtgcttataaaatgtaaatt

SEQ ID NO: 356362 - DNA, 550 bp, Homo sapiens
aaatcagaacatcaatcctggaataaagcactatctgggaatccataagtcagtgccttcacatccatcgctcattcttccactcaagaactacttaatgatcaccaactctgtaataggcactgtgctttgtgatggggatacagtggtgaacacaaaggactaggttttgccttcctgaaattcaaagtgtcataagagagaagaacaataaacaagtaaaaaaatgaaacttcagataaagacaatctaaaggaataaagggacaaagagttacaggggagagggtatactttagctaggccttcctgtgaaggagatgtttgaactgagccctgagggatggaggacatggggccagctakgggaagatcacaaggaagtgcagaccagatgggagaacgctaagtgtaaacgctgtgaggcaagtatgagcttagaagaagcaagccaatggggccggagcttaggaagacagaagaaggtgacatcagatgggtttggggagtaggcagcgggcagcagcaggttacacaccctagttgggggt

SEQ ID NO: 356363 - DNA, 550 bp, Homo sapiens
aaatcagaacatcaatcctggaataaagcactatctgggaatccataagtcagtgccttcacatccatcgctcattcttccactcaagaactacttaatgatcaccaactctgtaataggcactgtgctttgtgatggggatacagtggtgaacacaaaggactaggttttgccttcctgaaattcaaagtgtcataagagagaagaacaataaacaagtaaaaaaatgaaacttcagataaagacaatctaaaggaataaagggacaaagagttacaggggagagggtatactttagctaggccttcctgtgaaggagatgtttgaactgagccctgagggatggaggacatggggccagctaggggaagatcacaaggaagtgcagaccagatgggagaacgctaagtgtaaacgctgtgaggcaagtatgagcttagaagaarcaagccaatggggccggagcttaggaagacagaagaaggtgacatcagatgggtttggggagtaggcagcgggcagcagcaggttacacaccctagttgggggt

SEQ ID NO: 356364 - DNA, 642 bp, Homo sapiens
ttagtgtcaagattaatagcaccacaacctgctccctgcccctgtacccacatccaatccttcagcatttcctgttggccctaccttcaaaataggtccaaagtggaccatgacgcaccaccccactgccaagacctggtggggcttgccatcatctcatgcctggattattgcaatggcctcctagctggtctcctgcttcttttctcaacacagtagccagggatcctgttaaaatgttacattggagcaagtgattcctctgctcaaaaccttcccaaaggtctctgcatttttctcagagccaagccaaagtcatcccaatggctatcagtcccgtgtgacctggctcctaattacttgcctaacgttatttctactcatcctccaaccatcacacaggcttcctggctggtcccaccttagggcctttgcaytggccatgccctctgcctggagcgctcttccctctcggacatgcacttggctggtttccttactccttccaaactttgttcaaatcttgccttctctatgaggtcttttcataattaaaaatttgtgatcccaacatttcagattcccttttctgacttcaaatctttctctttaacacttatcactatcaaaatatcatatgct

SEQ ID NO: 356365 - DNA, 609 bp, Homo sapiens
tccttccccaaatttgggttgctacccctgtctgatgcccaaagtattctaaccagaaggcccataatcataatctttttgaaaaacatccttctggctgccctgcttaagctcagagcagtaattaaccccaccgccttctgagacctggagcaccctcattcaacacacacttttaataggatacattcagtctcaggctagactgggtaaaacatggtccttacygaagggaaagaggagacaatgggccataaccacatagttcttagtggtccaaggaccacctaacagggttgggaagaaagctcatgggatctcaggcagtgaggcattatgtcaacatcggttcaactaacaagctaagatggattctgcagcccaagctcaagtctgtgtgtgcatttagacactggggaaatgaacttccctgagctgttgcctggagcaggatacaaagcactcagggaccccccgacttcgtggtctcccatcaatgttatgatgctgcaatcttccccctttccttggctctcctgtttccctggtcttgttctctgggtcctgctctctaggtgttccagtggtttcccaaagacctggtttaca

SEQ ID NO: 356366 - DNA, 609 bp, Homo sapiens
tccttccccaaatttgggttgctacccctgtctgatgcccaaagtattctaaccagaaggcccataatcataatctttttgaaaaacatccttctggctgccctgcttaagctcagagcagtaattaaccccaccgccttctgagacctggagcaccctcattcaacacacacttttaataggatacattcagtctcaggctagactgggtaaaacatggtccttactgaagggaaagaggagacaatgggccataaccacatagttcttagtggtccaaggaccacctaacagggttgggaagaaagctcatgggatctcaggcagtgaggcattatgtcaacatcggttcaactaacaagctaagatggattctgcagcccaagctcaagtctgtgtgtgcatttagacactggggaaatgaacttccctgagctgttgcctggagcaggatacaaagcactcagggaccccccgacttcgtggtctcycatcaatgttatgatgctgcaatcttccccctttccttggctctcctgtttccctggtcttgttctctgggtcctgctctctaggtgttccagtggtttcccaaagacctggtttaca

SEQ ID NO: 356367 - DNA, 560 bp, Homo sapiens
aaaagcaccatcatctggtcatttaatctgaccagaaatcctgtttcctatccaccaggttcactccatttctttgccttgaatcagtacccgtctctccatttcacagggcaggctgccatcaccttatatgttacaaccccaacaagttccttactggctatcctactttgatctatttactcgacaaatacagagtccctcctatgttccaagaagtattttaagtgctgggaacacagcagtaagaaaataaaaacaagcaaacaaaagaacaccagggaaaatggaatagggagcaaagatcgtatcactaccatgaacagggtgttaagcaaggccaactgacaatatgacagactcgccttttcctaccctctgtaagcttccccctctcccccacattcagccaggatcatcttctcaagatgcaaatcaggtcaaatcaccttccagcttggaaatagccactgacagtttaaatagcagaggcatcaaattagyatttgacaaataaatgtgtaggttttattatcacagtgaatatttgcaatgactcc

SEQ ID NO: 356368 - DNA, 447 bp, Homo sapiens
tactatagttactgctgttgttgtttgctgtaagacatttttcctcctttgtatgtgctgcttcctttgcttgcaatgcytccctagccccctttcttcacctttaacttctatgtctggctaactcaaactatttaatctaggagccttttcctcaccctgtcctggaggctgggtgacacgtgcctcctgcataccatggctctataaccacagatttatccgtccgtatgtctgtagaccttgaagctatttctttcatctgcctctccctagaatctcgcatagggcctagcagatgtagatatataatacatgctgctgtaatgagtgaccaaaagaatgaaggggccatgattttgagggatgctgccatcctagagacaagctacatgtttgttttcagcagggaaggtcacggagagttgaggacatttcatgagttgc

SEQ ID NO: 356369 - DNA, 611 bp, Homo sapiens
gcctatgctttcttccagttagtgtcctccagatcattgccctccaggtgtctaaaggcaactagactccagcttcttcacatccataaaaaggcatctgtcttgctgaggttttcaactctgccgatgcaaaaacaaagaccaaatcatgttctctgtttccttttttgggggtggtgttcagtagaggcaatgaagtcatatttggagtcctattaagacaaatactytagagaaagaagcatctatatcgatcaagggctatcattttgttgtttatgagaactcgcatctttgcaggaaagagttaagggtgaggcatcaaaaggtgaatgtatctttattttatttaagcttccatcaaatgatggctagaaaatgctgcatctatctcagtgctttcttcatttcccttgacttttgtgaaactatcaaccagccattcttagggccagcgagctgagacactggggccagcttttctggttgttatggaaacagtggctttgtgaggctttttcccttaaaaaaaaaaaaaaaaaaaaaaaaaaaacgccaacctgtaattcaacaaaaattatgagcaagtatagctgtctatattgctgaca

SEQ ID NO: 356370 - DNA, 611 bp, Homo sapiens
gcctatgctttcttccagttagtgtcctccagatcattgccctccaggtgtctaaaggcaactagactccagcttcttcacatccataaaaaggcatctgtcttgctgaggttttcaactctgccgatgcaaaaacaaagaccaaatcatgttctctgtttccttttttgggggtggtgttcagtagaggcaatgaagtcatatttggagtcctattaagacaaatactctagagaaagaagcatctatatcgatcaagggctatcattttgttgtttatgagaactcgcatctttgcaggaaagagttaagggtgaggcatcaaaaggtgaatgtatctttattttatttaagcttccatcaaatgatggctagaaaatgctgcatctatctcagtgctttyttcatttcccttgacttttgtgaaactatcaaccagccattcttagggccagcgagctgagacactggggccagcttttctggttgttatggaaacagtggctttgtgaggctttttcccttaaaaaaaaaaaaaaaaaaaaaaaaaaaacgccaacctgtaattcaacaaaaattatgagcaagtatagctgtctatattgctgaca

SEQ ID NO: 356371 - DNA, 611 bp, Homo sapiens
gcctatgctttcttccagttagtgtcctccagatcattgccctccaggtgtctaaaggcaactagactccagcttcttcacatccataaaaaggcatctgtcttgctgaggttttcaactctgccgatgcaaaaacaaagaccaaatcatgttctctgtttccttttttgggggtggtgttcagtagaggcaatgaagtcatatttggagtcctattaagacaaatactctagagaaagaagcatctatatcgatcaagggctatcattttgttgtttatgagaactcgcatctttgcaggaaagagttaagggtgaggcatcaaaaggtgaatgtatctttattttatttaagcttccatcaaatgatggctagaaaatgctgcatctatctcagtgctttcttcatttcccttgacttttgtgaaactatcaaccagccattyttagggccagcgagctgagacactggggccagcttttctggttgttatggaaacagtggctttgtgaggctttttcccttaaaaaaaaaaaaaaaaaaaaaaaaaaaacgccaacctgtaattcaacaaaaattatgagcaagtatagctgtctatattgctgaca

SEQ ID NO: 356372 - DNA, 578 bp, Homo sapiens
tattacatgattcttgcagtgagtttttcagctctaacagatcagtttggttctttcttaaaatggctatttcatctttcagctcttgtatcattttattagattcctaagattcattggatttggattcaactttctccagaatctcagacatcttcattccaaaccagattctgaattctgtatctgtcatttcagcatttcagcatgcttaagatccattgctggggaactagtggggttgtttgctgttaagaagaaactctggctttttgagtttccagagttctttctcatccgtataagctggtgtatctttaatatttgaagttgctgtactttggatggcattttttgcttttgtattctttgatgcctttgaaggtttgactgtggtataatgtggggtcagtcaactgtcttcatttcyggaagatttcagggggccaaggctcagctcagcactactgagctgcttgttctaaccctgagtggctgagaccaggcctatggctttgtgctctggcccctcaggcttatgtacttgctgcattggaggagctgaaatgtttctggtc

SEQ ID NO: 356373 - DNA, 610 bp, Homo sapiens
tgataaagatgggaacctgattttgggaaacaccatgagggcccgtcccaggccccattctaaaccggggcctttccrgctcaggccattccctcacccctgtacaatgtctgtcccccgccacagccggtagtgccgcagtagatctatgctacacaaaagctgtgagccttctgcctggggaaccccccgcaaaaagttccaacagggctctgtggacccttgccagcagggacgataggattacttttaggaaggtctagtttaaatttaaaaggagtgcaaacacatacaggagtcattgactcagattacaatgaggaaattcaaattgttacatctacttctgttccctggaaagcagagccaggacagtgtatagcacagctcctgattgtgccgtatgtggacatggggaaaagtgaaattaaacaaacaggaggatttggaagcacaaataaacaagacaaagcagcttattgggtaaatcaaattactaataaacaccctacctgtgaaataactattcagggaaagaaatttaaaggtttggtagatacaggagcggacatttcaatcatttctctatagcactggccgtccacgtggc

SEQ ID NO: 356374 - DNA, 604 bp, Homo sapiens
tggtaaataaaagatgctaacagagtgggttgtgtgttgttaggatttgcagttccagcttttttcctcctccctagttgctgctactgactctcagttgcggtctggttacarcacaacacatattgagttatttagttcatcaaccattggcttattttatttgtactatgactcacatataaacccactgcagggaaaatgcttgctttacaatttatgataaacacataggatcttattttagttatcacccaaataggatcttagttagagactatagctttttccctggttgtagacatgagcacctgtttggcagcctatagcagagttagcatttctacatggtatatatgtgtctcagctggaaagagtcatttcctagattctttttatcctcctattactaagcaaatgcctagtgtgggaagcactccgccatgcatcatcaagctgagaaacatgtactgaactctgaaagtgagttctctctagtagcaaaggaagtcatatgcagtctccttcaaaccatagttggtcactaagtgggttggtgaaagagtaattcatccaaatgcggcccagaggaatgatgactttg

SEQ ID NO: 356375 - DNA, 604 bp, Homo sapiens
tggtaaataaaagatgctaacagagtgggttgtgtgttgttaggatttgcagttccagcttttttcctcctccctagttgctgctactgactctcagttgcggtctggttacaacacaacacatattgagttatttagttcatcaaccattggcttattttatttgtactatgactcacatataaacccactgcagggaaaatgcttgctttacaatttatgataaacacataggatcttattttagttatcacccaaataggatcttagttagagactatagctttttccctggttgtagacatgagcacctgtttggcagcctatagcagagttagcatttctacatggtatatatgtgtctcagctggaaagagtcattkcctagattctttttatcctcctattactaagcaaatgcctagtgtgggaagcactccgccatgcatcatcaagctgagaaacatgtactgaactctgaaagtgagttctctctagtagcaaaggaagtcatatgcagtctccttcaaaccatagttggtcactaagtgggttggtgaaagagtaattcatccaaatgcggcccagaggaatgatgactttg

SEQ ID NO: 356376 - DNA, 604 bp, Homo sapiens
tggtaaataaaagatgctaacagagtgggttgtgtgttgttaggatttgcagttccagcttttttcctcctccctagttgctgctactgactctcagttgcggtctggttacaacacaacacatattgagttatttagttcatcaaccattggcttattttatttgtactatgactcacatataaacccactgcagggaaaatgcttgctttacaatttatgataaacacataggatcttattttagttatcacccaaataggatcttagttagagactatagctttttccctggttgtagacatgagcacctgtttggcagcctatagcagagttagcatttctacatggtatatatgtgtctcagctggaaagagtcatttcctagattctttttatcctcctattactaagcraatgcctagtgtgggaagcactccgccatgcatcatcaagctgagaaacatgtactgaactctgaaagtgagttctctctagtagcaaaggaagtcatatgcagtctccttcaaaccatagttggtcactaagtgggttggtgaaagagtaattcatccaaatgcggcccagaggaatgatgactttg

SEQ ID NO: 356377 - DNA, 512 bp, Homo sapiens
cttagcgactttgatgtggtgaagctcatccatctgtgacttcaaatctccttgggatgctctttccactattaactgctttacgttccttgcagatacatgagactgggtctcagggtcttaactttctctttttggctagtatccatctcttgtttggattgagtaggtatttctayagcagagttgctagggctcctgaatttataacatttcagggatggatgggggaatgtgagtgcagccttcatgttctaccccagaacaactgcttcttatgaacagaatgttctgtgtctgaacctctttctaaaatcatggcaattttttattcaagagccctatataacttgaaatctgtggccacacctctctgctctaacatgactgcatatatcctatctccaattatgtactgagacctcgttctcatgacatatttttagacaatgaaaatcttgggattctgctaaaaaccagtgataagatcacttacatttatacaaggtata

SEQ ID NO: 356378 - DNA, 583 bp, Homo sapiens
tgggtgagttctggcttgtgaactatgggcttgatttttgtggtcaggttttggctgtttcagctgttttttggggaatcccagatatcagtatttttaggtcttttttccttaggctgatcagaatcactggtgaagactcttttagtctcctgcctggaagctgtaattctggataccactttctgggacagagataggaagagggctgaaggtttcaacattgagtatgaaaatttcctttaaaactcactgaattcagtatgrtacacaaccaaggactgtgtcttctcacgtaattatttttttttcattttctgctgactataaatctctagttttccataaagtggaagcctgtctactggagaagagaggccatttggagtctgagtgctttttaaataaactttcaaataatccttctgtttttaatcctgtcttccatcaaaatcccagtggcatcaacatctggtgccattatttccagaagagttgggtgggagatctggggtgcaaattggttgcttagctttcctcattgttggttgagaatacaactttcttcactttgttaaatcat

SEQ ID NO: 356379 - DNA, 565 bp, Homo sapiens
atggagtcaaaggagatcatgttggagctttaagctttgactgctctgatggattttggacttgcctagggcctgtagccctttgttttggccaatttctttcatttggaatggctgtatttacccaatgcctgtatccccattgtgtctagaaagtaactaagttgacaggctcataggcrcaaggcatttgctttgcttcagatgagatgttggactgttgacttttcagttaatgctgaaatgagttaagactttgggggactgttggggaggcatggttggttttgaaatgtgaggacatgagatttgggaggggccaggggcagagtgatatggtttggctatgtccccactcaaatctcatcttgaattttaactcccacaattcccctgtgatcatgggaggaacctggtgggagatgattgaattataggggcgagtctttcctgctctgttcttatgatagtgaatgagtctcacaagatctgatggctttaaaaacaggagttccctgcacaagctctctctttgcttaccaccatctgtgtaagatgttacttg

SEQ ID NO: 356380 - DNA, 626 bp, Homo sapiens
tgtttgctttgtccatcacagggtaagggttttaaaaattcctttactgttaggtgggtggatatagaagagaggatgggtaaatgaatggtttcattctgctacctttacccasctatgcccactcacttttcaggtaacttctccaactgcacttcatactgctgaaaccactctggcaagggaactgatgactcaggcctccacaggacttgtcttatctgtggtatttgaaactaataatttccatcttccttgaaaaccattttcctccctatgattcataactcacttgctttcgaatcccctacttctcttccttcctggtctcatcacaggtctttcttggtctatacttttattgttgatgtgcctcaatgttctctcttttctcttctgacttttctgcctgcctagggtaatttgatttctttttatggcttcatctacccccttggtattcaagattcgtgaatcttcatcagtgtttagactttttgcttgggctcttctgcttaatatccaactttcttctggatgttttcacttcaaactcaacgcgtccgtaatcaagctcatatttccaacaaatctgtttcttcttacttttttttttcaacctcaat

SEQ ID NO: 356381 - DNA, 552 bp, Homo sapiens
cctgagagtatgacaggggaataaactgcctctgggatatacattcccatcagagaacctggcagtccaggccatggggaggccttaaccctgcccagcataggagctgatttagtgagcggtggggagtatgtgaggagtggcattgggacatgctttgcatgtactcccagtctctagtggggatggagggaagccattcctgatcctacctcataggtaatctcccagaaattggttaggtagcataggcggtagtcacaggttgagagaagctctcaactgagattcacaatattatctcaggtggggagaaacttccttggccagaactgaagggcaagtgagaagtgtgctacagccacaaatgcaaaagctgggtggcagaccaagaggtgcatggcctgaaagccccagttgctgtctccctagggaggatttatggcatggggcacttttgggttctgagcacacactgcctggarcctagctagctgctgctggtagaatgctgctggagtaagaactgccttgctacatatgtgggagcta

SEQ ID NO: 356382 - DNA, 552 bp, Homo sapiens
cccaaaattttgtatccagcaaaactaagttttataaatgaagaaataagatctttctcagacaagcaaatgctgaggaaatttgtcactaccagaccamttctattagaaatgctgaaaggagttctaaatcttgaaacaaaaggtcaatattcaccagaatggaactcttgaaagcatcaaacccatatggcctagaaaacaataacaaaatgaaacaaaaaaaacaacaacaaagtatctaggtaacaatcaacataacgactggcacagtaccttgcatctcaatattagtgttgaacataaatggtctaaatgctccacttaatagatacagattggtaaaatggattaaaaaatcacaagccaaatatctgctatcttcaagagactcacctaacacgtaaggattcttatagattcaaggtaaaggagaggaaaaagatattccatccaaatagaaaccaaagcaaggaggagtcacttactttaaagcaataatagtaaaaaaaaaaagaagcaaagaagattattacattacataacgataga

SEQ ID NO: 356383 - DNA, 597 bp, Homo sapiens
ctatgtatgtcatttgcccactttttggtgggattattttyttctcactgatttgtttgagttccttgtagattctggatattagtcttttgtcagacgcatagtttgcaaaccttttctcccacttgctgggttgatggttcactctggtgattatttgttttgccatgcaaagaggctttttaatttaaatgggtcccatttctttatttttgtttttgttgcatttgcttttggggccttagtcataaattcctttctggccaatgtccagaagagttttttctaggttttcttctagaatttttatgctttctggtcatagatttaagtctttgatacacctggagttgatttttgtatgtagtgagagataggggtctagtgtaattctcgtatatatggctattcagttttcccagaaccatttattgaataggatgtgctttccccaatttgtgtttttgtatgctttattgaagatcagttggttgcagtatttggctttatttctgtgttcctattctgttccattggtctatgtatctacttttataccagtgccatgctgtcttggtaactatagccttgtagtat

SEQ ID NO: 356384 - DNA, 597 bp, Homo sapiens
aaggcatatgaccttttgtgccaaaaaagtacacagtatgtttctaaactcctcaaaatttttagcatgactgtattattacttagttgaatatttttctcatttggtaatgaattatgagtgtgatattcattaggtcccaaatagtgctcttcttatccactaaaagagctacataaaaaatacaaaagttgtagcactattcacaatagccaagatatggaatcagcctaagtgctcattaacagataaacagataaagaaaatgtggtatatatacacaatggaatattatttcaccataaaaagaatgaaatacagtcatttgcaacaacattaatggaactggaagacattatgttaagtgaaataagccaaagacacaaaggcaaatggcatatgttcttactcatatgtgggagccaaaaaataggctgggaagaatagtggagaggaagggataaagagaggttgcttaatgggtacaraaatacagttagaaagaaggaatatgatctagtatttggtagcacaaacacttagggcgactttagctgacaatagttcattgtatatttcaaaataactagaagagta

SEQ ID NO: 356385 - DNA, 609 bp, Homo sapiens
tgcctgcatatctctaatatattagaggaaggagaactaagtagataaaagctcaggtatccataaaatgtaatatctaaactaggacaatgttgaaaatgaagaaagccataatgattacagtgggacaatagaaggaaactggggctatactgggcaaattgagacattagagtcaccctgttaaaagtctgtgctgagttctgaggtcacactctgctagtagttacagagaaacagctgaaggcttttcagtagtgttgttaaatgaccagaacttcaggaagcttagcatagaagtgggttatggctcgattggagcagagagagactgaggctaggaaagcccatgaacatttttatgacaccagtgaagacataaggaaaggccaagccrcgatggcagcaataaaaagagaaaacctatatgagacattatctaaaatcacagttaaagcagttaaagaagatatacaagttgtgacactggtccaagtagttataaacttttgaacacatctcaagggacttgataggtaaaggtcaggcatggtagagcaattgccagcaggagaaaccaaggtgagatcagattccagggccaaagct

SEQ ID NO: 356386 - DNA, 565 bp, Homo sapiens
tttttttgtttttgtttttccttgaaaagcttgcattaattcaggagggtaacttaatatccatgacatcctaacagtgagagaaaacagtagagaatcttttcctaaagtccgaacagaaatcagattgtgaatatgtgcttatgtgcaaaggacttcatctggaaagtaatgagagggagcacagctgctgtaagcaagtgagtgcatagattgaattggattcaccatagyaattagtcaaaactagtacagaggaaggactagaaagaagcaggaggcaaaaactaaggtcagcatttagaggatctatttctctgggacagaaaaagtcagaacaaatcccagagacatttcagaatggaacctccaatatgcagttgtcattctgatgtaggccacggttgtgaggaaggggataggcacatgatgaaagccttattgatcctattactcagtcctggaacttgcagggagaagaatgattggccttcttgagtatattctcaagaagtagctcatattcaagggtaggtaagctgtgatgaaagagaggaaataaggc

SEQ ID NO: 356387 - DNA, 615 bp, Homo sapiens
ctgggttttttggttgttgttggcaactttttattattattattattattattactgattcaatctcactactcatttttgtctgttcaggatttccatatcttcctgcttcaatcaagaagagttgtgtttccaagaatttatccattccctttagattttctagtttgtatacatagaagtgttcatagtagacttcaataatatttgtatttttttttcctgtggtgttggttktaatgtctccattttcatttctagttgaacttatttgaatcttctctcttttctttgttaatctatcaaatttagtttattttttcaaagaaccaactttttgtttcattgatcttttgtactttttgtttcaaattaattttgttctgctctgatctttgttatttcttttcttctgctagctttcagtttggtttgttcttgtttctctagttccttgaggcatgacattaggttgtgaatctgtgatcttttgaacctttttttttttttttgagacagagtcttactctgtctcccaggctggagtgtagtggcacaatcttggctcactgcagcctctgttccctgggttcaagcgattctcctgcctcagcc

SEQ ID NO: 356388 - DNA, 615 bp, Homo sapiens
ctgggttttttggttgttgttggcaactttttattattattattattattattactgattcaatctcactactcatttttgtctgttcaggatttccatatcttcctgcttcaatcaagaagagttgtgtttccaagaatttatccattccctttagattttctagtttgtatacatagaagtgttcatagtagacttcaataatatttgtatttttttttcctgtggtgttggttttaatgtctccattttcatttctagttgaacttatttgaatcttctctcttttctttgttaatctatcaaatttagtttattttttcaaagaaccaactttttgtttcattgatcttttgtactttttgtttcaaattaattttgttctgctctgatctttgttatttcttttcttctgctagctttcagtttggtttgttcttgtttctctagttccttgaggcmtgacattaggttgtgaatctgtgatcttttgaacctttttttttttttttgagacagagtcttactctgtctcccaggctggagtgtagtggcacaatcttggctcactgcagcctctgttccctgggttcaagcgattctcctgcctcagcc

SEQ ID NO: 356389 - DNA, 594 bp, Homo sapiens
atctgtctcctaccagaattatttttctgactcctcatttgggtagactatttctagttattcctgattttattttttatttggctgtagttttttcactattttttccctttgaggatgtgaccttattgtttataatttaatgtggcctaatttggctcttggtgcttgcagggttgtaaagactctgtatgagtttcttggttatagagagtctttgtatgatgtctttctcagatkctggtgacagtggcaacgtggtaggtgtgtgagcaggttcactgtctcctgtggggttggaattgcagaggtatcttgatatgtttatcttcttctccagtggtgtacatttatttatttgttatttttccctcaggattttactaatgtggttgaatggttcaggcttcaggccagtaggggagatgtccattggttaaagccagttgtggctaaagcaggtgggtaaatgcaatacccaatggttggcagatgttgcagccttaacagaggtggctggggagctttcatggggaagggagggagccacctcagctcccctgccaggccagctagatagtcatccacctgtca

SEQ ID NO: 356390 - DNA, 585 bp, Homo sapiens
ctgcagttgttgggtagaatattctgtaaatatctgttgagtccacttgttttagggtatagtttaaattcattgttttttkttgttgttgttgttgactttctgtcttgatgacctgtctagtgctgtcagtggagtattgaagtgccccactattattgtgttgctgtttatctcatttcttaggtctagtagtaattgttttataaattttggagctccagtgttaggtgcatatctatttaggattgtgatattttcctgtttgacaaggccttttatcattatgtaatgtccctctttgtctgtttgaactgctattgctttaaagtttgatttttctgacataagaatagctactccggagtgcttgcttctggtgtccatttgcatggaatctccttttctacccctttaccttcagtttatgtgaatccttatgttaggtgagtctcttgaatgcagcagatacttgttggatgaattcttacccattctgcaattctgtatcttttaagtggagcattaacgccacttaccttccacattagtattgagatgtgaagtactattccattcatgcat

SEQ ID NO: 356391 - DNA, 554 bp, Homo sapiens
gatgattagtatgttatttcttaatttgaaacaaaatctgcctccctaggatttacattatttagtactagtttttccagagtttcagaggaaaaaaaattattgatgcttttatatatgatagatttttctttgagaatggctattgttcgactcctaaaatccttgcttttcaagtggaaacatccttggtttctcaaactttttatcaggtgacttttttttttctccctcagagcattcactagttcctatttgggtagatgccagcttgtaaaaattgtgcttaaagcatcatttccgaaagctgaaacctgatatgggtcagtccctgtttaacttcctttctgatgtgcttttcctagctcccctrtagctgcatcctttgactctcttctttccgggatcattcttactctagagcccagcttaaaacaggcttaaagaaggaagaatttatgcagcctcagtacctctgctgggtggggctgagcatcccagacccttcccagggtgatgacctaggacaaaatagactagaggtaatcactgag

SEQ ID NO: 356392 - DNA, 554 bp, Homo sapiens
gatgattagtatgttatttcttaatttgaaacaaaatctgcctccctaggatttacattatttagtactagtttttccagagtttcagaggaaaaaaaattattgatgcttttatatatgatagatttttctttgagaatggctattgttcgactcctaaaatccttgcttttcaagtggaaacatccttggtttctcaaactttttatcaggtgacttttttttttctccctcagagcattcactagttcctatttgggtagatgccagcttgtaaaaattgtgcttaaagcatcatttccgaaagctgaaacctgatatgggtcagtccctgtttaacttcctttctgatgtgcttttcctagctcccctgtagctgcatcctttgactctcttctttccgggatcattcttactctagagcccagcttaaaacaggcttaaagmaggaagaatttatgcagcctcagtacctctgctgggtggggctgagcatcccagacccttcccagggtgatgacctaggacaaaatagactagaggtaatcactgag

SEQ ID NO: 356393 - DNA, 594 bp, Homo sapiens
ggaaaaagatagaattaattttcacatagttcttagtgccaggtatatttttcccactgaaaactagcacaggggttacagttttccaaagttagaagaaaaagcaccaaacaaagcaaaatacgacctttacaatttcttatttctcatcttgattttgaaacagaaaataaaaactgaactcaagagtgtgaggagctctttctttgttacttattacattctagagaaatccaagaagttctaaaaagtagaggtaattgtctctgatttcctcagcttaagtactattgactcacttggagaaattttcaaggaaaattgaggcttatgtattactttcatcactttaattattgatgttggaaaaatatcccacataggatttttgtcttgatgaactttcttggcatgtttttttttwaaaaaaaaaaaaaacctgaaagatacttttcacatggcctaaaaatctttgccaagaaaatgaattaaaactgcttcagagaagcattttggaatcatcccagatcttgggtaattttaatatcaagtagatcaaattcactcacaatcctattccagggcattagcaag

SEQ ID NO: 356394 - DNA, 359 bp, Homo sapiens
acaaatggtaaaaagaaacattgaattcttttataatctggaagctaagtaaaactactaaattatttcataagataaagaagcaataaaaaattaataaatttaattccacaaaataacaaatgtttgcatgagatataaccatattattgtgtgtattaaaagtagcataaaaatctaaactactatamggaaagtcaaaagatgaaggaccaactaatagaaaatatttgtaactccaagggctaatttccttcatatataaagggctatttacaatcaagaagaaaaggtccaaaaacccaatataaaagtgaggaagaaaacataaagatagttcatggaaaagaaatgcaaat

SEQ ID NO: 356395 - DNA, 517 bp, Homo sapiens
taagaaacaaagagaaataacatgtatatatatttgcttatgtgcttacatatatttgcttatacatatttgcaaaagaaagccaaggaaagataaaacagaaatcaatgaaaatgattatctataaaggaagcatgaaaatgaagtggtgggataagaatgagagtgagagttcctggaatatattcccacaaaagtatgttctgttgacttttttatatggttttaaattaagtgcttcacatatgcagaattaaatgtaaaataaaccaaagtgaacaccaaaatttaacacaaatagaaacaaaggactcaaatgcacaccttctcctcaacttacggtggggttatakacagataaacccattgtgaattgaaattatcccaaattgaaagtggatttttgacatgatattttcaactgaggatgagcttactcagatgtaaccctattctaagttaggaagtgtactaaatgcatattgcttttgcatctcataaagttgaaaagtagtaa

SEQ ID NO: 356396 - DNA, 517 bp, Homo sapiens
taagaaacaaagagaaataacatgtatatatatttgcttatgtgcttacatatatttgcttatacatatttgcaaaagaaagccaaggaaagataaaacagaaatcaatgaaaatgattatctataaaggaagcatgaaaatgaagtggtgggataagaatgagagtgagagttcctggaatatattcccacaaaagtatgttctgttgacttttttatatggttttaaattaagtgcttcacatatgcagaattaaatgtaaaataaaccaaagtgaacaccaaaatttaacacaaatagaaacaaaggactcaaatgcacaccttctcctcaacttacggtggggttatagacagataaacccattgtgaattgaaattatcccaaattgaaagtggatttttgacatgatattttcaacygaggatgagcttactcagatgtaaccctattctaagttaggaagtgtactaaatgcatattgcttttgcatctcataaagttgaaaagtagtaa

SEQ ID NO: 356397 - DNA, 541 bp, Homo sapiens
acaaataatattggaaacacaacatagcaaaacctacatgatacagcaaaagcagtataaatagagaagttgatagctataagtgcctatgtcaaaaaagagaaaaatttaaaatacacaatctaacaatgcatcttaaagaactagaaagccaagagcaaaccaaactcaaaattattagaagaaaagaaataataaagattagagcagaaataaatgaatttgaaatgaagaaaacaatacaaataatcaacgaaacaaaagttggttttttgaaaagttaaataaawtcaataaaactttagccagactaatgaaaaaaaaagagaaaccaaaatgaataaaatcagtgatgaaaaaggagacattacatatgacaccacacaaattcaaaggatcattaatggctattataagcatctatatgccaataaattggaaaacttagaagaactggggaaattcctagaaacatgcaacctactaagattgaactgtgaagaaatccataacctgaacagactcacattataagtgaaaa

SEQ ID NO: 356398 - DNA, 481 bp, Homo sapiens
tgactaaagtcaataataatttaattrtacattttaaaataatcaatagagtataattggattgtttgtaacacaaagaataaatgcttgtggggaggatagcccattcttcatgatgtgattattacatattacatgtctgtgttaaaacatctcaggtactccataaatatatacacctactatgtacccatgaaaattaaaaattgaaacaaatatggttgtgagtgagatcacattgggtagtagtttcaggatttcttcttcaaatcatacccaattaggatttttaaattgagctttaattgtaaaaaagaattatttggcactagttatatcctaattgagtaaaattaaacaaggcaactaattacagatatcttctatagacatgagtttggctttgattccctatcattttcattttgtttcaaattttataatttgaaaagtttcaaacatatgacaagaaaagaataaa

SEQ ID NO: 356399 - DNA, 564 bp, Homo sapiens
agcagccacatgtgccaagtctcatgcattggccatcttcagggtaagctgaaatatggtaaagtatcaggttctgtgctagccaccacaggcaaaatacatgatcatttttccttggaaattttcccagtatttgttatttgtttgtgatctgcttgggtgaggctttctcacagtgggcaaaaataatagtaattattatattctgataaattcatgttcagtgatttcttgccctaggaacagagaaaagagaacaacagatccctaaaaataaattgccctaagaagcaaaaaaatacgttaaaatgcaatgcacactttttgtgaactttagaagagaagcataaaactgtaaataaaaaacagaatttgatttaaggttgtattttatgttgaacttcttaaggattttatctctagaggaacaataaccagacttgttgcctaataatttaatttagttctcagaragaaacgctcaccagactagttgcctaatattttaaagttgtttaccataaaaaaaataattttatatttgtgatatattttttaaattcc

SEQ ID NO: 356400 - DNA, 478 bp, Homo sapiens
cacctcggtcggggagaccctaacccagcggcgctagagaaattaaagacacacgcacagaaatatagaggtgtgaagtaggaaatcaggggtctcacagccttcagagctgagagccccaaacagagatttacccacatatttattaacagcaagccagtcattagcattgtttctatagatattcgattaactaaaagtatcccttatgggaaacgaagggatgggccgaattaaaggaataggttgggctagttaactgcagcaggagcatgtccttaaggcacagatcgctcatgctattgtttgtggcttaagaatgcctttaagcagttttccgacttgggcgggccaggtgttccttgccctcttgcggtaaacccacaaccttccagtgtgggtgttatggccatcatgaacatgtcacagtgctgcagrgattttgtttatggccagttttggggccagtttatggcca

SEQ ID NO: 356401 - DNA, 601 bp, Homo sapiens
cctgctttatatttaccaggatcactcttggtgctgcagagagaatagaatttagaggttcaagagtggaagccaggagaccactgaggagatttgacagcagtccaggagagagaagatagtggcttgaactaygtaaagggtgaaaggagtgaaaagtgtgcagataaatgttggatgcaggaccaacataatggatttaatgtgaggtatgacacaaaaagaggaatcataaatgatttccaggttttttgctagagtggatgatgatattgactaaaatgaggtggagaggtagggatgagatgaataacaggaatctggactggagtgggaagatggtgtggaaataacaagatatgttaagtgtgagattcctgttggatatccacatagatgtcaggtaggcaggtacacatgtctggagtttaaaagagaggccagtgctaaggattcaactcagcacccttcagagtatgggtgatatttagagcccagggaaaaaaagcctaaggaccaaacccagagatgctcttggaagaaagaaaaaagaaacccataagggagactgaagacgagcaaccagtgaggcaggagacaa

SEQ ID NO: 356402 - DNA, 601 bp, Homo sapiens
cctgctttatatttaccaggatcactcttggtgctgcagagagaatagaatttagaggttcaagagtggaagccaggagaccactgaggagatttgacagcagtccaggagagagaagatagtggcttgaactacgtaaagggtgaaaggagtgaaaagtgtgcagataaatgttggatgcaggaccaacataatggatttaatgtgaggtatgacrcaaaaagaggaatcataaatgatttccaggttttttgctagagtggatgatgatattgactaaaatgaggtggagaggtagggatgagatgaataacaggaatctggactggagtgggaagatggtgtggaaataacaagatatgttaagtgtgagattcctgttggatatccacatagatgtcaggtaggcaggtacacatgtctggagtttaaaagagaggccagtgctaaggattcaactcagcacccttcagagtatgggtgatatttagagcccagggaaaaaaagcctaaggaccaaacccagagatgctcttggaagaaagaaaaaagaaacccataagggagactgaagacgagcaaccagtgaggcaggagacaa

SEQ ID NO: 356403 - DNA, 601 bp, Homo sapiens
cctgctttatatttaccaggatcactcttggtgctgcagagagaatagaatttagaggttcaagagtggaagccaggagaccactgaggagatttgacagcagtccaggagagagaagatagtggcttgaactacgtaaagggtgaaaggagtgaaaagtgtgcagataaatgttggatgcaggaccaacataatggatttaatgtgaggtatgacacaaaaagaggaatcataaatgatttccaggttttttgctagagtggatgatgatattgactaaaatgaggtggagaggtagggatgagatgaataacaggaatctggactggagtgggaagatggtgtggaaataacaagatatgttaagtgtgagattcctgttggatatccacatagatgtcaggtaggcaggtacacatgtctggagttyaaaagagaggccagtgctaaggattcaactcagcacccttcagagtatgggtgatatttagagcccagggaaaaaaagcctaaggaccaaacccagagatgctcttggaagaaagaaaaaagaaacccataagggagactgaagacgagcaaccagtgaggcaggagacaa

SEQ ID NO: 356404 - DNA, 569 bp, Homo sapiens
tgggaatgataaatatggatatctcttttacagagtttaactagataggatgaaagggagggattttkttcgtgttttttgctgtatttttaaatttcaggagataatacagcatgttttatgttggttatgacttagtgaccaggaggataaatgctgattctggggggagaggatgtagagcagcaccctgagaggtgagaggggtacagatcaagagattgatacaagaagttgccttggagaggacagtctgtttactggaaggaaggaagtgaagattattgaacacctgctttgtctacatgaatcaactcatataatcttcaccccaagctgctgaggtagatgtaagtattttctccattttacagctgagcatagagcttttcaggcacttctgtaagatctgagaaggggcagatgcagcatttgagcctaggcagtgtggctccaaagcacttgctcttacccaccacaatttgcagagaaaatagttacagatatagggtgcatgtatatttgacaatgggaaaatctgatatcctcttctgattgcatcagttttc

SEQ ID NO: 356405 - DNA, 569 bp, Homo sapiens
tgggaatgataaatatggatatctcttttacagagtttaactagataggatgaaagggagggattttgttygtgttttttgctgtatttttaaatttcaggagataatacagcatgttttatgttggttatgacttagtgaccaggaggataaatgctgattctggggggagaggatgtagagcagcaccctgagaggtgagaggggtacagatcaagagattgatacaagaagttgccttggagaggacagtctgtttactggaaggaaggaagtgaagattattgaacacctgctttgtctacatgaatcaactcatataatcttcaccccaagctgctgaggtagatgtaagtattttctccattttacagctgagcatagagcttttcaggcacttctgtaagatctgagaaggggcagatgcagcatttgagcctaggcagtgtggctccaaagcacttgctcttacccaccacaatttgcagagaaaatagttacagatatagggtgcatgtatatttgacaatgggaaaatctgatatcctcttctgattgcatcagttttc

SEQ ID NO: 356406 - DNA, 569 bp, Homo sapiens
tgggaatgataaatatggatatctcttttacagagtttaactagataggatgaaagggagggattttgttcgtgttttttgctgtatttttaaatttcaggagataatacagcatgttttatgttggttatgacttagtgaccaggaggataaatgctgattctggggggagaggatgtagagcagcaccctgagaggtgagaggggtacagatcaagagattgatacaagaagttgccttggagaggacagtctgtttactggaaggaaggaagtgaagattattgaacacctgctttgtctacatgaatcaactcatataatcttcaccccaagctgctgaggtagatgtaagtattttctccattttacagctgagcatagagcttttcaggcacttctgtaagatctgagaaggggcagatgcagcatytgagcctaggcagtgtggctccaaagcacttgctcttacccaccacaatttgcagagaaaatagttacagatatagggtgcatgtatatttgacaatgggaaaatctgatatcctcttctgattgcatcagttttc

SEQ ID NO: 356407 - DNA, 533 bp, Homo sapiens
cccgtatattactcagtatataataacttaatatagggtgggttattttgatgtgtatgatgcttaattttgtaccatcttgactgggccacagggtacccagatatttagccaaacattattcactggatttctgtgaggttgtatttagatgagattaacatttacattggtagattaagtaaagcagattgccctcactaatgtgggtggccctcacccaatcagttgaaagcccartagagcagaaagtctgcctgtctcttaagtgggagaattattcctggctgaatgccttttaactgggactttgggttttttcttgcctttatattcaaactgaaactttggctcttcctgggtctggatcctgccagccttcagacaagaactatgcaataggcatttttggttctctggcctatggactctgactaaaactaaatcatcagctctggtgggtctccagcttgttggctcaccccgcagatctggggactggcttgcctcctcaatcgcatgagccaattata

SEQ ID NO: 356408 - DNA, 601 bp, Homo sapiens
attgtttataccactatcagcatttttatcaaagccattcaacaagtctctaggaagttccaaactttcccacattttcctgtcttcttctgagccgtctraagtgttccaacctctgcctgttacccagttccaaagttgcttccacatttttgggtatcttttcagcagtgtcccactctactggtaccaatctactgtattagtcaattttcacactgctaataaagacatacccaagactgggcaattgacagaagaaagaggtttattggacttacagttccacatggctggggaggcctcacaatcctggtggaaggtgaaaggcacatctcacatggtgacagaaaagagaagagagcttgtgtaggaaaactcccctttttaaaaccatcagatctcgtgagacttattcactatcatgaaaacagcatgggaaagatctgcccctaggattcagttacctcccactgggtctgtcgcacaacacatgggaatttaagatgcaatttgggtggggacacagccaaaccatatcagtcagccagcagcagagaccaacaataaatcttcaatatggtaccattcctaaggggtg

SEQ ID NO: 356409 - DNA, 601 bp, Homo sapiens
attgtttataccactatcagcatttttatcaaagccattcaacaagtctctaggaagttccaaactttcccacattttcctgtcttcttctgagccgtctgaagtgttccaacctctgcctgttacccagttccaaagttgcttccacatttttgggtatcttttcagcagtgtcccactctactggtaccaatctactgtattagtcaatttycacactgctaataaagacatacccaagactgggcaattgacagaagaaagaggtttattggacttacagttccacatggctggggaggcctcacaatcctggtggaaggtgaaaggcacatctcacatggtgacagaaaagagaagagagcttgtgtaggaaaactcccctttttaaaaccatcagatctcgtgagacttattcactatcatgaaaacagcatgggaaagatctgcccctaggattcagttacctcccactgggtctgtcgcacaacacatgggaatttaagatgcaatttgggtggggacacagccaaaccatatcagtcagccagcagcagagaccaacaataaatcttcaatatggtaccattcctaaggggtg

SEQ ID NO: 356410 - DNA, 633 bp, Homo sapiens
ctgtcgcacaacacatgggaatttaagatgcaatttgggtggggacacagccaaaccatatcagtcagccagcagcagagaccaacaataaatcttcaatatggtaccattcctaaggggtgatcagccagctatctgytggcaagttgattactttggaccactctcatcatgaaaggggcagagttttgttcatactggaatagacactaattttggacacatgtttttgccttccctacatgtgatgcctctgccaatactaccatctgtggaattacagagtgccttatccacagttatggtatttcacacagcattgcttccgattgaggaactcacttcacagcaaaaacaaattaaacaaaaaaaatgtgtggcaataaacccatatgcatggaattccctgatcttgccatgttcctcaccattctgaagcggctgtcttgttagaatggtatagtgaccttttgaagactcagttacagtgccagctaggtggcagtattttgcagggccggggcaagttttctagatggttaggtgtgctctgaatcagtgtgcaatatatgatgtgtttctcctgtagccaggattcatgaggccaggaatcaatggggaaatggaagtagc

SEQ ID NO: 356411 - DNA, 562 bp, Homo sapiens
aattaactaaaagtatctcttatgggaaatgaagggatgggttgaattaaaggaataggttgggctagttaactgcagcaagagcatgtccttaaggcrcagatctctcatgctattgtttgtgacttaagaatgcctttaagcggttttccaccctgggcaggccaggtgttccttgccctcattcctgtaaacctacaaccttccagcatgggcattaggtccattatgaacttactacagtgctgcagagattttgtttatggccagttttggggccagtttatggccagattttggggagcctgctcccaacatgtcccccttctctgatttgcaaatcaataaacacaaaggcagctttgtcacggtgagctacttctcacaggagtcaggatccacatctgcagactatacaaagacacacaacacagattaaaagcacaaccatcattgaaatcacagagcttccaagtgtttttatccactttcagctcctttaagcactccagttcctggcattaaggtcagatttgcatgggatgctttaaatatttgttct

SEQ ID NO: 356412 - DNA, 562 bp, Homo sapiens
aattaactaaaagtatctcttatgggaaatgaagggatgggttgaattaaaggaataggttgggctagttaactgcagcaagagcatgtccttaaggcacagatctctcatgctattgtttgtgacttaagaatgcctttaagyggttttccaccctgggcaggccaggtgttccttgccctcattcctgtaaacctacaaccttccagcatgggcattaggtccattatgaacttactacagtgctgcagagattttgtttatggccagttttggggccagtttatggccagattttggggagcctgctcccaacatgtcccccttctctgatttgcaaatcaataaacacaaaggcagctttgtcacggtgagctacttctcacaggagtcaggatccacatctgcagactatacaaagacacacaacacagattaaaagcacaaccatcattgaaatcacagagcttccaagtgtttttatccactttcagctcctttaagcactccagttcctggcattaaggtcagatttgcatgggatgctttaaatatttgttct

SEQ ID NO: 356413 - DNA, 562 bp, Homo sapiens
aattaactaaaagtatctcttatgggaaatgaagggatgggttgaattaaaggaataggttgggctagttaactgcagcaagagcatgtccttaaggcacagatctctcatgctattgtttgtgacttaagaatgcctttaagcggttttccaccctgggcaggccaggtgttccttgccctcattcctgtaaacctacaaccttccagcatgggcattaggtccattatgaacttactacagtgctgcagagattttgtttatggccagttttggggccagtttatggccagattttggggagcctgctcccaacatgtcccccttctctgrtttgcaaatcaataaacacaaaggcagctttgtcacggtgagctacttctcacaggagtcaggatccacatctgcagactatacaaagacacacaacacagattaaaagcacaaccatcattgaaatcacagagcttccaagtgtttttatccactttcagctcctttaagcactccagttcctggcattaaggtcagatttgcatgggatgctttaaatatttgttct

SEQ ID NO: 356414 - DNA, 633 bp, Homo sapiens
agcagatttattgtagtaaatgctgagatcagaaagcatgtgtaactgtgtcataaagtgattgcatccaggcattattgccagccaagattgataaatatacccagtaagtataattgttctctgtgtcagcccttattgaaggaatactcacagcagtggtgataactgctatcatagctaccattaaattattcattgtgactggttgtcccgctttcctcaggttttcttccgccatctaagacagcttcttgatctgtccccaggtgggtggctgtgttctatgggtgttgctcatgacagttggggtcctcctcagtgtcagtctcaacatggctgcaactggggggtcctsgggatcctcccagagtctcttccttggcatctggctcatgttaagggttcaggtgtcttgatggtatccaaatcggctgttgattcggtcctggagaaacacaagcataacctctaccccaggttattattttacctatttcccaacttgttgttatcagatctctccaccaaatcagttgttctgcttctgtctttgcaactggtttctgtagatgctgttcaactgctgataatatctgacctttgggcaggctcaaaaaatttaaagttaat

SEQ ID NO: 356415 - DNA, 633 bp, Homo sapiens
agcagatttattgtagtaaatgctgagatcagaaagcatgtgtaactgtgtcataaagtgattgcatccaggcattattgccagccaagattgataaatatacccagtaagtataattgttctctgtgtcagcccttattgaaggaatactcacagcagtggtgataactgctatcatagctaccattaaattattcattgtgactggttgtcccgctttcctcaggttttcttccgccatctaagacagcttcttgatctgtccccaggtgggtggctgtgttctatgggtgttgctcatgacagttggggtcctcctcagtgtcagtctcaacatggctgcaactggggggtcctcgggatcctcccagagtctcttccttggcatctggctcatgttaagggttcaggtgtcttgatggtatccaaatcggctgttgattcggtcctggagaaacacaagcataacctctaccccaggttattattttacctatttcccaacttkttgttatcagatctctccaccaaatcagttgttctgcttctgtctttgcaactggtttctgtagatgctgttcaactgctgataatatctgacctttgggcaggctcaaaaaatttaaagttaat

SEQ ID NO: 356416 - DNA, 600 bp, Homo sapiens
atatcgctggataatagctttagcttctttccagttaatgttgtatctgtgtttgagaccagaggcattaacatgggttaaattgtgaaaatgtctagcattagatattgcattagcaactaggtgatcagccatttgattccctttagtcgaaggtcctggaagaggtgtatgagccctaatgtgagtgatgtaaaaatgatgcattctactcctaactgctgtttgtaattgggtaaataaagtcatcagttgttcatctgtatgaaatcataactgagcattttcaattaactgtgtggaaagaaacacatatgaagaatcagaawtcacattaataggcatatcaaaagcagtcaatacctcaattacagctacaagttccgctttttgagctgaagtatagggcgtctggaaaactttacttttcgagccagaataagaagctttaccgttactagacccatctataaaaacattctcagcaccttcaattggtttgaattcagttattttggggagaatccaattagttaatttcaaaaactgaaacagcttcgttttaggaaaatgattatcgagaatacccacaaagtcagc

SEQ ID NO: 356417 - DNA, 600 bp, Homo sapiens
atatcgctggataatagctttagcttctttccagttaatgttgtatctgtgtttgagaccagaggcattaacatgggttaaattgtgaaaatgtctagcattagatattgcattagcaactaggtgatcagccatttgattccctttagtcgaaggtcctggaagaggtgtatgagccctaatgtgagtgatgtaaaaatgatgcattctactcctaactgctgtttgtaattgggtaaataaagtcatcagttgttcatctgtatgaaatcataactgagcattttcaattaactgtgtggaaagaaacacatatgaagaatcagaattcacattaataggcatatcaaaagcagtcaatacctcaattacagctacaagttcygctttttgagctgaagtatagggcgtctggaaaactttacttttcgagccagaataagaagctttaccgttactagacccatctataaaaacattctcagcaccttcaattggtttgaattcagttattttggggagaatccaattagttaatttcaaaaactgaaacagcttcgttttaggaaaatgattatcgagaatacccacaaagtcagc

SEQ ID NO: 356418 - DNA, 600 bp, Homo sapiens
atatcgctggataatagctttagcttctttccagttaatgttgtatctgtgtttgagaccagaggcattaacatgggttaaattgtgaaaatgtctagcattagatattgcattagcaactaggtgatcagccatttgattccctttagtcgaaggtcctggaagaggtgtatgagccctaatgtgagtgatgtaaaaatgatgcattctactcctaactgctgtttgtaattgggtaaataaagtcatcagttgttcatctgtatgaaatcataactgagcattttcaattaactgtgtggaaagaaacacatatgaagaatcagaattcacattaataggcatatcaaaagcagtcaatacctcaattacagctacaagttccgctttttgagctgaagtatagggcgtctggaaaactttasttttcgagccagaataagaagctttaccgttactagacccatctataaaaacattctcagcaccttcaattggtttgaattcagttattttggggagaatccaattagttaatttcaaaaactgaaacagcttcgttttaggaaaatgattatcgagaatacccacaaagtcagc

SEQ ID NO: 356419 - DNA, 600 bp, Homo sapiens
atatcgctggataatagctttagcttctttccagttaatgttgtatctgtgtttgagaccagaggcattaacatgggttaaattgtgaaaatgtctagcattagatattgcattagcaactaggtgatcagccatttgattccctttagtcgaaggtcctggaagaggtgtatgagccctaatgtgagtgatgtaaaaatgatgcattctactcctaactgctgtttgtaattgggtaaataaagtcatcagttgttcatctgtatgaaatcataactgagcattttcaattaactgtgtggaaagaaacacatatgaagaatcagaattcacattaataggcatatcaaaagcagtcaatacctcaattacagctacaagttccgctttttgagctgaagtatagggcgtctggaaaactttacttttcgagccagaataagaagctttaccrttactagacccatctataaaaacattctcagcaccttcaattggtttgaattcagttattttggggagaatccaattagttaatttcaaaaactgaaacagcttcgttttaggaaaatgattatcgagaatacccacaaagtcagc

SEQ ID NO: 356420 - DNA, 579 bp, Homo sapiens
taccttgtttaagctgtgtctctccccattatgcatcagtggctttaggctaaccttcatgggaatgtattcagaacataaaacatccagcagacctccttgtcagcaagggcttgtccaaatgcwtgcaggggcttccccaccactagacaccctgtcctcacaacacccattcagctgttggctaactatgccttacagactctgttcttgacccattcccagatgcttctgaccagtccttttcattttatttgtatatttgtataatgcagtgaagcatatccttgctgggactgcagagcaaattggtggcatgccttctgaggttccaaggttgtcatgggcatgatagcaataccctactctaactaaaagtcagttctaaactcctcagggagctcctgagggtgcatgttcttcattcttttggatactcagcagacaactagcatgtcctgaggtgccctaataacaaaagctcattccctccacataccagggggagaagatgactaggttggctttatttccttagtgacctgctgaaatctctctccgattgaaagccatcttttt

SEQ ID NO: 356421 - DNA, 576 bp, Homo sapiens
aaaggcctaatttaaatgaaaataactaatttcaaaataagaatcaaggcagaagttgaggagaagattcaggtgccagggagagatggaaatttacattggcggaattcatagttcactcttgggcagaggaactaccacattggagtctagtgcctgtgagttaataaacaaatactgctaagagggctgacactctttggagaacataaggacagcctcttagttccaatctatttaggtgaagtagtttagtattacattgagggaaggcattgaggtatcattagcagaatcctccttccagtatggtttttagcttctttgggttttgagaagagtttaggcaaaaaagaagggataggaaatcaatactgaataatacacatatctttacttcacacarcctctgctgtggcttgattttttggtacctagcagaatgacttgcacaaaagaaatgctcaatacctcttcaatgttaaaggaattaactagttaattaaaataattaattaattttgtgtttatataggcccacgcattgaccaaaggtgtttcagtgcaattttattc

SEQ ID NO: 356422 - DNA, 509 bp, Homo sapiens
ttagttcagcctatgcccaggaatgaacaaagacaggttggtggttagaagcaaaatggagtcagttaagttagatctctttcaatgtatcagtcatacttttgcaaaggtggtttcatgaccgtggtttaataatatcatcttctgtaaagagaatagaaraaatattgtcttttagttgctcaaactttttaaaatagtgtcagtataggtttacaccctataaacatgggtataatgataaattttatttcattttttatcctattaaagacagaaaaataataaatgcacctggcattcacaattatatagactgcattttcaagtttgttgtacataggcatctatgagaactgtatcctctgctttcacagtcttatgtgtatgattatcagaaaagtttcaacagactagttctagttctacacagttcaaacctggcttttcttctactactcatatgcttatggagccaggcaccattggatatgcttatagctagatat

SEQ ID NO: 356423 - DNA, 479 bp, Homo sapiens
tctcctggggccgtaaccatagttggcaactggcctgtgtcctcacttcactccagtcctggggcctacagcaaaaggaaactcacaaggcagaagtcctcctttgccctccttaagccatctgctttgatatggctcccctgaagaatcagagcttctagatttcaaaaaatctcaccagatcatctattccagcccttacttcatggaggtaaattaaaattgtcattaacaraaccatagtacaggctttcatgtggaaagaagaagggttagagcactgagtgagcagaggggtccaccaaagacctctgggaacagaaagtaagtgattccctggcttagataggaaaaaaacaggacataagaaaatagtagtactcaaactttggcatgcaccagaatcaccgacagggcttttaaaacacaaatccctggacctcacccccagaacctctaattcttgtgggtctgggaca

SEQ ID NO: 356424 - DNA, 605 bp, Homo sapiens
tggtttggtagatttatctgctgacagaccataattgaggaaaacattgattaattgatctctgactggcttgtgaggtgctatatagcaataaggaatatgtggtatgtagatcagcttttaattatttttgtttaggttcctgtcagattaaataagtgrctaggcagtattatcattgatctgtggcactggaagaaatagttcacagtacatgctgaagatttagaaatggttcatcctacaagtttagaatgcatctttgccttataaagctttgacctatgtaaaatccagattatgctaacaagttcaatttgtgcaaagctttgcagcttacaaatcattttctcatgcatcatcctacttgaccctcatgacaaatctgagaggtagggtgggcaggtgttactattcctcctttacaagcaaagacagtaaggctaagagatttcccccatccccaccccaagtaataacaccttattttaatttgcagagtatggaaagcaaaggaaaattagaaattatttagcaaattctagctggttaagcatgtggaaggcattaatcaccaccccaaacaacaccatactcatcaatat

SEQ ID NO: 356425 - DNA, 605 bp, Homo sapiens
tggtttggtagatttatctgctgacagaccataattgaggaaaacattgattaattgatctctgactggcttgtgaggtgctatatagcaataaggaatatgtggtatgtagatcagcttttaattatttttgtttaggttcctgtcagattaaataagtgactaggcagtattatcattgatctgtggcactggaagaaatagttcacartacatgctgaagatttagaaatggttcatcctacaagtttagaatgcatctttgccttataaagctttgacctatgtaaaatccagattatgctaacaagttcaatttgtgcaaagctttgcagcttacaaatcattttctcatgcatcatcctacttgaccctcatgacaaatctgagaggtagggtgggcaggtgttactattcctcctttacaagcaaagacagtaaggctaagagatttcccccatccccaccccaagtaataacaccttattttaatttgcagagtatggaaagcaaaggaaaattagaaattatttagcaaattctagctggttaagcatgtggaaggcattaatcaccaccccaaacaacaccatactcatcaatat

SEQ ID NO: 356426 - DNA, 605 bp, Homo sapiens
tggtttggtagatttatctgctgacagaccataattgaggaaaacattgattaattgatctctgactggcttgtgaggtgctatatagcaataaggaatatgtggtatgtagatcagcttttaattatttttgtttaggttcctgtcagattaaataagtgactaggcagtattatcattgatctgtggcactggaagaaatagttcacagtacatgctgaagatttagaaatggttcatcctacaagtttagaatgcatctttgccttataaagctttgacctatgtaaaatccagattatgctaacaagttcaatttgtgcaaagctttgcagcttacaaatcattttctcatgcatcatcctacttgrccctcatgacaaatctgagaggtagggtgggcaggtgttactattcctcctttacaagcaaagacagtaaggctaagagatttcccccatccccaccccaagtaataacaccttattttaatttgcagagtatggaaagcaaaggaaaattagaaattatttagcaaattctagctggttaagcatgtggaaggcattaatcaccaccccaaacaacaccatactcatcaatat

SEQ ID NO: 356427 - DNA, 541 bp, Homo sapiens
atgttcaatgatacaatgacatggcctatcaagtggaagcaaccaataaagcagacaatgatggtgcaggccaaggagcctgtatggtgctcacaggagggccattgtgctgggacatatagaagcagcttttcttcctgcttacaagatctactctgtcttgttggaggggaaaatgaggtgaacattagcttattacctctgtgtgttatgtgtrtgtgtgtgtgtgtgtgtgtgtgtgtgtgtgtttgtgtgtgtctgtgtgggtgagtgggaagggaggagttaaacacctagacagctccggaaacatccctgtctctatgaaacctggacactgaaggttttatatgtgagtaacatagattttgtttgtttgaacttctagtatagctctgcggtaacaagattagtgtcaaaatcctagatatccccaggagggaggggaagggttcctgggaaaggacaagagtccttccagtaatattccatgtacttgctgaacctagaaaacaaaactacaggatgcatatttatgtaa

SEQ ID NO: 356428 - DNA, 541 bp, Homo sapiens
atgttcaatgatacaatgacatggcctatcaagtggaagcaaccaataaagcagacaatgatggtgcaggccaaggagcctgtatggtgctcacaggagggccattgtgctgggacatatagaagcagcttttcttcctgcttacaagatctactctgtcttgttggaggggaaaatgaggtgaacattagcttattacctctgtgtgttatgtgtgtgtgtgtgtgtgtgtgtgtgtgtgtgtgtgtttgtgtgtgtctgtgtgggtgrgtgggaagggaggagttaaacacctagacagctccggaaacatccctgtctctatgaaacctggacactgaaggttttatatgtgagtaacatagattttgtttgtttgaacttctagtatagctctgcggtaacaagattagtgtcaaaatcctagatatccccaggagggaggggaagggttcctgggaaaggacaagagtccttccagtaatattccatgtacttgctgaacctagaaaacaaaactacaggatgcatatttatgtaa

SEQ ID NO: 356429 - DNA, 592 bp, Homo sapiens
actggagaacatttgcccttctcacatgaaagccatggtgtgagcaaagactggcaggaatgtagtttcctctggagacagtgaggatatcagattggtgggtgagtggcggagaaggctggacagggtgaagggaatagttctaactgaaagacatgaggatttcctgttaagcagccagctccccttgccttcacctggacacaagactgaccacagaagaggggctggctgcccattcatttttagcagagtcagttgttcagctagagttctgaggcatgctgagaacagaaaactctcaacttgatatccttccaaagacaactccatagtttygaggttaggaacagaatgctcagaattgggcattcattttctcgaggtcagtaacatatcttcaaattctcatttgacggtctccatggtactccaaatcaagttagaattaatttgaaactcatttctctttcaggtctaggtctgataattttcattcatttctttcatggacatggtgactcttttcttgccatccttaaggagaaaagccatggacactacaaaatctttgaggtttgaagtgggaact

SEQ ID NO: 356430 - DNA, 576 bp, Homo sapiens
agggagctttttgggctccgaccccacggcagcgtctaggggtgagtgtttagagctcccgaagccccagtggccatgttacaatgtgctctttcagttttgccatctgcaggtagcttgtgttaatcagttcagttagaccctatgccttatcacaaggacagaaggctttctgtatcacgggttcttccctagtggaccggaaaaaatgaatcccacgtaggcttggaggatgggtgcaaggttttttattgactggtggtagctatcastgaggtagatggagaggtcagaagggtcatagagggggaaggtggtcttccatggagttgggcggcccagcggcagccggactcttctccaaccgcccccctccaccgccgaattccacatctttctgctgtcaatggcctgctgatgtctgctcctcttctgctctcgatgtccagttgcttgtgtgtgtgcccactagggtctcaggtttttttttttcataggcacaggatggggacacggggagggccagagtggtcttggaaaatgcaacatttgggtgggaaaacaggagtgcctgtc

SEQ ID NO: 356431 - DNA, 576 bp, Homo sapiens
agggagctttttgggctccgaccccacggcagcgtctaggggtgagtgtttagagctcccgaagccccagtggccatgttacaatgtgctctttcagttttgccatctgcaggtagcttgtgttaatcagttcagttagaccctatgccttatcacaaggacagaaggctttctgtatcacgggttcttccctagtggaccggaaaaaatgaatcccacgtaggcttggaggatgggtgcaaggttttttattgactggtggtagctatcagtgaggtagatggagaggtcagaagggtcatagagggggaaggtggtcttccatggagttgggcggcccagcggcagccggactcttctccaaccgccccmctccaccgccgaattccacatctttctgctgtcaatggcctgctgatgtctgctcctcttctgctctcgatgtccagttgcttgtgtgtgtgcccactagggtctcaggtttttttttttcataggcacaggatggggacacggggagggccagagtggtcttggaaaatgcaacatttgggtgggaaaacaggagtgcctgtc

SEQ ID NO: 356432 - DNA, 539 bp, Homo sapiens
atccatcctcgtgtctataacatagatgccattaattataatatattgaaatcagtttttctctcatttagtattctttcatttccrtcttctttctaccattattttctaggttttcttgatataatatggtatattagatgcagatttttattttacacttttattttgacatcatggctctttcatttaaagaaatatttttgaaaaatgtattacattttatgatactgttatctattgttatttaggtataactatattaaatggcctgattcaattatatttttttaaaataccacaacacatcaatttttgagattttttttttttctttgagatggagccttgctcttgtcacccaggttggagtgcagtgggacgacctgagctcactgcaacctctgcctcctgagttcaagcgattctcctgcctcagcctcctgagtagctgggattatgggctcccaccaccatgcccagctaatttttgtatttttaatagcgatggggtttcaccatcttgaccaggctggtct

SEQ ID NO: 356433 - DNA, 539 bp, Homo sapiens
atccatcctcgtgtctataacatagatgccattaattataatatattgaaatcagtttttctctcatttagtattctttcatttccgtcttctttctaccattattttctaggttttcttgatataatatggtatattagatgcagatttttattttacacttttattttgacatcatggctctttcatttaaagaaatatttttgaaaaatgtattacattttatgatactgttatctatkgttatttaggtataactatattaaatggcctgattcaattatatttttttaaaataccacaacacatcaatttttgagattttttttttttctttgagatggagccttgctcttgtcacccaggttggagtgcagtgggacgacctgagctcactgcaacctctgcctcctgagttcaagcgattctcctgcctcagcctcctgagtagctgggattatgggctcccaccaccatgcccagctaatttttgtatttttaatagcgatggggtttcaccatcttgaccaggctggtct

SEQ ID NO: 356434 - DNA, 539 bp, Homo sapiens
atccatcctcgtgtctataacatagatgccattaattataatatattgaaatcagtttttctctcatttagtattctttcatttccgtcttctttctaccattattttctaggttttcttgatataatatggtatattagatgcagatttttattttacacttttattttgacatcatggctctttcatttaaagaaatatttttgaaaaatgtattacattttatgatactgttatctattgttatttaggtataactatattaaatggcctgattcaattatatttttttaaaataccacaacacatcaatttttgagattttttttttttctttgagatggagccttgctcttgtcacccaggttggagtgcagtgggacgacctgagctcactgcaacctctgcctcctgagttcaagygattctcctgcctcagcctcctgagtagctgggattatgggctcccaccaccatgcccagctaatttttgtatttttaatagcgatggggtttcaccatcttgaccaggctggtct

SEQ ID NO: 356435 - DNA, 587 bp, Homo sapiens
tgtttaaaagtgtgtagcacctcccactttgctctctttttcctgctcctgccatgtaagacatgcctgcttccccttcaccttctgccatggctgtaaatttcctgaggcctccccagccatgtttcctgtacagcctgctgaactgtgagtcaattaagcctcttttctttgtaaattaaccaagtacttctttatagcaatacgagagcaaactaacacaccagccttctgctggtggcctgcatgcatctggagaaggtgatcctatccttgcttctggattaggccctcactgttttaggctaagcatcacactgtataacctggctacaatgtttggttaaggaaygaacaggagacctagcctggaccaactgcagtgaatctcaggattattctttggaaatctgagacagagatgccctttctttcaggtaggatatgggcaacatgtggaatttgttggcagtgatattgcgaccactgggggagtagctttcatcagggggcagatagtctgcacttagaaacataccctctacatattacagaacaacctaacaattaatgttggtaatgatgac

SEQ ID NO: 356436 - DNA, 560 bp, Homo sapiens
tttgtaaattaaccaagtacttctttatagcaatacgagagcaaactaacacaccagccttctgctggtggcctgcatgcatctggagaaggtgatcctatccttgcttctggattaggccctcactgttttaggctaagcatcacactgtataacctggctacaatgtttggttaaggaacgaacaggagacctagcctggaccaactgcagtgaatctcargattattctttggaaatctgagacagagatgccctttctttcaggtaggatatgggcaacatgtggaatttgttggcagtgatattgcgaccactgggggagtagctttcatcagggggcagatagtctgcacttagaaacataccctctacatattacagaacaacctaacaattaatgttggtaatgatgaccctagatcaagaataaaatattacactataacttaatattaactgtgatttcatatattaataaaatattaaaactgtgactatgagcatgaggtagacattgcgaaaggcagcacagagacagagtttgaatttcctcatgg

SEQ ID NO: 356437 - DNA, 538 bp, Homo sapiens
attttgaaagtttcaaaaatgcttcttgatttaacaagtagagtttcatgaccaatattgaatctttgaagattgaaaatcttgcatcactttgggtgtcattagtctgtagagacaggatcttgctatgttgcccaggctggtcttgaacttctgtacacaggcaatcctccyaccttggcctcttaaagagctgggattacaggtgtgagccaccatggctggcctgggtgtcagtaatctgaacatgaatagtcaatgtaaaaacagagaatgtggaggaaattgggttgacgttacacagtttgagaatgtactctctaatgtattattttaaaaaactaaatttctcctgtgagtgtacttactgcttttgtgcttaaagcaattgctggggtagactgtgggactggtaagtgaaggatcatccagttgggttttagttaaatgaaattttatatcatctgcctgttatacagatgcaaacatccctccttagctttcctcactcctaatcctgagcagtggtcaagttgcc

SEQ ID NO: 356438 - DNA, 550 bp, Homo sapiens
ctgaattatggttacaagtgatgactctggtcagatctactgactggatgactgactcatgggtttgagtcttgacatcacttactattagctagatgacactgagcaagctacttagactctctgggtctcaggttcctcacctgtaaaaaaggttgttgtgaatatacaatgtgatttaaacattgataaatttgggtatataataaatgytcaatgatagctattataatcctatctttggggttaattattttctaccctttacttgccatcagctaattttctgatctttcccctatatgaagtaaaaacattggcacttggcttatgtctcttgttcatgtcttggaagtatcttttattatttgtgtcctatttatagccaatttagtggcatagtctcagaaatttttaccctttccaactctagcaacctcaaacatcgccaaagttcaggcactgacactgcggccatctagtaaaccttgttggcacaagaaatttctatccttctaaagttcttaagtgtcaatattccatttgcaga

SEQ ID NO: 356439 - DNA, 550 bp, Homo sapiens
ctgaattatggttacaagtgatgactctggtcagatctactgactggatgactgactcatgggtttgagtcttgacatcacttactattagctagatgacactgagcaagctacttagactctctgggtctcaggttcctcacctgtaaaaaaggttgttgtgaatatacaatgtgatttaaacattgataaatttgggtatataataaatgttcaatgatagctattataatcctatctttggggttaattattttctaccctttacttgccatcagctaattttctgatctttcccctatatgaagtaaaaacattggcacttggcttatgtctcttgttcatgtcttggaagtatcttttattatttgtgtcctatttatagccaatttagtggcatagtctcagaawtttttaccctttccaactctagcaacctcaaacatcgccaaagttcaggcactgacactgcggccatctagtaaaccttgttggcacaagaaatttctatccttctaaagttcttaagtgtcaatattccatttgcaga

SEQ ID NO: 356440 - DNA, 463 bp, Homo sapiens
ttattatttgtgtcctatttatagccaatttagtggcatagtctcagaaatttttaccctttccaactctagcaacctcaaacatcgccaaagttcaggcactgacactgcggccatctagtaaaccttgttggcacaagaaatttctatccttctaaagttcttaagtgtcaatattccatttgcagattacaacctcaacttcttccagctttcttatatcctcactcctagtaaaaccacgatttgaccttaatctttgaattcttctttatcttcacttattgattttttttccagtacttaatctggattccatgcatcagcccaataactctgttactaacattcatcctgttacctgcattttgagtgtggggatttgagctcaatgccayaatttaccttctctgctcctttagcagtgctgctccatgctgctgaagaaaatcttactgccatg

SEQ ID NO: 356441 - DNA, 566 bp, Homo sapiens
tttctcatagaagaggaaacttcaataagacatgatagttgttttgaagtatttgtaggaatgatatgtataaaaatagattaagtttattctatgtagtctgagaagtaggatgtaggttatttggaagaagcagggagacacagtgtagaaacataaataacttttcatcttagagccgatttaaaatgagatagatacctcagaagggatgaattctaccagaggcaatgaagtgtagcactgatgatgactcactggggatgctatgtgaacagaagaggcggagaaagcccatctacagagtctagggcagtagaggggagtggaggcagagaggaaaacctgcccaaattgccagtaacttttcgctttttggttctagcctttcttgaagctcaggcatttttgcctttgagtcctgtggggtcatttctataatcctaaaaaaawttctttatttctgtttaagctaatttcttgctctcattttctaacaaggaatctagtaatgagaatatctgttggaattggaaacatggagttccttggtcacatttgccagt

SEQ ID NO: 356442 - DNA, 621 bp, Homo sapiens
ctgcccacagccagctcaggggacacaggccccacctgtcccttggtaagcatatggccagagtgggctcattgcctccagaactgacactctctcagacatattggtgggatgtctttggcatcaccagcaggagtgtgtgtgagccaggcaggccatgcttctaaacctacagacccttggaagcaccctatctccatgtatgacatagctttctctcccttagcttgcaagagtccaatttgctatcaaaaaagatgacctctactttttcttttgtattttgatgaatactgcagaagctggagctgttaaattatcttgggtaaaacctcagaaccggtctgtttgatgtcagggaatcttacttgtttcaatacacaattaataaaagaaaatgaaaataattgctcttcaaaatagatttctcctctgtcatagcagatacactgaagctgcaattatgacacagttaccctttgcaaaattgcgyataaacttactttctcctcattgaaatatgggagtcttcctggctgactatgctgtcagtgtagtttctgaacagctgctagaagcggactggacatcttggacccactcagggcaccagatgccctg

SEQ ID NO: 356443 - DNA, 621 bp, Homo sapiens
ctgcccacagccagctcaggggacacaggccccacctgtcccttggtaagcatatggccagagtgggctcattgcctccagaactgacactctctcagacatattggtgggatgtctttggcatcaccagcaggagtgtgtgtgagccaggcaggccatgcttctaaacctacagacccttggaagcaccctatctccatgtatgacatagctttctctcccttagcttgcaagagtccaatttgctatcaaaaaagatgacctctactttttcttttgtattttgatgaatactgcagaagctggagctgttaaattatcttgggtaaaacctcagaaccggtctgtttgatgtcagggaatcttacttgtttcaatacacaattaataaaagaaaatgaaaataattgctcttcaaaatagatttctcctctgtcatagcagatacactgaagctgcaattatgacacagttaccctttgcaaaattgcgcataaacttactttctcctcattgaartatgggagtcttcctggctgactatgctgtcagtgtagtttctgaacagctgctagaagcggactggacatcttggacccactcagggcaccagatgccctg

SEQ ID NO: 356444 - DNA, 618 bp, Homo sapiens
ttcctttagttcctagtaaaggcattgtgcatttcaaacagctatctttcttctttaatccactttctttcttcctagtgtggaaaagatatataatttagccctcactcaaatacaaataagatgagtttcaaaggccattcaggccctaatgtgtgtcctttgcaagaacaagaaactgtgattctgaagaatttaaatacagatactgttggcagccagagatgttttctgctgttggaatgcaaaagaaaatattactttatagctgcactgtgccactcctgacattgatgggtcttgtattcaccagaggrgggaaaattaaaatatcttacctgtctacacagtatccttggtggttacacaacaataaaatattcagcagtctgatacctttactgttaaaactgaaataccaaattgaaactggttgagaatgtgtgcagtctattgtgttcctactttctttagattagctttctatcacaataactgcattcagtagggctcatattgtctcaattataaagtcaactccagacattagcactagattgcttcagcgaatctcaaatatttttaactgttgacaaaagtttcagtttcattatgcca

SEQ ID NO: 356445 - DNA, 379 bp, Homo sapiens
tgggcagcgggcaaggtgaacccactgggcagttacattcctaagccttacaccagatccacraaatcagaatctccaagggtagagcccgtgaatcacttttttaaaattctctatcattctgatcattgctaatcattggtcatagatgggatttaaaatcttagtttaatttgttatacagatttgatcttaaatatttagattctgtttatacccttaattacatctagaataatcctaaaatgtacattttgtattttttaaataaatcattaacaaaatttaaattttgcacttgaaaacttttcacaggttttattctacttatgatagaatgtgtaggttttaaaaattatcatatgatatgattaataac

SEQ ID NO: 356446 - DNA, 547 bp, Homo sapiens
accatcagcctttgattcctttctgggcatctttcccatgtccaaagtgcccccttctgttaaaactttgtaagccacattcatttaaagacttttaaaatataaccatctgatgtaacattcaaaatatttatgcatgctgagtcttcacctaacaagcagtttccccactgacagcatctgatgtcctcagaggtagcaattctaccccgacaacctcagcttctgcctatctgaccctgmtgagtcttctgacccaagtaacccactgggtctgccttctatctctcctagccttgttagagagttcattttcagaagccttacttgaaaaagctgtttcttagaaggaaatgactacctttcagttagaactctctactaatctggtaggaaaatggttggatctgtctctcctcacttttgtacagtctgagttttcctgacagtcagatgtcttaggcacagcacactccacagtctggctgcttcctgggtctctagcatcttcccacatggaactgtgtcttagcacagtttgcacagg

SEQ ID NO: 356447 - DNA, 670 bp, Homo sapiens
cagttcataggtatttaagggtacaaacccatggctgagcttggctttaaaaaaagtcttatctgagattccttatggaacaaagttccatcaaaaccaattttaaaagcctatgtaaaaaaattattattcttgctgcactttatacaaataatcaggccaagtataataaagcaaattgatcttaccgtgatttgtctttagtaaaaatgggaaactgcasggagaaaaaaaaaatatgtttcaagaactatggtacattcattgttagattctagtctcatttttaagctttttaaagcttgtttcctgcaatttagactaaccctgcttattcctgtaaaccaaccagtgatctctggctatagctcaaaagaaacaagagggatgggtaatgtaaaaaaatctggatcaatattctaattctgggcacatattggaatcagctagcaaccccatatcagcttggttccaacagttgcccacttcatggaaagccttctaatttggtttatttggggtaattttgcttattttgctttactgttatgaaatacatttgctgttgtactctttgtgtaggaatacaggataagtttactgaatgttttcttaaattgaacacttattaatcctccagatattaccttttgtcagagttatgaatggt

SEQ ID NO: 356448 - DNA, 670 bp, Homo sapiens
cagttcataggtatttaagggtacaaacccatggctgagcttggctttaaaaaaagtcttatctgagattccttatggaacaaagttccatcaaaaccaattttaaaagcctatgtaaaaaaattattattcttgctgcactttatacaaataatcaggccaagtataataaagcaaattgatcttaccgtgatttgtctttagtaaaaatgggaaactgcacggagaaaaaaaaaatatgtttcaagaactatggtacattcattgttagattctagtctcatttttaagctttttaaagcttktttcctgcaatttagactaaccctgcttattcctgtaaaccaaccagtgatctctggctatagctcaaaagaaacaagagggatgggtaatgtaaaaaaatctggatcaatattctaattctgggcacatattggaatcagctagcaaccccatatcagcttggttccaacagttgcccacttcatggaaagccttctaatttggtttatttggggtaattttgcttattttgctttactgttatgaaatacatttgctgttgtactctttgtgtaggaatacaggataagtttactgaatgttttcttaaattgaacacttattaatcctccagatattaccttttgtcagagttatgaatggt

SEQ ID NO: 356449 - DNA, 621 bp, Homo sapiens
ctttgtcccaatcttcgcctatctcttaggctccaggataccatgtgccccatcaaccgtagcctgttggttcacatctccagcagaaatgtgcagaaatcacaggaacaaaatggccctttgctccaactgacccaacaggatagcagaaagacacccaagctatgccctgggcaacagagagagagacgcaaacatcacattgctcacaacatgtctctcactttgccatgacttgaacacagcatccactcgaatatcctgatatcttccttcatgatgtcttctctataaaggaagcctctttccacccacttcccccttagtgcccatctccacctctattcctaccactcattaagccagtgttagggcatgtggggttcatatattccctaacagaaacagagtcattggggatttccaaattagttaagattataaccttgaagtcgggtagaatcccaacacccccaccttctagccatagtaacatattcataaaattagtctgatattcatttttatttttaaatcttcaaaagactatkataactaatctcataggtttggcatgaagattgtatcagataatgtgtacaacgtacccaatacaatacc

SEQ ID NO: 356450 - DNA, 530 bp, Homo sapiens
cccaatacaatacccagctcatagcaagcaattaataaggtaaaatattatcccaagtctagaccatacaacagagacaccatctatcatgttcatcactgtatccccaaaacttaacacagtgcctggtatagagtgggcactaaataattatttgatgaatgaatcaattaaacagtaaygaaatgcataattgtattcagtatcccttctctcccacctgttcgcatataataagaaaaagagtaaagtcaaggtccattagacataatatcactatttaatagatctagaacagtcagctataatttaaacaaaactagttctcagggggacatacaattaggtttaaatagagaaagggacaatgttcaaggcatattgtgaacacatggacagactgtgccagttggcctgcataatgcactctcactgttcctgtacttcctgagcaaaggcttccaaggtcagcagacaaacctctgcacagtcatgtcctggaggaatgctctgggactcccatgcccaag

SEQ ID NO: 356451 - DNA, 593 bp, Homo sapiens
ttccacaaactaaagatctccagagtaacacagaggatggagcacagactctgccacaaacaatttgaatcccattcttccatttactcctagtgtatcctcggacaagtaatagaactcctgtcaccctcagtctcctcatttgtacgattggggttacagtgcctgacttgggcaggggctgttctaagaagtacacaattatacagacaacatactgatgttcagaaagtgcttaattttgtttttgttttaaaactgctggtagtggtctctgcaataacctagaacaactctaaatccccttttatagcccttcaaatatggagtgaggctactatgatccaccactttttccatcaaacaattctttcttagagtgtggctcttttcatcctgtcagcaaggctcctgggtccctcactgtccactcaggctctgggctctttccakcctgcctttgtcccctcacaaagagccagccaaggctgtcatctagtctgcaacagaagtgcttttgctttctgggggtaattactcctgccacatctgtgtttactttagaacctgtggctaaggaaattagctggcag

SEQ ID NO: 356452 - DNA, 593 bp, Homo sapiens
tgtgtgtgtgtgtgtatatataaatatatacacttgagatgctacattataagtgtagctggaatatagataagggagatgttagtgctagctggaagggtagaataaaagcatcaggaaagaagtgaagatagacagtagatagaaaaaaaggaaamtgtagaattgcacagaaaatgaaaaatcaattaaataagtcttaatgtagaatgaatagatgagtaaaggaaaggaaaaaaataaaactgagttgacaaagaaagaacaaatttttaatcttggggaaacaatgacagataattaattattctaatgcagagtttatttagaattcattgtgcttttaacttatgcttgagctttgtaaacaaaaaaattgaaagtactaaccatcatttatattttcccttgaaactaatacacaactgaaaaaaaaggagtaaggttaaagcgggtttcaaggtacttttgaagtttccactattgtggcagagaaatatgttcaccaaatattgagcaacaatttaacaattttgtcacttgtgctcagggtgatgttcacatgaggaaaatattttaaaatattaaaattg

SEQ ID NO: 356453 - DNA, 605 bp, Homo sapiens
ggtgacttaaatgtttaaataaactctgaacttagacttatgattaatcatgttatttatatttgtgagttttgctcttgtaatttagagaataagaaagaataatttaaatatctggttgcagacattgaatagagccagtcattattattgaggattttrttaaatgcaaattgacttcaccattgaaccggtaaccttttaatagataaacaaaagcacagctgcttattttatgctttaataataataatggcattttgtgaatatttgaattgcttttaacctttaagtgtaaaaatcagtccctaacaggtatgtaaactagtagaatactatccccaacttgggtgatgtgttggctaattgtcaactcgactaagccacaagatgtccagatacttggttaactgtaatttgagtgtgcctgtgaggctgattctggatgatatttacattaaaattgatagactgagtaaagcagattgccctgcctgatgtgggtggggcctcatctaatcagttgaagttctgaataaaataaaaaggctgaccctccctcaagaaagagaattccttcttcctgactacttttgaactgggat

SEQ ID NO: 356454 - DNA, 605 bp, Homo sapiens
ggtgacttaaatgtttaaataaactctgaacttagacttatgattaatcatgttatttatatttgtgagttttgctcttgtaatttagagaataagaaagaataatttaaatatctggttgcagacattgaatagagccagtcattattattgaggattttattaaatgcaaattgacttcaccattgaaccggtaaccttttaatagataaacaaaagcacagctgcttattttatgctttaataataataatggcattttgtgaatatttgaattgcttttaacctttaastgtaaaaatcagtccctaacaggtatgtaaactagtagaatactatccccaacttgggtgatgtgttggctaattgtcaactcgactaagccacaagatgtccagatacttggttaactgtaatttgagtgtgcctgtgaggctgattctggatgatatttacattaaaattgatagactgagtaaagcagattgccctgcctgatgtgggtggggcctcatctaatcagttgaagttctgaataaaataaaaaggctgaccctccctcaagaaagagaattccttcttcctgactacttttgaactgggat

SEQ ID NO: 356455 - DNA, 595 bp, Homo sapiens
caatttggaagtctcattaaaaaaatgaaaacaatataaccctattatacttaggttagtactttggatatagaggtactcaataaagcttgttgtattcaactctgaagttgaggcaaatcataaatgtgattggatattgaatatagaagattgaatggattttcaacatttaaaataccatctgatcttttttggcatctggcayaactttccataagtcttcatttctttttgttggttctactctgcttcctcaccacaactctagaccgttagcccttcctcagtctctgggaaggcctgaaacataccctgcatggatcctggtggggctgttgtgctggcagctgcctggctcacctcaccagccctggaggggcccacacaccctccccagagtggctcctgggaagcctgcacattctcctgccttttagtgctattgggctttttcttttaagatgattcttctatgtctattctcctaatcaatgtactctagaacacaggagtcaaggtagtataacagtttaaagtgtggactttggagatctgagcttgaattctaactctattacctactaggtattat

SEQ ID NO: 356456 - DNA, 555 bp, Homo sapiens
caccagaacaaaccagaaaatcacaaacctgtagcaaacttgggttagtaaaaacaagacttcatacttcaattttctttgtatttaaaaaccttcacaaatgttaagttagtaagtctcatagcagctctttcagataagcccttaggtaaatgttttctcttgcaatttttgaatctgagtcaatactggagactagctggccagcctgttgtctggccactgaattatgcaactcatctccaaatgaagcctgaagtgatgcaggaggtaatcaatagaagggcttgatcgatgttcaatagaggaaagaaagtctaatgaacaaaatacaggactgggagcacagccaggyctgaattccaatcttctcctggccttgtaagcagaagactaacttggtaatttcattcctggagtatattcctataactgcatccttctctccatggatcctgctctgctctgagcctcttgatcaaatgggcaaatggttgaagaggtcacgagaaaaagacatgcagcagcagcagaagcgacatgagcctgtgtttt

SEQ ID NO: 356457 - DNA, 642 bp, Homo sapiens
attatatattatagtttttctggagtctcatgagccttagggtcactagccttagggagaaaagactctgacaagtataaggtaaggcaaagatgaatgagagaaagtgatataaaaaaatgaaaaatctggcagagtgtggtgtctcacgcctgtaatcctagcactttgggagcccaaggctggaggatcgcttgagcttaggagtttgagaccagcctaggcaacatgtgagacctcatttctatttttaaatacaaacaaagaaaaaataaaaatagtaggatctacttgtaacaaatgtaccatactaatgtaagatgttaataatggagacaagtgtgtaggggagtagaggacatacaggaacttcattctttctgtgcaattttcttgcaaaccttaaactgcaaaataaaaacttttaaaaaataaagacttcctaagatgatactgagtgataagctgggacaatttgacatagcatggctgaaaacagaggctagaaaaactgtcatgtttagttatgatcgaggaggttcctagraaacctgactacttatcacttatagtaagttgtgaagatcaaatgagattcataaatggaaaaacagttctggaaaagcatttatgtttctgctg

SEQ ID NO: 356458 - DNA, 624 bp, Homo sapiens
ggacctctgtggataccaaaatctgtgatgctcaaattccttacgtaaactggtatagtggttgcatataacctgaacatcttcctgtatactttaaatcatctatgggttatatgtaatrcctaatacgatgtaaatgctgtataaatagctgttgcactatattatttagggaataatgacaaggaaaaaagtctgtacatgtttggtatagatgaaactatgctgggcccagctccattacactctgtggtttgttgaatctgcagatgtggaacctgcagatatggaacctgcagatatggagggctgactgtatgtagttagaaaacagttaatttaaaacatatttgtgttcgcacagttatttatacctggattctgtaggtgtgtttcttggtttactcaacagtgcatcctcactggggggtttataatctccctccaactaaggacacctggaaccagagagttgctcctccttttgattcttcacatctttgatgccatcctcttctctcctgaacaagatgtcctcttcttgaatcaaaggtggcctctcttcactgactatgagagcttagactctgaatttacttaatggattcttaactgcaaaaatgc

SEQ ID NO: 356459 - DNA, 624 bp, Homo sapiens
ggacctctgtggataccaaaatctgtgatgctcaaattccttacgtaaactggtatagtggttgcatataacctgaacatcttcctgtatactttaaatcatctatgggttatatgtaatgcctaataygatgtaaatgctgtataaatagctgttgcactatattatttagggaataatgacaaggaaaaaagtctgtacatgtttggtatagatgaaactatgctgggcccagctccattacactctgtggtttgttgaatctgcagatgtggaacctgcagatatggaacctgcagatatggagggctgactgtatgtagttagaaaacagttaatttaaaacatatttgtgttcgcacagttatttatacctggattctgtaggtgtgtttcttggtttactcaacagtgcatcctcactggggggtttataatctccctccaactaaggacacctggaaccagagagttgctcctccttttgattcttcacatctttgatgccatcctcttctctcctgaacaagatgtcctcttcttgaatcaaaggtggcctctcttcactgactatgagagcttagactctgaatttacttaatggattcttaactgcaaaaatgc

SEQ ID NO: 356460 - DNA, 624 bp, Homo sapiens
ggacctctgtggataccaaaatctgtgatgctcaaattccttacgtaaactggtatagtggttgcatataacctgaacatcttcctgtatactttaaatcatctatgggttatatgtaatgcctaatacgatgtaaatgctgtataaatagctgttgcactrtattatttagggaataatgacaaggaaaaaagtctgtacatgtttggtatagatgaaactatgctgggcccagctccattacactctgtggtttgttgaatctgcagatgtggaacctgcagatatggaacctgcagatatggagggctgactgtatgtagttagaaaacagttaatttaaaacatatttgtgttcgcacagttatttatacctggattctgtaggtgtgtttcttggtttactcaacagtgcatcctcactggggggtttataatctccctccaactaaggacacctggaaccagagagttgctcctccttttgattcttcacatctttgatgccatcctcttctctcctgaacaagatgtcctcttcttgaatcaaaggtggcctctcttcactgactatgagagcttagactctgaatttacttaatggattcttaactgcaaaaatgc

SEQ ID NO: 356461 - DNA, 624 bp, Homo sapiens
ggacctctgtggataccaaaatctgtgatgctcaaattccttacgtaaactggtatagtggttgcatataacctgaacatcttcctgtatactttaaatcatctatgggttatatgtaatgcctaatacgatgtaaatgctgtataaatagctgttgcactatattatttagggaataatgacaaggaaaaaagtctgtacatgtttggtatagatgaaactatgctgggcccagctccattacactctgtggtttgttgaatctgcagatgtggaacctgcagatatggaacctgcagatatggagggctgactgtatgtagttagaaaacagttaatttaaaacatatttgtgttcgcacagttatttatacctggattctgtaggtgtgtttcttggtttactcaacagtgcatcctcactggggggtttataatctccctccaactaaggacacctggaaccagagagttgctcctccttttgattcttcacatctttgatgycatcctcttctctcctgaacaagatgtcctcttcttgaatcaaaggtggcctctcttcactgactatgagagcttagactctgaatttacttaatggattcttaactgcaaaaatgc

SEQ ID NO: 356462 - DNA, 622 bp, Homo sapiens
cagtctctgagtttatctagtttgtgacttggaataaattacttaaacccactgaattttcattttgttgtctatattatgataataataattcttacctcaaactattgttttgagaattgaattttataacattaaagcaatatttattaagtacttagtatccatcaaattctatgctaggtgctctttcttctggtatcttatgtgccaaattcatcatagtcattcaataattatggatggaataaatgaaatataatagttgaataaacagtagtcagyataagctgcataaaaataacattaagctatcatatgacactttatggtatttaaaatagttctgcttcattaaaactatattttaaagtgtttatggtagaaaagaaagtttgatggaggggatgattgtgaggtctgttggtgtagaatggtgccttcattcttgcactgtgtcaatgcacacaagaaatcatcatttacgaataggccagtcagtgctggcctagcttctgagcacagagaacaaaccctcacaaggatacagggtaacctgatcagggaacaacaggagaaagaattcccctgtggggtattttacaagtgaagtgttttattt

SEQ ID NO: 356463 - DNA, 622 bp, Homo sapiens
cagtctctgagtttatctagtttgtgacttggaataaattacttaaacccactgaattttcattttgttgtctatattatgataataataattcttacctcaaactattgttttgagaattgaattttataacattaaagcaatatttattaagtacttagtatccatcaaattctatgctaggtgctctttcttctggtatcttatgtgccaaattcatcatagtcattcaataattatggatggaataaatgaaatataatagttgaataaacagtagtcagtataagctgcataaaaataacattaagcwatcatatgacactttatggtatttaaaatagttctgcttcattaaaactatattttaaagtgtttatggtagaaaagaaagtttgatggaggggatgattgtgaggtctgttggtgtagaatggtgccttcattcttgcactgtgtcaatgcacacaagaaatcatcatttacgaataggccagtcagtgctggcctagcttctgagcacagagaacaaaccctcacaaggatacagggtaacctgatcagggaacaacaggagaaagaattcccctgtggggtattttacaagtgaagtgttttattt

SEQ ID NO: 356464 - DNA, 579 bp, Homo sapiens
aagtgaggaatttagaaagaacactccaaatgaaatatttggatgaaatgagaatgactcatctttttatgagaaagcttttatagaagcattcttatcttttaagagtatcctgtggataatgtrttgagcttgctctcatttttccagaggatctaattagcagcaaaaaggaaattgccaggcagtggactctgctcagtataaaaaagtctctcctacaagaccgaacaatgagggattggctgtccctagactcatataggagaaaccagagaaacacgtatggatgtattgaaaaggacattcatgtgtcaggtagaagcccagcctatgtgacctcccaaccctttccaactcctgattctatcaccagccaattctttcagattcccatgctgcaatgaggacacccactttctctccctctccccccatctcatttaaagggcagaaagacaaatactgcattcaaatactgcaaacctttacttatcctggtaagaacatggtttaaggggaattatcataatttcaaataacaaaatacacttgagataaataaaacactttgtatta

SEQ ID NO: 356465 - DNA, 579 bp, Homo sapiens
aagtgaggaatttagaaagaacactccaaatgaaatatttggatgaaatgagaatgactcatctttttatgagaaagcttttatagaagcattcttatcttttaagagtatcctgtggataatgtattgagcttgctctcatttttccagaggatctaattagcagcawaaaggaaattgccaggcagtggactctgctcagtataaaaaagtctctcctacaagaccgaacaatgagggattggctgtccctagactcatataggagaaaccagagaaacacgtatggatgtattgaaaaggacattcatgtgtcaggtagaagcccagcctatgtgacctcccaaccctttccaactcctgattctatcaccagccaattctttcagattcccatgctgcaatgaggacacccactttctctccctctccccccatctcatttaaagggcagaaagacaaatactgcattcaaatactgcaaacctttacttatcctggtaagaacatggtttaaggggaattatcataatttcaaataacaaaatacacttgagataaataaaacactttgtatta

SEQ ID NO: 356466 - DNA, 579 bp, Homo sapiens
aagtgaggaatttagaaagaacactccaaatgaaatatttggatgaaatgagaatgactcatctttttatgagaaagcttttatagaagcattcttatcttttaagagtatcctgtggataatgtattgagcttgctctcatttttccagaggatctaattagcagcaaaaaggaaattgccaggcagtggactctgctcagtataaaaaagtctctcctacaagaccgaacaatgagggattggctgtccctagactcatataggagaaaccagagaaacacgtatggatgtattgaaaaggacattcatgtgtcaggtagragcccagcctatgtgacctcccaaccctttccaactcctgattctatcaccagccaattctttcagattcccatgctgcaatgaggacacccactttctctccctctccccccatctcatttaaagggcagaaagacaaatactgcattcaaatactgcaaacctttacttatcctggtaagaacatggtttaaggggaattatcataatttcaaataacaaaatacacttgagataaataaaacactttgtatta

SEQ ID NO: 356467 - DNA, 552 bp, Homo sapiens
ttatgctctgcttcctttttaaatataagttctagtttcaggccatttctttgtttatgcaaatgagtgtaggcttttagaagcagccaggccacatcttgaacactttgctggtttgaaatttcttccaccagaggctgagtgtggtggctcacgcatgtaatcccagcactttgggaggctgaggtgggtggatcacctgaggtcaggagtttgagaccagcctggccaacatggcaaaactctgtctctactaaaaatacaaaaattagccagscatggtggcatgtgcctgtagtctcagctacacgggaggctgagtcatgagaatcgcttgaacccaagaggaagaggttacagtgagctgagatcatgccattacactccagcctgggtgacagagtgagactccgtctcaaaaaaaaaaaaaaaagaaatttcttccaccagacaccctaaatcatctctttcaagttcaaagttccacagatctctagagcaggggcacaatactgccagtctctttgctaaagtgtagcaagagtgaccttt

SEQ ID NO: 356468 - DNA, 552 bp, Homo sapiens
ttatgctctgcttcctttttaaatataagttctagtttcaggccatttctttgtttatgcaaatgagtgtaggcttttagaagcagccaggccacatcttgaacactttgctggtttgaaatttcttccaccagaggctgagtgtggtggctcacgcatgtaatcccagcactttgggaggctgaggtgggtggatcacctgaggtcaggagtttgagaccagcctggccaacatggcaaaactctgtctctactaaaaatacaaaaattagccaggcatggtggcatgtgcctgtagtctcagctacacgggaggctgagtcatgagaatygcttgaacccaagaggaagaggttacagtgagctgagatcatgccattacactccagcctgggtgacagagtgagactccgtctcaaaaaaaaaaaaaaaagaaatttcttccaccagacaccctaaatcatctctttcaagttcaaagttccacagatctctagagcaggggcacaatactgccagtctctttgctaaagtgtagcaagagtgaccttt

SEQ ID NO: 356469 - DNA, 552 bp, Homo sapiens
ttatgctctgcttcctttttaaatataagttctagtttcaggccatttctttgtttatgcaaatgagtgtaggcttttagaagcagccaggccacatcttgaacactttgctggtttgaaatttcttccaccagaggctgagtgtggtggctcacgcatgtaatcccagcactttgggaggctgaggtgggtggatcacctgaggtcaggagtttgagaccagcctggccaacatggcaaaactctgtctctactaaaaatacaaaaattagccaggcatggtggcatgtgcctgtagtctcagctacacgggaggctgagtcatgagaatcgcttgaacccargaggaagaggttacagtgagctgagatcatgccattacactccagcctgggtgacagagtgagactccgtctcaaaaaaaaaaaaaaaagaaatttcttccaccagacaccctaaatcatctctttcaagttcaaagttccacagatctctagagcaggggcacaatactgccagtctctttgctaaagtgtagcaagagtgaccttt

SEQ ID NO: 356470 - DNA, 552 bp, Homo sapiens
ttatgctctgcttcctttttaaatataagttctagtttcaggccatttctttgtttatgcaaatgagtgtaggcttttagaagcagccaggccacatcttgaacactttgctggtttgaaatttcttccaccagaggctgagtgtggtggctcacgcatgtaatcccagcactttgggaggctgaggtgggtggatcacctgaggtcaggagtttgagaccagcctggccaacatggcaaaactctgtctctactaaaaatacaaaaattagccaggcatggtggcatgtgcctgtagtctcagctacacgggaggctgagtcatgagaatcgcttgaacccaagaggaagaggttacagtgagctgagatcatgccattacactccagcctgggtgacagagtgagactccrtctcaaaaaaaaaaaaaaaagaaatttcttccaccagacaccctaaatcatctctttcaagttcaaagttccacagatctctagagcaggggcacaatactgccagtctctttgctaaagtgtagcaagagtgaccttt

SEQ ID NO: 356471 - DNA, 482 bp, Homo sapiens
attttcaggtatctttatagcaatgcctccacttctctggtatcaattttctgtacaagtctgttctcacactgctataaataactacctgagactgggtaattttaaagaaaagaggtttaatttactcacagttccacaggctgtacagaaggcatggctgaggcctcaggaaacttacagtcatggcagaagtgcaamggggaagcaagcatgtcttcacatgttggaaggagagagtgagtaaagagtgaagtgctacatacttttaaacaaccagatctcatgaggactcactcactctaattagaataaatgggggaaatacaagtccatgatccaatcacctctcacaaggcccttcctccaaaactgaagatcataattcaacatgagatttggatggggacagagagccaaaccatatcacacttctaaaaataaattttatagttcatcaaaattgagaaggcacttccaaa

SEQ ID NO: 356472 - DNA, 482 bp, Homo sapiens
attttcaggtatctttatagcaatgcctccacttctctggtatcaattttctgtacaagtctgttctcacactgctataaataactacctgagactgggtaattttaaagaaaagaggtttaatttactcacagttccacaggctgtacagaaggcatggctgaggcctcaggaaacttacagtcatggcagaagtgcaacggggaagcaagcatgtcttcacatgttggaaggagagrgtgagtaaagagtgaagtgctacatacttttaaacaaccagatctcatgaggactcactcactctaattagaataaatgggggaaatacaagtccatgatccaatcacctctcacaaggcccttcctccaaaactgaagatcataattcaacatgagatttggatggggacagagagccaaaccatatcacacttctaaaaataaattttatagttcatcaaaattgagaaggcacttccaaa

SEQ ID NO: 356473 - DNA, 482 bp, Homo sapiens
attttcaggtatctttatagcaatgcctccacttctctggtatcaattttctgtacaagtctgttctcacactgctataaataactacctgagactgggtaattttaaagaaaagaggtttaatttactcacagttccacaggctgtacagaaggcatggctgaggcctcaggaaacttacagtcatggcagaagtgcaacggggaagcaagcatgtcttcacatgttggaaggagagagwgagtaaagagtgaagtgctacatacttttaaacaaccagatctcatgaggactcactcactctaattagaataaatgggggaaatacaagtccatgatccaatcacctctcacaaggcccttcctccaaaactgaagatcataattcaacatgagatttggatggggacagagagccaaaccatatcacacttctaaaaataaattttatagttcatcaaaattgagaaggcacttccaaa

SEQ ID NO: 356474 - DNA, 482 bp, Homo sapiens
attttcaggtatctttatagcaatgcctccacttctctggtatcaattttctgtacaagtctgttctcacactgctataaataactacctgagactgggtaattttaaagaaaagaggtttaatttactcacagttccacaggctgtacagaaggcatggctgaggcctcaggaaacttacagtcatggcagaagtgcaacggggaagcaagcatgtcttcacatgttggaaggagagagtgagtaaagagtgaagtgctacatacttttaaacaaccagatctcatgaggactcactcactctaattagaataaatgggggaaatacaagtccatgatccaatcacctctcacaaggcccttcctccaaaactgaagatcrtaattcaacatgagatttggatggggacagagagccaaaccatatcacacttctaaaaataaattttatagttcatcaaaattgagaaggcacttccaaa

SEQ ID NO: 356475 - DNA, 603 bp, Homo sapiens
agtaaataaactacccagtaactgacagtcagacatataatagattcttaacacattatagtgttttttattactgtttttaaaaagaataaaacatgcttacagttccaaatggttttcagcaccaggtacattaaacttgaaatatgcacacaaaaacttttactaaccayctcttgaaaattttcacaattcgcaaattaactcagaagaaaacattgtttcaggtgtctattactgcaaaattaaatactctaaaatttagtgtctcaaaacaataattttttatcatctcccaacttctgcatgttgactgggctcaactgggacaattcttacttggaatctctcatgcagttgcagtcagatggcagctgagactggagtcatctgaagacttgactgagctggatgtccaagatgtcattcacaagcctggcagctgctgctggctattgggttggagcttagccagagctgtcaactgaagctcctctatgtggcctctgcatgtgggttcttagagagagtgctccaatagtgagtattcttaaaggcctgggcagaaatgaaaagccttcttatgagtgagtttcagcaatc

SEQ ID NO: 356476 - DNA, 603 bp, Homo sapiens
agtaaataaactacccagtaactgacagtcagacatataatagattcttaacacattatagtgttttttattactgtttttaaaaagaataaaacatgcttacagttccaaatggttttcagcaccaggtacattaaacttgaaatatgcacacaaaaacttttactaaccatctcttgaaaattttcacaattcgcaaattaactcagaagaaaacattgtttcargtgtctattactgcaaaattaaatactctaaaatttagtgtctcaaaacaataattttttatcatctcccaacttctgcatgttgactgggctcaactgggacaattcttacttggaatctctcatgcagttgcagtcagatggcagctgagactggagtcatctgaagacttgactgagctggatgtccaagatgtcattcacaagcctggcagctgctgctggctattgggttggagcttagccagagctgtcaactgaagctcctctatgtggcctctgcatgtgggttcttagagagagtgctccaatagtgagtattcttaaaggcctgggcagaaatgaaaagccttcttatgagtgagtttcagcaatc

SEQ ID NO: 356477 - DNA, 603 bp, Homo sapiens
agtaaataaactacccagtaactgacagtcagacatataatagattcttaacacattatagtgttttttattactgtttttaaaaagaataaaacatgcttacagttccaaatggttttcagcaccaggtacattaaacttgaaatatgcacacaaaaacttttactaaccatctcttgaaaattttcacaattcgcaaattaactcagaagaaaacattgtttcaggtgtctattrctgcaaaattaaatactctaaaatttagtgtctcaaaacaataattttttatcatctcccaacttctgcatgttgactgggctcaactgggacaattcttacttggaatctctcatgcagttgcagtcagatggcagctgagactggagtcatctgaagacttgactgagctggatgtccaagatgtcattcacaagcctggcagctgctgctggctattgggttggagcttagccagagctgtcaactgaagctcctctatgtggcctctgcatgtgggttcttagagagagtgctccaatagtgagtattcttaaaggcctgggcagaaatgaaaagccttcttatgagtgagtttcagcaatc

SEQ ID NO: 356478 - DNA, 591 bp, Homo sapiens
gtttcaggtgtctattactgcaaaattaaatactctaaaatttagtgtctcaaaacaataattttttatcatctcccaacttctgcatgttgactgggctcaactgggacaattcttacttggaatctctcatgcagttgcagtcagatggcagctgagactggagtcatctgaagacttgactgagctggatgtccaagatgtcattcacaagcctggcagctgctgctggctattgggttggagcttagccagagctgtcaactgaagctcctctatgtggcctctgcatgtgggttcttagagagagtgctccaatagtgagtattcttaaakgcctgggcagaaatgaaaagccttcttatgagtgagtttcagcaatcccagtcacttctgctacattcttctgatccagaagatcactaagggcagctcacactcaaagggaggggaactggacaccatgccatgatgtgtgaaacacaatgcacatacagagaggaaaggaagtaacagcagccgtcttggaggctagtcccacagcacaatactcaggaattacagtcagaactgctgtccattatcacggaa

SEQ ID NO: 356479 - DNA, 591 bp, Homo sapiens
gtttcaggtgtctattactgcaaaattaaatactctaaaatttagtgtctcaaaacaataattttttatcatctcccaacttctgcatgttgactgggctcaactgggacaattcttacttggaatctctcatgcagttgcagtcagatggcagctgagactggagtcatctgaagacttgactgagctggatgtccaagatgtcattcacaagcctggcagctgctgctggctattgggttggagcttagccagagctgtcaactgaagctcctctatgtggcctctgcatgtgggttcttagagagagtgctccaatagtgagtattcttaaaggcctgggcagaaatgaaaagccttcttatgagtgagtttcagcaatcccagtcacttctgctacattcttctgatccagaagatcactaagggcagctcacactcaaagggaggggaactggacaccatgccatgatgtgtgraacacaatgcacatacagagaggaaaggaagtaacagcagccgtcttggaggctagtcccacagcacaatactcaggaattacagtcagaactgctgtccattatcacggaa

SEQ ID NO: 356480 - DNA, 487 bp, Homo sapiens
ttttacaatatcagaaaatagccatggacagttactgtgttttcctctgttatctattttgccactttcataggcacatttcttatggtgagatcagatcttttgcatgcataatagtaataaattatgtggctgtttaagtactgagtaaatgttaagaaaatagacatgatgataccttaaaattggcaaccatctcacaaaaataccagctccctgtcattgtgtttattcaccaaggagtctgctatgtctttgtgtaagcagcttctggttttgagatttaaaaataaaatagagtttcttttcagrtactcttgtcctttcaaggatggtgttagctcaaaaatcaatccccaaaagtctaaggtgtacaggaaggttttttcacttctccatgaactcatttatttaaatgccctacctaacttccatgataacacaagaacttttacaaagttttgacacctaatttatcagaaaaatg

SEQ ID NO: 356481 - DNA, 521 bp, Homo sapiens
aacataatcaactctaacttcagtacagtggacctgttaacatttccactttcaacttcattattggctcattaacttatcttcttattaatgctaatacactctatactattcattaattaaggaaaaatgataatgtttaattatatccatttttttccctccaggaatcattataacaattgtactattctttgatatgctactaatagttaataaggaaaagaaagtgtccttcactgtattaaatggggccagtctcttgtttggcatayctttttcagttcacagactatgcactaccataaaaccatgtaaaaagttggttgtgtttgtgtgtgtatacacagaagagtgtgtatacactcttttccatacaacagaaaatgtaattctacatttccaaatgcaaatcacacacacaaaagaaacatttttattgggaacgatgaagcagatatatcagttgtaatatttgacatgatgtgcaatcgatcaatgacttagaagcttgctagatc

SEQ ID NO: 356482 - DNA, 598 bp, Homo sapiens
ttataagtactattaagtaggtaaatcctctgtgtatctgagagagcacagactaacaaacatcaatttacttgctactgtttgcatgctatattcttggtagatgcttacctaattcttctagaaaatgtatccactgaagctcaaatttaaatgccatctttaatttgtttggtttaaataaactgcacacaacagcttcttcagaggatagattgckaggatatgaatatgagcttgaaaaatatctctggtatggctaaaaaaatataagctgcagctctttattcagtgaactacattagtttatcacacttctaccagacttatatgtatatgaagagaagaattacagacaaccaaaatagaattaagatcaaccccacatttagagatgcacagcacatggaatttgaggtcatggagaactggccttaaatctcagctttattaggagcttgggctcaatacttaatctctcttcaagcctcagtttcctcagctgtgaaaaagaagaggaaagtcgggacaataagagctacctcatagatgagagggcataggaattccttaataaatggtagctgttatgattaca

SEQ ID NO: 356483 - DNA, 591 bp, Homo sapiens
tgaagctcaaatttaaatgccatctttaatttgtttggtttaaataaactgcacacaacagcttcttcagaggatagattgcgaggatatgaatatgagcttgaaaaatatctctggtatggctaaaaaaatataagctgcagctctttattcagtgaactacattagtttatcacacttctaccagacttatatgtatatgaagagaagaattacagacaaccaaaatagaattaagatcaaccccacatttagagatgcacagcacatggaatttgaggtcatggagaactggccttaaatctcagctttattaggagcttgggctcaatacttaatctctcttcaagcctcagtttcctcagctgtgaaaaagaagaggaaagtcgggacaataagagctacctcatagatgagagggcataggaattccttaataaatggtagctgttatgattacaaatcaacatttggaaggagaataaatcctccccatatagtcttgagagttaaatgaaaaattctctctatcctatagttttatcasctttatttcttttattaatttcaagaggtgtttcttatgcaaaa

SEQ ID NO: 356484 - DNA, 532 bp, Homo sapiens
tggaagacttaatttccctgagaatccgtctctgcaggctccrtttcacacgggcactagagtaggttaagacgctgcttgtctagcacttataacgagcaagtatattgaaaagaagccccgttgttcctcataccaacctgactgtggctgccatataaaacctactgagccatatattttactcatcttaataagcgcattataaaatggcactgaatttcttcctctcagagacaaggaatgctcagggtattaagaacatcaaaagcagaaaaagttaagtagttgcaacaggtacagatctaaggcaaagaactacatctatcgtggaatctcagatcaaatatgcctgctttttcctttcgccctttggggtcgttcctctgataaataattcacagactgcagtgcaaagtagtttgcatactgacaagattaaaaagaatgctttgtctgggttaaatttacaatctgaaaccttcctttaaaatgtcaagaaggtaattaatttaagaaggtttgccaagca

SEQ ID NO: 356485 - DNA, 594 bp, Homo sapiens
caaagtgagagcaagttccgttaaagggatcctgccatatttttaattttcccaacaatactcagccatttatgaggtggatcagagaaagcagaaagtggggtttcctagggtgggaaagacatagctttgtggtagagaaagaaggtgagggtacatagcctattcctgagggcattgcatgagtggctgatcatgcccacccagtttgggtgtagaaggaagtgatccaggatgggggtaatgaactgagaggacatggggacttgaaagtgataataatgaaatcctggctcaggaggagtgaataagtaagatgacaagtgaagaatgacaaggaagtgtggaggcagaaagtgccaaggtgtggctaggcttgtggtggtgggggctacaatataatggagatgacagtaatctgagtatccaagcccaatgaattgtggtattagagtactggaagatcatcacacaaacgtcaaagaagggtaagactataaagaaaatgttaaaaatttgatgaggcaggaaaaggcttatagaaaatggaaaastggatagcagtagatggcatggacttttacaaaagagata

SEQ ID NO: 356486 - DNA, 595 bp, Homo sapiens
gatgtacttgagactgatcttccatcttctctgctgatatcaccccattaaagcctttctttcctggcaatacttgttgtatcagtgattggctttctgtgcagtgagaaatgagatacagatggaactcctggtgttttggtaacaagcttttaaacctctccaaacttgtttttccatcactgcccccctccccaccgcccgacttcaacctgctttctttttgctcctcaatgatttcaatctctttcccactgcagggcctgaacattggacctcctccaaccctcatgaactcacacctttgccttctcttagcctccactcttcttttcagagaggcccccatgatttctctcactatcttatctttgatttttctgtctcactttctgaatctcattcrtcagtgagaattgtcatttcagacttttaaacatatcctctcaaatctatgcctcctttgctatctttaccactacgatatatcactttaacccatcaccatttctcatctgtaacaatgatttccagtattatcataaaagactggtggaaggtcagctgtcctttttaaaggaaaaatttagaacag

SEQ ID NO: 356487 - DNA, 595 bp, Homo sapiens
gatgtacttgagactgatcttccatcttctctgctgatatcaccccattaaagcctttctttcctggcaatacttgttgtatcagtgattggctttctgtgcagtgagaaatgagatacagatggaactcctggtgttttggtaacaagcttttaaacctctccaaacttgtttttccatcactgcccccctccccaccgcccgacttcaacctgctttctttttgctcctcaatgatttcaatctctttcccactgcagggcctgaacattggacctcctccaaccctcatgaactcacacctttgccttctcttagcctccactcttcttttcagagaggcccccatgatttctctcactatcttatctttgatttttctgtctcactttctgaatctcattcatcagtgagaattgtcayttcagacttttaaacatatcctctcaaatctatgcctcctttgctatctttaccactacgatatatcactttaacccatcaccatttctcatctgtaacaatgatttccagtattatcataaaagactggtggaaggtcagctgtcctttttaaaggaaaaatttagaacag

SEQ ID NO: 356488 - DNA, 496 bp, Homo sapiens
agagtatgtggcaatgagctgtgtattgttattctttgcttcaacactttgactttgcagatgaaaaatctgaagcctagaaagttcatgtgatttggatagtgggatttaacttactttatggagattttatgaaggctaagataatacacattcaacaaatgttaccaattattattattgttgtaattctgcttctgctgttgatgctgctggtggtggttgaagactatgtgggaaggctctctctactacrccttccttttccaattgccatgtaattttcacttgaagagcagttgttgacctcattttatcacaagttctggaaaggtaaatttgatagaatacagtatggaaaaataggtctgaaggaagatgatgcaatttttaaaaagaggaaagaaacactttgatttaatgaaagttattatctcaacaacagtgagaattgtcatttagaattttcaaatgagatattcatttgaatattcat

SEQ ID NO: 356489 - DNA, 534 bp, Homo sapiens
tttctttgtttcctgaactacagggatctttgtcttatatccctggcctcagaaacatatcaaccatttttgcacatttccaccttttccctaatatctatgtgtctaggacaaagctccccaaggcctactaaagagaaactccctgctgccttcaactttggccagtgctaacacactattcatgaaccattcagggccttaagggaatgttacttctgagactagctcccttggaactgggccctgatcactgtcatttcatttgccctactctgtgaatcattcaaatcataaatggtgggctctttggcctcgtattagtcaggattttacagagaaatagaaacaataatatttatttacttatcttaagctattgactcacacaattttggaggctgagaagacccatgatctgctctctgcmaactgaagacccaggaagctctctctccagagagctggagaaccaatggtgtaatcccagtctgagtctgaaagcctgagaataaggacaggagattgatgtcc

SEQ ID NO: 356490 - DNA, 642 bp, Homo sapiens
tatccatggctagcatttaatacmtatttgcagaaggaatagattaaaagtacttaatgctttaaataaagaatttgtgtccatattctaaaataatcatctcatgattttttctacagtttgcaagattcctgtaggtatttttttttttgtgcagttggctttcattagtataggtcattgacaagataaacattcaatgcaggtcctcttgactcatagatctcctgccatattcatatgcgctcacttagatttcatcctctcattttctattctcctctttcttcttccaaaggtccctccatcatctcccctctcctagtttatcaccatctttattgagtctgcaaggttgtgatggctagaagagagaaaggaagagggagaaattcatggaggaacacgtatttttcctccatacattgcagttcttgagccctcctctccaacccagtctgtgatttttagcagatttttataagcactgggtctatttgaacaagctatcaccaagaaatatagttgtagacacaaacaatgtctaatttgtctaggggctattaccttttctctgaattaatactaaatcaatactctagtaagttgtcaggggcgttgcattgaagtgatgtctttata

SEQ ID NO: 356491 - DNA, 507 bp, Homo sapiens
tacttctcaggctataattgcatctcatcattagatgttttttgttcctatgcttatatttgcacatctattcattcattctacaaatatttaataggcacctactatttgtgggtcattatagcttttaggcacacagcaaaagacaaagtccttgccctcaaaacccttgtgtttcagtaagagagaggcagtagacaaacaaacataatataagcaataagtrctgcaagaaaaaataaagtgggttaaagtgataaagggccagggagattatctctgagaaggtgacatttgagtagacatgactaaagtagaaattagtcatgaaggaatccaacaaatggcattctaggcagatggagaggcaagcacaaaggacttgggcaggaatgaacttaatggaacagatagaaggcctgtgtggtgagagctgagttacattcactaacttacatgtgtataactttttagtttatgtaatcttttcacacccattatattatt

SEQ ID NO: 356492 - DNA, 507 bp, Homo sapiens
tacttctcaggctataattgcatctcatcattagatgttttttgttcctatgcttatatttgcacatctattcattcattctacaaatatttaataggcacctactatttgtgggtcattatagcttttaggcacacagcaaaagacaaagtccttgccctcaaaacccttgtgtttcagtaagagagaggcagtagacaaacaaacataatataagcaataagtgctgcaagaaaaaataaagtgggttaaagtgataaagggccagggagattatctctgagaaggtgacatttgagtagacatgactaaagtagaaattagtcatgaaggaayccaacaaatggcattctaggcagatggagaggcaagcacaaaggacttgggcaggaatgaacttaatggaacagatagaaggcctgtgtggtgagagctgagttacattcactaacttacatgtgtataactttttagtttatgtaatcttttcacacccattatattatt

SEQ ID NO: 356493 - DNA, 507 bp, Homo sapiens
tacttctcaggctataattgcatctcatcattagatgttttttgttcctatgcttatatttgcacatctattcattcattctacaaatatttaataggcacctactatttgtgggtcattatagcttttaggcacacagcaaaagacaaagtccttgccctcaaaacccttgtgtttcagtaagagagaggcagtagacaaacaaacataatataagcaataagtgctgcaagaaaaaataaagtgggttaaagtgataaagggccagggagattatctctgagaaggtgacatttgagtagacatgactaaagtagaaattagtcatgaaggaatccaacaaatggcattctaggcagatggagaggcaagcacaaaggacttgggcaggaatgaacttaatggaacagatagaaggcctgtgtggtgagagctgagttacattcactaacttacrtgtgtataactttttagtttatgtaatcttttcacacccattatattatt

SEQ ID NO: 356494 - DNA, 512 bp, Homo sapiens
ctttctaaataactttccctaccatgggactgtcatacctaacacctcagagagtggaaattccagcactgttgctgtttgtggtctaaatgcagatgcacacactgaagctccttgaaagcttgtcttcctgctgtatatcctttcagcttctctcatatttcaccttccctttcctcttccagcttgaccctccrtggggccatctgtgtgactccttggaatctcctgtgataagatgtgggttctctgtcaacagcctttggacctggtctagaacttctaagccaggagctgcccccacagtgagaggtggacagtccagccagattcttttcacccctatcaggtcagacagtttcaaatcttgctgtaacaccaaattcacccatgggaacctataaaacaaagggaaatgaggaaggtaacttttattataagactgtttggagtctgcagaaatagaatgaagactacagtggaacagagatctcacagtaactgagcaggct

SEQ ID NO: 356495 - DNA, 649 bp, Homo sapiens
tgagtcatctgaagcacatgttcccagctgaggtcaagcaaggcaatgctctgtcttcttgtttatcttttatattgtaaacaagagtccttttctcagtctattgagtgccattttttcacatttgtgcttacttgtcggtgatttcagtgtttaaaattgtccccaagtgtagtgcagaagtgttgtctattgttcctcagtggaagaagactgtaatgtgccttacagagaaaatacatgtgttaaataaatttcattcaggcatgagtcatggtgctggtggctgagttcaatgttaatgagtcaacactrtatattaaataagatgtatttaaacagagacacatgaaacaaggttcacaaaagtgtgactagaggcttgcaggaacctaacactgtacttcccctaggagcaatggtttagtatttgcttattcagcatttgtggtgactttatagaaaacaacaagaatgaataatgagaactgagttgttttttttgttttgttttttaaaagcagtcatttgtaaatctattcatatcacattaagcacagtctggaaagaaaatggtggtatttatacaatctctaatgaatacaataaacaaatgtaattcttcataagacaaaataattgtttacaa

SEQ ID NO: 356496 - DNA, 568 bp, Homo sapiens
attccacgccaaaattctctggagcatgagtgatggtaagaaaggctattaggttaacaagaacatcaaatggatagaataatcttatttctctctctcagtggaggttctgttttgaatctgctggagtctaataattagttggtgttgctctgaattgtatctgacatgtctyttcatgttagctttgctgcatcttatgctttaggcttttgcaagcttctctggattaacggatggggagggagaataaaagggtactacccatggtgcccagaagcaaaaggaaagcaagtgagaagaaggtgcatgtggatggaattccgagaagggcccacgccattcagacttaagaactgctaagtcccaaaggagatacttctagcatctagcaggcatctggtaacctaacctctctgtatcgcacatccacccaacccacctttccactgggagtgtcaaagtatgtaatgaagctccctgtcttccgtaaagaagtatcctgcttagtatatgtaaacacaacaccttgatcttttttgttttggaaaataaaaacaaaacaaaa

SEQ ID NO: 356497 - DNA, 400 bp, Homo sapiens
ccaacccacctttccactgggagtgtcaaagtaygtaatgaagctccctgtcttccgtaaagaagtatcctgcttagtatatgtaaacacaacaccttgatcttttttgttttggaaaataaaaacaaaacaaaatatccaaaataaaccagagatttctttaaaaagaaacgcacgcaaataaaaacaacaacaaaagacactttgagtttgtactcctgatggaaaaatcattactgtggacaaagttatgagaagtcaaagtatagtttgtttttaataagagctatcattacattcatgctcaggatgtggcactcagagtactacgtatgtgtcaccacagctaagataggtactgttactccaggtaagtagagttcccccaaaattcatgcct

SEQ ID NO: 356498 - DNA, 612 bp, Homo sapiens
gcaaagagctaatgacctggtgctacactgagtggttaaaagaagattagggaagggaatctggaaattatggaagacaggatgcaattacacaaccaaaaatgaggcccagaggagagaaggatcaagagatacaagggtggggaatggtgtgtaacttcatcaattaggtatyatagcaggtcttctatcgtaaagccaatgctttcttttcaagacttcagatgaaggtgcatttgtgtggagtaagggctcataaaagggaatagtgcattctttattttatgataaagaaacaaaaaccaaaacgaaatcatcctcaattgctctgatgttctaaaatagatgatactttctgtaagccaaaggcctgattaaatttgtaccagtttagaattgctgaccaataggaagccaattaaaaattgccaggacctcccccaaaccaggtacaagattaaatttcttgtcttctttgatcattttgttggtcattgatgatgaaaacattactaatgttggtcattgtccttattggtcattgatggtgaaaacatgaacccagtagaaagcaagagccctcagtaacaggtacatgacaattggacatag

SEQ ID NO: 356499 - DNA, 612 bp, Homo sapiens
gcaaagagctaatgacctggtgctacactgagtggttaaaagaagattagggaagggaatctggaaattatggaagacaggatgcaattacacaaccaaaaatgaggcccagaggagagaaggatcaagagatacaagggtggggaatggtgtgtaacttcatcaattaggtatcatagcaggtcttctatcgtaaagccaatgctttcttttcaagacttcagatgaaggtgcatttgtgtggagtaagggctcataaaagggaatagtgcattctttattttatgataaagaaacaaaaaccaaaacraaatcatcctcaattgctctgatgttctaaaatagatgatactttctgtaagccaaaggcctgattaaatttgtaccagtttagaattgctgaccaataggaagccaattaaaaattgccaggacctcccccaaaccaggtacaagattaaatttcttgtcttctttgatcattttgttggtcattgatgatgaaaacattactaatgttggtcattgtccttattggtcattgatggtgaaaacatgaacccagtagaaagcaagagccctcagtaacaggtacatgacaattggacatag

SEQ ID NO: 356500 - DNA, 558 bp, Homo sapiens
tgggcccaggggaccgcgctcagcatacggaggactcgggccagcaccggtctctgagttccctcagtatttattgatcattatctctaccatctcggagarggggatgtggcaggacaatagggtaatagtggggagagggtcagtaggaaaacatgtgaacaaatgtctctgtatcataaacaaggttagaaaatgtgctgtgctttgatgtgcacatacataaacatatctggtgcattaaagagcagtattgctgccagcatgtttcacctccagccttaaggcagttttctcctatctcagtagatggaacatacaatcgggttttacaccgagacattccattgctcagggacaggcaggagacagatgccttcctcttatctcaactgcaaagaggccttcctcttttactaattctcctcagctcagaccctttacgggtgtcgggctgggggacagtcaggtctttcccttcccacgaggccatatttcagactatcacatggggagaaaccttggacaatacctggctttcctaggcagaggtccctg

SEQ ID NO: 356501 - DNA, 564 bp, Homo sapiens
gaaaaacctcagacctttaacatttcttgacatttcaatctctgaatttggaatacattcaaatatcataatttttctaagagaacctgctggagaactatattgtctaactttccatttgtgcctcatttttagtcttgagtgactgtgtcttcatctttgcccatgtgaaatgaaagtctgggctgctgaacttatctaaatggactctgctctttcctgaagagctgggctgtaacacaaacatttggaaagggaaattaaatcacattgtagtaaaataactgcaatgttctcatttgttaatggtcagagtcatttgtaatttagtctatagtatcataagaaatatctgcctttattctactcagaggtacagaatgacaaattaaatawataaaatgtgagtgcgttaaaacaaaggagtaaaaaaaataacaaaacattgctttcaccttattattaatgcacaactcaggaaaataaaattgatttttaaaaatcaagtgtaatagaacaatatcagattttgcaaatcagtggtcatttgcaactcaccaagaa

SEQ ID NO: 356502 - DNA, 531 bp, Homo sapiens
gtgggaatattttaaaatgttgtaagagtacatggatactaaatacttcaaaattattccctgaaagaagcatgtctgtactccctgcccccaatgagcaaacacacacacaaatggcttacggtaaaacacccataaagtaaagaagagggaagagtaacttatcttcaaaagcgcagacacagaaaatgtatgaagcgctcttagaaagcatattggtctgagatgttttaaaagtttatctttgaaaatctaagcctgaggttacttttgggaaaactaatttaagcatgaaaagaagagagcttatagcttatcaattaaacattttggcccatggcacattctttktttccactaacaggcagggactcttctcatctttagaatctatctcccatttgaacaatacttcttttaaagaactatccttaaaatcaattatttaaatactttaacctaagcagtggttgtgctgaagctggcttgtattggctcacaaaagtagcacttctccccaacttcgcattc

SEQ ID NO: 356503 - DNA, 547 bp, Homo sapiens
ttttctctccataaatgtagtactggcttattgactcaattctaataaaaagaattgatcaaaagtgatggatgtcacttctaagataatgttataaaaagaytgtcttctgtcttaggtgatctctcattatctcctggatcctttttcctagaaggatccacatgccatattatgtggcagccctgtcaagaggtccacggaataagggagcaaggactgtcaaccaggagaatgatcctgggaggagattcccccaccatcccaggcaagttttcagatgagactgcagcccaactgacagtctgactgtatcttcataagaaacctgaagctcaggatcccaagttaagctgtgttcagttactgacccatagaaacaaggaaatgctcaatgtttgttgttttaagctaaaaacttgtggagtaaagtaaataaacgtcagtttgttacatagcactagataactaatgtaccttcccagctacagacttccacagccaagattaagacttatttacccaccagttaactcactcatttcca

SEQ ID NO: 356504 - DNA, 547 bp, Homo sapiens
ttttctctccataaatgtagtactggcttattgactcaattctaataaaaagaattgatcaaaagtgatggatgtcacttctaagataatgttataaaaagattgtcttctgtcttaggtgatctctcattatctcctggatcctttttcctagaaggatccacatgccatattatgtggcagccctgtcaagaggtccayggaataagggagcaaggactgtcaaccaggagaatgatcctgggaggagattcccccaccatcccaggcaagttttcagatgagactgcagcccaactgacagtctgactgtatcttcataagaaacctgaagctcaggatcccaagttaagctgtgttcagttactgacccatagaaacaaggaaatgctcaatgtttgttgttttaagctaaaaacttgtggagtaaagtaaataaacgtcagtttgttacatagcactagataactaatgtaccttcccagctacagacttccacagccaagattaagacttatttacccaccagttaactcactcatttcca

SEQ ID NO: 356505 - DNA, 586 bp, Homo sapiens
cactttgtcagaccacgtgtctctgtttggtttactggaagaatggtgaacatggggaactgcatgttatcctaaatgaaacttcatataaaagaaaaccaaatgagaaacatatggaagaattaaagyggcgagctaagtgaagcaaagcgaagcaacttagaatgtttcgtatcctacgctggttctgagcaggcttaataagaagctgacatcgatatctgatggcctgagaatctacttcagcactgaagtacacttactcctggccccatggacctattattgttcaacttgcaataatgggacacttccaaagagctgacaggcaatctttaattaaaatacactgaaaataacttgaggcacagtttgcacaaagaaaacaactgctctcttaagttacccaacataagttgtattcttttttttttttttattttctttctaagctgagagttttcactgaagggaagaaactgattttacaattaattaagagatgaaaaacctatagcttagcagttaaacacctgggtcctagacccagataggcctgagtttgagcccagtcacctgcaagctg

SEQ ID NO: 356506 - DNA, 586 bp, Homo sapiens
cactttgtcagaccacgtgtctctgtttggtttactggaagaatggtgaacatggggaactgcatgttatcctaaatgaaacttcatataaaagaaaaccaaatgagaaacatatggaagaattaaagtggcgagctaagtgaagcaaagcgaagcaacttagaatgtttcgtatcctacgctggttctgagcaggcttaataagaagctgacatcgatatctgatggcctgagaatctacttcarcactgaagtacacttactcctggccccatggacctattattgttcaacttgcaataatgggacacttccaaagagctgacaggcaatctttaattaaaatacactgaaaataacttgaggcacagtttgcacaaagaaaacaactgctctcttaagttacccaacataagttgtattcttttttttttttttattttctttctaagctgagagttttcactgaagggaagaaactgattttacaattaattaagagatgaaaaacctatagcttagcagttaaacacctgggtcctagacccagataggcctgagtttgagcccagtcacctgcaagctg

SEQ ID NO: 356507 - DNA, 549 bp, Homo sapiens
gtcccaggaaacacaatttttaaaaatggtaacccttatttaaacacataataaaaagagatcttgtcaaatatattaaattataaattggacatcagttttgtacaggctgatttctaaactgtaatagaacacatctggggtgattttctggctctcctcgaatatctggttttccaggcagctgcaggaaatctctgggtagacataccactacaataattaatgccagctttcaggcatcccaatgaaaaagaattcatgacagcaacagaaaacggtactccccccgcaacacacacacagaataaccacgaatttaatgtaaaacatgaatccacaggcctccagcctggagcagctgaaagacatttgtgtgatttgtgtgattcatgaacaaagagtcattcgatctcttccatcagacttttctgcatctcagccacttttgtttctatccatcrctggctgcttcattcataccctggttatgtctgcactgaacagggctccctatttctattatactacaggttccaacaaggaacc

SEQ ID NO: 356508 - DNA, 636 bp, Homo sapiens
ttccattctagttacacagggaaagccaaaagacataatgcattaactgcagttagaaaacaactaagtaaaattatgagtgtgtgtgtgtgtgtgtgtgtgtgtstctctctttgactttcctttgttaaagagaattatttttaaatctgcagtccttaaaacacatacacacacaatattctatgttactcaaacactgtcccagtccagaaaacactgattaattagtcctccatgagttatcacatacatttttctaccaagcattcactgtgctattttggttagtttctatgtctgtctcaatttaattcaacaaatacttactgaggctccatttgccaagcaccataccaggtgctggagacctgataataaacatggtaagtttcctggtctgatggaacagcatctagatttacagctgaataaagggctgagtgttaaagagagtaagcacagcgtgcagtcagaacaaataggggggtccaacccagacgtgggagaaaggaaagacttcccagaagatgcagcccaaacagtgaatccacgttagccacagaagatgcagaggggcagagggtaaggagttgagagcactgctggcccaagaaatgccttgtacaacagcgc

SEQ ID NO: 356509 - DNA, 636 bp, Homo sapiens
ttccattctagttacacagggaaagccaaaagacataatgcattaactgcagttagaaaacaactaagtaaaattatgagtgtgtgtgtgtgtgtgtgtgtgtgtctctctctttgactttcctttgttaaasagaattatttttaaatctgcagtccttaaaacacatacacacacaatattctatgttactcaaacactgtcccagtccagaaaacactgattaattagtcctccatgagttatcacatacatttttctaccaagcattcactgtgctattttggttagtttctatgtctgtctcaatttaattcaacaaatacttactgaggctccatttgccaagcaccataccaggtgctggagacctgataataaacatggtaagtttcctggtctgatggaacagcatctagatttacagctgaataaagggctgagtgttaaagagagtaagcacagcgtgcagtcagaacaaataggggggtccaacccagacgtgggagaaaggaaagacttcccagaagatgcagcccaaacagtgaatccacgttagccacagaagatgcagaggggcagagggtaaggagttgagagcactgctggcccaagaaatgccttgtacaacagcgc

SEQ ID NO: 356510 - DNA, 540 bp, Homo sapiens
acacccacccacccaccataaaaaagaatgtagacgtgaaaatggcatgatacttaatgatcaagagattctcaggtaaaaatgtaaagcaagccagcatgatattacttatggttgggattcattctctatgcttctcccactcctgtccactcccctctcccccactattcaaaaaggaaaggaaaagctggatgtctagctctgacattgcaagggttgctgatattctattttactatgtttgctatgttttcaaaagaaccaacattttagaagaaaaggaacatcagtttatttaatttggttcttcactttttactctaaatcaaagttcaatttaccttaaagttttaaaaaaggctgacagctgargccttttggaaagatcacctcactctacagaatgcttaggggaaaaattcatcaaaagcagacagcagacatctaccatccaccataaatcagcttcctttttctttttctttttttttctttaagcatcttctttagaatacagtgagaaagtcgtgtcattta

SEQ ID NO: 356511 - DNA, 593 bp, Homo sapiens
ggggtcaaatctgcaaaggaaagggtggtggtagttaaagtaaatctaggaggctcttgggggaagacaggtgcatgggtgctagttacaaactcccaatctacagactgaatttaagtagactaaacctttgcattggaatcttagtatcacaggattgtagaactcaaggaaacaaagtgatcttaaccagcaaytctcaaagtatgaacctggggtcctggaggtcctgagaccttctctggactccccaagattgaatcattcccctgccctgtttcaggccccgaggtctgccagagtttggtcatagcatatatgtttatgtgactggtatcctccccatgactacaagctccatataattaacgtccacgtctgccatgtctgctgcatgcctggcatgcttcctggaagtcaacagtgtctcctggatgagaaactgaatacattaaaatacagccataacacctggatatttccttggatctttatctgcaaatgctttcttaccaagtgaaccactaaagactttgtcaatccaatcttctcagaggtctaagatgttacaaaagtaaagacattggattctt

SEQ ID NO: 356512 - DNA, 593 bp, Homo sapiens
ggggtcaaatctgcaaaggaaagggtggtggtagttaaagtaaatctaggaggctcttgggggaagacaggtgcatgggtgctagttacaaactcccaatctacagactgaatttaagtagactaaacctttgcattggaatcttagtatcacaggattgtagaactcaaggaaacaaagtgatcttaaccagcaactctcaaagtatgaacctggggtcctggaggtcctgagaccttctctggactccccaagattgaatcattcccctgccctgtttcaggccccgaggtctgccagagtttggtcatagcatatatgtttatgtgactggtatcctccccatgactacaagctccatataattaacgtccacgtctgccatgtctgctgcaygcctggcatgcttcctggaagtcaacagtgtctcctggatgagaaactgaatacattaaaatacagccataacacctggatatttccttggatctttatctgcaaatgctttcttaccaagtgaaccactaaagactttgtcaatccaatcttctcagaggtctaagatgttacaaaagtaaagacattggattctt

SEQ ID NO: 356513 - DNA, 622 bp, Homo sapiens
agtctatttagagaaacacaatcatgcaaaggtagggttgttttcaaagattttaaaattcacaccctctcccacttttaattattcacagagtatcagtaagagagacaaagagatctacctccacccaggtaaaatcccaaatctgagtctaagagacttttggagactcctaagtcttataggattggcagatttgtttgcctgtgtatagcaataaaccaatacactgagacagtggggtttgcagcagagaaggagcttagtaatcccaaggccactgagtgaggagaaagatggaatcctcaagtctcaaatccatctctccaaggagttctggggaaaggtttttaagtggatcatggatgatgaggggctggaaaattggggtcattgattggtcagggtaaggaggatgagatcattaggtagaaactgcaatcttccatgagtcagctccttgctgggtccttcagaacagctgacgtcagtagttttatcagtgagcagaacctaaaagagaaattsaaatggaaagcttacttcacaatgtcttagattttatctatagaacagaaaatgaacagagtcttgtgacaagggctacgttatcctggggcag

SEQ ID NO: 356514 - DNA, 526 bp, Homo sapiens
gaaatgggctgggctgaacctaggaggcagaggtttgcggtgagccaagatcacgccattgcactctagcctgggcaacaagagcgaagctccatctcaaaaaaaaaaagagagagagaaaagagaaaaagaaatgggccaggcatggtggctcatgcctgtaatctcagcactttgggagactaaggtggtaggattacttgagtccaggaatttgaaaccagcctgggcaatgtagaaagagcctgtcyctacaaaaaataaaaataattagctggccatggtggcatgcacctcaagttccagctacttgcagggctgaggtggaaagattgcttaagcccaggaggctgagactgcagtgagctgtgatcatgccactgcactccagcctgggtgacagaacaagaccctgtcacacacacacaaggaaagctttagaagttagtgaattaatgttctaaaaatgtagttcatccaaggtagttttctctgagggagaaggggcggaagggacggggtagca

SEQ ID NO: 356515 - DNA, 580 bp, Homo sapiens
acaccatcacgcctggctaagttttgtattttttgtagagacaaggtttcaccatgttgcctgggcttaaaagtcttgttgttacaataggtgattcctttggccatacctgtgtgtgcgtgtgaaatgacatcacattayaataataaaaaggtattgtttctctgagtctcttcttatttgctgatgatttccaaattctctccaactgttcaggagttctctaggatgtgcctagtgtgtacgcgggaatgcaatcctcccagcttctgtttcctccagcatgtcctcagaggcacattctctcagttctaatatggtagtctccactggctgtctccttgctctggctgctgctgtaacattccctgctgacgcttctcaagtcaaaacatacactcttctggctcgttgctcaggtagaagttatgttctacatttcaatatgctcacagtactgaatgggagcatcgtcaattaaagatggtcataatttctttgcttcttctctcattgagaggtacagtctaagtcccccactccttgaatctggctggctctagtggcttacttgaccaat

SEQ ID NO: 356516 - DNA, 571 bp, Homo sapiens
ttatgtaaggtaacagcaacaactgagcaattctttctcctggggaggcagactaccgagggaactaaaactaattgaatttctctggtataatcagagtcaattattcccacatgtacagtaacaccttttaaatttagattagaacttccaagtaatagaccgactgttcctgmgggtaagggtcccctaactcccatggggaccttctgtggctccccaggaagtaagaagattggaattgtgctctagaggtctttggcagcactgcctgctgaggtggggaacaattgttgtacatttgtaagggcactggctgtgctgggtatgccttggtttgttgagggtctcaaggcaggcccctcttcccatttcccaaaagagattgtccaactttgctaaatttagaatgacactgacttgcccagtgattgtctttcatactctggggacatacaccaggacttttctgttgattgacagtcgtagtttttgccttttgattttcttttctacattcctttcttgtgtgtccaaattgcccacaattaaagcaagagcctgagaagtg

SEQ ID NO: 356517 - DNA, 558 bp, Homo sapiens
cagtactaatggaagcttgaagataatacaatgcttgcaaaattttgagtgaaaattattttcaacctagaattctatataycctccagactatcagtgaagcatgaagatagaataaaaacattttcaaaatagaaagatcagggaaaaaagatatctatcatgtaaatgttttaaggaaaatgctaaaaggtgctctgaagtacaaacaacaaaaaagatataggctgtgagaaacaagagattcagtgcagaaaagtcacatggaaggtttttttaagacagagtctcagtctgtcgcctgggctggagtactgtggtgtgatcccagctcactgcaacctctgcctcccgggtttaaatgattgtcctgcctcagcctcccgagcagctgggattacaggtgcccgccgccatgcccggctaatctttgtatttttactagagatggggtttcgccatgttggccaggctggtctcaaactcctgaactctggtgatctgcctgcctcagcctcccaaagtgttgggattacaggtgtgagccactgtgactgg

SEQ ID NO: 356518 - DNA, 558 bp, Homo sapiens
cagtactaatggaagcttgaagataatacaatgcttgcaaaattttgagtgaaaattattttcaacctagaattctatataccctccagactatcagtgaagcatgaagatagaataaaaacattttcaaaatagaaagatcarggaaaaaagatatctatcatgtaaatgttttaaggaaaatgctaaaaggtgctctgaagtacaaacaacaaaaaagatataggctgtgagaaacaagagattcagtgcagaaaagtcacatggaaggtttttttaagacagagtctcagtctgtcgcctgggctggagtactgtggtgtgatcccagctcactgcaacctctgcctcccgggtttaaatgattgtcctgcctcagcctcccgagcagctgggattacaggtgcccgccgccatgcccggctaatctttgtatttttactagagatggggtttcgccatgttggccaggctggtctcaaactcctgaactctggtgatctgcctgcctcagcctcccaaagtgttgggattacaggtgtgagccactgtgactgg

SEQ ID NO: 356519 - DNA, 558 bp, Homo sapiens
cagtactaatggaagcttgaagataatacaatgcttgcaaaattttgagtgaaaattattttcaacctagaattctatataccctccagactatcagtgaagcatgaagatagaataaaaacattttcaaaatagaaagatcagggaaaaaagatatctatcatgtaaatgttttaaggaaaatgctaaaaggtgctctgaagtacaaacaacaaaaaagatataggctgtgagaaacaagagattcagtgcagaaaagtcacatggaaggtttttttaagacagagtctcagtctgtcgcctgggctggagtrctgtggtgtgatcccagctcactgcaacctctgcctcccgggtttaaatgattgtcctgcctcagcctcccgagcagctgggattacaggtgcccgccgccatgcccggctaatctttgtatttttactagagatggggtttcgccatgttggccaggctggtctcaaactcctgaactctggtgatctgcctgcctcagcctcccaaagtgttgggattacaggtgtgagccactgtgactgg

SEQ ID NO: 356520 - DNA, 545 bp, Homo sapiens
agatattatcttatcttcttatagatcttcttgtcagtttctctaacatgttgtcagaagattaagatccttttattttattcctttatctagaagcctgatctttagtttccatcaaaaatgtcaatttctggctgggtgcagtggctgacacctgtgatcccagcactttgggaggccaaggtgggcagatcacttgagatcaggagttcgagaccagccygaccaacgtggtgataccccgtctctactaaaacatacaaaaattagctgggtgtggtggagcatgcttgtagttccagctactggggaggctgaggcaggagaattgcttgaacccgggaagcagagattgtagtgagcctggatcatgcctctgcactctagcctggatgacagagcgagattcggtctcaaagaaaaaaaatttcaatttctaggagcttccagatagctgcacacctggaggttcttggagggtggtgcacctggagatggcatggaagcttggaacctcttcccctctactctgctctgtgcacttc

SEQ ID NO: 356521 - DNA, 605 bp, Homo sapiens
tctctacaaaaaataaaaagttagccaagtgtggtggtgcatgcctgtagtcccagctactcagtaggctgaggtgtaaggattgcttgagcctgggaggttgaggctgcagaaagctgtgactgagccattgaatgccagtgaggactaagctctgtttttttcttaccttgcccaaattcctatctaaggagtctggaaagtcatgccctacaaatcaaattctcatcagatgagttttatttaagcctatatatcatgacttactttccaatgactctggcataacattacgtgacaaagaagaaaatcaaactattttaccctaaaacatgttccttcrccatatgtatttgagatggagtcttgctctgtccctcaggctggagggcagtggcatgatcttggctctctgcaacctccatctcctgcgttcaagtgattgtcctacctcagcctcccgagtatctgggattacaggcatgtgccatgatgcctggctaatttttgtatttttagtacaaaaatacatgttggccatgactctctcatttctctctctctctctttccttggttacttacaagattgggtcaaaacacagg

SEQ ID NO: 356522 - DNA, 596 bp, Homo sapiens
aagaccctgtctctattaaaaatttaaaaaatcagctaagcatagtggtgtgcacctgtagtccttgccacttgggaagctgagacacgagggtcacttgagtctagggcttcaaggttacagtgagctatgatcatgccactgcatcccagcttggcaacaagcgagaccctgtctctaaaataaataaataaataaaaattgaaaaccattttctacatctattagataccactgaaaattgggaggccacattgtactacaggttagacctcacttcaatgtcaaggttaataaattccactagaaaatgacaagratatttgactctgatttatctgtgcctatgaagggaaacaacaaaaacccaaggtacaaaaagaaaatctgatataaaaaagcacagtcacactagctggtaaggaatctggtcatatgaataacaaaggacagaattcacaaataagccatccactcttgccaaggctaattgtttaacaagtcacagaggcttagaagatatcacacaggttattttacccaatcctttaatatacctcaatctctctgatttaccagtgataagaatttcatta

SEQ ID NO: 356523 - DNA, 579 bp, Homo sapiens
ttgtcaagccctctttccctcagtgggactaatatwtgacagataaaataatatggtaagtctgaaatcaaggtcatagatatcctttcctaatttaggataaatcttggggcaaggaaaagagacctaagtaaagcagtgctgtgggggaaaaaaaaaacctgttatctttgtcctgtgatatgggaaaataaggtgcaccaccaacctgacctacttgatcttccattgctaaacaagttttgcagctcttcctatagcaggctgtaacatatgtaacatagtggtgggaaatgaacagaagtaagagctaatgtagaggtgctagagaaaggacttgagattgctcatcccctcttagtaattctcttcctctagaatgcctgtagtagacaagacagaaagcccttgaactttctgtcccatgcatgactcagtctcccttttgattttaaggtccgtaacacctgcctcaacatgctactttgtttgccattctggcagagagggtgaactggtttagtttcatttcagcaagtccaagcctgcttttcacatggtactggtaattaattccct

SEQ ID NO: 356524 - DNA, 533 bp, Homo sapiens
ctaggattacaggcacccaccaccatgaccagctaatatttgtatttttagtagagatggrgtttcaccatgttggccaggctggtctcgaactcctgacctcgtgatctgcccacctcggcctcccaaagtgctgggactacaggcgtgagccactgcacccggccagggtaggttctttatgtcaaagagctgagagtcttaaaaagggtatatttagttggttataaggatgaacttggtggggacaaggagcttgaaagaagggagagaaactgctggggctaaagggatgcattcatccccaggatgtgggcatcaaggtcctgtgggttccaacttaagctccagcacaggccaccagagcagccaaaagctattaccaaggggagccctagcctggcttgggagcagtgaattgtacctcacactggcctgcctttacctctggagtttgttacatctgtcacttctggatactgttcatccacagctggctactacaacacagagatctgtaagtgacagccagg

SEQ ID NO: 356525 - DNA, 562 bp, Homo sapiens
gtgggcctgggcccccgtggacccagtccccagggcctgaaagtgcaccggctgtgtccacagagaaaactgtcaagacctcccctccccctacctccatcctccccctaccccgtagctgtcgggcctggggctggggctgaggggatccaagagtctagggagtcactgggaaatcaccccytttcatctgaaggccctacttgggggttttccccctgtaccctggtcttcccccaccttgcctctcggaggaagccgaaagaagcttctttctgggcacctgctgccccagagcctcagcctgtttggaccaggcaagcagcagggcctggggtgtggacagctcacctggaggggtgggatttaggatcaggcccaatgcagcaaaacctttgtcctctccctgagctgggtgtgggtttgcaaggagacatgcgacccagaacaaccctggaggcagcagggcgcctgccgtctggccactcttactaggactgctgtggcacttcctcccctagcagccccctggtaccaaagccttgcagctcctggagtgagg

SEQ ID NO: 356526 - DNA, 562 bp, Homo sapiens
gtgggcctgggcccccgtggacccagtccccagggcctgaaagtgcaccggctgtgtccacagagaaaactgtcaagacctcccctccccctacctccatcctccccctaccccgtagctgtcgggcctggggctggggctgaggggatccaagagtctagggagtcactgggaaatcaccccctttcatctgaaggccctacttgggggttttccccctgtaccctggtcttcccccaccttgcctctcggaggaagccgaaagaagcttctttctgggcacctrctgccccagagcctcagcctgtttggaccaggcaagcagcagggcctggggtgtggacagctcacctggaggggtgggatttaggatcaggcccaatgcagcaaaacctttgtcctctccctgagctgggtgtgggtttgcaaggagacatgcgacccagaacaaccctggaggcagcagggcgcctgccgtctggccactcttactaggactgctgtggcacttcctcccctagcagccccctggtaccaaagccttgcagctcctggagtgagg

SEQ ID NO: 356527 - DNA, 562 bp, Homo sapiens
gtgggcctgggcccccgtggacccagtccccagggcctgaaagtgcaccggctgtgtccacagagaaaactgtcaagacctcccctccccctacctccatcctccccctaccccgtagctgtcgggcctggggctggggctgaggggatccaagagtctagggagtcactgggaaatcaccccctttcatctgaaggccctacttgggggttttccccctgtaccctggtcttcccccaccttgcctctcggaggaagccgaaagaagcttctttctgggcacctgctgccccagagcctcagcctgtttggaccaggcaagcagcagggcctggggtgtggacagctcacctggaggggtgggatttaggatcaggcccaatgcagcaaaacctttgtcctctccctgagctgggtgtgggtttgcaaggagacatgcgacccagaacaaccctggaggcagcagggcgcctgccgtctggccactcttactaggactgctgtggcacttcctcccctagcrgccccctggtaccaaagccttgcagctcctggagtgagg

SEQ ID NO: 356528 - DNA, 537 bp, Homo sapiens
gggagacctcagtccctgcctggtctagggggaggggtggcttccgacttctggtctttatgrcagggagggagagctttggaagggttcacagctccgccctcaatgttcctttttgcctgtgagcttcgcctgtgagacccaaccctctgcttcccagcttcaaggaggagtttcccagcctgtgggcccacagggacggctgtcctcacttcctccctttggccccctctgcctgctgagcccagggcccagccctgccccctacccaggctcaccccacagccaggcctgagctcaggagtgggaaatggggctgagaccagccagtgaagggcggccttggcatttggggccaagcctgggactgctggggtgggtaggggtgttgagtggagttcaggaaagaaacttataggggagagaggaaaacactggtcgtgtccatgatttcagagatcaggagttcttattattattatttgttatttactgagcatttaccatctctctaccgactctaaattctttacttat

SEQ ID NO: 356529 - DNA, 511 bp, Homo sapiens
aatgtagcaagaccctctctcttaaaaggaaaaaaaaaaaacagtgacacttaaacttaaaaagcactttyaaccgttggctgttttattgccatctttctcattattatacttgtaaggtgattgaaataatggtttaaatatatagattaacattattcattttaagtttttttctctattcagatgacctgtgtagaaaaagcaggaacagatgagaaaatgcttatgaaggtttttcgctgtttgggaagttggtttaacttgggagttttggacagtaacttcatggctaacaataaattactagcactcctttttgaggttttggtaagtaatgaccttatttatcaaagtatttctgccaatcacttttcgtaactaacctgctgggacataaaaacgtttttaaatttttgcacagtaactggaaggcgtgtattaagaatgcagcaatgttccttccttgctacgaggtaccaaattagaagtatcagttttaatactccta

SEQ ID NO: 356530 - DNA, 511 bp, Homo sapiens
ccaccctgaccaatcaattgacattgcaacccccatatcagcactcttgagtcccctggcccttcaccagattcccaaatctcctagcagacgcttcaactgattatgctgatcatttgttttgtttgagaagtcaaataatccagaagtctttagayaaatgatacttacattataaagtgaaaataaggtgtcattctaaccgattctctggtagttccttccattgtgttctctttgaagatgatgaagtgaggcatctcacttcctgggcagggaaaaggaacatgcacacaaacccagaattctgaggcaatttcatctgactggttaatttagcagaagccaatttcaccaacaattttctgcagtgcttctcaaatcaagtggcaaaggatttaatgaagagatcccaggtgcaatgttagttgctgccatctagtggcttttgtgaaggaatagtgtgattccttgggctcttttcaaacgccagggagaaactcaacctgga

SEQ ID NO: 356531 - DNA, 442 bp, Homo sapiens
gaaaatatttatttccaggacataccccagacctgttgaatctcaatctctagtgaakgggccaagaatttctttttttttttttaatcccggaaaagtctgatgataagccattttggataacatatagtgcagaaaagagctttagatttggagctggacacacttgcgcttaaatcctggagatgccactttctagctgttcaaccttggacaagtcagcaacctgtctgaaatggggaatcttcgtaattatccacggagttcacatgaagattgaatgagattacatatttataaccctgggcatggcgtgcagtaatggctgcgaaggcatataggcctaatgagaaagaaccaaatcctgaacactctccatgtccagaggatggcacaaatatttgttctccccagcttccagaaatcccccttcagtcattcc

SEQ ID NO: 356532 - DNA, 549 bp, Homo sapiens
gcagaaaggactgctgggtgctctccagtccaggaccagggacctagaagtggttgtacagggaagtagtggggaacccaggtcatgctccccattacaagtgctgaatatccagtatctatcttccgtggttccactctctctttttatyctggtcaccttgaaagccaagttaacttccaaatctacccccttaataatgcaacaaatcacactaaaactaaaccattttaaagtaaattagcatgtgccttcagcgttggactaaggtgggagtagggctcacactctttgcagcagcatgatgtcctcatggttttcctcctacttcttgagccatcacttcccagtctccttggccagcttattcctgggcaccagcctcaccactggaactcctggagtctgcagttgttggctcttctcttctcactcctgaccttgcccatgacctgggcttcactcatgctctactctgggattattccccaaaatctccagcacagacctctcctcccaagctccctgtataactcaacatctacactg

SEQ ID NO: 356533 - DNA, 494 bp, Homo sapiens
atcaaggtgtccatagggttggttccctgtgaggcctgtgaggaagatctgttccacgactctctcctagctttargtagttttctggcactcttgggtgctgttcattggcttgaagaaccatcgccccaacctctctcttcatcttcacatcgtgtcctgcctgtgtgtgtgtctgtgtccagatttcccctttttaatgaggacgttatcatattgaattaggggcttgccctactccagcatgacttcatcttaactaattatatctgcaatgaccctatttccaaataagttccgattctgaggtatggagggctagggcttcaacatatgaattttgtggggaggcacaattcaacccctaacacaccctgtttttcaggtggagtccttcagttatgtagtgtcatagttctgccctgcagattttttctgccctgcaggttttttctgccctgcagtgtaattatcacttgaataatcacacaagc

SEQ ID NO: 356534 - DNA, 580 bp, Homo sapiens
actgcaggggttatgcccagtactctgggtttaaccacccctccaggttattgtgattcccttaaagtttaagaaacacttaactttaagtgattcttaactctactcggtaattaaagtattaccacatacaagcatcatcagtatcacctgggagtttattacaaaaggcaaaaatggaggtcataccccagacctactgaatgagaacctgcattttatcaagattgccagatgattctcatgcacactgaagttctagaagcactgcactaacatcagagtaatctcataaaatgcaaatctgaccatgtcactctcctgcttagaaaaacaagcaggattcttgtcagcttaaaaacaacatctaaactccttaacatggagctaagtgtggtgactcatgcccgtagtcccagctactcaaaaggctgaggtgggaggacaacctgaggccaggatttcaaaacctarcctggccaacataacaaggcctctgtctcaataaaataaaataaactcaacatgggatcctaagccattcaggatctagtcattgcctacctagcctttctagctt

SEQ ID NO: 356535 - DNA, 408 bp, Homo sapiens
ctcgtgttactagcaaaatgaagaagctctttttctctctgatggatgctctacgtctgctgtakgtacccaccatttttttctccactggagttccctgtcatcaaagaaaattctattcggagtcattgcacctgacttcagaagtgagcactaagagagcagatctaaaaagttattccccaaagctctacttttaaagtcaactttctggatgtattaaagaactgttccaatttcacctctcttggtgtttcaatgagaaaacacactctgaaaggccgaaaatacccttttcgtccctcctggaagcctgttctgattattaaccaacactgtgtctcagagggcatgaagtctatttccatattgacatttcttggcccattgattctgtgtgacaggctt

SEQ ID NO: 356536 - DNA, 481 bp, Homo sapiens
tcttggcccattgattctgtgtgacaggcttgacaaatgttcactcaatggccattactgtctaacttgctccccaactgagatccaccaagatgtctgatgtgaccaaagactaccacatgctcaaattcttttgattaagtctttcaacagaaaaaaaaaattagttcagttgaaattagaagcagtacctgggattgctatatgaccagaatggcactcttacagagggatytcccctgaccaggttacagaatgtattcattctgacatgcaccaaatcatatctgcagcataatataattccaggcagaagagatctgcttcactctgtgttgttacaggattagtatagggagtggtgggcttaagaagctaagaaatatggactatacccctggctttctctgtaatctgttgtgtgattttatgttagccatttgcttctccttgccatcttcctctgcacacaggtttataa

SEQ ID NO: 356537 - DNA, 508 bp, Homo sapiens
cttccaaaattagtgaatcatgtcgttaccgagtttaaggaccagtgttttttaaaagtggcaaattgataagcagatatccttggttattttccctctgatcattkttcttttactgcctttgttcttaactggatgagaaagtagaacaagagtttgctttacagataaaccaaggaaatttcatgcccaataatgtaaacgaagcaccatttttcctaccaaagcaccccacttacaaaactaaaatacagaaaagttgagaatttgtctagaatccagagcaccatttttaaagtgcccattgacacagtagcaatttatgaaagttttgcaatttgtgaagcagatgtttttcatcagcgtggatgccttgattcatgaaacattccagtttgacttcaccatcaactatcttttaacccatatgcatgtttaaccgagggtcaattgatcaaataatagctgactggccaaaaaggtcattcttgggtttggctgattgaaa

SEQ ID NO: 356538 - DNA, 521 bp, Homo sapiens
ttcatgcccaataatgtaaacgaagcaccatttttcctaccaaagcaccccacttacaaaactaaaatacagaaaagttgagaatttgtctagaatccagagcaccatttttaaagtgcccattgacacagtagcaatttatgaaagttttgcaatttgtgaagcagatgtttttcatcagcgtggatgccttgattcatgaaacattccagtttgacttcaccatcaactatcttttaacccatatgcatgtttaaccgagggtcaattgatcaaataatagctgactggccaaaaaggtcattcttgggtttggctgattgaaaatgagctgttgcattttktttctcttgtgtgttaagtgcagcacaaattattcatgacactgctaggaggtacagcaagttaataaatcataagaatggctccattctagttgctcatatccatgaaacctgtcctgttgtggttgatggtaaggctagagaaaatcaagtggacttgatagtagaagcagtgtg

SEQ ID NO: 356539 - DNA, 521 bp, Homo sapiens
ttcatgcccaataatgtaaacgaagcaccatttttcctaccaaagcaccccacttacaaaactaaaatacagaaaagttgagaatttgtctagaatccagagcaccatttttaaagtgcccattgacacagtagcaatttatgaaagttttgcaatttgtgaagcagatgtttttcatcagcgtggatgccttgattcatgaaacattccagtttgacttcaccatcaactatcttttaacccatatgcatgtttaaccgagggtcaattgatcaaataatagctgactggccaaaaaggtcattcttgggtttggctgattgaaaatgagctgttgcattttttttctcttgtgtgttaagkgcagcacaaattattcatgacactgctaggaggtacagcaagttaataaatcataagaatggctccattctagttgctcatatccatgaaacctgtcctgttgtggttgatggtaaggctagagaaaatcaagtggacttgatagtagaagcagtgtg

SEQ ID NO: 356540 - DNA, 543 bp, Homo sapiens
ggctgattcttcacatataaaaagtaggggaaatttttataaatagaaaaaataactactatttcagagaattttgagaagtaaattacatacatgccatgccctgttatatgtgaggggttggttctaggacttcccctctgctcctacacaaacaagaatccycatacagtcaagtgtctcagctggccccgtggaaggagcttttaggaaaaatcagccctccagatactctggttttgtatcctgcaaacactgtattttccatctgcatttggttgaaaaaaactgtgtataagtggtcccttgcagttcaaacctgtgttgttcaagggtcaactgtgtatatatttatatatatgacaaatatatattacccttaaatctctgaccagagacagtgggtttctatttagggtttcttcatgtaactgtgtttcatcaaggatttctgttgtcttaccatttagacgaggaaacgttggcagagaatcacctatattcaaaaattgctggctttgacaatatttttcttctgtatat

SEQ ID NO: 356541 - DNA, 530 bp, Homo sapiens
catataaaaagtaggggaaatttttataaatagaaaaaataactactatttcagagaattttgagaagtaaattacatacatgccatgccctgttatatgtgaggggttggttctaggacttcccctctgctcctacacaaacaagaatcctcatacagtcaagtgtctcagctggccccgtggaaggagcttttaggaaaaatcagccctccagatactctggttttgtatcctgcaaacactgtattttccatctgcatttggttgaaaaaaactgtgtataagtggtcccttgcagttcaaacctgtgttgttcaagggtcaactgtgtatatatttatatatatgacaaatatatattacccttaaatctctgaccagagayagtgggtttctatttagggtttcttcatgtaactgtgtttcatcaaggatttctgttgtcttaccatttagacgaggaaacgttggcagagaatcacctatattcaaaaattgctggctttgacaatatttttcttctgtatat

SEQ ID NO: 356542 - DNA, 530 bp, Homo sapiens
catataaaaagtaggggaaatttttataaatagaaaaaataactactatttcagagaattttgagaagtaaattacatacatgccatgccctgttatatgtgaggggttggttctaggacttcccctctgctcctacacaaacaagaatcctcatacagtcaagtgtctcagctggccccgtggaaggagcttttaggaaaaatcagccctccagatactctggttttgtatcctgcaaacactgtattttccatctgcatttggttgaaaaaaactgtgtataagtggtcccttgcagttcaaacctgtgttgttcaagggtcaactgtgtatatatttatatatatgacaaatatatattacccttaaatctctgaccagagacagtgggtttctatttagggtttcttcatgtamctgtgtttcatcaaggatttctgttgtcttaccatttagacgaggaaacgttggcagagaatcacctatattcaaaaattgctggctttgacaatatttttcttctgtatat

SEQ ID NO: 356543 - DNA, 567 bp, Homo sapiens
tttctaatttctcgatatccacattatgttggtcaagttacttaatctctgaggctgattcttcacatataaaaagtaggggaaatttttataaatagaaaaaataactactatttcagagaattttgagaagtaaattacatacatgccatgccctgttatatgtgaggggttggttctaggacttcccctctgctcctacacaaacaagaatcctcatacagtcaagtgtctcagctggccccgtggaaggagcttttaggaaaaatcagccctccagatactctggttttgtatcctgcaaacactgtattttccatctgcatttggttgaaaaaaactgtgtataagtggtcccttgcagttcaaacctgtgttgttcaagggtcaactgtgtatatatttatatatatgacaaatatatattacccttaaatctctgaccagagacagtgggtttctatttagggtttcttcatgtaactgtgtttcatcaaggatttctgttgtcttaccatttagackaggaaacgttggcagagaatcacctatattcaaaaattgctg

SEQ ID NO: 356544 - DNA, 547 bp, Homo sapiens
tgatgttcacactaaaaaggcaaaggcatttcaagagtgtaaagtggtatctgaatcaaaggaaagcttataattagtataatttcacatcaaatatattatactctaattctttggaaaaaatgtttttatgacaacttttaataaaycaggatatttaacttaataatccaggagctcctaataagcaggaactacataattttcattctatcccagtatctagcacagtgccaagcacaaaatgtacattcaataaatgttagttgaaataaaatgaaaacatgtattatggttcgggtttttaaaaaagaaaatgtcccccatatatgtgtttatatatgcatgtgaacatgcaaaaaaatatatgtgtcaagatgcacactgaactgtcatcaaggagcacctcatggatttgaggcaatgaagagagttagtttttctttaacacacagcacattaatgaagatcataggttttggagttagacttggttgaaatgccaactctaccccttctcatatgtgtcaacaggcaagttacttaa

SEQ ID NO: 356545 - DNA, 534 bp, Homo sapiens
aatttgcttatctattctcctattgaaggatatctcggttgcttccaagttttggaaattatgaataaagttgctgtaaacatttatgttgaggtttttgtgtgaacttcaggtttcaactcatttgagtatacaccataggatgcaattgctgagtcatgcaataaaagtatgtttaattttataagaaactgccaaagtgtctcccaaagtgactgtactgttttgccactcattgattaacaataataatctcattgattattataatcagattatcaatgataatcttattgattaccaccagcaatcaatgagagtttctgttgctccacatcctcaccaccatttagtgttgtcagggctttgtattttagccatcctagtagatgtgcagtgggayctccttgttttaatttgcaattctttcatggcaaatgatgtttagcatctttccatacgcttatttgacatctgtatatcctctttggtgaggtagctgttcagatcttttgaccattttttaatagtttt

SEQ ID NO: 356546 - DNA, 615 bp, Homo sapiens
tttgcttcaataaggcagtggaaaaaatcctagttattctttgaattagactgaccttgagagagcagatcttaaagaatttggttttgagacagaaagatttttttccagagggggggtggtggttcttgcaggcatattagtgtctctggctgcttatcttccctaattcctaatttataatcagcacctgtgaaaaatatctggggttccagtgtccattcacagatagcaaaataaaagcacagagcctcagctctctagaagtacatttttcctttaagtggagggtttttaatgaagaataatattagaccttagtttagtgaacttgaatattcacctactttagcaagcagtaartaacaggttcagtctaattgtctagagaaaatcttgacttttgtagtgaatgcaagttatcaaatactctgtattacactggtgaatgactcattttaagataaatctaaacatggaaaaatataacttatagtctagttcttatttttaagtattgctcatgttcactatgtgcattatttctacggcacagacagtgatggaataggagaagatttcccaggctaccaaaataaaggaaagattgtaatt

SEQ ID NO: 356547 - DNA, 584 bp, Homo sapiens
acattcaaggagggaagaggagcacggtggcatttgtcagcaatcagaataggaaaagctaccatctagacttagtaattccacttttaggtatattccctggagaaactcccacatatgtatttttaaacagtcatgaaaatgtgtgtattaaaatttataagagcaaaacactggaaatagccccaattattcatcaactaaaaaactgataaattgtggtgtatagtgggattctctacaaccgtagtggttatatacattgtcatggagggatctcactgtttgrtataaaaaacaagtcacagaggaacccctgtgctatatatatttataaaacagttcaaaaacaagaccaaattatttatgatatatatgtggcagaattagaggggacacaattatctctagggcaaatagaagggagaggtcatcagaatagcattacaacagtttcaacagtgctaggaattgttcttgctcataaacaaggttgtggatactcaaatattttgaatattttcacattttaacatttctgaactcaggaggattttaagagatgtagttgtaattgtcataga

SEQ ID NO: 356548 - DNA, 581 bp, Homo sapiens
aggagtggaactggtaaagttcaagtgggagaaaagagggaaaaagtatctgaagactttctttgtccacggatacaaagaaaataatgcaccaaaagcaaaacatattgatagatcacttagaaacactcagttgaactgwtgaactaaagaatttttaaattttttgtaaaatatgttcgatttctagtcagaagtaacctgaatataaatctggtgccttcattcacatgacccacatctctgtcatccttaaataaagttataccaagtaaataggtgagctactaaacttcataaccagtatgttttcaaagtcgaaggggaaaccattgtgtctttaaaaaaaaaagagagagagaagaaaaaaactgctaggccttgtttataaagaacagtgcggttggctgcaggaaaaagtaaagtcacatagaaataaggtagacagtgacgcctgccacatgaccagcctgtgttatccaggaaaagcctgattatcagattttattggaagaattggaacatagtataggaagtggacagtcactcagaatccaacacagcttcagcaaaagggttat

SEQ ID NO: 356549 - DNA, 633 bp, Homo sapiens
ttctgagggctttatgcttccattatatgtctttccatgaaagaaatactyaagcttttatgtctcatcatatttgtggtaaaagtaaaatgaatgaatgcatcggctaaattatactttctttgctttaacatcttaaactttaccttaagcctaataccaatagagataggtccctgtaatgtaatatcctaattacattttacacaatatcagtggaaagtaatcgtagacataacttatcaaagttggtgactgttagtactaaagaatttaataacatttgtttaaactgtaacttagatagcataatattaaaaataattttaaagaagaaaatattcaaaattccagaagaagaatgggaacactgtttcacccagctcattgtgaatctcaacatatcctggaacgaatagggattcacaaaattgtataaactgaaacccaaactccttatcactttgtaatgacccaaagcaacaaacacttactgaacagttgttgaatgcctttgccatccccgtgtttacaaaattgagtaagataccacctttatccttgaaaaatttatagtccagtaggagacacacgtacttaaagtgatcattttgatataatattataatcagt

SEQ ID NO: 356550 - DNA, 633 bp, Homo sapiens
ttctgagggctttatgcttccattatatgtctttccatgaaagaaatacttaagcttttatgtctcatcatatttgtggtaaaagtaaratgaatgaatgcatcggctaaattatactttctttgctttaacatcttaaactttaccttaagcctaataccaatagagataggtccctgtaatgtaatatcctaattacattttacacaatatcagtggaaagtaatcgtagacataacttatcaaagttggtgactgttagtactaaagaatttaataacatttgtttaaactgtaacttagatagcataatattaaaaataattttaaagaagaaaatattcaaaattccagaagaagaatgggaacactgtttcacccagctcattgtgaatctcaacatatcctggaacgaatagggattcacaaaattgtataaactgaaacccaaactccttatcactttgtaatgacccaaagcaacaaacacttactgaacagttgttgaatgcctttgccatccccgtgtttacaaaattgagtaagataccacctttatccttgaaaaatttatagtccagtaggagacacacgtacttaaagtgatcattttgatataatattataatcagt

SEQ ID NO: 356551 - DNA, 577 bp, Homo sapiens
ttgccagtgacttttttgtgtgtgttgctgtttcattttaacttgcctttcattcaacttgaagtatttattgaagcaacattaacattccttataagataggtctagtggtgatgcttatttatttaaataagtttttttcctttttttctttctcttctctttttggtaaccccagcacattctgaaggacagatttgccatgcatagtattcttggctggcasggtttttttctttaaggactttgaatgtaccattctactcacttctggtcttcaaaatttttgctgagagataacaaataatcttatgaaggctcccttgtatatgacaagttattttaccctttatgctcccaaaattctttgtcgttaccttttgacaacttaataataatgtgtctcagttgatgttctttgtacctttgtattggtggctgcaaatctgaagaaatggagccacctctaccaatctttatggactggtttggcagggaaagatcttcctagctagaaattctggaagcagcttaaaccttttctataactgtgtcttctctttatttgtgcatttaa

SEQ ID NO: 356552 - DNA, 577 bp, Homo sapiens
ttgccagtgacttttttgtgtgtgttgctgtttcattttaacttgcctttcattcaacttgaagtatttattgaagcaacattaacattccttataagataggtctagtggtgatgcttatttatttaaataagtttttttcctttttttctttctcttctctttttggtaaccccagcacattctgaaggacagatttgccatgcatagtattcttggctggcacggtttttttctttaaggactttgaatgtaccattctactcacttctggtcttcaaaatttttgctgagagataacraataatcttatgaaggctcccttgtatatgacaagttattttaccctttatgctcccaaaattctttgtcgttaccttttgacaacttaataataatgtgtctcagttgatgttctttgtacctttgtattggtggctgcaaatctgaagaaatggagccacctctaccaatctttatggactggtttggcagggaaagatcttcctagctagaaattctggaagcagcttaaaccttttctataactgtgtcttctctttatttgtgcatttaa

SEQ ID NO: 356553 - DNA, 602 bp, Homo sapiens
gaagaaacctgacaaacattgcctaagccagtggatcagtgtcaacaccgattgtgataaattatattgaaaatatctactttcaatatacgttgtgatgaaaatgacactttacctctgtggttttcttccccaaaacacgtaaccctagtctatacgtgagacaaacatcagttaactcccaatggacaaatctacaaaawacctagccagttctcctgaaaaccgtgaaggtcatcaaaaataagaaaactgagacactgacacactcaagagaaacttaagatgactacatatagttggatcctgggaaagaataaggacattaggtaacactatgaaaatctgaataaagtgtaggctttaagtaaacaataatgcatcaatgtaggctgattagttatgacaggtttctgacatcggtattagatgttcattataggaggatttggatttgaaagtatggtgattctctgtactatctttgtaatttttctagaaaaccaaaattattccaaaattttaaaaaatatgtttaaaattgatctgaaaatcaaagagggaataactatcatttaattatacaggaaggcactgtaaat

SEQ ID NO: 356554 - DNA, 471 bp, Homo sapiens
aacaatgctaatctctttgtacrtcaccttcagaaggcatgagtgaccaggttcattgtcaataagcagttatatttcaaaaggagtctttttttccaagtagtgggtgtccacagtgggcttaaaatattcagtaagacatgctatacacaaatgtcatctgggatttgttgttcaatttctagagcatgggcagagcaaattcgcataatttttaagggctttaggattttctggatggtaaatgaggattgacttcaacttaaagtcatcacctgcattagtccctaataagagagttagcctgtcagtcctctgaagctttgaagccaggtacaaacttctcctctccagttatgaaagttctagatggtgtcttcttccaatagaaagctgtttcatttacacaaacaaaaatctatttcttagtatagctattttcatcaatgatttttaaatggatcttctgga

SEQ ID NO: 356555 - DNA, 509 bp, Homo sapiens
atgacattttgatacagttgtattttataccttcttcaaaaagagaattccaaggcatcttctcagacatagtgataaaagtttacataaacaatgtctcattctaatatgctattgatattatcatctatcttaacgccattacttaktcatgtggagagttttgtctcagtattgtggtcagacaagttgaagttcattttttttggaactaagcctatttttctcacaccaggctagtactgatcaaaatggaatttccctcagtgggcatgttactccaaggctcgatgtcttagtccattttgtgatgctataaaggagtatctgagactaggtaattataaagaaaattatttatttggcttagaattgggatgactggaaagttcaatactgagcatctgtatcttgcgaggacctccagctgcttccactcattgtagcagcaaagatgagtcaacatgtgcaggcagagatcacatggtgaaaagaggaagtgagagaga

SEQ ID NO: 356556 - DNA, 585 bp, Homo sapiens
taataaatatttcaaaataaagcatataaacagaatttccaccaataaaaatttttattatataaggaatacaggaatttaagatgctgtgactggagataggaaattaaactgattcttttatttagcattgattttgtggcaagcaatacactcagcatcttacatgtaataaattgtttaactctataaaataaatattactattgcaatttattagatgagaaagtgattctcagattgctgaactaatttgtccaagatctcacaaaaayttattggccagaaacaaacctatgtgtgtctttctaagcaattgaaatgcttttgtcatgatatgcttcagcaagaagaacattttcatcacaggacctttttatgcatcacattgtgggttttcttatccaccaatttagaaaattgccattacttttaagacctattctcatgacatcttagtattcctggattagaaatgcatatattttaaggatttttatattttgattatgtgctattttaacaagtttttaaatatatacattctcaatatatgtgcctctacttatttataagttatatgta

SEQ ID NO: 356557 - DNA, 658 bp, Homo sapiens
tctttttcataagaattatattatttattatagaaacgacagtgaatcattttggtggtggaattgagctagtaggcaaatgtcaacatggaattgccaatttaaatcatcaacctcggttccaatatccttcatcctgaaaacagtttaaaccaaagtaataaacaaacagaagggagactattcagttataaatactttgactcagcagattaagaatacttaaaatctaccctccaaagatgtagaatatgtgttttcctactcttcaaaaaatcacttttatgcagttttgtttgtttataatcatatcacaatttctaaacataagagttactctgaagagggccatcctgtaaaatttgtgcaytttccagatttttataaaataacttgaaatttaaatctactcagcatattttcaaatatacctaagcacacaaggcttaacataaaattatattttccgtggaaaggctcagaagtcactatctcccagaaaagaaatatatactaagaagaagtgtaattattaacaagtgaatattttaaatttaatatatattatggtgaatagtgtgaatctagtcttcaagaaaacttagaatctaccctattcaattaaatatatctccatgttaactactcccatagccaa

SEQ ID NO: 356558 - DNA, 617 bp, Homo sapiens
tccaaagtatagatctcattttacattcctgaaagcaatgaatgagaatttggtatggctctctattctggtcaacaattggtattaacaattttttattagttttagtcattaatatttgtttaaaatcttgtggttttattttattttttgacttgagaacttgatattgagtatttcatcctgcacttattgaccactcatatatttccttgaacaaaaagatttgtaaataatacaaatgttaaattgttaataatatatttatagaaacatacatgtatatatgcaattatagataatatagttgtaatacattatatgtataatatttacaaatcaatgtcaaacaatctatatatatggacttgcatatatatacaaatatgtaagttctttatagatatatagactgtattttctcccattctgcagcttgccctttactttttaaaygatataattttaaaacaaaaatgtctctgattaaatacaatttatctatttttttaaatggcttgcgcattttgtgctctaagaaactctttatcaaactttacaaaatttatcctcctgtgtttttttagataatatattattttagcttataggtttaa

SEQ ID NO: 356559 - DNA, 625 bp, Homo sapiens
tcatactccaattgctttagaagctatattgacataactttcatggcagacaggtatgagttatattcatgtaaaaagcaatccaacacaggttgcaaggaaagagtgattggacatttattgaatggttgtgtgtgccaggtatcagatgttttaatgcacaatgcacaaaatctcacactatcagtctttaggccctgttggttctttctactaaatatatcttgattttttctttctcttcataacactacttgtttttgaatgatttcaagtataaaacattagctccttgttgagatactccaattacttccaaactgcctttcctgacaagaagttttattttaacattctaccatcaatagttatctttcccaatcacagattaaatgcatttgtctcttggaatcataaatagtttgtctttgcaataaatgagatataagattattaatgacttacatgcaagcctcatttaccgcaacttttatcaattcttctcccacttttctaccctaaatgtaccctatgattgaattagttacaaattctagcatatgrgtgccattgtctatgaaattctattcaaccaactcccttgtccttctctcaaaacaccagt

SEQ ID NO: 356560 - DNA, 466 bp, Homo sapiens
caggcaaaaccctgcggcaggggcagaaccctcatggagaacctcttatagggcagtgagaaagggaaatgtggagttagagctctcacacagaggccccactggggcgctgcmtagtggagatgtaagaagagggctaccatcctccagacctcagaatggtagagccaccaaaagttgcaccctgtgcctggaaaagccacaggcactcaacgccagcacatgagagcagctgtgggggtgaagccacaaagccacaagggtggagctgctcaaggccttgggagccccccttgcatcagcatgccctggatgtaagacatggagtcaggggagattattttggagctttagggtttaatgactgccctgctgggtttcagacttgcctggggcctgtagcccctttcttttggccgatttctcccttttggaacaagggtacttacctaatgcctatccccca

SEQ ID NO: 356561 - DNA, 466 bp, Homo sapiens
caggcaaaaccctgcggcaggggcagaaccctcatggagaacctcttatagggcagtgagaaagggaaatgtggagttagagctctcacacagaggccccactggggcgctgcatagtggagatgtaagaagagggctaccatcctccagacctcagaatggtagagccaccaaaagttgcaccctgtgcctggaaaagccacaggcactcaacgccagcacatgagagcarctgtgggggtgaagccacaaagccacaagggtggagctgctcaaggccttgggagccccccttgcatcagcatgccctggatgtaagacatggagtcaggggagattattttggagctttagggtttaatgactgccctgctgggtttcagacttgcctggggcctgtagcccctttcttttggccgatttctcccttttggaacaagggtacttacctaatgcctatccccca

SEQ ID NO: 356562 - DNA, 591 bp, Homo sapiens
caagaaggcaagcagggagagcagcgagaggctttgtaataagccaagcaaggggaagttctgcttggactaggatgataacagtggtggaagtgctgagggatgtctgggttctgggtatattttgaagatagaacaggaagaattttctgatggtttgaatatgagatatgaggaagaagatgactcaaggatgactttggttttacctgagtacatagagaatgaaatagaccataagagaaggatacatggaggattggaatctggagtttgtattttagatgtagcaagtttgagataccatgaagaaatccaagtaaagatgtagagggcagttggataaccatgttggagttcagtggagaggtctgggttggagacattaatctgtgactcatgcatgtaatcatgtaaatgaataaaatagaaaagagttccaaggaatgagtcctgcaacactccaatgcatagaagtttgacagatgaggaagagctaactggcagagctagagatggtttagccaggaagacaaaggctayggtgttgtggataccaacagaggaaagtattttgaggaagaggagatc

SEQ ID NO: 356563 - DNA, 581 bp, Homo sapiens
acatacttcaagagttataaaggaaattataaagcctttgaattgagtgaaaattaaaataaacatagaaatgaaaaacaaacatcaaacwtcaaaatttgtgaaatccaactaaatcagtgcatagaggaaaacatatggaatttcaagtttatatagcagaagaatagtttaaaatcaataaactaatattctacattaaagcactagaaaactaaaacaaattaattacaatgcaactaggaagaaataataaaaataagagcagaaatcaataaaacagaaaacaacaaaatagtagagaaaacaattcatgttaaaaagctggttcttcaaaaagatcattaaaactgatagattaaaaatgacctactaatatcagagataaaaaatgaatatccctacactttctactacatatattaaaatgataacatgatattaagaatgactttatgcctatagattgattaggtgaaatgaacaaataccttgaatgatacaaactacaaacatattttgaaagaaagaacctgattttccctattatctattttaaaaatagagtttgtagttataag

SEQ ID NO: 356564 - DNA, 568 bp, Homo sapiens
actgatacacctttagttgaagtagtcagggctatactctgttggcttttattattgtgtattctactgttttttttttaaacctatactttcattcattgacattgcttgacaatgtttatttattttgttttattccatctcagtgataacaccagttaatttaacctcattgactactattaggcagcatagctaagttgctcatatcttgagaatattaacctagagtaatataaaattttgctattttggtttaaaaaaaaccatgtagaaatggtattgcccagattttggaaacatacagcgccctaccactaactgactgattttaggtaagttgttgcttaccttgtctgtgcctcattactatcacctatrtaatggagatgagcacacttacccttcaaggttgttgtgggagccaaatgagatgcctatcaatagctttaacacaatagataatcaacaagttgcatattaatattgtgaagggtttcactagtattggactttgaaatttttttttgacctgatagatgtaaatgatatataacattaagtttgt

SEQ ID NO: 356565 - DNA, 545 bp, Homo sapiens
agctaatattattccatcactgaaaacaatatagtaatgctacctcttctaatttctgcccagagaagactgttttccttcatctattctctactgctttgtttttttatygctgtaacttgaacaatttctaaaatgcataagttattatagcctgcatgccaagatattttatcaagtttatgtgctaaaatattctcatttcttggataacttaagagctttcttaggagaattataatgttgaatggtattttaatatttccaaaaagaatactttatgggtgatgttattaaataaatgatagacaaaagtgacaatatttcactctgaatttttcacatcctctaatacctgttcatggtcagagaaaagagaaaaggcagttatagccagtactgattttaatgcaaagagtttaatgtgcactttctcattgatctagtatacatttctggtaaaagaatttcaagcataataaaatctttccttatattctatattcccagatagaattgccacctgtgcagttatagagccactt

SEQ ID NO: 356566 - DNA, 548 bp, Homo sapiens
tcaatttctaactgcttggacagaaagacaaaacactgcaacagtcattttatggcataaacagagagaaatagagaagcagatttgcagttaaaagcaaaaaaaaaaaaaaaaagaatgacacaaacatacagacaaatgaagaaatgagtggccatgaggctctggagaagaagattcagctttatttcccgactttgaggtcttggactcttgtgcctcgtgagacacagacgaaaagtgaatttctgtttattccatctggaattgctaatacatccactctctatagttcctccagtttcttgttcccttcactgtcccagattttctttcctttttgtttttactcaagtagagtaagtctaagctcaaaagtctgtaggtaccaatagggcttcattaaaggtaataagctaaatttgcaggtgttagtttcygtctacctagctataaacatctccagctcctgggtcccaccctgaaaggtgtcacaggtgagctcacatacagtcttgttatcttctctcactcttatccctctctgg

SEQ ID NO: 356567 - DNA, 548 bp, Homo sapiens
tcaatttctaactgcttggacagaaagacaaaacactgcaacagtcattttatggcataaacagagagaaatagagaagcagatttgcagttaaaagcaaaaaaaaaaaaaaaaagaatgacacaaacatacagacaaatgaagaaatgagtggccatgaggctctggagaagaagattcagctttatttcccgactttgaggtcttggactcttgtgcctcgtgagacacagacgaaaagtgaatttctgtttattccatctggaattgctaatacatccactctctatagttcctccagtttcttgttcccttcactgtcccagattttctttcctttttgtttttactcaagtagagtaagtctaagctcaaaagtctgtaggtaccaatagggcttcattaaaggtaataagctaaatttgcaggtgttagtttctrtctacctagctataaacatctccagctcctgggtcccaccctgaaaggtgtcacaggtgagctcacatacagtcttgttatcttctctcactcttatccctctctgg

SEQ ID NO: 356568 - DNA, 541 bp, Homo sapiens
gtgtcacaggtgagctcacatacagtcttgttatcttctctcactcttatccctctctgggatgcctgctgckttcacaatcacctaagggtaaggcttcaaagccacagccagcaccatagtcaatgctcaaggaatgacagcaacgtctggctctacactttgatctgtacttgctgtgcaatttcactctttccattctctgttaaacccactccagttaagctttcacccatacttttcatgttatcgcacaggtggctttgggatacaaacaaggtccactctcttctcacacaagttgagaacaatttctcaatcgtacattttaacttaatgttatgaggctaccattcaaaaagactgaaatctgttacttattttatgcatatataataaattctaaacctgagcagagtcttccataacacacaaatatcaatgctaaaattctgagtcttaaacacttttatactacattctaaatcttcttgaggctgaaggatgcatacccattaaggaagataattgccatccctat

SEQ ID NO: 356569 - DNA, 541 bp, Homo sapiens
gtgtcacaggtgagctcacatacagtcttgttatcttctctcactcttatccctctctgggatgcctgctgctttcacaatcacctaagggtaaggcttcaaagccacagccagcaccatagtcaatgctcaaggaatgacagcaacgtctggctctacactttgatctgtacttgctgtgcaatttcactctttccattctctgttaaacccactccagttaagctttcacccatacttttcatgttatygcacaggtggctttgggatacaaacaaggtccactctcttctcacacaagttgagaacaatttctcaatcgtacattttaacttaatgttatgaggctaccattcaaaaagactgaaatctgttacttattttatgcatatataataaattctaaacctgagcagagtcttccataacacacaaatatcaatgctaaaattctgagtcttaaacacttttatactacattctaaatcttcttgaggctgaaggatgcatacccattaaggaagataattgccatccctat

SEQ ID NO: 356570 - DNA, 566 bp, Homo sapiens
gcaatacagttctatacatggacgggtaagaaacattttctcttcccggatctagtcaccaatacctgtttagttaggaggagatcagagatacccatggaaataccctttgatctctgcttctgctgaattctagcttctatccttggatacatggtcccaattgactatcttctaggcaactcccaccagggtgaaaaacacatgcatagaatctcagagttggaagagtttcagaaggagatatagggtatttccctgcactgaggtgggaggacacgcaaatcatccaaggcaatggctatctattcctacctttgaaaatctctaargattaaacttccccgtattccttggttacctgtttcagtgtttaatcccttccttatacttatgtccatctttatgaccaactgaactttttctcttgctacaatttaaaagtatttccttttatttggtctcctgtggaagtaaagaacatctgttctgcatcttccctataataacctttcaaatacttgaagacagttaaatcatcccttcgtcttcccttctccaagtta

SEQ ID NO: 356571 - DNA, 536 bp, Homo sapiens
ctgaaatgtatacttatatagcaaaaaaggtgtgtagcaagaacaaattttgcctatatatttaaaacaacattttaggaaatcatayaaagaaacattcagacatttagcagccaattcttggttactgtaaaattattaatgtgggtaaaaaaagaattatatgtacccattttctcttcatttagaaaaaggttttttaaattttctacttaatttattttacaattcatatcaaatttttattgtgataagtttatccgcaggtgtagtggctcacacctatgatctcaccatgttgggacactgaggcaggaaaacagcttgaggccaggcgtttgagatcagcctggacaacacaaaccctatctctataaaaaatttgttttaaaaaattagctagatgtattacgctattctcacattgctataaagaaatacccaagaccgggcaatttatacagagaagaggcttaattggcttatggttctgctggctgtacaggaagcatgatactagcatctgctcagcttct

SEQ ID NO: 356572 - DNA, 536 bp, Homo sapiens
ctgaaatgtatacttatatagcaaaaaaggtgtgtagcaagaacaaattttgcctatatatttaaaacaacattttaggaaatcatataaagaaacattcagacatttagcagccaattcttggttactgtaaaattattaatgtgggtaaaaaaagaattatatgtacccattttctcttcatttagaaaaaggwtttttaaattttctacttaatttattttacaattcatatcaaatttttattgtgataagtttatccgcaggtgtagtggctcacacctatgatctcaccatgttgggacactgaggcaggaaaacagcttgaggccaggcgtttgagatcagcctggacaacacaaaccctatctctataaaaaatttgttttaaaaaattagctagatgtattacgctattctcacattgctataaagaaatacccaagaccgggcaatttatacagagaagaggcttaattggcttatggttctgctggctgtacaggaagcatgatactagcatctgctcagcttct

SEQ ID NO: 356573 - DNA, 492 bp, Homo sapiens
cctactattttgttgaaactgctgtcaaagcaatagtaaacttattctaaaatggtttaatatttgtggtatttggcagtatattcagtaagtctttaattgtatctgatagaagtacaagttccatctgtctcacacrtgcatcctactcaaagcatggcaccagagcaagtctgtttccgatgctcataaataagataccaacaaacccacaatattggtacagactgttctgggctaggttctaaaatgttaaccacaggaagtgattttacttctttttataaaaccccttttcccttcatcagctgcctacgtgctcagtgtggcactttagatttcctggatcttgaaagtgttaaaaattactggaataacctgctggaaggtgatcttatttacttaaacaaaacgtggataagtaactgctaaaatcatagctatctaagtctgtctaaaattgttctgattgtttaattgaaagtgggggtt

SEQ ID NO: 356574 - DNA, 531 bp, Homo sapiens
attactctaaagcctttttgaagagcatcctttcctgaaaagctgttgaaagcacaaattgttattagtatacatgctagaagaccaggtgacacccatcctgttggaaatctggcactggggttgttaaaatgtargcttatatggaaaatatcttgactgtagggtgtgtttgtgatggccaacttgacgttgaaatttaaaattgtgcttttgttatgtaacaaacatgttacgaattcatgtcctgatcataatttaccttaaacatattttatattatttttatttttacattatttaattttgttaggttttcacaaaagacctactgtcctctcctcaaaggtttataatttagaacatgtagctgaaaatgcattaaaagcagatatagctaatacacaattttaccgtaagtgtaaatagtagggctacttgtctgatattgtaaatctatatatttctgcccatcagaaataaaagaaatacagcaagtttctctatgacatttcaagatattttcatata

SEQ ID NO: 356575 - DNA, 531 bp, Homo sapiens
attactctaaagcctttttgaagagcatcctttcctgaaaagctgttgaaagcacaaattgttattagtatacatgctagaagaccaggtgacacccatcctgttggaaatctggcactggggttgttaaaatgtaggcttatatggaaaatatcttgactgtagggtgtgtttgtgatggccaacttgacgttgaaatttaaaattgtgcttttgttatgtaacaaacatgttacgaattcatgtcctgatcataatttaccttaaacatattttatattatttttatttttacattatttaattttgttaggttttcacaaaagacctactgtcctctcctcaaaggtttataatttagaacatgtagctgaaaatgcattaaaagcagatatagctaatacacaattttaccrtaagtgtaaatagtagggctacttgtctgatattgtaaatctatatatttctgcccatcagaaataaaagaaatacagcaagtttctctatgacatttcaagatattttcatata

SEQ ID NO: 356576 - DNA, 520 bp, Homo sapiens
actaatctcacagcattggtttttcagtgctgctaaaattaaaaaaaaaaaaaattctttagtttagccctccacaggtgagttgcttttctaactgcatctgctactacgcccataggccgaccctaagttcytgacagatgagattacttgcaaggtcttgtactttttcaagtttctgctttttctcatcctgttctttcttttttacatggaattactgaattttattattcattctatcagttgttattaagtatcttgggccaggaccaagcactgtgagtaagtatatactcatagtgagtatacttaaatgcttaaattgagtatacttaaataaactattagtagatgatcaatatgtttgtttggcttgaatgtacaatacaagaatttatgggtggcactggggatgaggcagcttctcaaggattatttaggcagaaaaagtttctttacattaaaacctatagtcatgtcttgcttaatgatagggatacattctgagaaaattgtg

SEQ ID NO: 356577 - DNA, 669 bp, Homo sapiens
tagtcttttataaaataatttgagattactaaattactatttttttacttattccagaaatttcaacacataattactgaacattgaagtggccatgcttttctctccattagatatttattttataaaaaagacattaaattatactctttcttatcaactagaatctattcaaagagcaggtaaaaccaggagaaaagagggagaacagcagagaaagaatcaccaggtaaacaaagatgtgttagtaatgacaaagaggctatgaagttttggtctttgatgtcatacaaatgcagcatcaagggaccagtgggctttaaataatcatttttatttggtaagggcttgccagtcatctgttcataattaacctgaattaactcatttttatgctcataattttccagttgaattggaagagttcaaaaacttttaaaactattttaagatatacgcrttttttggccttctcttttcccatcatgctattatggacatttaaagtttactgtaattattggctacctcctagttaaataataaaatcaccttaagttttattaaaatctggaaagattaataacatgatcaaagagcaatatcgatcccttaagatgccgtgctcaaactttggtttcatattaccatctgaaaagttcattacta

SEQ ID NO: 356578 - DNA, 580 bp, Homo sapiens
tattcccaaaggaatataaatcattttatcataaaaacacttgcacatgtatgttcactgcagcactgttcacaattgcagaaatatagaatcaacttaaatgcccatcaatgacagactggataaagaaaatgtggtacatatacatcacagaatactatgcagacataaaaaataattggattatgtcctttgcagggacataaatggatatggagggcattatccctagcaagctaatgcagcaatagaaaaccgaagtattgtatgttctcacttataagtgggggctaaatgcatcagaacacactgacacaaagaggggaatgacagactctagggcctacttgagggtggagggtgggaggggraagaggaacaacaacaacaaaataactattgggtactaggcttagtacctgggtgacagaataatgtgtatatcagacccctgtgacataagtttacttatgggacaaacctgcacatgtaccccagaatataaaatgaaagtttaaaaataaaaaaagaaagaaaaatattgacgtcacataattcagtgtccacccagaacaacaaa
